United States Patent Application Publication US 2007/0192889 A1 - sequence listing, part 4

SEQ ID NO: 8119 - protein, 148 aa, Zea mays
  unsure (1)..(148): unsure at all Xaa locations
  Clone ID: TF_LIB4741-005-R1-K1-D2.pep
HVRRPGGAEAPETEVPAEVPAVHVAXEAPMVKKAPKEKKAPKENKPSAGKKPTAHPTYAEMIVXAIAALKERKGSSSLAXITKYVEGQHGGELPTNFRTQLTEQLKKLAAAGKLTRVKNSFKLTATXDAKPKAAQVNAPKDGPKPKPS

SEQ ID NO: 8120 - protein, 98 aa, Zea mays
  unsure (1)..(98): unsure at all Xaa locations
  Clone ID: TF_LIB3150-101-P1-N1-A3.pep
SLLSTEEAVVAEDPETEXPVEXXRFMLXEVXNVKKVPKVKKAPKEKKLFAXEKPAAHPSYAEMIVEAIAALQERKGSSSVALNXFFQGKHGGKLPTNF

SEQ ID NO: 8121 - protein, 229 aa, Zea mays
  unsure (1)..(229): unsure at all Xaa locations
  Clone ID: TF_ZmC1172_3.pep
MGAPKQRWTSEEEAALRAGVARHGVGNWRMILNDPELSSTLRYRSNVDLKVKSIHSFLRKIDLVKGLPYLGIPXIMCLLVFKFLDSSSILMLICSFFIYHYLGQWRNMNVIVTSSSTRDRGRTSEELLLMSTPWQLPEXTSDIDDEIVDEKPIVSLPSEAKNTSSSKKSHRLDNIIMEAIKNLNEPTGSHRTTIANYIEEQYWPPSDFDHLLSAKLKDLSTSGKLIKMA

SEQ ID NO: 8122 - protein, 108 aa, Zea mays
  unsure (1)..(108): unsure at all Xaa locations
  Clone ID: TF_LIB3076-019-Q1-K1-B5.pep
TPPKQPHYADMILQSIRLPQRDRGXSSLAISQYIEGKHGDKLVTNFHKQLTAQLKTLTVDDKLTRVNNSFKLPATDANPIASNSKVPNDAPNSNTSHXANANTASKPK

SEQ ID NO: 8123 - protein, 87 aa, Zea mays
  unsure (1)..(87): unsure at all Xaa locations
  Clone ID: TF_LIB4730-055-R1-K1-C2.pep
RSLTSRSPASRNPKTDAATKPKPAVNQXNAITAGGSNPPYLQKIMEAIAELIERTGCSSQAIDMYVGDXHDSYLSDILKSMLYIQLR

SEQ ID NO: 8124 - protein, 169 aa, Zea mays
  unsure (1)..(169): unsure at all Xaa locations
  Clone ID: TF_LIB4740-123-A1-K1-G5.pep
MPALAKPASRTAKPAAAPKPKPAAAKPKAATAGASHPPYFEMIKEAITALKERTGXQLRGSAAKGKLVKVKASYKLSDAAKKASPKTKAKPAKAAAAKTTAPKPAKAAAAKSKKAAAAMPKKAAAAGTKRKVPEKKVVAKPKKSPAAKAKAKPKTLKSPASKKARKASA

SEQ ID NO: 8125 - protein, 80 aa, Zea mays
  unsure (1)..(80): unsure at all Xaa locations
  Clone ID: TF_LIB3354-043-P1-K1-D8.pep
RTADPAGAXESDPVPLKSNAVTVGGCYSADLEMIKEAITALKERTGCSSQAIGKYVGDKHCACMTVNLKXMLCMQLRGFP

SEQ ID NO: 8126 - protein, 87 aa, Zea mays
  unsure (1)..(87): unsure at all Xaa locations
  Clone ID: TF_LIB3732-029-Q1-K6-C1.pep
MSTEEAVVAEVPVTEVPAXVPAAQVAEAPRARRGPKXKKAPKXKKPFVGNNPAVHTAYAEMIVDVIGGLXDRKGFSSWAISKYLEGI

SEQ ID NO: 8127 - protein, 139 aa, Zea mays
  unsure (1)..(139): unsure at all Xaa locations
  Clone ID: TF_LIB4730-140-A1-K1-H11.pep
MSTEEAVMREVAVTEAPADDPPAQEAEDLRSDEXPHHNNPPTEKILSAVKKPARHPPYTEMFVSRIPAPXASTGTSSAAMGXYIQRKYGGEILTNFRKQITVHVYNLADAGNLTMVNNSFKLAVSDAKPDAAIARCSRG

SEQ ID NO: 8128 - protein, 139 aa, Zea mays
  unsure (1)..(139): unsure at all Xaa locations
  Clone ID: TF_ZmC190195_1.pep
MSAAEEAKVPAVEKPVEEVKAPKLAKEKKPKAPKEKKPKQAKTASHPPYLQMIKDALIALNEKGGSSPYAIXKYMEEKHKAVLPANFKKILGLQLKNQAARGKLVKIKASYKLAEAAKKVKESTAKATKESRPKRNKIA

SEQ ID NO: 8129 - protein, 157 aa, Zea mays
  unsure (1)..(157): unsure at all Xaa locations
  Clone ID: TF_LIB4730-130-A1-K1-G9.pep
MAAITKTASGTAXPARHPKPKPAVDNXKASIDVGSHSPYFQMNKEAITELKERTESSSLAIVKYVXKKHDATLMVNFNXMVFIHLGVIAVKVKLVKAEASHKLSDAXKKGSPKSKAKXLKCGAAKSTARRPRKADCAKXKKGAAAKPKKVAAAGTKR

SEQ ID NO: 8130 - protein, 90 aa, Zea mays
  unsure (1)..(90): unsure at all Xaa locations
  Clone ID: TF_LIB84-011-Q1-E1-B9.pep
MPALAKPASRSAKPAAAPTPKPAAANPIAAIAGASHTPYFQMINEVITALKXMTGSNSQAISTXVGEKHRASRPVNFKNMPSNQLRWSAV

SEQ ID NO: 8131 - protein, 90 aa, Zea mays
  Clone ID: TF_LIB3357-015-P1-K1-C2.pep
RRGPSPPPPSPRALRPQFPRAQTRREGRGSDSQQPRRPAQAWPLPLPVATARPRAPLTSCPPPTPRQPYLLSLCSALLLSARSVPICRID

SEQ ID NO: 8132 - protein, 164 aa, Zea mays
  unsure (1)..(164): unsure at all Xaa locations
  Clone ID: TF_LIB3355-019-P1-K1-G4.pep
MPALAKPASRTAKPAAAPKPKPAAAKPKAATAGASHPPYFEMIKEAXTALKERTGSSSQAIAKYVGDKHGPSLPANFKKMLSIQLXGSAGQGKLVKVKASYKLSDAAKKAFPXAKAKPAKAGAAKTPXPKPAQGRRAKSKKGSGLPGQKRAGAAWTKPKVPEKK

SEQ ID NO: 8133 - protein, 112 aa, Zea mays
  Clone ID: TF_ZmC1022_21.pep
YRMLGTLSQSYKDKLPPNFRKLLNVQLKKLVAGGKLTKVKNSYKLSSATKPKAAPKKTKTGVKKPKAAAKPKAKSPAKPKPAAKKAPVAKKAAPAKKAAAPARKAPSRKAKK

SEQ ID NO: 8134 - protein, 70 aa, Zea mays
  Clone ID: TF_LIB4732-048-R1-K1-C12.pep
ARSGSTAPGADAPKVQNAHNEISALNDNELSAANKTASHPPYVEMIVESIPALLERKGASSMDICKYMAA

SEQ ID NO: 8135 - protein, 71 aa, Zea mays
  Clone ID: TF_LIB3245-197-P1-N1-D11.pep
MRLATTPALGKPASRTAKPAAAPKPKPAAAKPKAATAGASHPPYFEMIKEAITALKERTGSSLHCERLVCG

SEQ ID NO: 8136 - protein, 95 aa, Zea mays
  Clone ID: TF_LIB4746-104-R1-K1-C3.pep
LALALALGLGDAALGFAAVLAFAFGEGLGLGAALGALGLAALGLASVAISKYVEGKHGGKLPTNFRKQLTVQLKKLAAAAKLTRVNNSLQLPSSE

SEQ ID NO: 8137 - protein, 100 aa, Zea mays
  unsure (1)..(100): unsure at all Xaa locations
  Clone ID: TF_LIB3732-023-Q1-K6-A11.pep
MSTEEAVVAEVPETXVPAEVPAXYVAAAPKAKRAGRENKAPNEKKPFAEKKPTAHPSYAKIIVEEIDALKERKGLISVGINKYIEGKHGGKLITNFHKHL

SEQ ID NO: 8138 - protein, 299 aa, Zea mays
  Clone ID: TF_ZmC238_1.pep
MGAPKQRWTPEEEAALKAGVAKHGPGKWRTILRDSDFSALLRLRSNVDLKDKWRNLSVTAGGYGSREKARMALKKGRRVVPKLTAEPMDVDVKDMDDAHDTAIDVEPLAMAFESLPTEESPDKSVARLDDLILEAIRKLKEPSGSSKAAIAAYIEDQYWPPADFQRLLSTKLKALVNSGKLIKVNQKYRIAPSPPPSGRIGTKVSSAEGMKAENNNAKRLTKHQVIAELEKMKGMTKEEAAAFAAKAVAEAEVAIAEAEEAARVAEAAENDAEAAKAFLDAVTLSMRNRNAASMMLRAC

SEQ ID NO: 8139 - protein, 180 aa, Zea mays
  unsure (1)..(180): unsure at all Xaa locations
  Clone ID: TF_LIB4762-057-R1-K1-H8.pep
MPALAKPASRTAKPAGVPKPXPAAAKPKAATAGASHPPYFEMIKEAITALKERTGSSSQAIAKYVGDKHGAFLPANFKKMLSIQLRGSAAKGKLVKVKASYKLSDAAKKASPKTKAKPAKAAVAKTTAPKPAKAAAAKSKKAAAAKPKKAAAAGTKRKVPEKKVVAKPKKSPAAKAKAKP

SEQ ID NO: 8140 - protein, 108 aa, Zea mays
  Clone ID: TF_ZmC1022_25.pep
MATDVAETPAPLVDAAPEAPADAPAAPAADAKPAKAKKATAPKKRASPTHPPYAEMVSEAITSLKERTGSSSYAIAKFVEDKHKDKLPPNFRKLLNVQLKKLVAGSKL

SEQ ID NO: 8141 - protein, 154 aa, Zea mays
  Clone ID: TF_LIB3354-104-Q6-K2-F6.pep
GPAAPKPKPAAAKPKAGTGAACHPPYFARIKEAITALNERTASSSKATAKYVRDKHRASLTANSKKMLSIQLLSSTHKGKLIKGKAPYKLSDAVMKASPKTKAKTTQADGAKTTRPKRAKAVAVKSNNAAIANPKKDVAAGTKHKVPEKKDKTK

SEQ ID NO: 8142 - protein, 113 aa, Zea mays
  Clone ID: TF_LIB5116-036-A1-PF1-H4.pep
MPALAKPAARPAKPAAAAPKPKPAAAKPKAAAAGAAHPTYFEMIKEAIAALKDRTGSSSVAIAKYIEEKHGKALPPNFKKMLSVQLRASAAKGKLVKVKASYKLSDAAKKDSP

SEQ ID NO: 8143 - protein, 171 aa, Zea mays
  Clone ID: TF_ZmC159_1.pep
MTTPTPSGDGSPPGSSDLVPPSYPEMIVAAITALAEENGSSQAAIARRIEAQARGDLPASHPALVAAHLSRMSAAGELVAVAGGKYALPPPPAQPAPESPADDGEDDDDDDECADEVDEEEEAPEPLLVPVPVPQPPAKRGRGRPPKPRPAGFPIGVPGAAASPAAAPRRR

SEQ ID NO: 8144 - protein, 185 aa, Zea mays
  Clone ID: TF_ZmC1022_9.pep
MATEVAETPAPLAEAVPETPAEAPAAPAAEANSTKAKKASAPKKRANPTHPPYAEMISEAVTSLKERTGSSQYAIAKFVEDKHKDKLPPNFRKLLLGQLKKLVAAGKLTKVKNSYKLPARAPAAAKPKPKSKTAVKKPKAGAKKPKAATKPKPKAKAKSPAKAKPAAKPKAAAKPKPAAAKPKAA

SEQ ID NO: 8145 - protein, 118 aa, Zea mays
  unsure (1)..(118): unsure at all Xaa locations
  Clone ID: TF_LIB4740-023-R1-K1-D9.pep
MSTEEAVVAEVPVTEVPAEVPAAQVAEAPKAKKAPKEKKAPKEKKPSAAKKPAAHPSYPXMIVEAIAALKERKGSSSVAINKYLEGKHGGKLPTHFXRQLTCKLRNLVAAANLHRVKN

SEQ ID NO: 8146 - protein, 93 aa, Zea mays
  Clone ID: TF_LIB4826-020-A1-N1-C2.pep
MPALAKPASRTAKPAAAPKPKPAAAKPKAATAGASHPPYFEMIKEAITALKERTGSSSQAIAKYVGDKHGASLPANFKKMLSIQLQEVPSRRP

SEQ ID NO: 8147 - protein, 109 aa, Zea mays
  Clone ID: TF_ZmC8559_2.pep
PTARRVGWAFRQMILAAIEDLGDKSGSNKSAISRYIEGKYDGDLPPAHASLLAAHLARMKESGELVFVKNNYFRVDAPDAPPKRGRGRPPKARDPGAPVSPPSGRGRGP

SEQ ID NO: 8148 - protein, 112 aa, Zea mays
  Clone ID: TF_LIB3117-014-Q1-K1-C6.pep
RTPLQFLEPSLRLGIPLVTGRALAKPASRTAKPAAAPKPKPAAAKPKAATAGASHPPYFEMIKEAITALKERTGSSSQAIAKYVGDKHGASLPANFKKMLSIQLRGSATKGK

SEQ ID NO: 8149 - protein, 163 aa, Zea mays
  Clone ID: TF_LIB3354-004-P1-K1-B9.pep
MQFLEPWLPIVIPLDTMPALAKPASRTAKPDEAPKPKPAAAKPKAGTAGASHPPYFEMIKEAITALKERTGSSSQAIAKDVGDKHGACLPANFKKMLSIQLRGSAAKGKLVKGKASYKLSDADKKAYSKTKAKPAKGAGDKTTDPKPDKAGGGKLKKAAGAKP

SEQ ID NO: 8150 - protein, 175 aa, Zea mays
  unsure (1)..(175): unsure at all Xaa locations
  Clone ID: TF_LIB3587-232-Q1-K6-F2.pep
FRRGLGRVVVIRKSTEEAVVAEVPVTEVPAEVPAAQVAQAPKRXAPKEKKAPNEKKLSPAKKPVAHPPYAEMIVEAIAALKERKGSSSVAISKYVXGKHGGKLPTNFRKQITVQLKKLSAARKLTKVKNSFKMTVTDAKPKVGKPKAPKNAPKPKPSPIAKAKTAANPKSAWPKP

SEQ ID NO: 8151 - protein, 261 aa, Zea mays
  Clone ID: TF_ZmC1022_1.pep
MATDVAETPAPLVDAAPEAPADAPAAPAADAKPAKAKKATAPKKRASPTHPPYAEMVSEAITSLKERTGSSSYAIAKFVEDKHKDKLPPNFRKLLNVQLKKLVAGGKLTKVKNSYKLSSAATKPNPKPKAAPKKPKTGAKKPKAAAKTKAKTPAKAKPATKPKPAAKPKAVVKPKTPAKPKAKPAAKAKPKTAGAKPKPLAKKAGRPAKAAKTSAKDTPGKKAPVAKKSAAAAKKAPAKKAAPSKKAATPVRKAPSRKAKK

SEQ ID NO: 8152 - protein, 257 aa, Zea mays
  unsure (1)..(257): unsure at all Xaa locations
  Clone ID: TF_ZmC1022_4.pep
MATDVAETPAPLVDAAPEAPADAPAAPAADAKPAKAKKATAPKKRASPTHPPYAEMVSEAITSLKERTGSSSYAIAKFVEDKHKDKLPPNFRKLLNVQLKKLVAGGKLTKVKNSYKLSSAATKPNPKPKAAPKKPKTGAKKPKAAAKPKAKTPAKAKPATKPKPAAKPKAVVKPXPKAKPAAKAKPKAAAAKPKPAAKKAGRPAKAAKTSAKDTPGKKAAPAKKPAAAAKKAPAKKAAPAKKAPTPSRKVPSRKAKK

SEQ ID NO: 8153 - protein, 239 aa, Zea mays
  Clone ID: TF_ZmC673846_1.pep
MSTEEAVVAEVPVTEVPAEVPAAQVAEAPKAKKAPKEKKAPKEKKLSAAKKPAAHPPYAEVRFSPLRSSRFVASLGSSPLMESVGLILSLCSVHVREFDIESETQPVGSVWLQMIVEAIAALKERKGSSSVAISKYVEGKHGGKLPTNFRKQLTVQLKKLAAAGKLTRVKNSFKLPATDAKPKAAKPKAPKAAPKPKPSPKAKAKTAAKPKAASPKPKAKAKAKPVAPAVAPAASPQAP

SEQ ID NO: 8154 - protein, 294 aa, Zea mays
  unsure (1)..(294): unsure at all Xaa locations
  Clone ID: TF_ZmC1022_5.pep
MATDVAETPAPLVDAAPEAPADAPAAPAADAKPAKAKKATAPKKRASPTHPPYAEVIGALPLILLPCRAVRASPPRLDLTEXWMVGAQMVSEAITSLKERTGSSSYAIAKFVEDKHKDKLPPNFRKLLNVQLKKLVAGGKLTKVKNSYKLSSAATKPNPKPKAAPKKPKTGAKKPKAAAKPKAKTPAKAKPATKPKPAAKPKAVVKPKTPAKPKAKPAAKAKPKTAGAKPKPLAKKAGRPAKAAKTSAKDTPGKKAPVAKKSAAAAKKAPAKKAAPSKKAAALVRKAPSRKAKK

SEQ ID NO: 8155 - protein, 285 aa, Zea mays
  unsure (1)..(285): unsure at all Xaa locations
  Clone ID: TF_ZmC13520_2.pep
MGAPKQKWTSEEEDALRRGVRKHGAGKWRTIQKDPQFSPILSSRSNIDLKDKWRNLSFSASGLGSSKVRVPKITGSSSSPSSSSQALLLPAANNVTEAMLPADADKKPRDGKTPPKYGAMIMEALSELNQPNGSDIDAIFDFIKQRHVVQSTFRRFLPSKLRRLADSNKIEKVDNFYRLPDSFATRTPAQIKVSDPKQKDPSKASKTIXLFAASSPALEAAMAAAVKVTDAEAKAHDAHDQMMEAERMLKMAEDTESILTIAAEIYDRCSRGEITTLVPVAQREF

SEQ ID NO: 8156 - protein, 102 aa, Zea mays
  Clone ID: TF_LIB3357-042-P1-K1-C6.pep
MSTDEAVVADVPVTEVPADVPADHVADAPKAKKAPKEKIAPKEKKLSAAKKPAAHPPYAEMIVEAIAALKERKGSSSVSIIKYVQGNHGGKLPNNFQKQLTV

SEQ ID NO: 8157 - protein, 235 aa, Zea mays
  Clone ID: TF_ZmC366_1.pep
MATVTEEVAPVVTVSEEPAPEAAKEVVEKPEEGKKPDEEGDERKKADPAAEKEKKADPAAEKEKKARKPRSRKPKSAGLHHPPYFEMIKEAILSQDGGKVGASPYAIAKHMGEKHRDVLPPNYRKVLAVQLRGFAAKGRLVKVKASFKLAAAEERKPSKKKASAGMAKRKRAAAPAKMKPAAAASAPSASAPSREARKVRAKRARKVAPAPAQPKPKPARAAASGAGKKVNKASA

SEQ ID NO: 8158 - protein, 222 aa, Zea mays
  Clone ID: TF_ZmC366_2.pep
MATVTEEVAPVVTVSEEPAPEAAKEVVEKPEEGKKPDEEGDERKKADPAAEKEKKARKPRSRKPKSAGLHHPPYFEMIKEAILSQDGGKVGASPYAIAKHMGEKHRDVLPPNYRKVLAVQLRGFAAKGRLVKVKASFKLAAAEERKPSAAAKAKKKASAGMAKRKRAAAPAKKKPAAAASAPSREARKVRAKRARNVAPAPAQPKPKPARAAAFGAGKKVNK

SEQ ID NO: 8159 - protein, 179 aa, Zea mays
  Clone ID: TF_LIB5075-005-R1-XP1-C6.pep
RTPLQFLEPSLPLVIPLVTMPALAKPASRTAKPAAAPKPKPAAAKPKADTAGASHPPYFEMIKEAITALKERTGCQAKEGRCCWDQAQSAREEGRGEAEEVPRRQGQGQAEDREVPCLQEGTEGLRMRWVALGLSSDCGWCQLSTVQTKCVPKVSQAARYVLSKLYLSECFSLVCPEVP

SEQ ID NO: 8160 - protein, 256 aa, Zea mays
  unsure (1)..(256): unsure at all Xaa locations
  Clone ID: TF_ZmC159_3.pep
AVAARRRGTQRLRGRRWXKPAGRGFGGLPRPRLAGGCGTGTGTSRGSGASSSSSTSSAQSSSSSSSSPSSAGDSGAGCAGGGGSAYFPPATATSSPAADMRERWAATSAGCEAGRSPRACASMRRAMAAWLEPFSSARAAIAATIICSSQGRRTGQSIPQIGADLAERSSGEESKEVGLERREGGLPRGRKGARGRRSPGASRRHWEWEWSCLRWRWPPRLLAVASSPARRVWVRGERELGAQRTGEGGGAATTRX

SEQ ID NO: 8161 - protein, 139 aa, Zea mays
  unsure (1)..(139): unsure at all Xaa locations
  Clone ID: TF_jC-zmXLIB3527P017Dg06a1.pep
PLQFLEPSLAVIPLVTLPALAKPASRTXKPAAAPKPKPAAAKPKAXTXGXXXXXYXXMIKEAITALKERTGSSSQAIAKYVGDKHGASLPANFKKMLSIQLRGSAAKGKLVKVKASYKLSDAAXKAXPKTKAKPAKGRA

SEQ ID NO: 8162 - protein, 172 aa, Zea mays
  unsure (1)..(172): unsure at all Xaa locations
  Clone ID: TF_LIB4766-069-R1-K1-F8.pep
MSTEEAVVVDVPVTEVPAEVPAALVAEAPMAKKASKEKNAPKEKKLSAAKKPAAHPPYAEMIVEAISALXERKGSSSVAISKYVKGKHVGKLPSNFRKHLTVHLKKLAAAGKLTRVKNSFMLPATDAKSKGVKSKGPYDAPNIQVLVLREGQYRCRILGGVALTLGQGQGQD

SEQ ID NO: 8163 - protein, 170 aa, Zea mays
  Clone ID: TF_ZmC4197_3.pep
MPALAKPASRTAKPAAAPKPKPAAAKPKAATAGASHPPYFEMIKEAITALKERTGSSSQAIAKYVGDKHGASLPANFKKMLTTQRGGSAAKGKLVKVKASYKLSDAAKKASPKTKAKPAKAAAAKTTAPKRKVPEKKVVAKPKKSPAAKAKAKPKTVKSPASKKARKASA

SEQ ID NO: 8164 - protein, 154 aa, Zea mays
  Clone ID: TF_LIB3912-032-Q6-K6-H10.pep
MPALAKPASRTAKPAAAPKPKPADAKPKAATDGAYHPTYFEMIKEAITALKERTGSSSQAIAKYVGDKHGASLPDNFKKMLSIQLRGSAAKGKLVKVKASYKLSDAAKKASAKTKAKPAKAAAAKTTAHKPAKDADDKSNNAAAAKPNNAAAAG

SEQ ID NO: 8165 - protein, 155 aa, Zea mays
  unsure (1)..(155): unsure at all Xaa locations
  Clone ID: TF_LIB3959-022-Q1-K6-A5.pep
MPALAKPASRTAKPAAGPNXTCPPGGGGTAXASHPPYFEMIKGAITGLKERTGSSSQAIAKYVGDKHGASLPANFKKMLSIQLRGSAAKGKLVKVKASYKLSDAAKKASPKTKAKPAKAGAAKTTGSKPAKPAAAKSKKAAGAKPKKTGAAGTKR

SEQ ID NO: 8166 - protein, 158 aa, Zea mays
  unsure (1)..(158): unsure at all Xaa locations
  Clone ID: TF_ZmC163344_1.pep
MMVTREHPMRSRECQLCHENPLSSPSMTKMIVEAIAALKERKGSSSVAISKYVEGKHGGKLPTNFRKQLTVQLKKLAAAGKLTRVKNSFKLPATDAKPKAAKPKAPKAAPKPKPSPKAKAKTAAKPKAASPKPKAKAKAXEPVAPAAASPKPRGRPPK

SEQ ID NO: 8167 - protein, 185 aa, Zea mays
  unsure (1)..(185): unsure at all Xaa locations
  Clone ID: TF_ZmC163344_2.pep
MMVTREHPMRSRECQLCHENPLSSPSMTKMIVEAIAALKERKGSSSVAISKYVEGKHGGKLPTNFRKQLTVQLKKLAAAGKLTRVKNSFKLPATDAKPKAAKPKAPKAAPKPKPSPKAKAKTAAKPKAASPKPKAKAKAKPVAPAAASKXXPXGRPSKVAKTSAKASPAKPAKKAAAPCQEGKGS

SEQ ID NO: 8168 - protein, 108 aa, Zea mays
  unsure (1)..(108): unsure at all Xaa locations
  Clone ID: TF_LIB4730-062-R1-K1-F6.pep
QRRLKTNKAPKEKKPSAAXKKPAAHPPYAVMIGEAIAALKERKGSSSEAINKYVXERNHCGKLPTNFRKQLNVQVKKVAYVSKLTRVKNCLKLPCTDAKPKAGKPKAP

SEQ ID NO: 8169 - protein, 137 aa, Zea mays
  Clone ID: TF_cC-zmle189061e03d1.pep
QTPLQFLEPSLPLEIPLVTKPALAKPASRTAKPAEAPKPKPAAAKPKAATAGASHPPYFEMIKEAITALKERTGSSSQAIAKYEGDKHGASLPANFKKKLSIQLRGSAAKGKLEKVKASYKLSDAAKKASPKTNAKP

SEQ ID NO: 8170 - protein, 115 aa, Zea mays
  Clone ID: TF_jC-zmX189017Q1E1C8b1.pep
MATDVAETPAPLVDAAPEAPADAPAAPAADAKPAKAKKATAPKKRASPTHPPYAEMVSEAITSLKERTGSSSYAIAKFVEDKHKDKLPPNFRKLLNVQFKKLVAGGKLTKVKNLY

SEQ ID NO: 8171 - protein, 196 aa, Zea mays
  Clone ID: TF_ZmC4197_1.pep
MPALAKPASRTAKPAAAPKPKPAAAKPKAATAGASHPPYFEMIKEAITALKERTGSSSQAIAKYVGDKHGASLPANFKKMLSIQLRGSAAKGKLVKVKASYKLSDAAKKASPKTKAKPAKAAAAKTTAPKPAKAAAAKSKKAAAAKPKKAAAAGTKRKVPEKKVVAKPKKSPAAKAKAKPKTVKSPASKKARKASA

SEQ ID NO: 8172 - protein, 196 aa, Zea mays; identical to SEQ ID NO: 8171
  Clone ID: TF_ZmC4197_2.pep

SEQ ID NO: 8173 - protein, 178 aa, Zea mays
  Clone ID: TF_ZmC4197_4.pep
MPALAKPASRTAKPAAAPKPKPAAAKPKAATAGASHPPYFEMIKEAITALKERTGSSSQAIAKYVGDKHGASLPANFKKMLSIQLRGSAAKGKLVKVKASYKLSDAAKKASPKTKAAAAKSKKAAAAKPKKTAAAGTKRKVSEKKVVAKPKKSPAAKAKAKPKTVKSPASKKARKASA

SEQ ID NO: 8174 - protein, 196 aa, Zea mays; identical to SEQ ID NO: 8171
  Clone ID: TF_ZmC4197_5.pep

SEQ ID NO: 8175 - protein, 194 aa, Zea mays
  unsure (1)..(194): unsure at all Xaa locations
  Clone ID: TF_LIB4730-076-R1-K1-C7.pep
MSTEEVVVAEVPVTEVPSEVPAAQVAEAPKAKKAPKENKAPNEKKPSAANKPAEHPPYADMIVQAIAALKERXIGSSSVAISKYVEGNHGGKLPTNFRKHLTVQLKKLAAAGKLTRVKNSFKLPATDAXPKAAKPKAPNAAPKPKSSSKAKVKTAAKPKAASAXPNAKDKVKAKAKPVVPAAASPKPRGRPPKV

SEQ ID NO: 8176 - protein, 103 aa, Zea mays
  Clone ID: TF_9462059.pep
KEAITALKERTGSSSQAIAKYVGDKHGASLPANFKKMLSIQLRGSAAKGKLVKVKASYKLSDAAKKASPKTKAKPAKAAAAKTTASKPAKAAAAKSKKAAAAK

SEQ ID NO: 8177 - protein, 179 aa, Zea mays
  Clone ID: TF_ZmC1022_20.pep
LGFGLVADDSLYEFFTLVSLPPYAEMVSEAITSLKERTGSSSYAIAKFVEDKHKAKLPPNFRKLLNVQLKKLVAGGKLTKVKNSYKLSSATKPNPKPDPAPKKPKTGVKKPKAAAKPKAKSPAKPKKAKTSAKATPGKKAPVTKKPAAPAKKAPVAKRAAPAKKAAAPARKAPSRKAKK

SEQ ID NO: 8178 - protein, 142 aa, Zea mays
  Clone ID: TF_LIB4729-137-A1-K1-H11.pep
MSTEEAVVAEVPVTEVPAEVPAAQVAEAPKAKKAPKEKKAPKEKKLSAAKKPAAHPPYAEMIVEAIAALKERKGSSSVAISKYVEGKHGGKLPTNFRKAAKKAAAPAKKGKAAAAPKKVATPKKAAAAAAPARKGVARKAKK

SEQ ID NO: 8179 - protein, 186 aa, Zea mays
  Clone ID: TF_ZmC1022_10.pep
MATEVAETPAPLAEAVPETPAEAPAAPAAEAKPTKAKKASAPKKRANPTHPPYAEMISEAVTSLKERTGSSQYAIAKFVEDKHKDKLPPNFRKLLLGQLKKLVAGGKLTKVKNSYKLPARAPAAAKPKPKSKTAVKKPKAGAKKPKAATKPKPKPKAKSPAKAKPAAKPKAAAKPAAKPKPAAAKP

SEQ ID NO: 8180 - protein, 108 aa, Zea mays
  unsure (1)..(108): unsure at all Xaa locations
  Clone ID: TF_LIB3150-009-Q1-N1-D8.pep
MSTDEAVVAEVPKTEVPSKVPAAQVADAPKAKKAPKEKKAPNEKKLSEAKKPAAHPPYTEMIVEAIAALKERKGSSSVAISKYVXGNHGCKLPTNFLKQLTVQLMKLT

SEQ ID NO: 8181 - protein, 105 aa, Zea mays
  Clone ID: TF_LIB3060-018-Q1-K1-D2.pep
MPALAKPASRTAKPAAAPKPKPAAAKPKAATAGASHPPYFEMIKEAITALKERTGSSSQAIATYVGDKHGTCLTANFKKMLSIQLRGSAAKVKHVKVKASYKLSD

SEQ ID NO: 8182 - protein, 191 aa, Zea mays
  Clone ID: TF_11544761.pep
MATDEATKPSPIPPYPEMILAAIEGLDDKSGSNKSAISKYIEGKYGSLPPAHASLLTAHLARMKESGELVFLKNNYFRAGAPDAPPKRGRGRPPKARDPNAPAPAPKSPSSTGRGRGRPPKAKSPLEAAVKQATAGMPKPRGRPPKKAKTEGAASPSPSPAPAGDGSTPGKRGRGRPPKVRPAVPSETAAA

SEQ ID NO: 8183 - protein, 193 aa, Zea mays
  unsure (1)..(193): unsure at all Xaa locations
  Clone ID: TF_ZmC8319_1.pep
MATDEATKPSPIPPYPEMILAAIEGLDDKSGSNKSAISKYIEGKYGSLPPAHASLLTAHLARMKESGELVFLKNNYFRAGAPDAPPKRGRGRPPKARDPNAPAPAPKSPSSTGQLECCVGRLIIXAEAAVKQATAGMPKPRGRPPKKAKTDGAASPSPSPAPAPAGDGSTPGKRGRGRPPKVRPAVPSETAAA

SEQ ID NO: 8184 - protein, 288 aa, Zea mays
  Clone ID: TF_ZmC13520_1.pep
MGAPKQKWTSEEEDALRAGVRKHGAGKWRTIQKDPEFSPVLSSRSNIDLKDKWRNLSFSASGLGSSKLRVPKITGPSSSPSSSSQPLLLPAANKFTEATLPADAEKKPQDGKTLPKYGAMIMEALLELNEPNGSDIAAIFGFIEQRYAVQPTFRRFLASKLRRLADSNKIEKIDKSYRLPDSLATRTPAPMNASAPKQKDPSKPSKVSKAIGLFSASSPALEAAMAAAVKVADAEAKAHDAHDQTMEAERIFKMAEDTESLLIIAAEIYDRCSRGEITTLVPVAQREI

SEQ ID NO: 8185 - protein, 189 aa, Zea mays
  Clone ID: TF_ZmC1022_11.pep
MATEVAETPAPLAEAVPETPAEAPAAPAAEAKPAKAKKASAPKKRANPTHPPYAEMISEAVTSLKERTGSSQYAIAKFVEDKHKDKLPPNFRKLLLGQLKKLVAGGKLTKVKNSYKLPARAPAAAKPKPKSKTAVKKPKAGAKKPKAATKPKPKPKAKSPAKAKPAAKTKAAAKPTAKPKPAAAKPKAA

SEQ ID NO: 8186 - protein, 179 aa, Zea mays
  Clone ID: TF_ZmC1022_13.pep
MATEVAETPAPLAEAVPETPAEAPAAPAAEAKPTKAKKASAPKKRANPTHPPYAEMISEAVTSLKERTGSSQYAIAKFVEDKHKDKLPPNFRKLLLGQLKKLVAGGKLTKVKNSYKLPARAPAAAKPKPKSKTAVKKPKAGAKKPKAATKPKPKPKGKSPAKAKPGAKPKAAAKPKPAA

SEQ ID NO: 8187 - protein, 183 aa, Zea mays
  Clone ID: TF_ZmC1022_18.pep
MATEVAETPAPLAEAVPETPAEAPAAPAAEAKPTKAKKASAPKKRANPTHPPYAEMISEAVTSLKERTGSSQYAIAKFVEDKHKDKLPPNFRKLLLGQLKKLVAGGKLTKVKNSYKLPARAPAAAKPKPKSKTAVKKPKAGAKKPKAATKPKPKPKAKSPAKAKPAAKPKAAAKPKPAAAKPK

SEQ ID NO: 8188 - protein, 273 aa, Zea mays
  Clone ID: TF_ZmC1022_2.pep
MATEVAETPAPLAEAVPETPAEAPAAPAAEAKPTKAKKASAPKKRANPTHPPYAEMISEAVTSLKERTGSSQYAIAKFVEDKHKDKLPPNFRKLLLGQLKKLVAGGKLTKVKNSYKLPARAPAAAKPKPKSKTAVKKPKAGAKKPKAATKPKPKPKAKSPAKAKPAAKPKAAAKPAAKPKPAAAKPKAAAKPKAKPAAKAKPKAAAAKPKPAAKKAGRPAKAAKTSAKDTPGKKAAPAKKPAAAAKKAPAKKAAPAKKAATPSRKVPSRKAKK

SEQ ID NO: 8189 - protein, 151 aa, Zea mays
  Clone ID: TF_LIB4730-130-A1-K1-A1.pep
MPAIAKPASRTAKAAGFPKPKTAAAKPKADTAGASHPAYFEMIEEVITEIKEMTGSSSQVIAKYVGDKHGASLPVNFKKMLSIQLRGSAAKGKLVKVKDSYKLSDAAKKASPKTKAKPAKAAAAKTTAPKPAKAAAAKSKNAAAVKPKKAA

SEQ ID NO: 8190 - protein, 158 aa, Zea mays
  unsure (1)..(158): unsure at all Xaa locations
  Clone ID: TF_LIB5026-070-Q1-XP1-H9.pep
MPALVKSASRTAKSDASPNTKSVAAXSKASTAGASHPPYFYMVWEVISMLMERTASXHXAIAEDVMDIDATILPPDFNKMLSIHIRGSVCXGKLEKVKASYKLSDTANIASPXNKGNSAKDDAAKTTATXPDNAVDVKSKNAATGKTMNDGAAETNRK

SEQ ID NO: 8191 - protein, 170 aa, Zea mays
  Clone ID: TF_ZmC159_2.pep
MATPTSSGDGSPPGSSDLVPPSYPEMIVAALAALAEENGSSQAAIARRIEAEARGDLPASHPALVAAHLSRMSAAGELVAVAGGKYALPPPVPPPPESPADDEEDDYADDEEEEEEAPEPEPLPQPPAKRGRGRPPKPRPTGFPAGVPGAAGPGPIGVPGAAAAAAAPRR

SEQ ID NO: 8192 - protein, 131 aa, Zea mays
  unsure (1)..(131): unsure at all Xaa locations
  Clone ID: TF_LIB4766-078-R1-K1-E1.pep
MSTEEDVVAEVXVTEVAAEDPAAQVVEVPKAKKASKEKKAPKEKKLSAAKKPAAYPTYAEMIVEAVAALKERKGSSSVVISEYAEGKYGGKQHTNYRKQXTVQMKKLAAARQLTRVKKFLKLPAIDRKPRP

SEQ ID NO: 8193 - protein, 180 aa, Zea mays
  unsure (1)..(180): unsure at all Xaa locations
  Clone ID: TF_LIB4732-039-R1-K1-A11.pep
MSTEDAVVAEVPETEVPVDVPADQVDEVAQVQXAPKDKKAPKENNLSAGNKPAAHPPYAEMIVDAIAALKERKGSSSVAISKYVEVKHGGKLPTNFGKKLTVQLKKLAAVVKLTMVKNSFKLADTDVKAKAAMPKEPKDVPMTKPSPKANAKTAAKLKATSSKSNVNDYVKANVNSVAPD

SEQ ID NO: 8194 - protein, 180 aa, Zea mays
  Clone ID: TF_LIB5116-004-A1-PF1-B7.pep
MPALAKPAAAAPKPKPAAAKPKAAAAGAAHPTYFEMIKEAIAALKDRTGSSSVAIAKYIEEKHGKALPANFKKMLSVQLRASAAKGKLVKVKASYKLSDAAKKDAPKPKAAAKPSKDAAKPKKKAAEKPKKTAAAGTKRKAPEKKKLVTKAKKSPAAKAKAKPKTVRSPAAKKARKVAAA

SEQ ID NO: 8195 - protein, 190 aa, Zea mays
  unsure (1)..(190): unsure at all Xaa locations
  Clone ID: TF_LIB4172-047-R1-L1-C9.pep
FGTRLQMIVEAIAALKERKGSSSVAISKYVEGKHGGKLPTNFRKQLTVQLKKLAAAGKLTRVKNSFKLPATDAKPKAAKPKAPKAAPKPKPSPKAKAKTAAKPKAASPKPKAKAKAKPVAPAAASPKPRGRPPKVAKTSAKASPAKAAKKAAAPAKKGKAAAAPKKVATPKKXAAAAXPARKGVARKAKK

SEQ ID NO: 8196 - protein, 162 aa, Zea mays
  Clone ID: TF_LIB4767-003-R1-N1-F9.pep
DLKKKKKKKKKKKKKKKKKKKKKKKKKKKKKKKKKIQFSPTASAAKKREGKGISEKGWEKKKEPQMSTKKVFGVKAPGTKGPGKAPGAKGAKAPKGKKAPKEKKAPKEKKFSGEKKPGGNPPYPKKIEKAILALKKRKGSTSGAIKKYVKGNNGGKFPTNFR

SEQ ID NO: 8197 - protein, 136 aa, Zea mays
  Clone ID: TF_ZmC8559_1.pep
MATEEVAKPSPIPPYPEMILAAIEDLGDKSGSNKSAISRHIEGKYDGDLPPAHASLLAAHLARMKESGELVFVKNNYFRADAPDAPPKRGRGRPPKARDPGTPVSPPSGRGRGRPPKPKDPLDAAVKQATAGMPRA

SEQ ID NO: 8198 - protein, 298 aa, Zea mays
  Clone ID: TF_ZmC238_3.pep
MGVPKQRWTPEEEAALKAGVAKHGPGKWRTILRDSDFSALLRLRSNVDLKDKWRNLSVTAGGYGSREKARMALKKGRRVVPKLTAEPMDVDEKDMDNAHDTVIDVEPLAMAFEPLPLLESPDKSVARLDDLIVEAIRKLNEPSGSNKAVISGYIEDQYWPPADFQYLLSTKLKSLVNSGKLIKVNQKYRIAPSSSLGGISTKVSSSEGMNTENNNVKRLTKPQVVAELEKMKGMTREEAAAFAAKAVAEAEVAMAEAEEAARVAEAAENDAEAAKAFLDAVILSMRNRNAASMILRAC

SEQ ID NO: 8199 - protein, 109 aa, Zea mays
  unsure (1)..(109): unsure at all Xaa locations
  Clone ID: TF_LIB4730-072-R1-K1-F11.pep
APKEKKLSAAKKPAAHPSYAEMIGEAIAALKERKGASSVAISKYVEGKHGGKLPTNFREQLTVQLKKLAAAGKLTRVKNSFKVPATDAXPKPAKPKAPQGRAQDPKPSP

SEQ ID NO: 8200 - protein, 110 aa, Zea mays
  unsure (1)..(110): unsure at all Xaa locations
  Clone ID: TF_LIB3060-027-Q1-K1-F9.pep
YPQCPREEAVDAEVXLTDVPAEVPAVQVADAPKAKNAPTEKKAPKEKKLSAAKKPAAHPTYAEMIVEAIAALKERKVSSSVAIIKYVXGEHGGKAHTNLRKQLTVQLKKL

SEQ ID NO: 8201 - protein, 133 aa, Zea mays
  unsure (1)..(133): unsure at all Xaa locations
  Clone ID: TF_LIB4766-079-R1-K1-A11.pep
MSTEEDVVGEVPVTDVPWEVPEAQADEEPKAKNAPKEKNVPKEKKISXAVNKPVACPPYAEMIVQAIAALNDRKGSSSAYINKYIQVKHGDKLPCNFCKELTVHVKKVAGVGKLTREKNCFKMASTDVKPEAA

SEQ ID NO: 8202 - protein, 183 aa, Zea mays
  unsure (1)..(183): unsure at all Xaa locations
  Clone ID: TF_LIB4742-052-R1-K1-C9.pep
MSTEEAVVAEVPVTEVPAEVPAAQVGEAPKAKKASKEKKAPKENKLSAAKKSEVHPPYAEMIVEAIAALKERKGSSSVAISKYLEGKHGGKLPTNFRKQLTVQLNKLAAAGKLTRLKNSFKLPATDVKPKGAKPXAPMAAPKLKSSPKAKAKTSAKTMVASTKPKAKAKVKSVAPAVASPKPR

SEQ ID NO: 8203 - protein, 97 aa, Zea mays
  unsure (1)..(97): unsure at all Xaa locations
  Clone ID: TF_LIB5116-023-A1-PF1-D3.pep
FRSWQMIKEAIAALKDRTGSSSVAIGKYIEEKHGKSLPANFKXMLSVQLRSFASKGKLVKVKASYKLSDAAKKDAPKPKPKAKPAAPKGRGEARQGR

SEQ ID NO: 8204 - protein, 128 aa, Zea mays
  unsure (1)..(128): unsure at all Xaa locations
  Clone ID: TF_LIB4729-008-R1-K1-B2.pep
MSTEEAVVAEVPVTEVPAEVPAAQVAEAPKANKAPKEKKAPGEKKLSAAKKPAAHPPYAEMIVEAIAALXERFGSRSVAISKSSEGIHGGGLPXXLRTQVSVRLVRLPAARPLSRLVHCFQLXATFAC

SEQ ID NO: 8205 - protein, 158 aa, Zea mays
  Clone ID: TF_ZmC1022_12.pep
MTTDVAETPAPLVDAAPEAPADTPAAPAADAKPAKAKKATAPKKRASPTHPPYAEMVSEAIASLKERTGSSSFAIAKFLEDKHKDKLPPNFRKLLNVQLKKLVAGGKLTKVKNSYKLSSATKPKAAPKKPKTGVKKPKAAAKPKAKSPAKPKPATNPK

SEQ ID NO: 8206 - protein, 161 aa, Zea mays
  Clone ID: TF_ZmC1022_14.pep
MATDVAETPAPLVDAAPEAPADTPAAPAADAKPAKAKKATAPKKRASPTHPPYAEMVSEAIASLKERTGSSSFAIAKFLEDKHKDKLPPNFRKLLNVQLKKLVAGGKLTKVKNSYKLSSATKPKPKPKAATKKPKTGVKKPKAAAKPKAKSPAKPKPATKP

SEQ ID NO: 8207 - protein, 237 aa, Zea mays
  unsure (1)..(237): unsure at all Xaa locations
  Clone ID: TF_ZmC1022_7.pep
MATDVAETPAPLVDAAPEAPADTPAAPAVDAKPAKAKKATAPKKRASPTHPPYAEMVSEAIASLKERTGSSSFAIAKFLEDKHKDKLPPNFRKLLNVQLKKLVAGGKLTKVKNSYKLSSATKPKAAPKKTKTGVKKPKAAAKPKAKSPAKPKPATKPKAAAKSXAPKTPGVKPKPLAKKAGRPAKAAKTSAKDTPGKKAPVAKKSAAAAKKAPAKKAAPSKKAATPARKAPSRKAKK

SEQ ID NO: 8208 - protein, 161 aa, Zea mays
  Clone ID: TF_ZmC1022_8.pep
MATDVAETPAPLVDAAPEAPADTPAAPAVDAKPAKAKKATAPKKRASPTHPPYAEMVSEAIASLKERTGSSSFAIAKFLEDKHKDKLPPNFRKLLNVQLKKLVAGGKLTKVKNSYKLSSATKPKAAPKKTKTGVKKPKAAAKPKAKSPAKPKPATKPKAAL

SEQ ID NO: 8209 - protein, 194 aa, Zea mays
  unsure (1)..(194): unsure at all Xaa locations
  Clone ID: TF_ZmC4197_8.pep
MPALAKPASRTAKPAAAPKPKPAAAKPKAATAGASHPPYFEMIKEAITALKERTGSSSQAIAKYVGDKHGASLPANFKKMLSIQLRGSAAKGKLVKVKASYKLSDAAKKASPKTKAKPAKAAAAKTTAPKPAKAAAAKSKKAAAAKPKKAAAAGTKRKVPEXKVVAKPKXKSPAAKAKAKPKDLGSPWPPERHG

SEQ ID NO: 8210 - protein, 95 aa, Zea mays
  Clone ID: TF_LIB3245-307-P1-N1-F12.pep
MPPKKASTSAAASSASKKAAPSHSSYRDMIKDAIINLKDRNGSSRQSIKKYVQNNNKITVVSQAAFDAQFNKAIKAGVEKGEFSQPKGPSGPVKL

SEQ ID NO: 8211 - protein, 150 aa, Zea mays
  unsure (1)..(150): unsure at all Xaa locations
  Clone ID: TF_LIB3354-039-P1-K1-B7.pep
GKAGGDHAAEKPGNQQRTEEAGAGHAPATEEPAEGPRAQAAEXAPKANKAPKENKAPKEKKLSAANKPAAHPPYAETTAEASATLKERKGSSSVAISKYFXGNHSGKLPTNFRKQLTTQLKKLAANTKLTRVKNSFKLTGTDAKPKAAKP

SEQ ID NO: 8212 - protein, 164 aa, Zea mays
  Clone ID: TF_ZmC366_4.pep
IRHEGLLGTWGDRGQMIKEAILSQDGGKVGASPYAIAKHMGEKHRDVLPPNYRKVLAVQLRGFAAKGRLVKVKASFKLAAAEERKPSAAAKAKKKASAGMAKRKRAAAPAKKKPAAAASAPSREARKVRAKRARKVAPAPAQPKPKPARAAASGAGKKVNKASA

SEQ ID NO: 8213 - protein, 130 aa, Zea mays
  unsure (1)..(130): unsure at all Xaa locations
  Clone ID: TF_LIB4602-009-Q1-K1-G5.pep
SALSTEDAVVADVPVTDVPSDVPAAHVADAPKANNAPKENMAPKEKKPSAAINPAAHPPYAEMIVDAIAALMERKGSSSVAIMLYVEGIHGGXLPTIFRMLLTVQLMMLAAAGXLARVMFSFXLPASVAL

SEQ ID NO: 8214 - protein, 96 aa, Zea mays
  unsure (1)..(96): unsure at all Xaa locations
  Clone ID: TF_LIB3076-020-Q1-K1-B1.pep
PRDHSSYSDMFEEAIVALKQMISSSCGGIIKYVDGNHDTXLPTKLLKHLTAHLKKLDDALKLTKVKNSLKLPVTDANPKADKSKAPKVAPNPNPSS

SEQ ID NO: 8215 - protein, 339 aa, Zea mays
  unsure (1)..(339): unsure at all Xaa locations
  Clone ID: TF_ZmC154725_1.pep
IVQTPLTATSRRIHGRQRRLRPFPASSPGLNFTAAPTENPHFLFSKPHSPQRAAGSMAGKDGSPPPPPLPSYPEMIVEAIRALGLENGCNKTAISDYIKGSYGSNLPAQHNAVLTGHLARMKATGELAFLRNNYLLPNEDEASPLSTGGHKGPAAAEEESTGVLDVGDDVLLASPLVIDADAVDIDVPAPAPVVTADVDDIDVPAPAPVVTADVNPVHTKRGRGRPPKPKDPVAEGYGGKPATAPVAAAAVPVKRGRGRPPKPKNPVAEDSAPTAASVVTTDGNAVPXKRGRGRPPKLKDPINVATDQATSGMLSPTWPWAPAQAAQVLVEDPRGDLLN

SEQ ID NO: 8216 - protein, 84 aa, Zea mays
  Clone ID: TF_LIB3958-009-Q1-K6-G6.pep
MMVTREHPMRSRECQLCHENPLSSPSMTKMIVEAIAALKERKGSSSVAISKYVEGKHGGKLPTNFRKQLTVQLKKLAAAGKLTR

SEQ ID NO: 8217 - protein, 88 aa, Zea mays
  unsure (1)..(88): unsure at all Xaa locations
  Clone ID: TF_LIB4765-025-R1-K1-H5.pep
MVAAVASPSSAAPSAGRPHPTYKEMIMQALTELRDPSGSSRSAIASYIADHFSXLHSRHDALLSVHLRSLKSHGQLRLVSGNYFVSTA

SEQ ID NO: 8218 - protein, 168 aa, Zea mays
  Clone ID: TF_ZmC1022_15.pep
MATDVAETPAPLVDAAPEAPADAPAAPAADAKPAKAKKAAAPKKRASPTHPPYAEMVSEAVTSLKERTGSSSYAIAKFVEDKHKDKLPPNFRKLLNVQLKKLVAGGKLTKVKNSYKLSSATKPNPKPKAAPKKAPDNARPLPRRSRRPRCGKRRPPRKAAKPGRDAKI

SEQ ID NO: 8219 - protein, 216 aa, Zea mays
  unsure (1)..(216): unsure at all Xaa locations
  Clone ID: TF_LIB4729-085-Q1-K1-C11.pep
MSTEEVVVAEVPVTEVPAXVPAVQVAEAPMANKAPXEKKAPKDKNLSAAKKPAAHPPYAEMIVEAIAALKERKGSSSVFISKYVEGKHGGKLPTNFRKQLSVQLKKLAASVKLSRLNNSFXLPATDAKPKGAKPKAPKGASKPKPSPKVKGXTAAKSKAASPKXKVKVNDKPVSPAAASPKLSRGXPPKVAKTSAKVSPVQAAKKASAPAYKGKAA

SEQ ID NO: 8220 - protein, 361 aa, Zea mays
  Clone ID: TF_ZmC13520_3.pep
MGAPKQKWTSEEEDALRRGVRKHGAGKWRTIQKDPQFSPILSSRSNIDLKDFRVLGGLPAGCCSFVGSTVVDLGHRRRDFVFGVTDKCRRRLKWPCYAAEGCFDVIILLKDNDAVVVMDTQCRITCGTCQRRGTLVSDSTCSAVIAVGIGFSVINLKDILLMIPHCTGIHGWEDIALKKFLRVFNLSNLRPWYGAMIMEALSELNQPNGSDIDAIFDFIKQRHVVQSTFRRFLPSKLRRLADSNKIEKVDNFYRLPDSFATRTPAQIKVSDPKQKDPSKASKTIGLFAASSPALEAAMAAAVKVTDAEAKAHDAHDQMMEAERMLKMAEDTESILTIAAEIYDRCSRGEITTLVPVAQREF

SEQ ID NO: 8221 - protein, 174 aa, Zea mays
  unsure (1)..(174): unsure at all Xaa locations
  Clone ID: TF_LIB4730-078-R1-K1-C8.pep
LLSSLRHIHYDPQCSREDGDVDDVPATDPAAEVPEVHVAXAPKVNKAPKENKAPNEKKPSAAKKPAAHPPYAEMIVQAIAALKERKGSSSVAITKYVEGKHGGKLPTNFRKQLTVQLKKLAAAGKLTRVKNSFKLPATDAKPKGAKPKAPKAAPKPKPSPKAKAKTAAKPKAAS

SEQ ID NO: 8222 - protein, 185 aa, Zea mays
  Clone ID: TF_LIB3689-248-Q1-K6-E3.pep
MSTEEAVVAEVPVTEVPAEVPAAHVADAPKAKKAPKEKKAPKEKKLSAANKPAAHPPYAEMIVEAIAALKERKGSSSVAISKYVEGKHGGKLPTNFRKQLTVQLKKLAAAGKLTRVKNSFKLPATDANPNAAKPIAPIAAPNPKPSPNAIAKTAAKPKAASPKPNANANAKPVAPAAASPNPRWR

SEQ ID NO: 8223 - protein, 178 aa, Zea mays
  Clone ID: TF_LIB4762-093-Q1-K1-C4.pep
MSTEEAVVAEVPVTEVPAEVPAAQVAEAPKAKKAPKEKKAPKEKKLSAAKKPAAHPPYAEMIVEAIAALKERKGSSSVAISKYVEGKHGGKLPTNFRKQLTVQLKKLAAAGKLTRVKNSFKLPATDAKPKAAKPKAPKAAPKPKPSPKAKAKTAAKPKAASPKPKAKAKAKPVAPAAA

SEQ ID NO: 8224 - protein, 244 aa, Zea mays
  Clone ID: TF_ZmC2187_1.pep
MSTEEAVVAEVPVTEVPAEVPAAQVAEAPKAKKAPKEKKAPKEKKLSAAKKPAAHPPYAEMIVEAIAALKERKGSSSVAISKYVEGKHGGKLPTNFRKQLTVQLKKLAAAGKLTRVKNSFKLPATDAKPKAAKPKAPKAAPKPKPSPKAKAKTAAKPKAASPKPKAKAKAKPVAPAAASPKPRGRPPKVAKTSAKASPAKAAKKAAAPAKKGKAAAAPKKVATPKKAAAAAAPARKGVARKAKK

SEQ ID NO: 8225 - protein, 247 aa, Zea mays
  Clone ID: TF_ZmC1022_3.pep
MATDVTETPAPLVDAAPEAPADAPAAPAADAKPAKAKKATAPKKRASPTHPPYAEMVSEAITSLKERTGSSSYAIAKFVEDKHKAKLPPNFRKLLNVQLKKLVAGGKLTKVKNSYKLSSATKPNPKPKAAPKKPKTGAKKPKAAAKPKAKTPAKAKPATKPKPAAKPKAVVKPKTPAKPKAKPAAKAKPKTAGAKPKPLAKKAGRPAKAAKTSAKDTPGKKAPAKKAAPSKKAATPVRKAPSRKAKK

SEQ ID NO: 8226 - protein, 270 aa, Zea mays
  Clone ID: TF_ZmC238_2.pep
MGVPKQRWTPEEEAALKAGVAKHGPGKWRTILRDSDFSALLRLRSNVDLKDKWRNLSVTAGGYGSREKARMALKKGRRVVPKLTADPMDVDEKDMDNAHDTVIDVEPLAMAFEPLPLLESPDKSVARLDDLIVEAIRKLNEPSGSNKAVIAGYIEVNQKYRIAPSSSLGGISTKVSSSEGMNTENNNVKRLTKPQVVAELEKMKGMTREEAAAFAAKAVAEAEVAMAEAEEAARVAEAAENDAEAAKAFLDAVILSMRNRNAASMILRAC

SEQ ID NO: 8227 - protein, 66 aa, Zea mays
  Clone ID: TF_uC-zmflteosinte082a08a1.pep
LPPPGNKNTKRRKTRRWSLFEEETLRKGVEEYGVGNWRDILDNNAEALTGRTPVDLKDKWRNMLFR

SEQ ID NO: 8228 - protein, 199 aa, Zea mays
  Clone ID: TF_ZmC38422_4.pep
MCTRMSFTGSAPESSDPNKQPAKKQTRQWAAWTHQEEENFFNALRQVGKNFDKITHRVQSKNKDQVRHYYYRLVRRMKKLLGPRFSLDAKNSKDTIAAMLRWWSLLEKFSCSASKLHLKPRRFKTFVEALGKQLLKDRNKSRKKHSRVDMCISSPSPVISKAPGDETPPVKLLSIDSQNGSRVASPKGTIFQADCRTNF

SEQ ID NO: 8229 - protein, 149 aa, Zea mays
  Clone ID: TF_LIB4980-057-A1-K1-E1.pep
MGRHSCCYKQKLRKGLWSPEEDEKLMNHITKHGHGCWSSVPKLAGMYNEIFLPLVLSYQLSILPFSSLCIFLISNCQLKPLLQIVAGLQRCGKSCRLRWINYLRPDLKRGAFAQDEEDLIIELHAVLRERWSQIAAQLARETDNEIKNL

SEQ ID NO: 8230 - protein, 157 aa, Zea mays
  Clone ID: TF_ZmC42_44.pep
EEEHRLFLLGLKKYGKGDWRNISRNFVQTRTPTQVASHAQKYFIRLNSGGKDKRRSSIHDITTVNLTDDQPPSPSQSSLITSQSNAPAPSPAPAPAAGICQVPLAADVKRHGAGTLPFSSPNRTSAVPAYRMEFHDQQGLQCGPLHDQLLASQSVLF

SEQ ID NO: 8231 - protein, 86 aa, Zea mays
  unsure (1)..(86): unsure at all Xaa locations
  Clone ID: TF_LIB4744-001-R1-K1-D4.pep
DGVHPARDHRRPGGDAGVLPDAAAGHLPDDVLLCGRAIWPALPIHARLLRSGKRCLLRWINYLRPNLXRGNFTAAEEEALIKLHAS

SEQ ID NO: 8232 - protein, 879 aa, Zea mays
  Clone ID: TF_ZmC720_1.pep
MGPAKGSRTINKTTVKGYEDQQQHDDPSSSSKAKQKKRKISDLDPKWSKDELTRFYEAYRQHGKDWKKISIAIGGKSSDMVRSLYSAHRTFLSLPEHQATAMGFIALVTGHHNASEKTTSHRGYDHIARASGKARKHGEQQKSIDGPDLHNCHEGEITGFSASFKKRYYGELVRNSRNHAVQRRTPLIPVIAPADRSTIDEPTPGIENVINFNSTKRKYEAANHGCAVAPTNKYSSDRVSGFAETYKADQGHSYLDTMEIGDIAMCQQHFKKTRIQQTVEESQTGIVEHETTMASKEGNKLVSSVNNNQILIDSISEDDMLVLDVLNSLVNAPSKMSELEINIPSGSLGKTDSVLREEGHPTIDLSKQGKPVRKSSASKTRKKKPKKILGAEVPAEAQKKCDDNLVLPETLRVGITDDSSLCTDSGRARTPEASEDISAEVPNTQTEAKPEFIMSGRTRLKSQMHCKTKPMSCNEGSDNFQAKKLLHCLSSEPLRRWCTYEWFYSAVDYPWFSNNEFVHYLDHAKLSHLSRLTRSEWSAIRSSLGKPRRFSNHFLAVEKEKLEDYREKVRKIYAQLNDGSRDSLPADLARPFSIGQQVIVRHPSSRELCDGKVVMMGPDCYKVHFDDPDLGVDTVKDTDCMPVNWLHNRPDNMRRNYLSNDVYNILEMDHIPDLTPSENGNHAINGTTVFEELKSLRLTSDRQPKAESIIHSERPPYRSTSDGPTSSSGFSCPDNNAGHNGELESYVAAFFENSLSQARQMVDDYIQANSGGSDDEKVCMLNQVTGCLGSDSRGVQLPSDLISNCIATVISIKRLSDSRHPFGNVAGVLEHALSMLRPSCPQNLGVYTEIKRDLCTIANQIFALVPTASGNCSPPVSPM

SEQ ID NO: 8233 - protein, 422 aa, Zea mays
  Clone ID: TF_ZmC5585_1.pep
MPRLTPAHATLILDHVLGDPSIPTAVTIALIAGIPSPSDPTPRLRRGVLLRRLATDPVSESSLETLHLLASLPACASPIAAAHIAVAAFLAASAPDFDAVARALFARPDGRARQAVHGGSSPALASDDAIATVDQFEAAVGMSSSQTILRVLWGNRAAVEERVQELLAAEWAAIGPSRLEALAMRIVGDGAVETWGAADEAMRANLRILAGEAKTREILDKLEKTTCNTNPISTPAVEKVMDALKASCADLHSIVEDPLPAAKAVADELLTARMEKLVSLNAQEVGGQPTTCGVAGPSIHNDKDNGPGIGKPHSLMERNATARTSQWEESLGLDGSEPPSPPRPHLPSPRRLPPSPLSPPGNKNNNRRKARRWSLFEEETLRKGVEEYGVGNWRDILDNNAEAFTGRTPVDLKDKWRNMLFR

SEQ ID NO: 8234 - protein, 87 aa, Zea mays
  Clone ID: TF_LIB4073-010-Q6-K1-H9.pep
MSGSRNSSRNVNIDSNWSKKENKLFEEALGGYGEGTPDRWHKVARAMGGIKTADEVRRHYEILNDDVTLIESGGVPFPNYNTQGAWN

SEQ ID NO: 8235 - protein, 111 aa, Zea mays
  Clone ID: TF_ZmC2063_4.pep
MGRHSCCYKQKLRKGLWSPEEDEKLMNHITKHGHGCWSTVPKLAGLQRCGKSCRLRWINYLRPDLKRGAFSEEEEDLIVELHAVLGNRWSQIATRLPGRTDNEIKNLWNSS

SEQ ID NO: 8236 - protein, 78 aa, Zea mays
  Clone ID: TF_ZmC141670_1.pep
MDSSSGSQDKKFRDNDRPEAKEANSTAQHLVDFTEAEEDLVSRMHRLVGNRWEIIAGRIPGRTAEEVEMFWSKKYQER

SEQ ID NO: 8237 - protein, 78 aa, Zea mays; identical to SEQ ID NO: 8236
  Clone ID: TF_ZmC141670_2.pep

SEQ ID NO: 8238 - protein, 75 aa, Zea mays
  Clone ID: TF_ZmC141670_3.pep
CFFFSYSRDQLYPFTIIAEANSTAQHLVDFTEAEEDLVSRMHRLVGNRWEIIAGRIPGRTAEEVEMFWSKKYQER

SEQ ID NO: 8239 - protein, 43 aa, Zea mays
  Clone ID: TF_6165685.pep
INYLRADVKRGNISKEEEDLIIRLHRLLGNRWSLIASHLPGRT

SEQ ID NO: 8240 - protein, 164 aa, Zea mays
  Clone ID: TF_LIB4835-010-R1-M1-G2.pep
VPLKVSSENEHAEAVDSKGVRNLQAKVCSAVSKPKIKHGLTRKHHRAWTLSEVVKLVDGVARYGAGKWSEIRKLSFASYSYRTSVDLKDKWRNLIRATQTQLPAQKDGACPRKTNPSIIPIPPSILLRVKELHELQSQGGGFTAPVKFSGQDGKVLQGKGSGFL

SEQ ID NO: 8241 - protein, 204 aa, Zea mays
  unsure (1)..(204): unsure at all Xaa locations
  Clone ID: TF_ZmC152_4.pep
MVSASAPPPQAQSDAAGSGEEVSKKVRKPYTITKSRESWTEQEHDKFLEALQLFDRDWKKIEAFVGSKTVIQIHLPXHRNSGMNVPVSSWAHSSIPQAVASSMVKDLGAGTPGSNNFCSSSTEGLPRTWQPGETNDPINQIPSLRLMPDFAGVXSFLGSVFDPSTSGHLQKLKEMNPIDVETALLLMRNLSINLTSPDFEDQRF

SEQ ID NO: 8242 - protein, 651 aa, Zea mays
  unsure (1)..(651): unsure at all Xaa locations
  Clone ID: TF_ZmC21713_1.pep
MKFDLSMEMDDSHGTMVNKSEENDFEKKGTSDPVVYQLVRVEGDGTLVPATEDDVLQFEHFLHNEKVDLPPIEDADHVEEFFNNDCMLLKKPDLEDGSSKLETVEAHTQKLGANLEENILQSLDDSLSPPSDFRIHSQHSDKLLTEQGANVTRQDNASTETTKSTVLNDSCCAEKYKADACSRSVCDTSTDPSVSGVNSSMPDFSILRGEVCLDDLTIRELQEAFRATFGRQTNVKDKIWLKRRITMGLTNSYDVPSSSCVLKDYKIEGXDAKNDMSDLDERAKTGLRATSVVIYQGNEGDSPSSSYYQSEDQEDSSKRVPIHNDEPQGNLLGEQCTDKRTRKPTKRYIEELSDIETHDSTVKNSSPAKKACXDELLMKPRVAPFNETGSLGTIYPTRKDTFGGFSVHVPYVSRMRRGRPRKDFISFADKGPSVEPKGIQPSVEMILVKDGDKGNHLRKVPEVPLKVSSENGHVEAVDSKGVRNLQAKVCSAVSKPKIKHGLTRKHHRAWTLSEVVKLVDGVARYGAGKWSEIRKLSFASYSYRTSVDLKDKWRNLIRATQTQLPAQKDGACPRKTNPSIIPIPPSILLRVKELHELQSQGGGFTAPVKFSGQDGKVLQGKGSGFFVIRVMQIYVYASGRCGIYTSKYYLK

SEQ ID NO: 8243 - protein, 93 aa, Zea mays
  Clone ID: TF_ZmC881404_1.pep
MASMSLSSSRAQWTAKQNKLFEQALAVYDRDTPDRWHNIARAVGGKSADEVRRYYELLVKDLEHIEAGKVAFPAYRCPGGYDDADSDRLKHLT

SEQ ID NO: 8244 - protein, 100 aa, Zea mays
  Clone ID: TF_LIB4742-061-R1-K1-D4.pep
LTQRRRQLLPVRLRPAERLPPLSTGPSSSPPPAPAAAAAYHCCRCPYYYCHYYAHHRPAASCSSCLLLPVSPSTTDDEDNDRPSVSLRPLPLIFRQRGQD

SEQ ID NO: 8245 - protein, 685 aa, Zea mays
  Clone ID: TF_ZmC12732_1.pep
MASARKVRNANKRYAKINEDWQDKDTPSVPKSKVRKKKLSDMLGSQWSKDELERFYGAYRKYGKDWRKVAGTIRDRTSDMVKALYNMNKAYLSLPEGTATAAGLIAMMTDHYNILDGSNSDRESSDSPKASRRLQKRGRAKLQSVSKTSDTHFTDLLQPQPASSSYGCLSLWKKKRSGDLFVGNRPRAVGKRTPRVPVASMYHRDDRGAPNRQAKPDANDGDDEGAHVAALALAEVHQRGGSPQISHTPRRSGDHMFLSPAKSSGRKNADSEMGSSKLHGFQLDADYPEGSLGSREAETGDYTKGTSYLIANKGSPSSKPQKKVKRPQKRRKKAVRRTDDQFEDDREACSGTEEGCSMKKAKEEPELETLGTKTAWPSSTSNKRSRQLFFDDESLARPALHTLADLSVNILQPSSVVESESSAQIKDEKRDNDSDGKPGIPAAAVSVYEQKDNSKSTSKKLKRQPEMASTDMVTRKKGKLAKDTHPDGSTTSEVKQQACTCGVKTEKKKKSSMGKILKDEKKMPKDVEKTEVSPEEEKTSSNKTMDIAETTTQVATTLHADLMAKGKSRRKLGIQKSLTQECKPAEGAGDSGSDKLSYSLSNIIDLKDKLSHCLSSRLLRRWCMFEWFYSAIDYPWFAKSEFVEYLNHVKLGHVPRLTHVEWGVIRSSLGKPRRLSKQFLHEERE

SEQ ID NO: 8246 - protein, 43 aa, Zea mays
  Clone ID: TF_6165699.pep
LNYLRPNIKHGGYTDEEDRIIWSLYSSIGSRWSIIASKLPGRT

SEQ ID NO: 8247 - protein, 196 aa, Zea mays
  Clone ID: TF_ZmC11324_3.pep
PAGLLPFAPRGGRPPCPFFPAAATGQCARLRCICISKHLSGRTDNEIKNYWNTRFKRRQRAGLPPYPPDVERQIKLLRAQNVNPFADADADAAPLRRRKPVRVALQHTVTVADGLALALATDQPELPASEPDAGVPPPRRQSAAVVPHASRTAARRLSATSSPLACRHCQPPERRRSYIRTNSTPPAAAGCWISRC

SEQ ID NO: 8248 - protein, 328 aa, Zea mays
  Clone ID: TF_ZmC9414_16.pep
RTIVALQREFAMKDLGLLHHFLGITAERRPQGLFLHQRQYAIDILERADMSDCKPCSTPVDTQAKLSEDDGPPVADATSYRSLTGALQYLTFFRPDIAYVVQQVCLHMHTLREPHFTALKRILRYLRGSLDHGLLLRPSPMLELVVYTDADWAGCPDTRRSTSGYAVFLGANLVSWAAKRQPVVSCSSAEAEYRAVANGVAEASWLRQLLHELNSPLQRATLVYYDNVSAVYLSTNPVQHQRTKHVENDLHFVRERVAAGDVRVLSVPTMLQFADIFTKGLPTSVFLEFRFSLNICTGQSCDCGGVRLSLCNGPGPSTLIYQYNSNPG

SEQ ID NO: 8249 - protein, 1079 aa, Zea mays
  unsure (1)..(1079): unsure at all Xaa locations
  Clone ID: TF_ZmC27529_1.pep
MKLEISDDLPVKKWTYHDHKSDLLSSVTSANSAIAKEINEVLFKSLPADTPRLDLFASSHLLSQRKSDLIVKERLGVCKTRLRLKEQMLTMKFKAYCHLWKDVQLFSANKQRSKSNKRTDQSNRTSQIGSQRQRSSNRSRLTMPAGNLSTFSTPEMSDVAMRLFSEFKIKRCRNYLKMPALIIDEKEKEWLKLMNKNGLVEDPVLVEEDRMMINPYTKEERTRSRTGRAFEAXSRPTSSDGVQKQKRPGDVKLFGQILSHQSTLQSSGLSCFGNKSKPPSPLDDTSXHKWNPESNARSRDMLGVASVIAAHGLEYAKQVEKISAKSLIRTAYGPSVTSVANKSSDKECIDHVPLHERESVAADVLAGICGTLSPDGMGSCITSSADPGQKISMKRVEHVLSQENDKTVEEEDTLSDQECEVDPVDWNDDEKSIFIEAMNNYGKDFARISSCVKSKSYEQCKVFFSKARKSLGLDLIHQGAADVSMPASDTNGGKSDTDEACAVEMDSAICSTQSCSKIAMDVCPTEGAIGGPNSVIISKQAEAYISNGCNADVKIEEDEKVADKNCSIVDDKRSSDATHEAGPIDINCPGSTDKLQGTDDVVDLVNMHSNSGISSSAKHAVAIHSEMRSTLHSVEVLQTDKGEGTGTDLSWVEECSHHALDNTPMKNGNSGAPAFLASDSGIKDNVRISNITAASTVSPAFTSSYQHSVPGDMPLPKPKPLVTPLTPKDLMPVQFSSVLPDPTAIRFEGIASITTPNFEDTGNRVSGALGAKEMSKYPAFRDPSGNQQSTLFCNIDGYMNHRLTTELPFFSERTASGTVNTSQADRLTQTKLQNGRSSSLCLQNNSDGIQWPRDHEGGLEGSLRPCSRNTSSEGDEQQKRPGDVKLFGQILSHQSTLQSSGLSCNGNKSKPPSPKIDTSVRSMNNPMDRVVCSSRPGTTPHLGLEERLARCYGHLDGSTAQPEPLLVMAKRQRSLAGVQFYSAKNGTLGVLPDYQQPSTQPQQSDPKRVERLSDPQKRNVLELISGFQQPGRVARFGGAGILVSGNVSDPVAAALKAQYGPGSKIMGSDVDPWTDIGSR

SEQ ID NO: 8250 - protein, 143 aa, Zea mays
  Clone ID: TF_ZmC42_15.pep
MMAEAWTPVLLPATAPCFWQQDTHSVLWRRGDAWTVEENKLFEKALAQIDRNAPDRWEKVAAVLPWKTVDDVRSQYHALEKDVGVIEAGGLVPFPRYSGSVPPPSGFALEDWGGGDRGFRRARGSEEMQERKKGVPWTEEEHK

SEQ ID NO: 8251 - protein, 442 aa, Zea mays
  unsure (1)..(442): unsure at all Xaa locations
  Clone ID: TF_ZmC10388_1.pep
MDAKDILGLPKTPFSSSQEKKSRPPKEPQRKPDGVSREVYALTGGVGMPPLMPTIEASHLKRRPAAEKEKVAWQWLPFTSSARTDNLQLYHWVRVVNGIQPTGDYQFAKYNKRADVLKYTDEEYEKYLVDPVXAWSKEETDQLFELCERFDLRFIVIADRFPTARSVEDLKSRYYSASRALLIHRARSFEDVSGNPLVKDAYDAAHETERKRALSALLSQTKQQERKDAETLAEAKRIMESRAASKNVDVAVMPPNSDNAMVPVDGVSPSSSTHPSLAHPNTSANILIPNSLRTLRVYLRTHALDQMVQAVGASAGLRVIKRVDQTLQELAVNLKPKVPTKAVCIEHIELRNELLTLLNLQKQLQNKEAEVSANRESSFTEAPSTPKRSNRDIDRPFIPDTSGFTGERAGKRDHKRKSTGRFIDAPPSPPQSKRPRKLKGSD

SEQ ID NO: 8252 - protein, 153 aa, Zea mays
  Clone ID: TF_ZmC602324_1.pep
MDPMFSSEWSVSEIKMAKSLIASRNTSSNLASDDDASNKKHSDIVDELQARFPWKGKHEVIGLYVDLTMEMINTPPEVGDDGLVLDDDNFGMPVEEQPQMKYTGRFWTREEHRNFLRGLNMYGRGNWMYISRDFVPTKTPMQIYSHAQKFFRR

SEQ ID NO: 8253 - protein, 68 aa, Zea mays
  Clone ID: TF_LIB5025-072-A1-XP1-D8.pep
MGRSPCCEKAHTNKGAWTKEEDQRLIAYIKAHGEGCWRSLPKACSCKSPSPAAAGFRFLRPLEEGQYI

SEQ ID NO: 8254 - protein, 88 aa, Zea mays
  Clone ID: TF_ZmC87815_2.pep
MSGSRSSSSHNVTIDSEWSKKENKLFEEALACYGAGTPDRWHKVARAMGGIKTADEVRRHHEILNEDVTLIESGRVPFPNYNTQGAWN

SEQ ID NO: 8255 - protein, 502 aa, Zea mays
  Clone ID: TF_ZmC9414_14.pep
MYKEPKDQETITGPVAWSPQAVHADVDLDNHNEPINPPIDGTQSMFGEVPGREKGKSKSVSFALSDVSGIASPIDTNSEMGNIGDSCSDKLTDENLSNSSRHIAEKHSITKDQYSNEQDHEREPLDHAVQQQPKSDVGERASSMKRRCRKKVQKVGTPNHTVDDYFGEDCVEPSLAEEDNDTGDHYTTGNKHKARKKSRGGVEESQQQKAQKNKSKVSSRGRKRTLKDESTEKPEKKLTHRIRQRIPKEVKALLETPREQIKPMKLCASHLRLLQEARERVDPKGIPSGPSSNTRNFQLDDMDDLGYRDEEARFFDNDITEEHVQNATKLNYHSYMNKPARGKWSKSDTDLFYEGLRQFGIDFAMIQQLFPDKTRHQVRQKFKSEERKNPLLVHDAIVHRSGDNLYFKKVIKQLNIEDVVLPDIKSTQKQDGASSERGPGNENVLDDLNEEENSSNWLNEEHDVQMADVEEEHGEQMDDVEEERDLGNDGGDDDLGDVFDWY

SEQ ID NO: 8256 - protein, 87 aa, Zea mays
  Clone ID: TF_ZmC2209_2.pep
MSASRSSSPNSMSQWSQKENKMFEEALAYYGEGTPNRWDKVSSAMGGIKSAEEVRCHYENLDYDVKMIESGNVPYPKYKTQGFWTRG

SEQ ID NO: 8257 - protein, 101 aa, Zea mays
  Clone ID: TF_ZmC2209_3.pep
MSASRSSSPNSMSQWSQKENKMFEEALAYYGEGTPNRWDKVSSAMGGIKSAEEVRCHYENLDYDVKMIESGNVPYPKYKTQGFWTRGKVHGTSKANWKHIT

SEQ ID NO: 8258 - protein, 108 aa, Zea mays
  unsure (1)..(108): unsure at all Xaa locations
  Clone ID: TF_LIB3245-012-P2-N1-A9.pep
EEANTKVLKPYTITKWRESXTEHELNKLLXALQLFDRDWHKIEAPVGCKTVIQIRSHAQKYFLKVQKNRTSEHVPPSRPKATAAHTYPQKAHKTEPHYSLKTERSSIH

SEQ ID NO: 8259 - protein, 492 aa, Zea mays
  Clone ID: TF_ZmC395_1.pep
MLSTHEANADQFDLLSYGNLRGLEASRSSEESNFGNDLKDGSSVSSENFGSSCLPGESYQSATVDHEKRPLSDVKTCQIACKRPKQTDHCTWLYSFEEHPLTSEVGISSPALYDGLVEIKQPNDIPAINGATTCSGSSVIPCRNHDQSILVENLDIPDWATSFPGYFEDCGPVVTYSHVDDIGSPRKGVPIGPEHQADIPEWRPLNSMIVPGASEFCANLDCSSASTSESVPRGDDYVSDKWIRYCVVPVTCCSSPVDWAGDSKIDCNCSDEGSMRCSRQHIIEARDNLKMILGQDRFRELGLCEMGEDVALRWTDEEEKLFQRVVFLNPVSLGKNFWDHLPDAFPNKTSQELVSYYFNVFMLRKRAQQNRSDVLAVDSDDDELHGEPLAERVEGDPAVESSTHEHSVSNSLPMDDDHKEFEGAQFDGSLCEKSVYNAVECRHLPNQMPADSNTVNTALDVCDQDNGAQCSEFHMSLPSDTSNSLGDQSASV

SEQ ID NO: 8260 - protein, 205 aa, Zea mays
  Clone ID: TF_ZmC344_7.pep
MLLISYLLFFPICMFSCRWSKIAAKLPGRTDNEIKNRWNTHIKKKLIKMGIDPVTHEPLDRKTTSSGPATTSQSTKSDEATKEQSPQNDDAVIRDVPADGCSPTESSTNTVSTGGSSSSGGGGHDQDPLVKWLLEEEPATGDEAWLNFTGSVDVDEFSSIAAGPELLPWDGATDWLLDYQDFGLGDSSLVDGYMVNNNSSNGAKF

SEQ ID NO: 8261 - protein, 169 aa, Zea mays
  Clone ID: TF_ZmC42_33.pep
MMRETYMDVLPPVDHIAASRSGGWFPGAARLWTAAENKQFERALAGLDLCRPDWEKVARAIPGRTVREVVSHFKSLQVDVQQIESGLVPMPVYGAGAGAGSFTLQWDGCYGPADSRHNGYRFGSGGCGRRHHGRTPEQDRKKGVPWTEEEHRSYILYVVMMRELHQTPV

SEQ ID NO: 8262 - protein, 307 aa, Zea mays
  Clone ID: TF_ZmC29713_8.pep
MGSQPLSDRLQNTVIQQRTGLDGKWCSGSSSRYWTGLPEVMALVGVLSISLCCLAITAGRWSLIASHLPGRTDNEIKNYWNSHLSRQIHTYRRKYTAGPDDTAIAIDMSKLQSADRRRGGRTPGRPPKASASRTKQADADQPGGEAKGPAAAASSPRHSDVVNPGPNQPNSSSGSTGTAEEEGPSSEDASGPWVLEPIELGDLVWGEADSEMDALMPIGPGGHDSAALEGLGAVGCEAQVDDLFDMDWDGFAAHLWGGPEQDEHSAQLRQAAEPLEVAAAAAAATAARTPDDRELEAFETWLLSDSF

SEQ ID NO: 8263 - protein, 43 aa, Zea mays
  Clone ID: TF_6165769.pep
TNYLRPGIRRGNFTPREERVIVHLHSLLGNRWAAIASHLPQRT

SEQ ID NO: 8264 - protein, 114 aa, Zea mays
  unsure (1)..(114): unsure at all Xaa locations
  Clone ID: TF_LIB4742-048-R1-K1-D6.pep
NAHRWSLIAAQLPGRTDNEIKNYWNTHIKRKLIARGIDPRTHQPASAAAXPPPPPPPPPRKAAFATMATTRRWRGAAARETAAASRRTAATTTTARPGPCHTNMLSAASTSTSR

SEQ ID NO: 8265 - protein, 138 aa, Zea mays
  Clone ID: TF_ZmC14429_2.pep
AHAQRRSRARQERERKEMLINTHRHSPFLHQSIPTHACIYICMHACMLGDRMHPPPRKPETFAKKSPPAFTKQADEPYQLSVFLLCPRALPHRRRRHCCCCCLSLLPLPLLLLPLLRSPPPCSFLLILLAAAGVAIDD

SEQ ID NO: 8266 - protein, 43 aa, Zea mays
  Clone ID: TF_6165743.pep
GAVGEVGGDGGPAVAEERLEVDDEPVLLVGEAAAADARAEVVG

SEQ ID NO: 8267 - protein, 176 aa, Zea mays
  unsure (1)..(176): unsure at all Xaa locations
  Clone ID: TF_LIB5117-013-A1-PF1-C4.pep
MMAEAWVDVLPPPAPYFAGQPCWAVQQERRGGGAWTLEENKVFEEALAAIDLDAPDRWEMVALMLPRKTVADVVNHYRALENDVGFIEAGLVPFPHYDSSSPSSGFTLDWXDGGAAGAGGFRRGYCLKRGRADQERKKGVPWTEEEHRLFLKGLKKYGIGDWRNISRNYLTSRTPT

SEQ ID NO: 8268 - protein, 157 aa, Zea mays
  unsure (1)..(157): unsure at all Xaa locations
  Clone ID: TF_LIB3732-036-Q1-K6-G4.pep
KKSPFTPGEDPAILAPHALLGNRWAGLSRLLPERSYNSAKNHFIWGGGLNLATDSXDLHRRGSADHPCKRSTPGPGSPSASDRNDLSHCCSTIHVFLPVPRALGFNAIIAENVRPLFSTAILDDDPLTILSLSLPELDHSPSGFHHYSARSHFQELS

SEQ ID NO: 8269 - protein, 164 aa, Zea mays
  unsure (1)..(164): unsure at all Xaa locations
  Clone ID: TF_ZmC344_3.pep
WRSLPKXAGLLRCGKSCRLRWINYLRPDLKRGNFTADEDDLIVKLHSLLGNKWSLIAARLPGRTDNEIKNYWNTHVRRKLLGRGIDPVTHRPIAADAVTVTTVSFQPSPSAAAAAAAEAEATAAKAPRCPDLNLDLCISPPCQSGEEEEVDLKPSAAVVKREVL

SEQ ID NO: 8270 - protein, 221 aa, Zea mays
  unsure (1)..(221): unsure at all Xaa locations
  Clone ID: TF_LIB3592-067-Q6-K6-D3.pep
XRXMINPWTXNERXIFMEMLAKFGKDFSKISSFITHKTTADCVEFYYKHHKSDSFREVKKLLDLHQQLPASNYLGAKSGQKWNPESNAASLDMLGVASAEAAHDLEYANKVEKISVKSLIRTAYGSNVSFVTKKSSDKECIDNVPLHERESVAADVLAGICGTPSPDGMGSCITSSADPGLKISMKRVEHVLSQENDKNVNEEESLSDQECEXDPVDWNDD

SEQ ID NO: 8271 - protein, 43 aa, Zea mays
  Clone ID: TF_6165689.pep
TNYLRPDIKRGHFTPEEHNSILQLHAIIGNRWSTIAAQLPGRT

SEQ ID NO: 8272 - protein, 224 aa, Zea mays
  unsure (1)..(224): unsure at all Xaa locations
  Clone ID: TF_LIB4758-049-R2-K1-E6.pep
PLLRYAGEESSAATPEGSGSAASAPKDAGGGGGGGGGHRREERKSGVGVDVGKSSSKAEQERRKGIPWTEEEHRLFLLGLDKFGKGDWRSISRNFVISRTPTQVASHAQKYFIRLNSMNRDRRRSSIHDITSVSAGEVAAAGAPITGGPTTAGAMPMGPAGMKHHHHHPAPPMGMYGHAPMGHPVSGHMVAPAXRRTPVMFPXGHHSPYVMPVGYPAPXGQMHP

SEQ ID NO: 8273 - protein, 162 aa, Zea mays
  Clone ID: TF_ZmC42_27.pep
RRSSCFCSSRLFLLGLKKYGKGDWRNISRNFVQTRTPTQVASHAQKYFIRLNSGGKDKRRSSIHDITTVNLTDDQPPSPSQSSLITSQSNAPAPAPGPAPAAGICQVPLAADAKRHGARTLPFSSPNRTSAAPAYRMEFHDQQGLQCGPLHDQLLASQSVLF

SEQ ID NO: 8274 - protein, 81 aa, Zea mays
  Clone ID: TF_LIB4978-036-R1-K1-C1.pep
MGAPKQRWTPEEEAALKAGVAKHGPGKWRTILRDSDFSALLRLRSNVDLKVTLGSPGRVGGWVFGDQLRGVWRKSPVFLVG

SEQ ID NO: 8275 - protein, 128 aa, Zea mays
  Clone ID: TF_ZmC42_28.pep
SKVSSTEQDHVFFVVDVLGARLFLLGLKKYGKGDWRNISRNYVQTRTPTQVASHAQKYFIRLNSGGKDKRRSSIHDITTVNLTDDERAPSPSRSSLITTTTSQPNAPAPAAVVIGGPFSSSSAAAAEA

SEQ ID NO: 8276 - protein, 324 aa, Zea mays
  Clone ID: TF_ZmC11324_2.pep
MARSGGGMEGNKWARISKHLSGRTDNEIKNYWNTRFKRRQRAGLPPYPPDVERQIKLLRAQNVNPFADADADAAHANASAGLPAPPLLYDVGNPFALLSSIPSLSQTASHSHSPLINQNYPLLNQMQVFHHLGGSQQPSFHQDGSAAAFGDIVSSRLPPLPTARTQAELHSNQFDTSISGGLVDQSMLIGDEHLLRPNPSMVKVSSMPALSYREPDGSRMLPAHGAGSDGDVSSLGQCPPGQDLHRGATWDFTFAAVKPAKRRTASEVGFSDMFAVAPPGDWFGGGSTAPSPGPSSAVTDEEFNLEMQQFMSMLPLSDEHGWNA

SEQ ID NO: 8277 - protein, 322 aa, Zea mays
  Clone ID: TF_ZmC5904_1.pep
GQLDEVDVDDDAVVAGVARPPAPAQVRVPVVLDLVVSSARQMTGDQGPPGKKKETWHSENGQSSNSKKLAKLMSISKNRKIMFKTQSNKLSFFFAILFYSVSVQFTRHLWLARPPRHLPSFMRALTYFCSRTPSRRSEGPRARCHRRRSDGRWRGRAQSAATATASRETSWPGAPLHRLWRLHAPPRRLPQSHCKPPSGQAQGRGRARLPGRRRGTRTGPAPPRQVRRVLRWLPRHCGPAFVILLALGTQRQERREHKGHRLVEPLELGLGASEHHEGTEADQLLVQQEHHGRANNHVNATMHARFASWVDRRAFIRATPRD

SEQ ID NO: 8278 - protein, 412 aa, Zea mays
  unsure (1)..(412): unsure at all Xaa locations
  Clone ID: TF_ZmC9939_1.pep
EFPDDDEYDLEQAESREHKRWMERQNAKLQEKAKKVEYARVRTLVDNAYKKDPRIQRRKEEEKAEKQRRREAKYLAKKLQEEEAAKAVEEERIRKEEESKKAAEAALHQKKLKEKEKKLLRKEKTRLRTLAAPVIADSHFGLSEANVESACASLDMEQLKKLCDGMDGKDAAGKARLLSNVLRNESSSKEAKKIEGNGVEPSAPKSNSTGGRATEGSNSILNSYEKKERPWGKEEIEMLRKAIQKYPKGTSRRWEVVSEFIGTSRSVEEILKATKTVLLQKPDSSKAFDSFLEKRKPTQSIASPLSTRDEISSTEGAGTASSKAAAQSANSQTANEKAAADPVTDGGPSVSDPDAWTDAQVLALVQALKAFPKDASQRWERVAAAVPCKTVVQCKKKXAAMRENFRSKKSGE

SEQ ID NO: 8279 - protein, 85 aa, Zea mays
  Clone ID: TF_jC-zmXLIB3527P015Be03d1.pep
GGGSGSGSGEERRRGVPWTEDEHRLFLEGLEKYGRGDWRNISRWSVKTRTPTQVASHAQKYFIRQASAASRGDTKRKSIHDITTP

SEQ ID NO: 8280 - protein, 495 aa, Zea mays
  Clone ID: TF_ZmC1981_1.pep
MATTATTMAPVTAPVATANLEPTPTPLHPRPAAPPHLRALSTLAPVKSEAPPTPSSSTAITAAAGAEDPSYIITVPSYSAWFSFDSIHDTERRLLPEFFVGEAAAASGCRGPHAYKYYRDSLIRRFRARPGRRLTLTEARRGLVGDVGSVRRVFDFLEEWGLINYGALPSGSKQAKEKREEAAQQSSLPSGAIAPRKLCTGCRTVCGLAYYACDKADISLCARCYVNNNYRPGLSPANFKRVEITEDAKPDWTDKETLHLLEAVLHYGEDWKKVSEHVSSRSEKDCIARFIRLPFGEQFMGHKEDRMRFENTDDNTDEPGANVSKRLRLTPLADASNPIMAQVAFLSAIVGSDVASAAAQAAISAQSRVDLNDGEIETSINSIKQEESSHTNGLSANVLLKEAAANARAQLEKERNSIEQSLSNIVDVQMKEIQDKICRFEQKEMLMEKERQQLHFLRDLLFTDQLAVMQHQQRSPAVATECKGDEKPKPVASMS

SEQ ID NO: 8281 - protein, 342 aa, Zea mays
  Clone ID: TF_ZmC5277_1.pep
MPRDSRPAGMRLFGVTIAPAPEADPPVRDPSPNPPVAAREDVMRKCKSMGNLAALGAVVDGGGGGADGGGAGDGYLSDGGLMQSSGKRRRAQERKKAVPWTEEEHRTFLAGLEKLGKGDWRGIAKNFVTTRTPTQVASHAQKYFLRQTNPNKKKRRSSLFDMMPRELSPAPNCPILPPSMAKVHDVVAMTKQLQNSNLEGTSSSNAASQVGRDLPPVPSFKATNMDPSFSKFSHMERVWRTPYPFGPVPRAPEGTPSPTAAAAAAAAAAANAAVPVSQANLTTACTSNTFLSQPKPSDTPSLPPKGGPPSEEDGLELTVAPPSQQNMTNMSSQNAVGVIQVI

SEQ ID NO: 8282 - protein, 181 aa, Zea mays
  unsure (1)..(181): unsure at all Xaa locations
  Clone ID: TF_LIB3900-001-Q1-N6-F1.pep
MLELGLKRTGKSCRLRWLNYLKPDIKRGNLTPEEQLLILELHSKWGNRWSRIAQHLPGRTDNEIKNYWRTRVQKQARQLRVDANSAVFRDAVRCYWMPRLLEKMAAHHHGDGELPPPLHPSHNIAGTASSRSPPAHXSQQEDPSSSAPAASGHYLQQVDPSPSTSTTSGSTTSAALPPVPC

SEQ ID NO: 8283 - protein, 127 aa, Zea mays
  unsure (1)..(127): unsure at all Xaa locations
  Clone ID: TF_ZmC40061_1.pep
MGRQPAXDKEGVKRGPWTAEXDKKLISFILTHGRCCWRAVPKLAGLLRCGKSCRLRWTNYLRPDLKRGLLSTAEEQLVIDLHAKLGNRWSQIAAKLPXRTDNEIKNHWNTHIKKKLVKMGVDPATHE

SEQ ID NO: 8284 - protein, 201 aa, Zea mays
  Clone ID: TF_ZmC2941_8.pep
MGSEADCDRIRGPWSPEEDDALRRLVERHGARNWTAIGREIPGRSGKSCRLRWCNQLSPQVERRPFTPEEDAAILAAHARLGNRWAAIARLLPGRTDNAVKNHDSARSHFQELSPSSSPSPQSTPPAFPPQAAPSQSSYAFSGELVAAMQEMIRAEVRKYMSGAGLRAGCGPGAVGEVCMPQLVEGVMRAAAERVGVVTRP

SEQ ID NO: 8285 - protein, 122 aa, Zea mays
  Clone ID: TF_ZmC8104_2.pep
MGRTPCCDRAAVKRGPWSPEEDEALRSYVQRHGSGGNWITMPKKAGLKRCGKSCRLRWLNYLRPDIRHGGFTAEEDAVIMSLYAQLGSKWSLIASQMEGRTDNDVKNHWNTKLKKRLLAAAA

SEQ ID NO: 8286 - protein, 191 aa, Zea mays
  Clone ID: TF_ZmC3484_3.pep
MGRHAASGGGVQQKLRKGLWSPEEDEKLYNHIIRYGVGCWSSVPKLAGLQRCGKSCRLRWINYLRPDLKRGSFSQQEEDAIVGLHQILGNRWSQIASHLPGRTDNEIKNFWNSCLKKKLRQRGIDTSTHKPAVSASVPASEQPVSQDRKPLAAAAADGGSDMKHQQVFDPFPLTDSFGGGFGAALYGHTGG

SEQ ID NO: 8287 - protein, 221 aa, Zea mays
  Clone ID: TF_ZmC864203_1.pep
MRKPECPAANSSNAGAAAAKLRKGLWSPEEDERLVAYMLRSGQGSWSDVARNAGLQRCGKSCRLRWINYLRPDLKRGAFSPQEEELIVSLHAILGNRWSQIAARLPGRTDNEIKNFWNSTIKKRLKNSSAASSPAATDCASPEPNNKVAAAGSCPDLSVLDHQDGGHHHAMTTTTAGLWMVDSSSSCTSSTSPMHQFQRPTTTMAAAVASGSYGGLVPFLT

SEQ ID NO: 8288 - protein, 285 aa, Zea mays
  Clone ID: TF_ZmC8091_1.pep
MAASPSPSGSGGGKAGVDRIKGPWSPEEDEALQRLVRRHGARNWSLISRSVPGRSGKSCRLRWCNQLSPRVEHRPFTPDEDDAILRAHARFGNKWATIARLLSGRTDNAIKNHWNSTLKREREREREYYADARPGPGDQRSLKRTSSDGPPGSPSGSDLSDSSHQSLPTVMPSAASTAVTSQQQLQHVYYRPVPRAGGVVLLPVAPPSPQAPPATSLSLSLSLPGLDQQPEPSPPPPPTPQAQASSPLSAEFLLMMQEMIRIEVRNYMSGSGFDARAVMGMAEID

SEQ ID NO: 8289 - protein, 215 aa, Zea mays
  unsure (1)..(215): unsure at all Xaa locations
  Clone ID: TF_ZmC659_2.pep
MGRAPCCEKMGLKRGPWTPEEDKILVAHIHSHGHGNWRALPKQAGLLRCGKSCRLRWINYLRPDIKRGNFTDEEEQSIIQLHQLLGNRWSAIAARLPGRTDNEIKNVWHTHLKKRLDLSAQEQHEEAKKRKKPAAAARKRDGKVKMRKLDALTAKAAPVLSSPERSVSSTVTESTSTXXPAAAEQHGNSGSSASASASVKEECFTSSKESEESRS

SEQ ID NO: 8290 - protein, 190 aa, Zea mays
  Clone ID: TF_ZmC42_26.pep
MDFHHGCHSSSIHAAAPPPARPWSKEENKMFESALVMWPEHTPERWALVAAQLHGRTPREAWEHYEALVADIALIERGGVDVPACWNDDNQVRGGCGSEGGTGNSRRAGADRAHREGRRPGKPWSEEEHRLFLQGLEKYGRGDWRNISRFTVRTRTPAQVASHAQKYFNRQLNPASRNSKRKSIHDITTP

SEQ ID NO: 8291 - protein, 142 aa, Zea mays
  Clone ID: TF_ZmC14064_1.pep
MGRAPCCDKTSVKRGPWSPEEDEVLRSYVQNHGTGGNWIALPHKAGLNRCGKSCRLRWLNYLRPDIKHGGYTEQEDRVICSLYSSIGSRWSIIASKLPGRTDNDVKNYWNTKLKKKAIAMQQQQQEYYHHQQQQHSSGGRGR

SEQ ID NO: 8292 - protein, 232 aa, Zea mays
  unsure (1)..(232): unsure at all Xaa locations
  Clone ID: TF_ZmC3484_1.pep
MGRHAASGGGVQQKLRKGLWSPEEDEKLYNHIIHYGVGCWSSVPKLSGLQRCGKSCRLRWINYLRPDLKRGSFSQQEEDAIVGLHEILGNRWSQIASHLPGRTDNEIKNFWNSCLKKKLRQRGIDPSTHKPISADAAALEQPASRDRKPSLATAAAGGGLDVKQQQQQQQVFDPFPLTDSFGGGFDDAAGAALYGHMGGGGGKQQDAAATAVDVLXVSENLGYGESSSTAAH

SEQ ID NO: 8293 - protein, 331 aa, Zea mays
  Clone ID: TF_ZmC2013_1.pep
MDMAHERSDASSEEEVMAGELRRGPWTVEEDLQLVNYVDAHGEGRWNSLARSAGLKRTGKSCRLRWLNYLRPDLRRGNITPQEQLLILELHSRWGNRWSKIAQHLPGRTDNEIKNYWRTRVQKHAKQLKCDVNSQQFKDVMRYLWMPRLVERIQNAAAMAGTPQQHKAGAADTPLSSPSSWQPGGGGGLYASPDLPTDACWPPADCYYYPAAADHQLLNNPAAAAVVPDLSSTTAGSASPSSDSGAGTAQPWPAPMGGAEWLTTAACDASSAAAAVLLGGQQQQSCLVGETSWASSELPELGVADFEIGSFDVESIWSMDDSLWFTQAQGV

SEQ ID NO: 8294 - protein, 340 aa, Zea mays
  Clone ID: TF_ZmC2013_2.pep
MDMAHERSDASSEEEVMAGELRRGPWTVEEDLQLVNYVDAHGEGRWNSLARSAGLKRTGKSCRLRWLNYLRPDLRRGNITPQEQLLILELHSRWGNRWSKIAQHLPGRTDNEIKNYWRTRVQKHAKQLKCDVNSQQFKDVMRYLWMPRLVERIQAAAANNNASGAGVPPAGAAADDTPLSSSWQHGGGADDDGGLYASPELPTDACWPPADCYYYPAAADHQLLNNPAAAAVFPDLSSTTAGSSSPSSDSGAGTAQPWPAPLGGGAEWLTTGACCDASSAAAAAVVLGGQQQQSCLVGETSWASSELPELGVADFEIGSFDVESIWSMDDSLWFTQAQGV

SEQ ID NO: 8295 - protein, 330 aa, Zea mays
  Clone ID: TF_ZmC3584_1.pep
MVRPPCCDKEGVKKGPWTPEEDLVLVSYIQDHGPGNWRAVPTRTGLMRCSKSCRLRWTNYLRPGIRRGNFTEQEEKLIVHLQALLGNRWAAIASYLPERTDNDVKNYWNTHLKRKLQAGGGDGDGDGAAKPPAHRPPSSNSKGQWERRLQTDINLARRALREALTPLGDLKPQPQPQRAGAGVGTGGGDSPAPSSSSSQSSPAPAAFAAAAAGPYVLTAENISRMLDGWAGRKVRGGGTPGTPGGAESASTGSSDASEVSYGGAAVASAAPAPACGGPVFEYEAKPGVPTSHQQMPLSAIESWLFDDDSHLHHAVQSASLLDAAPMDYPF

SEQ ID NO: 8296 - protein, 135 aa, Zea mays
  unsure (1)..(135): unsure at all Xaa locations
  Clone ID: TF_LIB4767-042-R1-K1-D8.pep
NGARILCCYKLNLTKALWXADDYEKVMKQITKDVHGCXRSIPGLSVLQRCAKKXTLMRIHYLRPELQRGAFSQDQEDFIIELHAVLGNRXIXIAAQMPRRTDNEIKNLWNSXINKKLRQKGIDLHTPQALTERDP

SEQ ID NO: 8297 - protein, 138 aa, Zea mays
  Clone ID: TF_LIB3608-060-Q6-N6-G11.pep
MWSLPLLADFDLCCDCYNEGKFDPGMAKTDFILMDSAGVSGASGTSWTDEETLLLLEGLEIFGGKWAEIAEHVATKTKAQCMLHFLQMQIEDRFHDGKDINQNIPVKTEQATTEKAIAETSEKMEVEDKVEGRGTVDE

SEQ ID NO: 8298 - protein, 339 aa, Zea mays
  Clone ID: TF_ZmC27878_1.pep
MVSMNTTPNPLDSAAGSAAVAGGSVDEGGGGGGRKKRMRGAVAAAMVPPPMAVPLPAAAPAAGEEVRKVRKPYTITKSRESWTEPEHDKFLEALQLFDRDWKKIEAYVGSKTVIQIRSHAQKYFLKVQKNGTGEHLPPPRPKRKAAHPYPQKSSKNVSQTILLQEQPTQREQGSVMPMDTATVRNTNANVAVPSWDNTLAQPFSAGHVQGAAATNNCSSSMESPSGTWPTSEAVEQENMVPPLRAMPDFAQVYNFLGSIFDPDTSGHLQRLKAMDPVDIETALLLMRNLSMNLRSPDFEQHRRLLSSYSYGGADHVKSEAMENLGSPQSGHLPSLVTSE

SEQ ID NO: 8299 - protein, 312 aa, Zea mays
  Clone ID: TF_ZmC9324_3.pep
HASEYHCNSCSVDCSRKRYHCRTQADFDLCCVCYNEGKFDPGMAKTDFILMDSAEVSGASGTSWTDEETLLLLEGLEIFGGKWAEIAEHVATKTKAQCMLHFLQMQIEDRFHDGDDINQNIPVSTEQATTEKAIVETPEKMEVGDKVEGRDNADEKASEKTEGSCEETKTEDANVVNKDTQKSGGKDSGASPSTEEAKQSSDDQPIVKENSVDVDTSGEKLSNVAIDILKCAFEAAGHSPEYEGSFADAGNPVMALAAYLAGLVEDDNTTTSFRSSLKSVSDVSPALQLSSRHCFILEDPPDELKDICASVR

SEQ ID NO: 8300 - protein, 279 aa, Zea mays
  Clone ID: TF_ZmC1193_7.pep
GSTPLSRRGSPCCEKAHTNKGAWTKEEDERLVAHIRAHGEGCWRSLPKAAGLLRCGKSCRLRWINYLRPDLKRGNFTEEEDELIVKLHSVLGNKWSLIAGRLPGRTDNEIKNYWNTHIRRKLLSRGIDPVTHRPVTEHHASNITISFETEVAAAARDDKKGAVFRLEEEEERNKATMVVGRDRQSQSQSHSHPAGEWGQGKRPLKCPDLNLDLCISPPCQEEEEMEEAAMRVRPAVKREAGLCFGCSLGLPRTADCKCSSSSFLGLRTAMLDFRSLEMK

SEQ ID NO: 8301 - protein, 137 aa, Zea mays
  Clone ID: TF_ZmC16180_2.pep
MCTRGHWRPSEDEKLKELVALYGPHNWNAIAEKLQGRSGKSCRLRWFNQLDPRINRSPFSEEEEELLLASHRVHGNRWAVIARLFPGRTDNAVKNHWHVIMARRCRERMRLSNRRAGGAAAAGARRRRHRCCCRRWQ

SEQ ID NO: 8302 - protein, 204 aa, Zea mays
  Clone ID: TF_ZmC39745_1.pep
MGRPPCCDNGVGVKKGPWTPEEDIVLVSYIQQHGPGNWRSVPENTGLMRCSKSCRLRWTNYLRPGIKRGNFTPHEEGIIIHLQALLGNKWAAIASYLPQRTDNDIKNYWNTHLKKKVKRLQQPAADSFQTTASNAVTCSPNYYSPSSSHHSLQGMQPMSSYPHTTCSGGAPSNNEATTGYYYRRRLPLSPAWMRASPAAATANC

SEQ ID NO: 8303 - protein, 226 aa, Zea mays
  Clone ID: TF_ZmC7195_1.pep
MGRSPCCEKAHTNKGAWTKEEDQRLVAYIKAHGEGCWRSLPKAAGLLRCGKSCRLRWINYLRPDLKRGNFTQEEDDVIIKLHQVLGNKWSLIAAQLPGRTDNEIKNYWNTHIKRKLIARGIDPRTHQPASAAAVAPAAAAAAAAQSSFRHHGDDEAVARRSCSRDSGCIAAHSSDDDDSTSGSLPHQHAVGGIDLNLSLSPPTSQPSSPAAAKGVVASGYGQGSES

SEQ ID NO: 8304 - protein, 106 aa, Zea mays
  unsure (1)..(106): unsure at all Xaa locations
  Clone ID: TF_LIB4746-133-Q1-K1-A11.pep
GYLEAGRKVVELSSLRRRCSTEQGSKRCVKSCRLRYTNYRALIWATNCVRVCRGSLIAKQLPRRTGNDVRNRWNTKLXKQLRQRGIDPTAPIAGLMHIFVGALSLR

SEQ ID NO: 8305 - protein, 353 aa, Zea mays
  unsure (1)..(353): unsure at all Xaa locations
  Clone ID: TF_ZmC1193_6.pep
MYALRCTCTAPPVCPHPSALAYLFPLPPVIIATKPNQTRAQEELRKLRGGARKQAHEGEPGRQPAMGRSPCCEKAHTNKGAWTKEEDQRLIAYIRAHGEGSWRSLPKAAPRVRGXGLLRCGKSCRLRWMNYLRPDLKRGNFTDDDDEVIIKLHALLGNKXALSLSSPPARRYHYFPPPRLNHFPIVGRPVARRWSLIAGQLPGRTDNEIKNYWNTHIKRKLLTRGIDPQTHRPLSAAAALTAGFPSPARPPTVLFARPAPSEDGGHSSGGGSADAPRCPDLNLDLSVGPPCSPPKTPAATASTPTSQQQQRTTTICLCYHLGVRSGEACSCKSPSPAAAGFRFLRPLEEGQYI

SEQ ID NO: 8306 - protein, 334 aa, Zea mays
  Clone ID: TF_ZmC42_43.pep
PRARRLPCPPTPTGKGETLGRLASGVQGTLMTELWMEVLPPPYFAGQAAGGWFLPDRRAGPGAWTLEENKMFERALARVDWDAPDRWERVAAMLPGRTASDVAAHYDDLECDVGCIEAGFVPFPCYGSGGGGGASQSAGFTFDWDAGGLGFKRSCYVVGGGKRERGPDQERKKGVPWTEEEHKQFLMGLKKYGRGDWRNISRNFVTSRTPTQVASHAQKYFIRLNSGGKDKRRSSIHDITTVNLPDDDAGGTASASPPSVLTSASAPSSTGGGGPVVSEQFGVLVDSKPPAPHHHFVPHPYGNVKLEPVSSHHGGFLDDSVLMQMHCGQLQPLG

SEQ ID NO: 8307 - protein, 308 aa, Zea mays
  Clone ID: TF_ZmC3584_2.pep
WTPEEDLVLVSYIQDHGPGNWRAVPTRTGLMRCSKSCRLRWTNYLRPGIRRGNFTEQEEKLIVHLQALLGNRWAAIASYLPERTDNDVKNYWNTHLKRKLQAGGGDGDGDGAAKPPAHRPPPSNSKGQWERRLQTDINLARRALREALTPLGDLKPQPQPQRDGAGVGIVGGDSPAASSLSSQCSPPPAPAALGTYVLTADNVSRMLDGWAGLNGKRRGGAPGTPGGAETASTGSSSEVSYGGGTAVVAPAAGGPVFEYETKPPAAPFQLMMPLSAIESWLFDDDTHFHRPVQSASLLDAAPMDYYLL

SEQ ID NO: 8308 - protein, 362 aa, Zea mays
  Clone ID: TF_ZM4497.C3.o9.fg.pep
MGRAPCCEKVGLKRGRWTAEEDQLLANYIAEHGEGSWRSLPKNAGLLRCGKSCRLRWINYLRADVKRGNISKEEEDIIIKLHATLGNRQAKKHDRYHAFGSHYEAAAAQPAAMITWSLIASHLPGRTDNEIKNYWNSHLSRQIHTYRRKYTAGPDDTAIAIDMSKLQSADRRRGGRTPGRPPKTSASRTKHSDADQPGGEAKGAAASSPRHSDAVNPGPNQPNSSSGSTGTAEEEGPSSEDASGPWVLEPIELGDLWGEADSEMDALMPIGPGGHDSAALQGLGAVGGEAQVDDLFDMDWDGFAAHLWGGPEQDDHSAQLRQAAEPMEAAAVAAAAAAATAACTPDDRELEAFETWLLSDSF

SEQ ID NO: 8309 - protein, 229 aa, Zea mays
  Clone ID: TF_ZmC17859_2.pep
HASVLLQQGWRKGPWTALEDRLLTEYVQQHGEGCWNSVAKLTGLRRSGKSCRLRWVNYLRPDLKRGKITPDEETVILHLHAMLGNRWSAIARCLPGRTDNEIKNYWRTHFKKVRPSRRARAQLLHQYQLQQQEQRRQYLQLLQPQQLQQQQLGVVKQQQLEQQSPPEPHHQAMMDSLQSTAACYCSPVPEECCPLPADDDAVLWDSLWRLVDGDGCGDGDGDGSSGGDY

SEQ ID NO: 8310 - protein, 322 aa, Zea mays
  Clone ID: TF_ZmC1302_1.pep
MGRSPCCDENGLKKGPWTPEEDQKLMEYIQKNGHGSWRALPRLAGLNRCGKSCRLRWTNYLRPDIKRGKFTQEEEQTILQLHSVLGNKWSAIAKHLPGRTDNEIKNFWNTHLKKKLIQMGFDPMTHRPRTDFFAALPQLIALANLRQLVEQRPWDDHAARIQVEAVQAAKLQCLQNLLQSAASITTTPSSSSMNTIPSDLGLLSPPQMSSLSTLPSPSFLESISGQDMVAGQLSDIQIPSSFFEQPTSNEANQQSDFTPKSSVEGENGTPKTLLSENSLPPLADFPISNLGDACGASSCDGSSIQFPSWPELFDEQFMCEFV

SEQ ID NO: 8311 - protein, 438 aa, Zea mays
  Clone ID: TF_ZmC984_1.pep
MEQSSDGLPISQRRANSSTKHSSKSDEVAEDMLQSNIPHETVRLCQGVESEEIEGPPHKKIVQNFTESSSSKNKKHRWSSEEDEALKQMVKKYGTKNWRTIACAIPGRNANSCLSRWNSLKIPESTKGKWLAEEDEILIKMVTKHGKNWQTVAFAIPGREAKQCQIRWTRSLDPAIKKQDWSEQEDLKLIRAHQIYGSQWLKMVKHFPGRTNHALKEHWRNRIKGKLNFYLASGLLEQVPDLEEGGISVPESSQSEIPKDSQGSADRSGPPPVLRAQPKSKPELPENAGTSGEGTSDSIRLKGPNAHPTEVSEKVLAKSKQRARARRRLDFLSTPVELKLCTAAASCQRPPQKMDQPGPVAENISPSDACQDISQNVPPERADAITPLAASNHHSPATPVDPFSLEMHEANASDLLDMSYCDGLIIDSPRDPHDGSLM

SEQ ID NO: 8312 - protein, 273 aa, Zea mays
  Clone ID: TF_ZmC39133_1.pep
MPSDKAKAPKKKGEEDPGIPPAPCEGEISHEPHRQRSLNGRTTGPTRRSTKGNWTPEEDAILSRAVQTYQGKNWKKIAESFPDRTDVQWLHRWQKVLNPELVKGPWSKEEDEIIVQMVNKYGPKKWSAIAQALPGRIGKQCRERWHNHLNPAINKEAWTQEEEITLIHAHRMYGNKWAELTKFLPGRTDNAIKNHWNSSVKKKVDSYISSGLLSQVPCLSLIECPAQCDSLSAMDQQNNGGTDCNDQNTSVGLSSDLQVNVDANKKEHMTLTR

SEQ ID NO: 8313 - protein, 88 aa, Zea mays
  unsure (1)..(88): unsure at all Xaa locations
  Clone ID: TF_uC-zmflteosinte056a06b1.pep
EWIQDEEDLIIHLHPMMGNKWAHIARHVPGRTDNEVXKNFWNCATKRTSVMIGSGLSPNTLLRVDYNGIQRRPGMFNHCELIHVVLSS

SEQ ID NO: 8314 - protein, 120 aa, Zea mays
  Clone ID: TF_ZmC8104_1.pep
MGRTPCCDRAAVKRGPWSPEEDEALRSYVQRHGSGGNWITMPKKAGLKRCGKSCRLRWLNYLRPDIRHGGFTAEEDAVIMSLYAQLGSKWSLIASQMEGRTDNDVKNHWNTKLKKRLLAA

SEQ ID NO: 8315 - protein, 96 aa, Zea mays
  Clone ID: TF_LIB4767-058-R1-K1-G8.pep
MGRAPCCEKMGLKRGPWTPEEDKILVAHIQSFGHSNWRALPKQAGLLRCGKSCRLRWINYLRPDIKRGNFSKEEEDAIITLHEQLGNRYVTYLPLC

SEQ ID NO: 8316 - protein, 108 aa, Zea mays
  Clone ID: TF_ZmC659_6.pep
MGRAPCCEKMGLKKGPWTPEEDKVLVAHIQSFGHSNWRALPKQAGLLRCGKSCRLRWINYLRPDIKRGNFSKEEEDAIISLHEQLGNRYFLLTPLFFPFVLALLSSRV

SEQ ID NO: 8317 - protein, 220 aa, Zea mays
  Clone ID: TF_ZmC11324_1.pep
MARSGGGMEGSGGLKKGPWTQAEDKLLRDHVRRHGEGNWNAVRRETRLQRCGKSCRLRWANHLRPNLRKCPFSPEEERQILLLHGLIGNKWARISKHLSGRTDNEIKNYWNTRFKRRQRAGLPPYPPDVERQIKLLRAQRQPFAAAALASPEQLPAAVSRRRKPVRVALQHTVTVADGLALALATDQPELPASEPDAGVPPPRRQSAAVVPPGRQRGGFR

SEQ ID NO: 8318 - protein, 277 aa, Zea mays
  Clone ID: TF_ZmC4021_2.pep
MASSSTTNTSDGGAKSSSCPRGHWRPGEDEKLKQLVEKYGPQNWNSIAEKLEGRSGKSCRLRWFNQLDPRINKRPFTEEEEERLLNAHRAHGNKWALIARHFPGRTDNAVKNHWHVVMARRSRERSRLLARAASSSSSPSTGGYLFGAVTPATSSLCFGFSKLGGAGSASGSGGLFRSPVPAPPTSLFKNFGTATASKGLLGSSFEASGRYSYSGKQPTAPLSITFSSPREALGMDIGHHGRHEHHQKDYHASESADEPLKKKDVPFFDFLGVGVSS

SEQ ID NO: 8319 - protein, 195 aa, Zea mays
  Clone ID: TF_ZmC2251_1.pep
MSAAVNKSSAGTKKSRKPYVVSRPRERWTADEHGRFLHALLLFGRDWKRVQAFVATKTGTQIRSHAQKHFLRADKKLGLAVPPPHPRRSAADYGGALAPDVETVQLPLSQDDLRFAQVYRFVGDVFGCGAMWPVEAQLQRLLGADPVVVDTILRVLANLQDKTSLPVACRSTIFCSQLRYGGIGFESCDYKFPAR

SEQ ID NO: 8320 - protein, 150 aa, Zea mays
  Clone ID: TF_ZmC2251_2.pep
AVNKSSAGTKKSRKPYVVSRPRERWTADEHGRFLHALLLFGRDWKRVQAFVATKTGTQIRSHAQKHFLRADKKLGLAVPPPDVETVQLPLSPDDLRFAQVYRFVGDVFGCGAMWPVEAQLQRLLGADPVVVDTILRVLANLQDNFPPCSL

SEQ ID NO: 8321 - protein, 139 aa, Zea mays
  unsure (1)..(139): unsure at all Xaa locations
  Clone ID: TF_LIB4977-051-Q1-K1-D10.pep
MGRQPCCDKVGLKKGPWTAEEDQKLVSFILGNRQCCWRAVPKLAGLLRCGKSCRLRWTNYLRPDLKRGLLSDAEEKLVIDLHAQLGNRWSKIASHMPGRTDNEIKNHWNTXIKKKLRKMGIDPLTHKPLPAPDPHPPKD

SEQ ID NO: 8322 - protein, 328 aa, Zea mays
  Clone ID: TF_ZmC1497_3.pep
MATTQSRGGGGVVPVEVDEEHGRRRQGGAAPQEEEEEEAAEKPELRRGPWTVDEDHTLVNYIADNGEGRWNSLARAAGLKRTGKSCRLRWLNYLRPDVKRGNFTADEQLLILDLHTRWGNRWSKIAQHLPGRTDNEIKNYWRTRVQKHAKQLNCDASSKRFKDAMRYLWMPHLVDATATTADDEYHHHQHQHQAAAAGNIDGLLAGGDVDDVQNALAAGVAAAMASSSSDSLASEPYSYEDGGLLASVRAGEDMQLVMSGGGWAMAQEANDQGLWPSSSGHGLSSSVQAAAGGAGQFEDPELSGWVQGFSDSIITGNLWALEEIWKMQ

SEQ ID NO: 8323 - protein, 280 aa, Zea mays
  Clone ID: TF_ZmC20189_2.pep
MGCKACDKPKPSYRKGLWSPEEDQKLRDYILLHGHGCWSALPAKAGLQRNGKSCRLRWINYLRPGLKHGTFSPEEEETVMSLHATLGNKWSRIAKHLPGRTDNEVKNHWNSYLKKRVEGPSTPPSDSDDSHCAKPGRGGSTARETGDDRPADYSGSSEPREPSSSPDTSCLTGTPKVMFVDWLDMDCMGGGGGGPPGAAAAAAAPGLGAAAGVARVSTGDDQMTMDDGSASGRADVSLHGTFGDSGGAGCWEFHESFDQMQAAGFCDLLSSIGEYYFGLD

SEQ ID NO: 8324 - protein, 345 aa, Zea mays
  Clone ID: TF_ZmC16443_1.pep
MGRAPCCEKVGLKKGRWTKEEDEVLARYIKEHGEGSWRSLPKNAGLLRCGKSCRLRWINYLRAGLKRGNISEEEEDMIIKLHATLGNRWSLIAGHLPGRTDNEIKNYWNSHLSRRAADFRDGVVVDIDLSKLPGGGKRRGGRASRGAVVAAAKEKKAKEKDDRGNSKVAEAEQQLRDTEDDDGGSVSTPRPQSDDCGTAQSEEEQAQASASDLTSDGHGPEEEEEEDPLALSEEMVSALLAPESPKLEVGPDGSCMDSYSGPPSGESGCGSSGPSGDVAQDLDLDDDKAIMDWDLMGLDISTAGDMWDQLVWDYDETLVTEPEGGEEGHQQQDDVMSDLFFLDNL

SEQ ID NO: 8325 - protein, 67 aa, Zea mays
  Clone ID: TF_ZmC11751_1.pep
MGRSPCCDQDAGVKKGPWTPEEDKLLVDYINGNGHGSWRRLPKHAGLNRCGKSCRLRWTNYLRPDIK

SEQ ID NO: 8326 - protein, 317 aa, Zea mays
  Clone ID: TF_ZmC19314_1.pep
MGRPPCCDKANVKKGPWTPEEDAKLLAYTSTHGTGNWTNVPQRAGLKRCGKSCRLRYTNYLRPNLKHENFTQEEEDLIVTLHAMLGSRWSLIANQLPGRTDNDVKNYWNTKLSKKLRQRGIDPLTHRPIADLMHSIGALAIRPPQPATSPNGSAAYLPAPALPLVHDVAYHAAGMLPPTPAPQRQVVIARVEADAPASPTEHGHELKWSDFLADDAAAAAAAAAEAQQQLAVVGQYHHEANAGSSSAAAGGNDGCGIGVGGDDGAAAFIDAILDCDKETGVDQLIAELLADPAYYAGSSSSSSPGMGWASMGLLNAD

SEQ ID NO: 8327 - protein, 73 aa, Zea mays
  Clone ID: TF_LIB3245-455-P1-K1-H9.pep
MGRPPCCDKAGVKKGPWTPEEDIVLVSYVQEHGPGNWRAVPVSTGLMRCSKSCRLRWTNYLQPGIRRGNFTPH

SEQ ID NO: 8328 - protein, 228 aa, Zea mays
  Clone ID: TF_ZmC2204_1.pep
MVTVREEMRKGPWTEQEDIQLVCTVRLFGDHRWDFIAQVSGLNRTGKSCRLRWVNYLHPGLKHGRMSPQEERIIIELHARWGNRWSRIARRLPGRTDNEIKNYWRTHMRKKAQERKMGMPSPSSSSSSLTYQTCLLDTIPVIGMGSGDTHNGSCVTSTLENTQSVMDGYPMDQIWKEIEAPHAPNLLSIAEGKEKTCSSIPCHLPSPVMWDYKCPEIFWKMGDQEIMM

SEQ ID NO: 8329 - protein, 358 aa, Zea mays
  Clone ID: TF_ZmC152_1.pep
MLEVGGGRRSLVIVSSCCLALPRQHQHAARSHHTTRHVTTAPSFVLSCLTSHASRSAKHQQRTTTPTLGLRGRRGEGGAAQRQPMVSMSSTPHPLDPSVPAVVGGGKEEEEAVESCAAAAPLPPVGIDDDEEGPRRVRKPYTITKSRESWTDPEHDKFLEALQLFDRDWKKIEAYVGSKTVIQIRSHAQKYFLKVQKNGTGEHLPPPRPKRKAAHPYPHKSSKKALQVVLPQQVSHIMEQGCGTPMDVATVATDSSVNNAFPVQHFSPRHTQAMPDFARVYNFLGSIFDPETNGHLQKLKEMDPIDAETVLLLMKNLSINLTSPNFEEHRRLLSSDASSMDQKSGSSRVHLPFMITSK

SEQ ID NO: 8330 - protein, 276 aa, Zea mays
  Clone ID: TF_ZmC42_55.pep
MMAEAWTPVPFPPTAPCFWLHDTHSVFWRGGDAWTAAENKLFEKALAQIDRNAPDRWEKVAEVVRTKTVDDVRNHYHDLENDVGFIEAGLVPFPHYSGSVPSFGFTHHEDWDGGFRRGYCLKRARGSDPERKKGVPWTEEEHKLFLMGLKKYGRGDWRNISRKYVTTRTPTQVASHAQKYFIRLNSGGKDKRRSSIHDITTVNLPDEDRGNAPPSAVTTTTNPSVALPDMKPFIAPLQDALGVSHPYGNVKLEPKSSLVAGLGFNDSVLLMHCGQL

SEQ ID NO: 8331 - protein, 132 aa, Zea mays
  Clone ID: TF_ZmC256743_2.pep
MSQRKGAMAAAVTASKHREDQEAMMVELRRGPWTLEEDNLLMNYIACHGEGRWNLLARCSGLKRTGKSCRLRWLNYLKPDIKRGNLTPEEQLLILELHSKWGNRWSRIAQHLPGRTGHQIKNYWRTRVQKQA

SEQ ID NO: 8332 - protein, 226 aa, Zea mays
  Clone ID: TF_ZmC14101_1.pep
MGRPPCCDRAGVNKGPWTPEEDIVLVSYVQEHGPGNWRAVPVSTGLMRCSKSCRLRWTNYLRPGIRRGNFTPHEEGIIVHLQALLGNRWAAIASYLPQRTDNDIKNYWNTHLKKKLRKQQAIGAIFAPPPPSEPTAGHADCRRHDMTRSSKDSHACLADSTPAADEVVTQLIAQQFAATDGDTSSSSSYSYASSTDNISKLLNGFMKSAFAGAGRRYRHHQDFLGH

SEQ ID NO: 8333 - protein, 171 aa, Zea mays
  Clone ID: TF_LIB5116-021-A1-PF1-H6.pep
MGRSPCCDKTGIKRGPWTAEEDMTLVAHIEQHGHSNWRALPKQAGLLRCGKSCRLRWINYLRPDIKRGNFTGEEEDAIIQLHAMLGNRWSTIAARLPGRTDNEIKNVWHTHLKKRLDSSSSKTSGQAAPKRKAKKPVAAASTADGPVSMPVSSPEQPISSSATDYSMASSL

SEQ ID NO: 8334 - protein, 332 aa, Zea mays
  Clone ID: TF_ZmC16901_1.pep
MGRSPCCEKEAGLKKGPWTAEEDQKLLAFIEQHGHGCWRSLPAKAGLRRCGKSCRLRWTNYLRPDIKRGKFTLQEEQTIIQLHALLGNRWSSIATHLPKRTDNEIKNYWNTHLKKRLAKMGIDPVTHKARADVVGGSSGAGNNSGARYRAAAHLSHTAQWESARLEAEARLAREARLRALASPPPPPGPGPGPAFSGLESPTSTLSFSESVLFASAAHDTHALTSRAYAEAFGAEQQQRFADTAAAADAAPGFLAGVLLGCSVAGAEKGFAASSTDASVCEQQQEEEDKGYWSSILNMVNSSMSSSTSSLTSDAVTDPAAAYLPPATAAAEF

SEQ ID NO: 8335 - protein, 186 aa, Zea mays
  Clone ID: TF_ZmC741467_1.pep
MTVVEAGEVLNLKVGENPLLEGEAKTGYVSPDDQDGETASEKPCGAPQLKKGPWSPDEDKLLKNYVEAHGEGKWNKVQRNSGLNRCGKSCRLRWTNHLMPDLKKGSFDNEEIDKILKFYLKWGPKWAKIASRLPGRTDNEINFWNTSETDLPIYLSQAPAVSSLLPTCFLGVVGMCSLHPGTDLLC

SEQ ID NO: 8336 - protein, 44 aa, Zea mays
  Clone ID: TF_6165807.pep
LNYLRPNIRRGNISYDEEDLMIIRLHRLLGNRWSLIAGRLPGRT

SEQ ID NO: 8337 - protein, 93 aa, Zea mays
  Clone ID: TF_LIB3079-030-Q1-K1-F3.pep
GRVGARRPFTVDEDAAIARADARLGNRWAVIARLLPGRTDNAVKNHWNCSLKRKLGAADAASGSAVAADDCVADGETEARRGKMMMMSISPAD

SEQ ID NO: 8338 - protein, 319 aa, Zea mays
  unsure (1)..(319): unsure at all Xaa locations
  Clone ID: TF_ZmC764246_1.pep
LCSYCSXPLPSLHYESQKEADIALCSDCFHDARFVPGHSSLDFQRVDGTKDGSDNDGDSWTHEETLLLLEGLEKYNDNWNAIAEHVGTKSKAQCIHHFIRIPVEDGLLESIEVPEASVSSRVQSNGFSYSNSNGGISGSVPQSSQPGQQLPFVNSANPVMSLVAFLASAVGPRIAASCANAALSVLTRDDSRMCSEGNDVMGQAARPNYDASSSVSPENVKYAAMCGLSAAATKCKLFADQEEREIQRLAATIINHQLKRLELKLKQFAEVETLLLKESEQVERARQNXTAQRVRXMSARLLSSGVPPGAAAAPWHQIQ

SEQ ID NO: 8339 - protein, 179 aa, Zea mays
  unsure (1)..(179): unsure at all Xaa locations
  Clone ID: TF_LIB4764-028-R1-K1-B7.pep
IGSLEAGLQRCWKSCRLRWINYLRPDIRRGRFTAEEEKLIISLHAIVGNRWAHIASHLPGRTDNEIKNYWNSWIKKKIRKPAMSTTTSSAVTAASPPCSTAALDAALGRHLQTPFSAAEHRLDAILSQSLALPPPKLGSGXRRAAAAKSXPPLPPHCPFFMFDTSVSVSPPSSLASPAA

SEQ ID NO: 8340 - protein, 359 aa, Zea mays
  Clone ID: TF_ZmC21035_1.pep
MGRAPCCDKNNVKKGPWSPEEDAKLKEFIEKHGTGGNWIALPQKAGLRRCGKSCRLRWLNYLRPNIKHGEFTETEDRVICSMYASIGSRWSIIASQLPGRTDNDIKNYWNTKLKKKLLGSTAAPHPHRAPRQQQQHHHHRPGLNLMLQQTLPSLPQLATYNSFFSVAGGGALHHDDPIIPALALPPPHQDYMLSPGGGGGGLGIPTSLLHAQQQFQQQHQQHVVKEESGSMIVFGRDQQSCSSSDGGGGAHSQHQQPQYGNGHGKELSFDGYLFGYSNGGSGMEHDNCGRLMQQLQDAHQQQAHQHLVPVEYNYEEIKQLLMSTAAADTLHAAGSHDDDDDNGGIEGFGGSQGNKVTMM

SEQ ID NO: 8341 - protein, 241 aa, Zea mays
  unsure (1)..(241): unsure at all Xaa locations
  Clone ID: TF_ZmC2041_1.pep
MGRQPCCDKVGLKKGPWSAEEDEKLVTFLLTNGQCCWRAVPKLAGLLRCGKSCRLRWTNYLRPDLKRGLLSSEEETTVIDLHAQLGNRWSKIASHLPGRTDNEIKNHWNTHIKKKLRKMGIDPATHKPLHPQPAAPPPTQQEQDTGGSPEEEGEKADAVMMAAATPIIGHETAPFFTDEEEMLAHLLDDIDDFPPAAYSPDDXFFALLLLLRVPVVSLGLRRHSAVVERSWWKQRRRRRAA

SEQ ID NO: 8342 - protein, 241 aa, Zea mays
  Clone ID: TF_ZmC14028_2.pep
MGRAPCCEKKGLRRGAWSPEEDQRLVAYVRQNGHPNWRALPQQAGLPRCGKSCRLRWINYLRPDIKRGNFTREEEDAVIQLHQMLGNRWSAIAARLPGRTDNEIKNVWHTHLKKRLEPKTATQAPKRKPKKQQQPEAVTLAAPVSPEQSAVSTSTTSTTTDYSAASSSLENADSFTSEEEDYQIDDSFWSETLAMAVDSSDSGMEEAEGAFGASPPAPSTNDDVDFWLKLFMQASDMQNSP

SEQ ID NO: 8343 - protein, 289 aa, Zea mays
  unsure (1)..(289): unsure at all Xaa locations
  Clone ID: TF_ZmC17037_2.pep
MGRSPCCEQAHTNKGAWTKEEDQRLVAYIKAHGEGCWRSLPKAAGLLRCGKSCRLRWINYLRPDLKRGNFTEEEDDLIIKFHELFGNKWSLIAGRLPGRTDNEIKNYWNTHIKRKLLARGMDPQTHRPLASATAGQQHYQLQEPQKRAAGGGPAGHPHQDHLXGRRHLQLAGRGLQXVAATTXPRSATPPRRHLDIDLNLSISLAAYQPPEETGIIKQPLVMKQEQETAAGGTNAAAVCLCLNSLGYRPGVECVCGDGSSSSSSWHSHSHSHQWALNFLQAAAPCYRGQ

SEQ ID NO: 8344 - protein, 341 aa, Zea mays
  Clone ID: TF_ZmC1497_1.pep
MAATQSCQAAACFPAAVAVDEEHGHHSHQLKGGAQEEAENDNKPELRRGPWTVDEDLTLVNYIADNGEGRWNNLARAAGLKRTGKSCRLRWLNYLRPDVKRGNFSADEQLLILDLHTRWGNRWSKIAQHLPGRTDNEIKNYWRTRVQKHAKQLNCDANSKRFKDAMRYLWMPHLADDVDTIAAANDDDEDHHHHLRLLVLHHHQAQHLQQAAAAAGGAANDLAAGAYDVRQLHALPSSGMAATSSSDSLASESYDDGGLLFANLRAGEMLMDGGDWAAQQEADQGLWPPPPPTSDLDQSVVQAAGAGAGQFQDMELSGWVQGFSESITDNFWALEEIWKMQ

SEQ ID NO: 8345 - protein, 356 aa, Zea mays
  Clone ID: TF_ZmC1497_2.pep
MATTQSCQSRSSACSKAAACFPAAVAVDEEHGHHSHQLKGGAQEEAENDNNKPELRRGPWTVDEDLTLVNYIADNGEGRWNNLARAAGLKRTGKSCRLRWLNYLRPDVKRGNFSADEQLLILDLHTRWGNRWSKIAQHLPGRTDNEIKNYWRTRVQKHAKQINCDANSKRFKDAMRYLWMPHLADDVDTIAAANDDDEDHHHHLRLLVLHHHQAQHLQQAAAAAGGAANDLAAGAYDVRQLHALPSSGMAAVPTTATTSSSDSLASESYDDGGLLFANLRAGEMLMDGGDWAAQQEADQGLWPPPPPTSDLDQSVVQAAGAGAGQFQDMELSGWVQGFSESITDNFWALEEIWKMQ

SEQ ID NO: 8346 - protein, 360 aa, Zea mays
  unsure (1)..(360): unsure at all Xaa locations
  Clone ID: TF_ZmC1497_4.pep
MATTQSCQMATTQSCQSRSSACSKAAACFPAAVAVDEEHGHHSHQLKGGAQEEAENDNNKPELRRGPWTVDEDLTLVNYIADNGEGRWNNLARAAGLKRTGKSCRLRWLNYLRPDVKRGNFSADEQLLILDLHTRWGNRWSKIAQHLPGRTDNEIKNYWRTRVQKHAKQLNCDANSKRFKDAMRYLWMPHLADDVDTIAAANDDDEDHHHHLRLLVLHHHQAQHLQQAAAAAGGAANDLAAGAYDVRQLHALPSSGMAATSSSDSLASESYDDGGLLFANLRAGEMLMDGGDWAAQQEADQGLWPPPPPPPSXXLDQSVVQAAGAGAGQFQDMELSGWVQGFSESITDNFWALEEIWKMQ

SEQ ID NO: 8347 - protein, 106 aa, Zea mays
  unsure (1)..(106): unsure at all Xaa locations
  Clone ID: TF_LIB3245-072-P1-K1-A9.pep
MTDASDASYLAQGFNSLFTKTNRRTGNTHGRTETPQYNNGERLPCCEKIGLNKGPWTHDEDKVLVGHIQSFXHTNWSTLAKQALLFRCTKSSQLRXINYLSHDIKR

SEQ ID NO: 8348 - protein, 299 aa, Zea mays
  Clone ID: TF_ZmC42_25.pep
MMRETYMDVLPPVDHIAARSNWFPAAARLWTAAENKQFERALAGLDLCRPDWEEVARAIPGRTVREVVSHFKHLEVDVQQIESGQVPLPAYGGGASSFTLQWDGYGPGPGDFRHGYRFAGGCGRRHHGRTPEQERKKGVPWTEEEHRLFLLGLKKYGKGDWRNISRNFVQTRTPTQVASHAQKYFIRLNSGGKDKRRSSIHDITTVNLTDDQPPSPSQSSLITSQSNAPAPAPGPAPAAGICQVPLAADAKRHGARTLPFSSPNRTSAAPAYRMEFHDQQGLQCGPLHDQLLASQSVLF

SEQ ID NO: 8349 - protein, 295 aa, Zea mays
  Clone ID: TF_ZmC42_41.pep
MMRETYMDVLPPVDHIAARSNWFPAAARLWTAAENKQFERALAGLDLCRPDWEEVARAIPGRTVREVVSHFKHLEVDVQQIESGQVPLPAYGGGASSFTLQWDGYGPGPGDFRHGYRFAGGCGRRHHGRTPEQERKKGVPWTEEEHRLFLLGLKKYGKGDWRNISRNFVQTRTPTQVASHAQKYFIRLNSGGKDKRRSSIHDITTVNLTDDQPPSPSQSSLITSQSNAPATAPAAGICQVPLAADAKRHGAGTLPFSSPNRTSAAPAYRMEFHDQQGLQCGPLHDQLLASQSVLF

SEQ ID NO: 8350 - protein, 295 aa, Zea mays
  Clone ID: TF_ZmC42_48.pep
MMRETYMDVLPPVDHIAARSNWFPAAARLWTAAENKQFERALAGLDLCRPDWEEVARAIPGRTVREVVSHFKHLEVDVQQIESGQVPLPAYGGGASSFTLQWDGYGPGPGDFRHGYRFAGGCGRRHHGRTPEQERKKGVPWTEEEHRLFLLGLKKYGKGDWRNISRNFVQTRTPTQVASHAQKYFIRLNSGGKDKRRSSIHDITTVNLTDDQPPSPSQSSLITSQSNAPAPAPAAGICQVPLAADAKRHGAGTLPFSSPNRTSAAPAYRMEFHDQQGLQCGPLHDQLLASQSVLF

SEQ ID NO: 8351 - protein, 249 aa, Zea mays
  Clone ID: TF_ZmC17859_1.pep
MDAISSLLLQEGWRKGPWTALEDRLLTEYVQQHGEGSWNSVAKLTGLRRSGKSCRLRWVNYLRPDLKRGKITPDEETVILQLHAMLGCRWSAIARCLPGRTDNEIKNYWRTHFKKARPSRRARAQLLHQYQQQQEEERRQYLQSLQLLQQEQQQQQLLLQQQSQQLVVKQQQLEQQSPPEPDHQAVMAMLDSQQSTAECYCSPVPVVPEQCCALPADDDDAMLWDSLWRLVDGDGRGCGDGDDSSGVAY

SEQ ID NO: 8352 - protein, 236 aa, Zea mays
  unsure (1)..(236): unsure at all Xaa locations
  Clone ID: TF_ZmC1193_2.pep
MGRSPCCEKAHTNKGAWTKEEDDRLIAYIKAHGEGCWRSLPKAAGLLRCGKSCRLRWINYLRPDLKRGNFSDEEDELIIKLHSLLGNKWSLIAGRLPGRTDNEIKNYWNTHIRRKLTSRGIDPVTHRAINSDHAASNITISFEAAAQRDDKGAVFRRDAEPTKAAAAAITHVDHHHRSNPHHQMDXXPGKPLKCPDLNLDLCISPPSHEGPMVDTKPVVKEEAGAGXVGVVGLCFS

SEQ ID NO: 8353 - protein, 432 aa, Zea mays
  Clone ID: TF_ZmC21016_1.pep
MESMAQERDALDSPALSIDKRLRSDAVESPLVDDATQPKEGADGYPVKVRKPYTITKQREKWTEEEHGKFLEALKLYGRSWRQIQEHIGTKTAVQIRSHAQKFFSKVVREPGASNSIEIPPPRPKRKPLHPYPRKCADSTVTNAPMGEPKNAPVSSPSGSDQENGSPVSVLSAMQSDAFGSSISNPSTGGTSPASSDDGNNVPEIVNGEENLLTQQIEDRSHQESKQDNSDGELSEEDSSRVQETSLKLFGKTVIIPDPKKVCSSDGGAGDDTQEVMQTSWVGGGVAAYPAHNGWFLPFHSFPAHMYESGDARISPLHMWWPYYGFPAGHPRGFGTGLLNEGAIESDADNSPSVETNSDRTGNVHVQTTTPTIHNNAVKESVGPVEMPESGPSIELKPSANSAFVRVKPSSSVSGDQSLVRGFVPYKRCKVE

SEQ ID NO: 8354 - protein, 212 aa, Zea mays
  Clone ID: TF_LIB4764-081-R1-K1-H2.pep
MTPVVLRLFGVDVRRVGASGEPEESPMDLRKSSSMPDLTINPLLTPEEKEGCKGYASDDAELASGQQKRRRRKAQDRKKGIPWTEEEHRKFLDGLRQLGKGDWRGISKGFVTTRTATQVASHAQKYFLRQTNPGMKKRRASLFDVGIADYKDNQVPGPQSIVTAKPAPTQEIIHTDRGDVPIPRRYRGLGEILGSNMQVNQLTDYYYFHKNS

SEQ ID NO: 8355 - protein, 281 aa, Zea mays
  Clone ID: TF_ZmC13262_1.pep
MDMDRPEEEGQQRRETMTPVLLRLFGVDVHRGGGSGEPEESPMDLRKSSSMPDLTINPLLSPEEKEGCKGYASDDAELASGQQKRRRRKAQDRKKGIPWTEEEHRKFLDGLRQLGKGDWRGISKGFVTTRTATQVASHAQKYFLRQTNPGMKKRRASLFDVGIADYKDNQVPGPQSIVAAKPAPTQEIIHTDRGDVPIPRYRGLGEILGSNMQVNQLTDYYYFNKNSHVPAGTSLSMASGLETASTVDSLELSIAVNGLELSIAPPSRCVCGGAAGAIKVL

SEQ ID NO: 8356 - protein, 249 aa, Zea mays
  Clone ID: TF_ZmC16180_1.pep
MCTRGHWRPSEDEKLKELVALYGPHNWNAIAEKLQGRSGKSCRLRWFNQLDPRINRSPFSEEEEELLLASHRVHGNRWAVIARLFPGRTDNAVKNHWHVIMARRCRERMRLSNRRAGGAASGAGAGAVVATGAAAEDGSNPRSANKKPRPDASGMASLLDKYRREFSAAVPFAINHDSNQQQGYCSNTNEDANKSVEFYDFLQVNANSSDTKCGSSIEEQEAESRDDDQAEGQVQFIDFLEVGASHRRR

SEQ ID NO: 8357 - protein, 262 aa, Zea mays
  unsure (1)..(262): unsure at all Xaa locations
  Clone ID: TF_ZmC14028_1.pep
MGRSPCCEKMGLKRGPWTAEEDRILVAHVERHGHSNWRALPKLXQAGLLRCGKSCRLRWINYLRPDIKRGNFSREEEDAIIQLHQMLGNRWSTIAARLPGRTDNEIKNVWHTHLKKRLEPKPASQQAPKRKPTKKQQPQPEPEPVTTLEGPAGAVPPVSPERSLSTTTSTTTSTADYSAASSLENAGDSFTSEEDYYQIDDSFWSETLAMTTTVDSFESGVQQAEGSFGKSAAAPSSTNDDMDFWLKLFMQASDMQNLPQII

SEQ ID NO: 8358 - protein, 217 aa, Zea mays
  Clone ID: TF_UC-ZMFLB73085C02_FLI.pep
MGRPPCCDKMGVKKGPWTPEEDLMLVSYVQEHGPGNWRAVPTNTGLMRCSKSCRLRWTNYLRPGIKRGNFTEQEEKLIVHLQALLGNRWAAIASYLPKRTDNDIKNYWNTHLKKKLKNMQGGEGGAGGKRPAVPKGQWERRLQTDIHTARQALRDALSLEPSATPLAKVEPLPTAPGCATYASSADNIARLLEGWLRPGSGKGPEASGSTSTTATTR

SEQ ID NO: 8359 - protein, 242 aa, Zea mays
  Clone ID: TF_ZmC13187_2.pep
MVTVREETRKGPWTEQEDLQLVCTVRLFGERRWDFIAKVSGLNRTGKSCRLRWVNYLHPGLKRGRMSPHEERLILELHARWGNRWSRIARRLPGRTDNEIKNYWRTHMRKKAQERKRNMSPSSSSSSLTYQSGYPDTPSTIGVEGQELHGGSGCITSILKGTPPDMDGYPMDQIWMEIEAPQMPSEESFVGGNHNVCSSLATPLPPPTVWEYYPDACWKVDDEIKMATQFQFGYSEGVGPCF

SEQ ID NO: 8360 - protein, 376 aa, Zea mays
  Clone ID: TF_1491932.pep
MGRAPCCEKVGLKRGRWTAEEDQLLANYIAEHGEGSWRSLPKNAGLLRCGKSCRLRWINYLRADVKRGNISKEEEDIIIKLHATLGNRWSLIASHLPGRTDNEIKNYWNSHLSRQIHTYRRKYTAGPDDTAIAIDMSKLQSADRRRGGRTPGRPPKASASRTKQADADQPGGEAKGPAAAASSPRHSDVVNPGPNQPNSSSGSTGTAEEEGPSSEDASGPWVLEPIELGDLVWGEADSEMDALMPIGPGGTTRLPSKGLARSAERPRWTTCSTWTGMASRPICGAGRSRTSTARSCGRPPSRWKLLLLLLLRRRPAPRTIASWRRSRLGSCPTRSDGSGHRTDQTDQPRWPGHMVDAASRRCSCVQFFFLFCRFCS

SEQ ID NO: 8361 - protein, 201 aa, Zea mays
  Clone ID: TF_ZmC1193_8.pep
MGRSPCCEKAHTNKGAWTKEEDERLVAYVRAHGEGCWRSLPKAAGLLRCGKSCRLRWMNYLRPDLKRGNFTDDEDELIIRLHSLLGNKWSLIAGQLPGRTDNEIKNYWNTHIKRKLLARGIDPKTHRPLGAGADAAAPPGVVAHRALLHRAALVELAVKPAPAESSDDGGRSSGTSSGGGGGASVEEPRCPDLNLDLSVGP

SEQ ID NO: 8362 - protein, 335 aa, Zea mays
  Clone ID: TF_ZmC29713_1.pep
MGRAPCCEKVGLKRGRWTAEEDQLLANYIAEHGEGSWRSLPKNAGLLRCGKSCRLRWINYLRADVKRGNISKEEEDIIIKLHATLGNRWSLIASHLPGRTDNEIKNYWNSHLSRQIHTYRRKYTAGPDDTAIAIDMSKLQSADRRRGGRTPGRPPKASASRTKQADADQPGGEAKGPAAAASSPRHSDVVNPGPNQPNSSSGSTGTAEEEGPSSEDASGPWVLEPIELGDLVWGEADSEMDALMPIGPGGHDSAALEGLGAVGCEAQVDDLFDMDWDGFAAHLWGGPEQDEHSAQLRQAAEPLEVAAAAAAATAARTPDDRELEAFETWLLSDSF

SEQ ID NO: 8363 - protein, 217 aa, Zea mays
  Clone ID: TF_ZmC234163_1.pep
MRAMAEVMQEGCVENRQPLAASSSSVSDGSSCGGGERAGTSPPVSSSGNSISVLRRTSGPIRRTKGGWTLKEDETLRKAVEAFKGRNWKKIAEFFQDRTEVQCLHRWQKVLNPELIKGPWTQEEDEKIIDLVRKYGPTKWSIIAKSLPGRIGKQCRERWHNHLNPEIRKDAWTPEEERALIDAHQVFGNKWAEIAKVLPGRTDNSIKNHWNSSLEKK

SEQ ID NO: 8364 - protein, 169 aa, Zea mays
  Clone ID: TF_LIB4761-014-R1-K1-G7.pep
MMRDGVPPSVAGSGGAAGGDGPRRCSQCGHHGHNARTCTGRPVKLFGVRIGGKPIRKSASMGNIAHLAAEGSGGREEGYGSDGERPHKKRGEAWTEEEHKKFLLGLNKLGKGDWRGISRKYVVSRTPTQVASHAQKYFNRQTNVPGRKRRSSLFGLVIVDPSAQLPLSR

SEQ ID NO: 8365 - protein, 370 aa, Zea mays
  Clone ID: TF_ZmC2821_1.pep
MMRDGVPPSVAGSGGAAGGDGPRRCSQCGHHGHNARTCTARPVKLFGVRIGDKPIRKSASMGNIAHLAAEGSGGREEGYGSDGERPHKKRGEAWTEEEHKKFLLGLNKLGKGDWRGISRKYVVSRTPTQVASHAQKYFNRQTNVHRRKRRSSLFDMVIDDPSDQLPLSRSSSQEMEQQHLDDPQPVAALPAPVVSPATVVPPVPVEVSASVPSPVQVPVPVSAPVMTSQPMEQDSDTTSSIAGEAGTVMPGAMPPYLYPMMIPPPYYHTAFVPMPCYGYVPFYCEPQGAAQAPHEVVKPVAVHSTPPLNAKDLYNMSELSLKGDSNANGGVPASPLPPKPIGRPERQSAFHGKGPTPTGGSSGGLIPAVK

SEQ ID NO: 8366 - protein, 214 aa, Zea mays
  Clone ID: TF_ZmC2204_2.pep
MVTVREEMRKGPWTEQEDIQLVCTVRLFGDHRWDFIAQVSGLNRTGKSCRLRWVNYLHPGLKHGRMSPQEERIIIELHARWGNRWSRIARRLPGRTDNEIKNYWRTHMRKKAQERKMGMPSPSSSSSSLTYQTCLLDTIPVIGMGSGDTHNGSCVTSTLENTQSVMDGYPMDQIWKEIEAPHAPNLLSIAEGKEKTCSSSPCHLPSPCMDYNAL

SEQ ID NO: 8367 - protein, 131 aa, Zea mays
  Clone ID: TF_LIB4739-022-Q2-K1-A2.pep
MATTQSCQSRSSACSKAAACFPAAVAVDEEHGHHSHQLKGGAQEEAENDNNKPELRRGPWTVDEDLTLVNYIADNGEGRWNNLARAAGLKRTGKSCRLRWLNYLRPDVKRGNFSADEQLLILDLHTRWGNR

SEQ ID NO: 8368 - protein, 218 aa, Zea mays
  Clone ID: TF_UC-ZMFLMO17291G03_FLI.pep
MGRSPCCEKAHTNKGAWTKEEDDRLVAYIKAHGEGCWRSLPKAAGLVRCGKSCRLRWINYLRPDLKRGNFTEEEDELIIKLHSLLGNKWSLIAGRLPGRTDNEIKNYWNTHIRRKLLSRGIDPVTHRPINEHTSNITISFEDWGQGKALKCPDLNLDLCISPPCQEEEEAMLLRPVKREEAGLCFSCSLGLPKSADCKCSNFLGLRTAMLDFRRLEMK

SEQ ID NO: 8369 - protein, 308 aa, Zea mays
  Clone ID: TF_ZmC2941_1.pep
MGAEAAERDRIRGPWSPEEDEALRRLVERHGARNWTAIGRGVPGRSGKSCRLRWCNQLSPRVARRPFTADEDAAIARAHARLGNRWAAIARLLPGRTDNAVKNHWNCSLKRKLGAAAAASGSAVSADDSAAAAETEARRGKMMMMSISPPDSPSGSGSGSDRSDLSSHGAGSGSGSGSGQIYRPVAARSGGFEPADCAMSRPQEEDPLTALSLSLPGTDQRFHHHSAAADSHFQELPPSPSSPAPSAYPFSPEFAAAMQQLIRTEVQRYMASAGLRAGCGAVGATDLCMPQLVDGVMRAAAEQVGRMQ

SEQ ID NO: 8370 - protein, 253 aa, Zea mays
  Clone ID: TF_ZmC28328_1.pep
GSDDEPAVRKGPWTLEEDLILVSYISQHGEGSWDNLARAAGLNRNGKSCRLRWLNYLRPGVRRGSITAGEDTVIRELHARWGNKWSKISKHLPGRTDNEIKNYWRTRIQQKKQQGAKTTQQREPSTTASSGAGDDYWCTKPDPNQQAHYCLQKAAMAAATATTSAVVVSSEDDAPSAALTSQDSSAAAGGDWYMHQQQQMCYPYCSELSFVAAGHDETVGLDAVTMQFLSSHFTASFWTNGVDDFWESKPIDY

SEQ ID NO: 8371 - protein, 267 aa, Zea mays
  unsure (1)..(267): unsure at all Xaa locations
  Clone ID: TF_ZmC13262_2.pep
LAATNSASPSASSSSSLVSVEEAXPEKMAHGYLSDGLMGRAAQERKKGVPWTEDEHRRFLAGLEKLGKGDWRGISRHFVTTRTPTQVASHAQKYFLRQSSLTHKKRRSSLFDVVENAERAATSSIKGMERLRLKDAITTATATGSAEPGTGTTAQLPPALSLGVGRPPARPDHAALPPSSLLSLQLPRCSAGIGRTAPSLALAPPKHSHPSSPLTAAKAGGLAPDLELKISTARQSEHQQQVQMGPSLPPPPPPPQRTPFLGTIRVT

SEQ ID NO: 8372 - protein, 192 aa, Zea mays
  Clone ID: TF_ZmC42_22.pep
MMRETYMDVLPPVDHIAASRSGGWFPGAVRLWTAAENKQFERALAGLDLCRPDWEKVARAIPGRTVREVVSHFKSLQVDVQQIESGLVPMPVYGAGAGSFTLQWDGCYGPADSRHNGYRFGNGGCGRRHHGRTPEQERKKGVPWTEEEHRLFLLGLKKYGKGDWRNISRNYVQTRTPTQVASHAQKYFIRLN

SEQ ID NO: 8373 - protein, 324 aa, Zea mays
  Clone ID: TF_ZmC1597_2.pep
MGRPPCCDKVGVKKGPWTPEEDLMLVSYVQEHGPGNWRAVPTNTGLMRCSKSCRLRWTNYLRPGIKRGNFTDQEEKLIIHLQALLGNRWAAIASYLPERTDNDIKNYWNTHLKKKLKKMQAGEGGGGDGDGAAGASEGGAVATAGAGGKRPAVPKGQWERRLQTDIHTARQALRDALSLEPSPSAPPPAKVEPLPATAPGYKTYASSAENIARLLEGWLRPGSGGGKGPEASGSTSTTATTQQRPQCSGEGAASASASHSGGAPANAAAQTPECSTETSKVAGAGSAPPAFSMLESWLLDDGMGHGEDGLMTDVVPLGDPSEFF

SEQ ID NO: 8374 - protein, 548 aa, Zea mays
  Clone ID: TF_ZmC21354_1.pep
ANSGDGTPPSPRELYTIPASSGWFRWDGIHETERRALPEFFGGAGGAGFGTATRNPRIYREYRDFIIAKYREDPARRLTFTEVRRALVGDVTLLRKLFAFLDSSGLINFSASSSSVPASRQQEVGVVVEAPVGLQVTPRPPASYFAEEKRVAAGGEKENEFRLPPLTSYSDVFGEWAPGKAPICGFCGEECNGADVETLQDGFKVCSKCSKSNNDNIKEEANKCPGDKKENMENHASSAWTDTETLLLLEGVLKHGDDWDLIAQHVRTKNKSECIAMLIQLPFGEHMLGTINGKFVSRLHINQTDDGKTNQHIMESSSHSTEMADGMQIDGSEDSADKSVEEYPTKRRRLFFSMDATTSLMEQLAILTTAASPDVAAAAADAAIKAFGNENPQARKAFRLNEQEYKTKAFASNHVQQIDHKVSNKDTAMHGQSGSDKQEKKFIASAYQLRAAVATAVGVAAARAKMLADQEEREMELLMASVIETQLRKMQYKIKHFEELDSLMDQEYTAIQQMKGSLMNEWIKVLEHAFRAGVSLPRDELLTKLLLN

SEQ ID NO: 8375 - protein, 210 aa, Zea mays
  unsure (1)..(210): unsure at all Xaa locations
  Clone ID: TF_LIB4766-044-R1-K1-H8.pep
MTRRCSHCSHNGHNSRTCPNRGVKIFGVHLTDGSAIRKSASMGNLSLLSAGSTSGGASPADGPDLADGGGGYASDDFVQGSSSASRDRKKGVPWTEEEHRRFLLGLQKLGKGDWRGISRNFVVSRTPTQVASHAQKYFIRQSNMSRRKRRSSLFDMVPDESMDLPPLPGSQEPETSMLNQPPLPPAVXGEVGSMESDTSAVAEKSGASAL

SEQ ID NO: 8376 - protein, 283 aa, Zea mays
  Clone ID: TF_ZmC152_2.pep
MVSASAPPPPPQAQSDAAGSGEEASKKVRKPYTITKSRESWTEQEHDKFLEALQLFDRDWKKIEAFVGSKTVIQIRSHAQKYFLKVQKNGTSEHVPPPRPKRKAAHPYPQKASKNEPNYGLKTDSSSIHRNSGMNVSVSSWPHRSIPQAVASSMVKDLGAGTPGPNNFCSSSTEGPPRTWQPGETNGPINQIPSLRLMPDFAGVYSFLGSVFDPSTSDHLQKLKEMNPIDVETALLLMRNLSINLTSPDFEDQRKLLSLYSASDGPELGSSRSSALATSAPFM

SEQ ID NO: 8377 - protein, 317 aa, Zea mays
  unsure (1)..(317): unsure at all Xaa locations
  Clone ID: TF_ZmC34_1.pep
MTRRCSHCSHNGHNSRTCPNRGVKIFGVHLTDGSAIRKSASMGNLSLLSAGSTSGGASPADGPDLADGGGGYASDDFVQGSSSASRDRKKXVFLGLKKNTGXVFAGITKAWERGXWRGISRNFVVSRTPTQVASHAQKYFIRQSNMSRRKRRSSLFDMVPDESMDLPPLPGSQEPETSMLNQPPLPPPVEEEVESMESDTSAVAESSGASALMPESLQPTYPMIVPAYFSPFLQFSVPFWPNQEDGGDLPQETHEIVKPVAVHSQNPINVDELVGMSKLSIWEHGQETVSTSLSLNLLGGQNRQSAFHANPQTRAQA

SEQ ID NO: 8378 - protein, 317 aa, Zea mays
  Clone ID: TF_ZmC34_2.pep
MTRRCSHCSHNGHNSRTCPNRGVKIFGVRLTDGSAIRKSASMGNLSLLSAGSTSGGASPADGPDLADGGGGYASDDFVQGSSSASRERKKGVPWTEEEHRRFLLGLQKLGKGDWRGISRNFVVSRTPTQVASHAQKYFIRQSNMSRRKRRSSLFDMVPDESMDLPPLPGSQEPETSVLNQPPLPPPVEEEEEVESMESDTSAVAESSAASALMPESLQPTYPMIVPAYFSPFLQFSVPFWPNQEDGGDLPQETHEIVKPVAVHSKNPINVDELVSMSKLSIGEPGQETVSTSLSLNLLVGQNRQSAFHANPQTRAQA

SEQ ID NO: 8379 - protein, 215 aa, Zea mays
  Clone ID: TF_ZmC34_3.pep
MTRRCSHCSHNGHNSRTCPNRGVKIFGVHLTDGSAIRESASMGNLSLLSAGSTSGGASPADGPDLADGGGGYASDDFVQGSSSASRDRKKGVPWTEEEHRRFLLGLQKLGKGDWRGISRNFVVSRTPTQVASHAQKYFIRQSNMSRRKRRSSLKPSNPIQTRQARNPPMAHRVLLLLSLASAAVAAAVDAEDPLIRQVVPGGDDNDLELNAESTF

SEQ ID NO: 8380 - protein, 314 aa, Zea mays
  unsure (1)..(314): unsure at all Xaa locations
  Clone ID: TF_ZmC34_4.pep
MTRRCSHCSHNGHNSRTCPNRGVKIFGVRLTDGSIRKSASMGNLSLLGGSTSGGGGASPADVGHDAAAEGYASDDFVQGSSSANREREKGVPWTEEEHRRFLLGLQKLGKGDWRGISRNFVVSRTPTQVASHAQKYFIRQANMSRRKRRSSLFDLVPDESDLPPLPGNQEPEAQILNHPPLPPPXREEEVESMESDTSVIAESSSASAIMPESLQPSYPMIVPAYFSPFLQFSVPFWPNQEDGGDLPQETHEIVKPVAVHSQNPINVDELVGMSKLSIWEHGQETVSTSLSLNLLGGQNRQSAFHANPQTRAQA

SEQ ID NO: 8381 - protein, 90 aa, Zea mays
  Clone ID: TF_LIB3592-047-Q1-N6-E1.pep
MGRAPCCGKVGLKKGRWTREEDEILARYIEEHGEGSWRSLPKNAGLLRCGKSCRLRWINYLRAGLKRGNITEEEEDVIVKLHATLGNRAT

SEQ ID NO: 8382 - protein, 141 aa, Zea mays
  unsure (1)..(141): unsure at all Xaa locations
  Clone ID: TF_LIB4969-013-A1-XP1-F1.pep
MGRHSCCYKQKLRKGLWSPEEDEKLMNHITKHGHGCWSSIPKLAGLQRCGKSCRLRWINYLRPDLKRGAFSQDEEDLIIELHAVLGNRWSQXAAQLPGRTXYEIKNLWNSCIKKELRQKGIDPNTHXPLTXADRSGAAPPS

SEQ ID NO: 8383 - protein, 243 aa, Zea mays
  Clone ID: TF_LIB4742-042-R1-K1-A11.pep
MGRSPCCCHDAGVKKGPWTEEEDRALVDHIQRHGGHVSSWRNLPKAAGLNRCGKSCRLRWTNYLRPDIKRGNFTDDEERLIIGLHAQLGNRWSTIATHLDGRTDNEIKNYWNTHIRKKLLRMGVDPVTHQRLPPDDLLLAVSASPTTTILSAAASQLRGLNTALMQVQALQFLLQAVSGVGNDVNAAAAAANGGGGLVPSLSAAADNNAVLNASRSVVPGFQDLQLTTMTRASSRVSRESRVS

SEQ ID NO: 8384 - protein, 230 aa, Zea mays
  Clone ID: TF_ZmC10786_1.pep
MGCKACQKPKVQYRKGLWSPEEDEKLRDYILRYGHGCWSALPLKAGLQRNGKSCRLRWINYLRPGLKHGVFSREEEETVMSLHAKLGNKWSQIARHLPGRTDNEVKNYWNSYLKKRVEGGAQGKHGAADPATPGRSDVHGSPDDPSENNGQGSVVSRPANSDSSEPAVESSSADDSSCLTVTEPAGARASATAAVRPHAPVLPKVMFADWLDMDYGTSLVALGPDAGVFD

SEQ ID NO: 8385 - protein, 204 aa, Zea mays
  unsure (1)..(204): unsure at all Xaa locations
  Clone ID: TF_21215256.pep
MGRSPCCEKAHTNKGAWTKEEDDRLVAYIKAHGEGCWRSLPKAAGLVRCGKSCRLRWINYLRPDLKRGNFTEEEDELIIKLHSLLGNKWSLIAGRLPGRTDNEIKNYWNTHIRRKLLSXXIDPVTHRPINEHTSNITISFEDWGQGKALKCPDLNLDLCISPPCQEEEEAMLLRPVKREEAGLCFSCSLGLPTAMLDFRRLEMK

SEQ ID NO: 8386 - protein, 218 aa, Zea mays; identical to SEQ ID NO: 8368
  Clone ID: TF_ZmC1193_3.pep

SEQ ID NO: 8387 - protein, 415 aa, Zea mays
  unsure (1)..(415): unsure at all Xaa locations
  Clone ID: TF_ZmC3305_2.pep
MERSRPGAAPKPSPEEEVAAEGHAHGDDVTGQEEEEEATPVVLKKGPWTASEDAMLMDHVRHHGEGNWNAVQRMTGLLRCGKSCRLRWTNHLRPNLKKGSFSPDEELLIAQLHAQLGNKWARMAAHWLAWCAXQLPGRTDNEIKNYWNTRTKRRQRAGLPVYPPEVQLHLALSKRCHYDDYDFPPLASSPQLSATTTTDVQALGAGPGYASSRPAPLDLARSQLAATTTQQTAQFLSPPPFSAPSSPWAKPFARNAQYFQLAHSSPVSPSTPTGPVHPAMPDLSLGGHGARAAAAADQSRLPPLSPSPGPRVELPSNQYGQPAPPTSAAAVAAGLALPDHQNAASLEQMLQELHDVIKVEPQALVPASGGGAALERHDCGVSVPESRISGLQRRGDDMDTLFGLVHPALGAPETA

SEQ ID NO: 8388 - protein, 164 aa, Zea mays
  Clone ID: TF_ZmC3305_1.pep
MERSRPGAAPKPSPEEEVAAEGHAHGDDVTGQEEEEEATPVVLKKGPWTASEDAMLMDHVRHHGEGNWNAVQRMTGLLRCGKSCRLRWTNHLRPNLKKGSFSPDEELLIAQLHAQLGNKWARMAAHVSTLSFALDNKFIYGEWRRPADVTDVCEFVPRANSELT

SEQ ID NO: 8389 - protein, 192 aa, Zea mays
  Clone ID: TF_ZmC659_5.pep
MGRAPCCEKMGLKRGPWTPEEDKILAAHIHSHGHGNWRALPKQAGLLRCGKSCRLRWINYLRPDIKRGNFTDEEEQSIIQLHQLLGNRWSAIAARLPGRTDNEIKNVWHTHLKKRLDPGAQEQLEEASAAKKRKKPAAAARKREGKIKMRKLDALTAKAAPVLSSPRRSVSSTLTESRHRPRAGEEQHGNSG

SEQ ID NO: 8390 - protein, 197 aa, Zea mays
  unsure (1)..(197): unsure at all Xaa locations
  Clone ID: TF_ZmC17037_1.pep
MGRSPCCEQAHTNKGAWTKEEDQRLIAYIKAHGEGCWRSLPKAAGLLRCGKSCRLRWINYLRPDLKRGNFSEEEDELIIKFHELFGNKWSLIAGRLPGRTDNEIKNYWNTHIKRKLLARGMDPQTHRPLAAAPAGGPQQQHCHYQMEPQKRAAAADHXRGRRCHQLAGRPAAAAATTTRRRRWRHRRGGGSATSTST

SEQ ID NO: 8391 - protein, 242 aa, Zea mays
  Clone ID: TF_ZmC30034_1.pep
MNPNFNSVWSAPEINMMNSLITSHIANNTYTNNNQHVVASRSAIVNHNNFGMPTEVVPPVDNMDMMQGYLMDDTDAMRLVQGQQHMPNVVPNQRRHAVKFWTTDEHRNFLRGLEVFGRGKWKNISKYFVPTRTPVQISSHAQKYFRRQECTTEKQRFSINDVGLYDTQPWVRQNNSSSSWEALTFTAGRAYNSTNYCAFNSLPYASSQASNNQVATWITDQQATASSSIAPPATEESQIYNR

SEQ ID NO: 8392 - protein, 297 aa, Zea mays
  unsure (1)..(297): unsure at all Xaa locations
  Clone ID: TF_ZmC337_1.pep
MARKCSHCGNCGHNSRTCGRETMLCEAGDARNGGGGLRLFGVQVRIGGGVGAGSASMKKSYSMDCLQLAAPIGCSASSCQSPSTXSSSSSLLLMSIEEGSERGAPNGYLSDGPHGRAVQERKKGVPWSEEEHRQFLSGLEKLGKGDWRGISRSYVPTRTPTQVASHAQKFFLRQSSLGKKKRRSSLFDMVPICENSASISDPLSSEGASTSLSLNVPRHGVTSVSERAALDLNSTEEDDSGADASSASASGAGTRPPFPAAQTEPLQPSSLGRGRGHHCSPLDLELGMSLPAPSIGT

SEQ ID NO: 8393 - protein, 194 aa, Zea mays
  Clone ID: TF_ZmC337_5.pep
NNRLVGNVAAGVFLSISNTAGVPWSEEEHRQFLSGLEKLGKGDWRGISRSYVPTRTPTQVASHAQKFFLRQSSLGKKKRRSSLFDMVPICENSASISDPLSSEGASTSLSLNVPRHGVTSVSERAALDLNSTEEDDSGADASSASASGAGTRPPFPAAQTEPLQPSSLGRGRGHHCSPLDLELGMSLPAPSIGT

SEQ ID NO: 8394 - protein, 205 aa, Zea mays
  Clone ID: TF_ZmC42_49.pep
MDFHHSSSSSVHAHAAAARPWIKAEDFNPSSSVHAAGPPAVPAAARPWNRAEDKVFESALVAWPEHTPDRWALVAAQLPGRTPRDAWEHYEALVADVDLIERGAVDAPSCWDDDDGDHQVRGAGADRARREARRPGIPWSEEEHRLFLQGLEKYGRGDWRNISRFSVRTRTPTQVASHAQKYFNRQFNPASRNSKRKSIHDITTP

SEQ ID NO: 8395 - protein, 151 aa, Zea mays
  Clone ID: TF_168591.pep
MGRTPCCEKVGLKRGRWTAEEDQLLANYIAEHGEGSWRSLPKNAGLLRCGKSCRLRWINYLRADVKRGNISKEEEDIIIKLHATLGNRRHLMIEADYSPPSTVRCLPRGALAYLTLPRQSPFQTARITYDRIGSALLRSVRFCFRCVPSRW

SEQ ID NO: 8396 - protein, 302 aa, Zea mays
  Clone ID: TF_ZmC20189_1.pep
MGCKACDKPKPNYRKGLWSPEEDQKLRDYILLHGHGCWSALPAKAGLQRNGKSCRLRWINYLRPGLKHGMFSPEEEETVMSLHATLGNKWSRIARHLPGRTDNEVKNYWNSYLKKRVEAKDQGPSTPAPAASNSDDDSHCVKQRRDDGDTAAGANGPADSGASEPRESSSADDSSCLTDPHACRPHAPVPPKVMFADWLDMDMDYVGGALPSTAPAAPGLLGAAGVATASTGDRDRDQHQVMSMSQGSVQVDGPSGADVSLHGFGDSGAGCWEFQEHFDAIDHMQAAGFCDLLSMTDYFGLD

SEQ ID NO: 8397 - protein, 340 aa, Zea mays
  Clone ID: TF_ZmC20189_3.pep
MGCKACDKPKPNYRKGLWSPEEDQKLRDYILLHGHGCWSALPAKAGLQRNGKSCRLRWINYLRPGLKHGMFSPEEEETVMSLHATLGNKWSRIARHLPGRTDNEVKNYWNSYLKKRVEGKDQGPSTPAPAASNSDDDSHCVKQRRDDDGTADSGASEPRESSSADDSSCLTDPHACRPHAPVPPKVMFADWLDMDYVGGALPATAPAAPGLLGAAGVATASTGDRDQHQVMSMSQGSVQVDGPSGADVSLHGFDDSGAGCWEFQEHFDAIDHMQGGRLLRPALHERLLRPRLDSNPGWSSIVGERICVFFYLHFVRSLGERLACVVYCRVRIDRGILKSR

SEQ ID NO: 8398 - protein, 76 aa, Zea mays
  unsure (1)..(76): unsure at all Xaa locations
  Clone ID: TF_LIB3061-045-Q1-K1-A8-R2B.pep
MVMPPCCDKVGEKIGPWTLXEDLMLVCYDQELGPENWRAAPTNSGLMRCSXSCKLRWTIYLRPGMKRVNFTDLEEK

SEQ ID NO: 8399 - protein, 134 aa, Zea mays
  Clone ID: TF_ZmC42_23.pep
MENCEVLFPGGSSGANAFTRPEQERKRGQPWTEEEHKLFLLGLKKYGRGDWRNISRNFVQTRTPTQVVSHAQKYFMRHNSGGKDKRRSSIHDITTVKLSDDQDQPPSSPSQSSLITDQFNALALTSGAAYSPSN

SEQ ID NO: 8400 - protein, 304 aa, Zea mays
  Clone ID: TF_ZmC42_54.pep
MMRETYMDVLPPVDHIAASRSGGWFPGAARLWTAAENKQFERALAGLDLCRPDWEKVARAIPGRTVREVVSHFKSLQVDVQQIESGLVPMPVYGAGAGSFTLQWDGCYGPADSRHNGYRFGSGGCGRRHHGRTPEQDRKKGVPWTEEEHRLFLLGLKKYGKGDWRNISRNYVQTRTPTQVASHAQKYFIRLNSGGKDKRRSSIHDITTVNLTDDERAPSPSRSSLITTTSQPNAPAPAAAVIGGPFSSAAAAEAKQHQHGAGNLPPNRTSVVPAVYRMDDSQDHGLQCGPLRHQLVASHHSVLF

SEQ ID NO: 8401 - protein, 370 aa, Zea mays
  Clone ID: TF_ZmC24814_1.pep
MNSFQSYNTDYFYAHGAQTQNFCAEDLLNFDSTVFLDDSESESISTLQSGSKKITKTSPAVQAKQASYKKSKRARNPWTPKEDAKLMELMKKYGQSWAMISSQLEGRTGKQVRDRYLNKLRPNIKLGDWSVQEDELVVKLLKEVGNRWSLIANHLPGRTEGQVKNRFYSFIKKRLQPDGTLCQISDSRTSSEEYTSFSNSPQPETGFDFGYEFDVNAANGSAINFAPQTFNCAITKGAYVTEEEIYSEGSTTQGPTSQVGNSPFRGEVDPTDVISYDLPEAFFYKQPSQHRHFNLAPIEHDSQVDAILTNVTNYFAENNKFYMPSEVDSFFTQAETQGQAPQDDRLNQLSMRKAYLELALAKTLNEMKSL

SEQ ID NO: 8402 - protein, 223 aa, Zea mays
  unsure (1)..(223): unsure at all Xaa locations
  Clone ID: TF_ZmC13187_3.pep
MVTVREETRKGPWTEQEDLXTGLNRTGKSCRLRWVNYLHPGLKRGRMSPHEERLILELHARWGNRWSRIARRLPGRTDNEIKNYWRTHMRKKAQERKRNMSPSSSSSSLTYQSGYPDTPSTIGVEGQELHGGSGCITSILKGTPPDMDGYPMDQIWMEIEAPQMPSEESFVGGNHNVCSSLATPLPPPTVWEYYPEACWKVDDEIKMAPQFQFGYSEGVGPCF

SEQ ID NO: 8403 - protein, 262 aa, Zea mays
  Clone ID: TF_ZmC13187_4.pep
LEAGREATKTKWRTLLCTSFLLPPPLLLPNRLDFIKIILKLEPTSRQRKKSKKTGSQPIQGLNRTGKSCRLRWVNYLHPGLKRGRMSPHEERLILELHARWGNRWSRIARRLPGRTDNEIKNYWRTHMRKKAQERKRNMSPSSSSSSLTYQSGYPDTPSTIGVEGQELHGGSGCITSILKGTPPDMDGYPMDQIWMEIEAPQMPSEESFVGGNHNVCSSLATPLPPPTVWEYYPDACWKVDDEIKMATQYQFGYSEGVGPCF

SEQ ID NO: 8404 - protein, 258 aa, Zea mays
  Clone ID: TF_ZmC13187_5.pep
LGTSRPAGTAQARSNLSSVASTSVLVFASSLKIDKGSNSARALLYLHAGLNRTGKSCRLRWVNYLHPGLKRGRMSPHEERLILELHARWGNRWSRIARRLPGRTDNEIKNYWRTHMRKKAQERKRNMSPSSSSSSLTYQSGYPDTPSTIGVEGQELHGGSGCITSILKGTHPDMDGYPMDQIWMEIEAPEVPSEESFVGGNENVCSSLATPLPPPTVWEYYPEVCWKLDDEIKMAPQFGYIVKELTPASDTIYIGSDY

SEQ ID NO: 8405 - protein, 208 aa, Zea mays
  Clone ID: TF_LIB4729-111-A1-K1-E11.pep
MAAPPVAAALSALHEAQETHGHDDSRAGHARGHWRPAEDAKLKDLVALYGPKNWNLIASKLHGRSGKSCRLRWFNQLDPRVNRRPFSAAEEQRLVAAHRAHGNKWALIARLFPGRTDNAVKNHWHVLTARRQRERTGAPPRRRKPSSSSPAAHHHRAPSPLPFCAGKATRPRSVRRRRRRRRVRRVRVVHLLRRPLLPRLRVRPRRPL

SEQ ID NO: 8406 - protein, 304 aa, Zea mays
  unsure (1)..(304): unsure at all Xaa locations
  Clone ID: TF_ZmC2941_2.pep
MGVESECDRIKGPWSPEEDEALRRLVERHGARNWTAIGRGIPGRSGKSCRLRWCNQLSPQVERRPFTPEEDAAILAAHARLGNRWAAIARLLPGRTDNAVKNHWNSSLKRKLATATATSSGSDAERACKRASPGPGSPTASDRSDLSHGCGAAQVFRPVPRAGGFDAISAADVRPPPPPAVADEDPLTSLSLSLPGXGPVAVGLPPRQRPEPLPGALPLVVPVAAVYSTRLPSAGGSVSVVVXFSGELVAAMQEMIRAEVRKYMSGAGLRAGCGPGAVGEVCMPQLVEGVMRAAAERVGVVTRP

SEQ ID NO: 8407 - protein, 244 aa, Zea mays
  Clone ID: TF_ZmC42_34.pep
TAEEVRRHYEALVEDVAAIEAGRIPLPRYAGEESSAATPEGSGAAGPSTPKDGGGGSGHRREERKGGVGADAGKSCSKAEQERRKGVPWTEEEHRLFLLGLDKFGKGDWRSISRNFVISRTPTQVASHAQKYFIRLNSMNRDRRRSSIHDITSVTAGEVATAGAPITGGGPTAAGAMPMGPGGMKHHHPVPPMGMYGHAPMGHPVAGHMVAPAAVGTPVMFPPGHHSPYVLPVGYPAPPTKMHQ

SEQ ID NO: 8408 - protein, 77 aa, Zea mays
  Clone ID: TF_ZmC177016_1.pep
DEEKLIIHLHSLLGNKWSAIATKLPGRTDNEIKNYWNTHLRKKLLAMGIDPVTHQRRTDLNLLAAGGFTNLLAAANL

SEQ ID NO: 8409 - protein, 155 aa, Zea mays
  unsure (1)..(155): unsure at all Xaa locations
  Clone ID: TF_LIB3600-012-P1-K6-D11.pep
RWTNHLRPDLXXSVWTEEDDMALIKAHKRCGNHWSTIATFLPGRSENAVKNHWNATKRSLKAKRRLKKKSNAQQVPAGQWSVLEEYIRSLYPDLADGAGADQTPPAAEDSPPSSYNLGSYSYGEVISSPASAAAPPGSFDQMTAMGLYLGASSSS

SEQ ID NO: 8410 - protein, 356 aa, Zea mays
  Clone ID: TF_ZmC17058_1.pep
MARRTSGPKKKLRRGLWSPEEDDKLVNHIAKYGHGCWSSVPKLAGLERCGKSCRLRWINYLRPDLKRGAFSQEEEDLIIHLHSMMGNKWSQIASQLPGRTDNEVKNFWNSYVKKKLRQRGIDPATHKPLPLAAEGISSRTAVFSDAELILSSPAAAAGRHMPPPPVAASAAESYVYSYSHSSGGASDGSLQSLSGYNSNSKQTAADHLGAAAAAGYLQQEQDPAAAAAAADALHCGPSGAPAVVLPSVSSSSTLNSMAGLSPAATTTDEQCTNNCSSCSFHSGLEPWLELGSTSGYYGASAAVDHYGAALDELKWSDYVFDGGYGGQPGQGIYGDSKDAVQFVDANALSSSSWCLN

SEQ ID NO: 8411 - protein, 130 aa, Zea mays
  unsure (1)..(130): unsure at all Xaa locations
  Clone ID: TF_LIB4969-008-A1-XP1-D12.pep
MVTVREETRKGPWTEQEDLQLVCTVRLFGERRWDFIAKVSWLNRTGKSCRLRWVNYLHPGLKRGRMSPHEERLILELHARWGNRWSRIARRLPGRTXHEIXNYWRTHMRKKAQERKENMSPSSSSSSLTY

SEQ ID NO: 8412 - protein, 111 aa, Zea mays
  Clone ID: TF_LIB4764-078-R1-K1-F4.pep
MGRAPCCEKVGLKRGRWTAEEDQLLANYIAEHGEGSWRSLPKNAGLLRCGKSCRLRWINYLRADVKRGNISKEEEDIIIKLHATLGNSLHSSAGPWPSGGRKTSSKLATVS

SEQ ID NO: 8413 - protein, 95 aa, Zea mays
  Clone ID: TF_LIB4767-023-A1-K1-E7.pep
MGRAPCCEKVGLKRGRWTAEEDQLLANYIAEHGEGSWRSLPKNAGLLRCGKSCRLRWINYLRADVKRGNISKEEEDIIIKLHATLGNRDTAAHQS

SEQ ID NO: 8414 - protein, 189 aa, Zea mays
  Clone ID: TF_LIB5117-052-A1-PF1-E5.pep
MAEAEGQLAACWGKQDDEWRKGPWTTQEDKLLLDHVAQHGEGRWNSVSKLTGLKRSGKSCRLRWVNYLRPDLKRGKMTPQEESTIVQLHSLWGNRWSTIARSLPGRTDNEIKNYWRTHYKKGKPSKNIERARARFLMQRREMQQQQQQQQQKLLLGQGKDAELASATAEDDVDEKMTGNVGPAATALAD

SEQ ID NO: 8415 - protein, 222 aa, Zea mays
  unsure (1)..(222): unsure at all Xaa locations
  Clone ID: TF_LIB4744-081-Q1-K1-A2.pep
MYALRCTCTAPPVCPHPSALAYLFPLPPVIIATKPNQTRAQEELPRKLRGGARKQAHEGEPGMGRSPCCEKAHTNKGAWTKEEDQRLIAYIRAHGEGSWRSLPKAAGLLRCGKSCRLRWMNYLRPDLKRGNFTGDDDELIIKLHALLGNKWSLIAGQLPGRTDNEIKNYWNTHIKRKLLSRGIDPQTHRPLSGGAGSALTTTXSTAGFPSPGPRPGPGPRPR

SEQ ID NO: 8416 - protein, 188 aa, Zea mays
  unsure (1)..(188): unsure at all Xaa locations
  Clone ID: TF_ZmC1193_14.pep
MGRSPCCEKAHTNKGAWTKEEDQRLIAYIRAHGEGSWRSLPKAAGLLRCGKSCRLRWMNYLRPDLKRGNFTGDDDELIIKLHALLGNKWSLIAGQLPGRTDNEIKNYWNTHIKRKLLSRGIDPQTHRPLSGGAGSALTTTXSTAGFPSPAPAFRPTPTPPPAVXVVPPNAIFARXAPVVDGHSSSGAS

SEQ ID NO: 8417 - protein, 334 aa, Zea mays
  unsure (1)..(334): unsure at all Xaa locations
  Clone ID: TF_ZmC192589_1.pep
MAKQSCCHKKKLRRGLWSPEEDEKLMNHIAKYGHGCWSSVPKLAGLDRCGKSCRLRWINYLRPDLKRGTFSQEEEDLIIHLHSLLGNKWSQIAAQLPGRTDNEVKNFWNSYIKKRLRERGIDPATHQPLAEPAAAATATTTTTVSRRAVFGDVDLIPTTTTTTIQVPPPSFEGGPMLESVKLAVELDWPVAGDGVTSRPCYLQGGCFDMDALQQHCGPIPPAPVVPSASASASSSTLTSMAEAEHCSTNNVAAGGNLPWLELGANAVADAGGHVVGSCYAGALDELRWSEYFDSAFQAAESQQGALQPGQCVYGGKDDVPGALRVSMXGLSNWC

SEQ ID NO: 8418 - protein, 925 aa, Zea mays
  Clone ID: TF_ZmC335_2.pep
MRIMIKGGVWKNTEDEILKAAVMKYGKNQWARISSLLVRKSAKQCKARWYEWLDPSIKKTEWTREEDEKLLHLAKLMPTQWRTIAPIVGRTPSQCLERYEKLLDAACAKDENYEANDDPRKLRPGEIDPNPESKPARPDPVDMDEDEKEMLSEARARLANTRGKKAKRKAREKQLEEARRLASLQKRRELKAAGIDTRHRKRKRKGIDYNAEIPFEKRPPSGFYDTVGEDRPPEHVQFPTTIEGLEGKRRADIEAQLRKQDIARNKILQRQDAPAAIMQANKLNDPEAVTKRSKLMLPPPQISDHELEEIAKMGSAGDPALADELGEGSTATRTLLASYSQTPRLGMTPLRTPQRTPAGKGDAIMMEAENLARLRESQTPLLGGDNPELHPSDFSGVTPRKKEIQTPNPMATPLASPGPGITPRISMTPSREGHSFGLTPKATPLRDELNINEVEMQDNTKLELRRQAELRKSLRSGFASIPQPKNEYQIVMPPITEDEKEEAEEKIEEDMSDRLARERAEEQARHEALLRKRSKVLQRSLPRPPAVSVEIIRQSLIRSGESRSRSTFMPPTSLEQADELINEELLRLLEHDNAKYPLDEKTQKEKKKGSKRQQNGGPLVPEIDDFDEDELKEASSMVEEEIQYLRVAMGHENESFEDFVKAHDACQDDLMFFPTSNSYGLASVAGNADKISALQNEFETVKKRMDDEAKKASRLEQKIKLLTQGYQIRAGKLWSQVQDTFKQMDTAATELECFQELQKQEHLAASYRIQNLSEEVSKQKALERTLQSRYGELVSGFQRIQEQVEEHKRQLKVQEAVEAESHAQEEEAAASNHAAAEEEDERKEDDERKEEDGSKSLSSEEKPQQTSTATDEEPAGSKGTTEDQMDVDSGNGEGGVVGPVPPAPDTEGGNDEVSVQEISEAQPLP

SEQ ID NO: 8419 - protein, 228 aa, Zea mays
  unsure (1)..(228): unsure at all Xaa locations
  Clone ID: TF_ZmC3484_2.pep
MGRLSCGGVQPKLRKGLWSPEEDERLYGHIIRHGVGCWSSVPKLAGLQRCGKSCRLRWINYLRPDLKRGGFSQQEEDLIVALHEILGNRWSQIASHLPGRTDNEIKNLWNSCLKKKLRQRGIDPATHKPIAAEAGSALLHHDDQSKPQQQPAAAAVFDPFPVTDFGFDLGAAALYGEXSDASSDAGFVADYSSVLDVSENLGYGESSSNSSGWTARRWACRARQRGAA

SEQ ID NO: 8420 - protein, 185 aa, Zea mays
  Clone ID: TF_LIB4741-010-Q1-K1-H11.pep
METALQQSAATTAGGGMRPGAATTVKKARQELEQELRFPQAAPADQGGLDEELRRGPWTVDEDLTLINYIADYGEGRWNALARAAGLKRTGKSCRLRWLNYLRPDVKRGDFTADEQLLILDLHSRWGNRWSKIAAHLPGRTDNEIKNYWRTRVQKHAKQLNCDVNSKRFKDAMRFLWMPRLAERA

SEQ ID NO: 8421 - protein, 158 aa, Zea mays
  Clone ID: TF_ZmC29713_11.pep
PARDGEGRRACKKVGLKRGRWTAEEDQLLANYIAEHGEGSWRSLPKNAGLLRCGKSCRLRWINYLRADVKRGNISKEEEDIIIKLHATLGNRRPLIAGPLPAPPSAVRCHHDNLSLACTDRDAMRSSSGKLINVLFQGLRLVLLYSEILCIVCQKPRC

SEQ ID NO: 8422 - protein, 401 aa, Zea mays
  Clone ID: TF_ZmC2165_1.pep
MSAAETAVSPTTTPQPQLQSDPNAAADAASSNSLWVADETQTLTEVLLQPQPNHLSPPPSGEGDDGITASGAPVGGDAAASASAAAAANATIEERVRGPWSPEEDAVLSNLVEKFGARNWTLIARGIPGRSGKSCRLRWCNQLDPQVKRKPFTEEEDRIIMAAHAVHGNKWASIAKLLDGRTDNAIKNHWNSTLRRRYCNDGQCKHGGSVERSIPKVSREVSEEPWPLNDLNSFTAMDVKDDPVQTAPDTSPRARHITDHCSITQVVDPPYLSRPAAKIGAFRPYYLGHTEPTQQEMPGAVVMFDSTHKVSTPESEVFKFVDPICFAAEVPDKCGYGCCGAHEQHRKNSLLGPEFSEFEGHPPVLNISFASLVSEISSIAWMRSGMQSSDSSNLMQSIPPT

SEQ ID NO: 8423 - protein, 264 aa, Zea mays
  Clone ID: TF_ZmC22694_1.pep
MMKNYPGPASSSSVAVEVKKGSWSPEEDALLTRLVEQHGPHRWSLISAPIPGRSGKSCRLRWCNQLSPDVHHRPFTPHEDALILAAHARYGNKWATIARLLPGRTDNSIKNHWNSNLRRCRRRAAAAAVASRPQVQDSDDAPAAAAAHDDQPAAVVAAGGLGGGNSSSGLPPAAAGAATAEAEPSLSLSLGLPLPAAEPAEAAADDESRNSQGQASPLLEEGEGNAQLLAVVRRMVREEVQRQTGQLAYSLMAAAAARAKGHHR

SEQ ID NO: 8424 - protein, 318 aa, Zea mays
  Clone ID: TF_LIB4732-032-F12_FLI.pep
MGRSPCCDENGLKKGPWTQEEDEKLLHYIQKNGHGSWRTLPRLAGLNRCGKSCRLRWTNYLRPDIKRGKFSREEEQTILHLHSVLGNKWSAIATHLPGRTDNEIKNFWNTHLRKRLIQMGFDPMTHRPRTDFFAALPQLIALAALRGQLPADPDPPQQAGTTAAAAAALAGLIGALCSPPQLTLLDTTTATTAAAAPPVVSSSSADDDAAHQYYLPRTTFPDAPGSGEAAHQRQQQAAGLISYGRRPDDAGGDVDVFACYGGGGGSSLPPLTDLSDDAATLLQLQVDTASSEFGSGGSSPLLPWPEFFPDDPFITDFL

SEQ ID NO: 8425 - protein, 168 aa, Zea mays
  Clone ID: TF_ZmC344_2.pep
MGRSPCCEKAHTNRGAWTKEEDERLVAYVRAHGEGCWRSLPRAAGLLRCGKSCRLRWINYLRPDLKRGNFTADEDDLIVKLHSLLGNKWSLIAARLPGRTDNEIKNYWNTHIRRKLLGSGIDPVTHRRVAGGAATTISFQPSPNTAVAAAAETAAQAPIKAEETAAVK

SEQ ID NO: 8426 - protein, 340 aa, Zea mays
  Clone ID: TF_UC-ZMFLB73162H04_FLI.pep
MGRGRAPCCAKVGLNRGSWTPQEDMRLIAYIQKHGHTNWRALPKQAGLLRCGKSCRLRWINYLRPDLKRGNFTDEEEEAIIRLHGLLGNKWSKIAACLPGRTDNEIKNVWNTHLKKKVAQREKKKAGAGSGDAGTPATAPLSSATSSTTTHNSSGGSDSGDQCGTSREPDATDVCPLQLEDMDVSDMLVDGAPPAAQPMPSPSSSSSLTTCVGGVEELIELPVIDIEPEIWSIIDGESAVARHGGDAAAPCTGTGTAVSTSEAEEAAANDWWLENLEKELGLWGYAEEDTQAHPDLLDHYTGLSPLCALEGDPVSTYFQTGPAAAEPELLVVVEPSAVLL

SEQ ID NO: 8427 - protein, 324 aa, Zea mays
  Clone ID: TF_ZmC372_1.pep
TRPVSSPHLLSWKPPRSDPDKMAAFFGAAPPPALASFRHEEEEEQHQDAAEEVYHVDDVDEGSGDGRGHGGAGQGKLCARGHWRPAEDAKLKELVAQFGPQNWNLIAERLDGRSGKSCRLRWFNQLDPRINRRAFSEEEEERLLAAHRAYGNKWALIARLFPGRTDNAVKNHWHVLMARRQREHSGALRRRKPSSTSPSPAPAPAPHLAPVVVLHHHHHYAGGSPPMPPLHAADAHTQYTAAAAAADTRAHSGGESDETASTCTTDLSLASAAPCFYQSGYDVAPRAAAFAPSARSAFSAPPATARSDDKVSLPFFDFLGVGAA

SEQ ID NO: 8428 - protein, 114 aa, Zea mays
  Clone ID: TF_LIB3245-422-P1-N1-B11.pep
GKSCRLRWVNYLRPDLKRCKITPQEESVIVQLHALWGNSTVLRWSTIARSLPGRTDNEIKNYWRTHFKKGKPSKNVERARARFLKQRREMMMQQQSLGGSTCTSTRAVTSAAAR

SEQ ID NO: 8429 - protein, 123 aa, Zea mays
  unsure (1)..(123): unsure at all Xaa locations
  Clone ID: TF_jC-zmX700203880a1.pep
QGEFNYRKALWSPEEDXKLKHYILTDGLGCXSAGPVKAAVQRNGKSXRLGXINYLRPGLNRGMMSQEEEXDVLIYLQAKLGNKWAQIAIHLPGRTDNEAKNYWNSYLTKRVTPEAQSAVVQFQ

SEQ ID NO: 8430 - protein, 233 aa, Zea mays
  Clone ID: TF_ZmC42_31.pep
MMAEAWTPVLLPATAPCFWQQDTHSVLWRRGDAWTAEENKLFEKALAQIDRNAPDRWEKVAAVLPWKTVDDVRSQYHALEKDVGVIEAGGLVPFPRYSGSVPPPSGFALEDWGGGDRGFRRARGSEEMQERKKGVPWTEEEHKLFLMGLRKYGRGDWRNISRKYVTTRTPTQVASHAQKYFIRLSSGGKDKRRSSIHDITTVNLPGDAPRSSPPAATTNPSAGALVVDVKPFV

SEQ ID NO: 8431 - protein, 773 aa, Zea mays
  Clone ID: TF_ZmC54113_1.pep
MPRKASSNSDARAKSRKRKRAAASASPSKQPDDHSDDSDTAAAANGDDETSRAASVNGGGGTLAGVGGDDDPVLDLRAAEVLSSSAEPVSAFPAAVRRAVSRPHPSVLAVIAAERAAASSDDAPVTPASVPVLENISHGQLQVISAMLPDHPSLSYDPDKPSTYVCTPPPLMEGCGVHKQFYDKLHIVPRHSDWFVPQTVHRLERQVVPQYFSGKSQGQTPEKYIMLRNKVIAKYLERPGKRLVFAECQGLVTSTPELYDLSRIVRFLESWGIINYLATGSVYRGPRTASSLIKEETTGELQLVSAPMKSIDGLILFDRPKCSIQANDISSLVSTSSAPFVVNHDGDSANLDEKIWERLSESSCSFCSQPSHASDYESQKETDIALCSDCFHNAKFVTGHSNLDFQRVDAMKDGSDTDGDRWTDQETLLLLEGIEKFNDNWNHIAGHVGTKSKAQCIHHFIRLPVADGLLENIEVPEASLPSGMQSSGFLHSDSNGSTSGSQPGNQIPFINSANPVMSLVAFLAAEVGPRVAASCASAALSVLTREDSRMNAEGIDAMGHGTHLNYGPSSSISSETVKNAASCGLSAAATKSKLFADQEEREIQRLSATIINHQLKRLELKLKQFAEVETMLLKESERLDLMRQQLVTQRIRMLSTRFTSTGGTIPGGSSGMVSNLMNQASGLRPPLMMPGSVTQSSMPAMYANNMQGHPQMALLQQRQQMLSFGPRLPLSAINPGSSSSAPNMMFNHGMPNSAAPNHHPLLRSPSGDNSNVG

SEQ ID NO: 8432 - protein, 385 aa, Zea mays
  Clone ID: TF_ZmC21015_1.pep
MGHHCCSKQKVKRGLWSPEEDEKLVKYITAHGHSCWSAVPKHAGLQRCGKSCRLRWINYLRPDLKRGTFSDHEERTIIDVHRILGNRWAQIAKHLPGRTDNEVKNFWNSCIKKKLIAQGLDPKTHNLLPASRTLLHGNGANPSSNNPAHFNSNGCAAVVSVATTPFTISSPTKAAAYGTVTATPPPETMAPATYDVPNNYPDGMLMRHDQAATAAAIPGYPYHPGNGGGVLMSFRDQNAGLQTSVDFVNGSSSSSSMDHAAGMPNGNGFSQQGMGAAFMDVTAGMWSTAAVDSGMCAGMEVAQPPPPPPQQPLPPQGLVQGEVLVGRQTVMNGGGAVADKGMDMMDVSSVYGGAGAMAFDLELMESCALFCGSTGNTMEQLQWDC

SEQ ID NO: 8433 - protein, 319 aa, Zea mays
  Clone ID: TF_ZmC42_29.pep
PSPPLPLKLYCRRESAPPPADQTSAMTTLATDTAAWTREEDKAFENAVAASAAPPADGPPDDGWFTALVASVPARTAEEVRRHYEALVEDVAAIEAGRIPLPRYAGEESSAATPEGSGAAGPSTPKDGGGGSGHRREERKGGVGADAGKSCSKAEQERRKGVPWTEEEHRLFLLGLDKFGKGDWRSISRNFVISRTPTQVASHAQKYFIRLNSMNRDRRRSSIHDITSVTAGEVATAGAPITGGGPTAAGAMPMGPGGMKHHHPVPPMGMYGHAPMGHPVAGHMVAPAAVGTPVMFPPGHHSPYVLPVGYPAPPTKMHQ

SEQ ID NO: 8434 - protein, 322 aa, Zea mays
  unsure (1)..(322): unsure at all Xaa locations
  Clone ID: TF_ZmC603825_1.pep
MGRQPCCDKVGLKKGPWTAEEDQKLVSFILGNRQCCWRAVPKLAGLLRCGKSCRLRWTNYLRPDLKRGLLSDAEEKLVIDLHAQLGNRWSKIASHMPGRTDNEIKNHWNTHIKKKLRKMGXIDPLTHKPLPPPDPHPPKDHQSPPHTATGGSPEAPPSPSPKPPQEKTAVPVMTPASQQEAGDDDVPLLSNYYPGFCTDEVPMMDPDEIMVPLDDGRTAPPTSTIFSTTTTTSYSAASDSVSSSLSRDEDPLFPLMDLEFPDIAFQMGLLDDMVASWDDSLAQQPLSPSPVYDDDYANQLQIRSGVAFDQEPGNKIVLFSSY

SEQ ID NO: 8435 - protein, 409 aa, Zea mays
  unsure (1)..(409): unsure at all Xaa locations
  Clone ID: TF_ZmC10631_1.pep
MGRAPCCDKASVKKGPWSPEEDAKLKAYIEEHGTGGNWIALPQKIGXLKRCGKSCRLRWLNYLRRNIKHGDFTEEEEHIICSLYISIGSRWSIIAAQLPGRTDNDIKNYWNTKLKKKLLGKRAPSRRARANQDPYLAAGGGNSSTSGGNSAATATQTLSASALERIQLHMRLQGMYGAFGCSGGGGNDDRNAVVGAAAPQWPKLEALLQANRLLPGSLPTDAMATTVSVQQRHHQHLVDHQSLAVGAGNAAAVEGEQQQLSSADAANYMALPGGGFFERPKLGFYSPSAEAEATAAAASVEMNSVAPMVGGGYGGAGFEQYHHHDVLYEFLYSNYGSVGELAQDGHVPTLPELQCPNGAAVDGADEKFSVWTASAACDYGAAGGYQIQLGNSIGSNLHDYVLGGYDQWE

SEQ ID NO: 8436 - protein, 294 aa, Zea mays
  unsure (1)..(294): unsure at all Xaa locations
  Clone ID: TF_ZmC11324_5.pep
AATRPCGKSCRLRWANHLRPNLRKXAFSPEEERQILLLHGLIGNKWARISKHLSGRTDNEIKNYWNTRFKRRQRAGLPPYPPDVERQIKLLRAQNVNPFADADADAAHANANANANASAGLPAPPLLYDVGNPFALLSSIPSLSQTASHSHSPLINQNYPLLNQMQVFHHLGGSQQPSFHQDGSAAAFGDIVSSRLPPLPTARTQAELHSNQFDTSSSGGLLDQSMLIGDEHLLRPNPSMVKVSSMPALSYREPDGSRMLPAHGAGSDGDVSSLGHCPPGQDLHRGATWDFTFE

SEQ ID NO: 8437 - protein, 242 aa, Zea mays
  Clone ID: TF_ZmC13187_1.pep
MVTVREETRKGPWTEQEDLQLVCTVRLFGERRWDFIAKVSGLNRTGKSCRLRWVNYLHPGLKRGRMSPHEERLILELHARWGNRWSRIARRLPGRTDNEIKNYWRTHMRKKAQERKRNMSPSSSSSSLTYQSGYPDTPSTIGVEGQELHGGSGCITSILKGTPPDMDGYPMDQIWMEIEAPQMPSEESFVGGNHNVCSSLATPLPPPTVWEYYPDACWKVDDEIKMAPQFQFGYSEGVGPCF

SEQ ID NO: 8438 - protein, 427 aa, Zea mays
  Clone ID: TF_ZmC2063_1.pep
MGRHSCCYKQKLRKGLWSPEEDEKLMNHITKHGHGCWSTVPKLAGLQRCGKSCRLRWINYLRPDLKRGAFSEEEEDLIVELHAVLGNRWSQIATRLPGRTDNEIKNLWNSSIKKKLRQKGIDPNTHKPLLVEVERSKAAPTTSTERTSESNDVDPSSGAALGNSSHLLLSETAQSPQLPALGKHRRETTSLAHLRVPPKELFLDQLASGHENLTGCRTAGPVPNFPFQQLMCYNNEFGNKNGASNNSLWFNHNETSGSTISTVMPPVSPSTLSTSTGLNRSPDNPHSGGTAIQSTQFYWDTANPSSCSSRGSSGSNGLGFELQSTSSLLESSVFPWTELTPDKNSQVHLGEELKWPDLLHGTFTDTPATMQNLSQSLYEDVIKAESQFNIEGLCAAWSQNLQPQQHLQVSDLYDKDLQRMSLSFENI

SEQ ID NO: 8439 - protein, 200 aa, Zea mays
  Clone ID: TF_ZmC521637_1.pep
MDPNYGEWNFSEIKIAKALIASHNAKSSYSSDMNNKQTDIIDMLQARFPTKEKHKVTKLYVDLMLEKMQMILSGNQHATMGKKLVNDKFGMSIEDPAIDFMGGDLVEKRTAKRKAREDMNTHLDSQKERRYRRFWTIDEHRNFLYGLRAYGRSDWKNISKHFVTTRTPMQISSHAQKYLHRMVFFARRQRSSINDIGPSR

SEQ ID NO: 8440 - protein, 275 aa, Zea mays
  Clone ID: TF_ZmC337_3.pep
MLCEGGDDNNGRSGLRLFGVQVRIGGGGGAGSASMKKSYSMDCLQLAAPHACSSLVSSPSSSSLCSSSSPSSLLLSIDDGLQRGAADGYLSDGPHGRAVQERKKGVPWSEEEHRQFLAGLDKLGKGDWRGIARSYVPTRTPTQVASHAQKFFLRQSSMGKKKRRSSLFDMVPICENSASISDPLDVARHGVASADSERAAVDVDLMNSTTEGDDGRSRDVVSSASGAGTALRFPAAAAQTEPLHPSSSHGHGRGHHCSPLDLELGMSLPAPSVGT

SEQ ID NO: 8441 - protein, 264 aa, Zea mays
  Clone ID: TF_ZmC337_4.pep
GTSRPAGTVVLRPHSRTCGLGLGLGHREIMLCEGGDDNNGRSGLRLFGVQVRIGGGGGAGSASMKKSYSMDCLQLAAPHACSSLVSSPSSSSLCSSSSPSSLLLSIDDGLQRGAADGYLSDGPHGRAVQERKKGVPWSEEEHRQFLAGLDKLGKGDWRGIARSYVPTRTPTQVASHAQKFFLRQSSMGKKKRRSSLFDMVPICENSASISDPLDVARHGVASADSERAAVDVDLMNSMTEGDDGRSRDVVSSGSGAGTALRFPA

SEQ ID NO: 8442 - protein, 559 aa, Zea mays
  Clone ID: TF_ZmC1108_1.pep
MYRVKSEGEGEGEGDCEMMLQEQMDSLVADDVSSGGGSPHRGVGTPLKKGPWTSAEDAILVDYVKKNGEGNWNAVQKNTGLFRCGKSCRLRWANHLRPNLKKGAFTPEEERLIIQLHAKMGNKWARMAGHLPGRTDNEIKNYWNTRIKRCQRASLPIYPASVCNQSTNEDQQLSGNFNGGENISNDLLSGNSLYLPDFTSDNFIANPEALSYAPQLSAVSISNLLGQSFASKSCSFMDQVDQAGMLKQSGCVLPALSDAIDSVLSSADHFSNDSEKLRQALGFDYLNEANASSKSIAPFGVALTGSHAFLNGNFSASRPTNGPLKMELPSLQDTESDPNSWLKYTVAPAMQPTELVDPYLQSPSATPSVKSECASPRNSGLLEELLHEAQALRSGKNQQSSVRSSSSSAGTPYETTTVVSPEFDMGQEYWEEQPSSFLSEYAHFSGNSFTESTPPVSAASPDIFQLSKISPAQSPSMGSGEQALEPKHESAASPRPENLRPDALFSGNTADPSIFNNAIAMLLGNGIDAEYKPVLGDGIVLDSSSWNNMQHAFQMAGFK

SEQ ID NO: 8443 - protein, 390 aa, Zea mays
  unsure (1)..(390): unsure at all Xaa locations
  Clone ID: TF_ZmC1108_2.pep
SEGEGEGEGDCEMMLQEQMDSLVADDVSSGGGSPXKGPWTSAEDAILVDYVKKNGEGNWNAVQKNTGLFRCGKSCRLRWANHLRPNLKKGAFTPEEERLIIQLHAKMGNKWARMAGHLPGRTDNEIKNYWNTRIKRCQRASLPIYPASVCNQSTNEDQQLSGNFNGGENISNDLLSGNSLYLPDFTSDNFIANPEALSYAPQLSAVSISNLLGQSFASKSCSFMDQVDQAGMLKQSGCVLPALSDAIDSVLSSADHFSNDSEKLRQALGFDYLNEANASSKSIAPFGVALTGSHAFLNGNFSASRPTNGPLKMELPSLQDTESDPNSWLKYTVAPAMQPTELVDPYLQSPSATPSVKSECASPRNSGLLEELLHEAQALRSGKNQQYEIS

SEQ ID NO: 8444 - protein, 276 aa, Zea mays
  unsure (1)..(276): unsure at all Xaa locations
  Clone ID: TF_ZmC27160_1.pep
MGRTPCCDSKGIKKGPWAPEEDKLLVDYVQANGPGNWRILPKLAGLNRCGKSCRLRWTNYLRPDIKRGPFTPEEHNSILQLHAVVGNKWSMIAAQMPGRTDNEIKNYWNTHMKKXSCPAARHTAQWETARLEAEARLSLLSSSAATTVTSATASSSSSTVAAEHAAPPDIFLRLWNSEVGDSFRGAAAQQGHGPEASAAGAGVPALLPELGGGGDDSSAASTYEAEAAADDGYQAFLDLAMEEFALLHGRLGAFSAFPQADVFAEAHCCLFAPFEE

SEQ ID NO: 8445 - protein, 436 aa, Zea mays
  Clone ID: TF_ZmC62316_1.pep
MPCLEQIPMATGETAVDRREDHRDMDLSGEEHVRPKARKPYTITKRRERWTEDEHGQFLEALQLHGRAWRRIQVHIGTKTAVQIRSHAQKFFTKVVRESSPGSNASAGAAPAIQIPPPRPKRKPAHPYPRKADGAAKKPAPELKRLEKTSLRDRVRDEGSPTSVLASARTASRAEVSGSLVANSSSASRSPALSDAGSDERGDGGGSLASSVDREDGCASPRTRAPCTKVLCHAHEVSRLGSGAPVVKLFGNKVVVVKVKDLETDTPPASVAEAARNGSPPNGAAGASSWKPWPELTCLVPRRDGFAAQPVVSPPCAVFYYPQASAASAQEHQQASEPLDHRRAQREGSSPTGSSVASSAAAESRHGPVQENASDGYAALRAAIPRPTKRVSSASFGGRGFVPYKRCAAESEAARPVALALAPGEEADGDLTRLCL

SEQ ID NO: 8446 - protein, 369 aa, Zea mays
  Clone ID: TF_ZmC2044_1.pep
MKERQRWRPEEDAVLRAYVRQYGPREWHLVSQRMNVALDRDAKSCLERWKNYLRPGIKKGSLTEEEQRLVIRLQAKHGNKWKKIAAEVPGRTAKRLGKWWEVFKEKQQRELRDSRRPPPEPSPDERGRYEWLLENFAEKLVGERPQQAAAAPSPLLMAAPVLPPWLSSNAGPAVAAAAVAHPPPRPPSPSVTLSLASAAVAPGPPAPAPWMPERAAADAAPYGFPSPPQHGGAAPPGMTVVDGQALAELAECCRELEEGRRAWATHRREAAWRLKRVEQQLEMEREMRRREVWEEFEAKMRTMRLEQAAAAERVERDHREKVAELRRDAQVKEEKMAEQWAAKHARVAKFVEQMGACSRSWSSATDMNC

SEQ ID NO: 8447 - protein, 292 aa, Zea mays
  Clone ID: TF_ZmC152_3.pep
MVSASAPPPQAQSDAAGSGEEVSKKVRKPYTITKSRESWTEQEHDKFLEALQLFDRDWKKIEAFVGSKTVIQIRSHAQKYLLKVQKNGTSEHVPPPRPKRKAAHPYPQKASKNDSSSIHRNSGMNVPVSSWAHSSIPQAVASSMVKEDLGAGTPGSNNFCSSSTEGLPRTWQPGETNDPINQIPSLRRLYLMIFLISSCSAKYLLRFCPSLLFMPDFAGVYSFLGSVFDPSRGTSGHLQKLKEMNPIDVETALLLMRNLSINLTSPDFEDQVLPIRDASTQQSRPEVRTTIL

SEQ ID NO: 8448 - protein, 117 aa, Zea mays
  Clone ID: TF_ZmC152_5.pep
MVSASAPPPQAQSDAAGSGEEVSKKVRKPYTITKSRESWTEQEHDKFLEALQLFDRDWKKIEAFVGSKTVIQIRSHAQKYLLKVQKNGTSEHVPPPRPKRKAAHPYPQKASKNGTLA

SEQ ID NO: 8449 - protein, 265 aa, Zea mays
  Clone ID: TF_ZmC152_7.pep
MVSASAPPPQAQSDAAGSGEEASKKVRKPYTITKSRESWTEQEHDKFLEALQLFDRDWKKIEAFVGSKTVIQIRSHAQKYLLKVQKNGTSEHVPPPRPKRKAAHPYPQKASKNDSSSIHRNSGMNVPVSSWAHSSIPQAVASSMVKEDLGAGTPGSNNFCSSSTEGLPRTWQPGETNDPINQIPSLRLMPDFAGVYSFLGSVFDPSTSGHLQKLKEMNPIDVETALLLMRNLSINLTSPDFEDQVLPIRDASPHQSRPEVRTTIL

SEQ ID NO: 8450 - protein, 261 aa, Zea mays
  Clone ID: TF_ZmC182615_1.pep
MTRRCSHCSNNGHNSRTCPVRSAGGGSGGGGVRLFGVRLTTAPAPAVMKKSASMSCIVSSLGGGFGGSSPPVEGVGAGRGGEDSGTGYVSDDPAHASCSTNGRAERKKGTPWTEEEHRMFLMGLQKLGKGDWRGISRNFVVSRTPTQVASHAQKYFVRQTNSSRRKRRSSLFDMVPEMPMDESPAAVEQFTLQNTQDEDTSSNHVPTLHLGQRKETEFAKQLQTFQPGHHEKSEYAEPSLLLPNLEMNPNVPFKTITDPTR

SEQ ID NO: 8451 - protein, 164 aa, Zea mays
  Clone ID: TF_ZmC8091_3.pep
ASLLLRFQGARRQRQQQRRWRRSLRFSVEFQWFLMALSVRPERRRAMVAHLLPNLACARRMVWRRHNHAAADGGGALIGGRGLLLLGPRLGLAAGALAGGRRIVAGSGQGARGARALALPRQRIHEEGIGTLGGGGGGGVLPPLACHGCRGRGVRRAALDPEGW

SEQ ID NO: 8452 - protein, 310 aa, Zea mays
  Clone ID: TF_ZmC11894_1.pep
MPGDHGSKGDISFAGRFTASAIAACFAEICTIPLDTAKVRLQLQKNVVAAAASGDAAPALPKYRGLLGTAATIAREEGAAALWKGIVPGLHRQCIYGGLRIGLYEPVKSFYVGKDHVGDVPLSKKIAAGFTTGAIAISIANPTDLVKVRLQAEGKLAPGVPRRYTGAMDAYSKIARQEGVAALWTGLGPNVARNAIINAAELASYDQVKQSILKLPGFKDDVVTHLFAGLGAGFFAVCVGSPVDVVKSRMMGDSAYKSTLDCFVKTLKNDGPLAFYKGFLPNFARLGSWNVIMFLTLEQVQKLFVRKATS

SEQ ID NO: 8453 - protein, 277 aa, Zea mays
  Clone ID: TF_ZmC11894_2.pep
MPGDHGSKGDISFAGRFTASAIAACFAEICTIPLDTAKVRRHYELLVEDVDGIESGRVPLPAYAADGAAEEGGGGGKKGSGGGGTHGDKGSAKSAEQERRKGIAWTEDEHRLFLLGLEKYGKGDWRSISRNFVISRTPTQVASHAQKYFIRLNSMNRERRRSSIHDITSVNNGDPSTAQGPITGQTNGQAANPGKPSKQSPQPANTPPGVDAYGTTIGQPVGGPLVSAVGTPVTLPVSAPPHLAYGMRAPVPGAVVPGAPVNIAPMPYPMPPPPSHG

SEQ ID NO: 8454 - protein, 130 aa, Zea mays
  unsure (1)..(130): unsure at all Xaa locations
  Clone ID: TF_LIB5117-068-A1-PF1-E3.pep
MARFQETKPDLLNSGSDTRMMAEARAPKARKPYMITKQREKWTEEEHKLFLEAMQLHGRAWRRIQEHIGTKTAVQIRSHAQKFFSKVTRDSSGDSGGSSSGGAGPPIQIPPPRPKXRKSVHPYPWHQRSA

SEQ ID NO: 8455 - protein, 344 aa, Zea mays
  Clone ID: TF_ZmC8091_2.pep
MASSSPSCRGSGGKSDVDRIKGPWSPEEDEALQRLVARHGARNWSLISRSIPGRSGKSCRLRWCNQLSPQVEHRPFTAEEDDTILRAHARFGNKWATIARLLSGRTDNAIKNHWNSTLKRKYYAASDAVVADADDERPLKRTSSDGHPGLCFSPGSPSGSDLSDSSNHSLPSVMPSAASAAAVTSHQQQQHVYRPVPRAGGVVMLPVAPLVPPPPQPPATSLSLSLSLPGLDGQKPEPSPAVLTPAPAPPQPPLQIQQQQPAPPQMPPPQAQPSLPFQLQAAATNLTSQQPAAAPFSSEFLLLMQEMIRIEVRNYMSGSGLDPRTDGAAVHAVSKRMMGMAKIE

SEQ ID NO: 8456 - protein, 565 aa, Zea mays
  Clone ID: TF_ZmC277_1.pep
MGRSRGVQNSGDDDTVHRSKRRRVASGGDATDSVSAGIGGAGEGGGKKALYHCNYCNKDISGKIRIKCSKCPDFDLCVECFSVGAEVTPHRSNHPYKVMDNLSFPLICPDWNADEEILLLEGIEMYGLGNWLEVAEHVGTKSKLQCIDHYTTAYMNSPCYPLPDMSHVNGKNRKELLAMAKVQGESKKGTSLLPGELTPKAESPFSPSRVKVEDALGEGLAGRSPSHIAVGANKKASNVGHIKDGSNVSKVEDGHVDRSVGVKKPRYSADEGPSLTELSGYNAKRHEFDPEYDNDAEQALAEMEFKETDSETDRELKLRVLRIYLSRLDERKRRKEFILERNLLFPNPLEKDLTNEDREVYHRYKVFMRFLSKEEHEALVRSVIEERKIRRRIQELQECRSAGCRTLAEAKIHIEQKRKKEYELNAQKAKDSSQLNANNKSVQKMNRPMKIESDGNLDPKKGGAGLDSPKTTGPTSVKQWDDWDIVGLPGAELLSASEKLLCCQNRLLPSHYLRMQEVLMQEIFKGSVLKKEDAHVLFKVDPTKVDSVYDMVTKKLGNHVELPTV

SEQ ID NO: 8457 - protein, 162 aa, Zea mays
  Clone ID: TF_ZmC2240_2.pep
MGRQPCCEKIGIKKGPWTAEEDQKLVTFLLSHGHCCWRLVPKLAGLLRCGKSCRLRWTNYLRPDLKRGLLSEEEEALVIDLHAQLGNRWSKIAARLPGRTDNEIKNHWNTHIKKKLKKMGIDPVTHGPLAPATQPLALALAHQRDPPQVVREEERCDDDPSK

SEQ ID NO: 8458 - protein, 159 aa, Zea mays
  unsure (1)..(159): unsure at all Xaa locations
  Clone ID: TF_LIB3732-055-Q1-K6-B2.pep
SGIFRLGWKDRERLSESSCSYCLQPLPSLHYRSQKRXDIFLCSDCFHDAMNITGHSCLDFQRVDGDNDESENDSDKWTDEETLLLLEGIEKYNDNWDDIAGHVGTKSKAQCIYHFIRLPVEDCLLENVEIPNAPIPFRPQSNGYQCLDSNGSTSGGLLH

SEQ ID NO: 8459 - protein, 378 aa, Zea mays
  Clone ID: TF_ZmC13666_1.pep
RVDGDNDESENDSDKWTDEETLLLLEGIEKYNDNWDDIAGHVGTKSKAQCIYHFIRLPVEDCLLENVEIPNAPIPFRPQSNGYQCLDSNGSTSGAPVQNIQQGNELPFINSSNPVMSLVAFLASSIGPRVAASCAHAALSFLTRDEDSRVSSEGSHAGGLGNGANPNFQNHNGASPSISPENVKYAAMLGLSAAAMKSKLFADQEEREVQRLTATVINHQLKRLELKLKQFAEVETLLLKECEQVERVRHRISAERVRMRSALLGPTGSGLPGGSCSTMPSNPAGMSPRPVGVPGYMPQTSMPATYANNLQGHGNPQMPFLHQRPQMLSFGPRLPLSAIQTQPSPQSSNMFNSGMPNSIAPNHHQLLRSSSGNNSSAG

SEQ ID NO: 8460 - protein, 181 aa, Zea mays
  Clone ID: TF_LIB4764-079-R1-K1-H8.pep
MAYYCNACCAGKSCRLRWFNQLDPRISKRPFSDEEEERLMAAHRFYGNKWAMIARLFPGRTDNAVKNHWHVIMARKYREQSTAYRRRKLNQAVQRKLEAASAAVAMPPGAGAGDVAVGQHHHLLAAAAAAHAHDAAYSFAADPYGFGIRHQYCTFPFPPGAASAEDPPPPAFIDFLGVGAT

SEQ ID NO: 8461 - protein, 137 aa, Zea mays
  unsure (1)..(137): unsure at all Xaa locations
  Clone ID: TF_LIB4978-032-A1-K1-C6.pep
MGRHSCCYKQKLRKGLWSPEEDEKLMNHITKHGHGCWSSIPKLAVQLPKFEKTNCXGLQRCGKSCRLRWINYLRPDLKRGAFSQDEEDLIIELHAVLGNRWSQIAAQLPGRTDNEIKNLWNSCIKKKFRQKGIDPHT

SEQ ID NO: 8462 - protein, 188 aa, Zea mays
  Clone ID: TF_ZmC42_20.pep
MMRETYMDVLPPVDHIAASRSGGWFPGAARLWTAAENKQFERALAGLDLCRPDWEKVARAIPGRTVREVVSHFKSLQVDVQQIESGLVPMPVYGAGAGAGSFTLQWDGCYGPADSRHNGYRFGSGGCGMRHHGRTPEQDRKKGVPWTEEEHRLFLLGLKKYGKGDWRNISRNYVHTRTPTQVASHAQK

SEQ ID NO: 8463 - protein, 212 aa, Zea mays
  Clone ID: TF_LIB5117-045-A1-PF1-B2.pep
MAACRGGGGGKDVDRIKGPWSPEEDDALQRLVGRHGARNWSLISKSIPGRSGKSCRLRWCNQLSPQVEHRPFTPDEDDTILRAHARFGNKWATIARLLSGRTDNAIKNHWNSTLKRKYSSSSSASASPADDAMANDDEDRRPLKRTSSDGYPGLCFSPGSPSGSDLSDSSHQSLPFVMPSAASQQPHVYRPVARARRGVPAPDGQPRIRRLP

SEQ ID NO: 8464 - protein, 166 aa, Zea mays
  Clone ID: TF_ZmC659_3.pep
MGRAPCCEKMGLKRGPWTPEEDKILVAHIQSFGHSNWRALPKQAGLLRCGKSCRLRWINYLRPDIKRGNFSKEEEDAIITLHEQLGNRWSAIAARLPGRTDNEIKNVWHTHLKKRLEPTTKQLEQEQHGAHAGGDAARKRSRPKRAGARKDDDGRRRPGHHRAGVA

SEQ ID NO: 8465 - protein, 127 aa, Zea mays
  Clone ID: TF_LIB4974-032-A1-K1-F12.pep
AAAAAGAGGGDEEGPVDRGGRRSAGLRRTGKSCRLRWVNYLHPGLRRGRITADEERLILQLHAQWGSRWSRIARSLPGRTDNEIKNFWRTRARKQKAAAQQHQQDSRSSKTAMGVGVLRVSVVRDYH

SEQ ID NO: 8466 - protein, 277 aa, Zea mays
  Clone ID: TF_ZmC12010_1.pep
MNDRYLHHQSSMVTPAAASKMSKKLQGGGERSSGSSSRGSGNSDKQQVPAAAMRKGPWTEEEDAQLVWFVRLFGERRWDFLAKVSGLRRTGKSCRLRWVNYLHPGLRRGRITADEERLILQLHAQWGSRWSRIARSLPGRTDNEIKNFWRTRARKQKAAAQQQQQQQDSRSSKTATASAFSGSASSVTTTTSSCSGSPNDDHQQQHQECYASDHFWNDIAAAEAAIYMLIDGGWTGSGPGHPAADPPSSPAWEYCSDYSLWRIDDDEYYEKMLDSSS

SEQ ID NO: 8467 - protein, 265 aa, Zea mays
  Clone ID: TF_ZmC39729_1.pep
RCGKSCRLRWLNYLRPELRHGGFTDEEDSLILSLYGEIGSKWSVIASRLPGRTDNDVKNYWNTKLKKRYLASSTSTGEARPPPPPPAPPSASGDDSSAAADSHQAQQDEPSLPLTPPAFSTDLDTTFAVVDDDMLLFKSDQLYAELVGLVEKKSQATAGPSTGGGGDEANSTATPSSSSYGTGTTNSPTVSSSSGSCALWPTDVHGTTLLSEPTSSSLFDDAYGVGDDAFGAAALPAYSFQDLLASSYDDATAAVVTQELMQYYQ

SEQ ID NO: 8468 - protein, 268 aa, Zea mays
  unsure (1)..(268): unsure at all Xaa locations
  Clone ID: TF_ZmC689999_1.pep
LVTXKDIWTEEEDIVLIQAHKSFGSHWSTIAKFLPGWPENAIKNHWNSTKRSLGSKRRLKKKKSQQAPPGQLSVLEEYIRSLESDSSSAAPPAATSRPAIGRPRRAVHTSAVPEMELHLSAPNNQDAPVRHQPRAISQGNPMLPDLNVSYDPEETHYMGYPMYDPAAAPQLQLVSQEPRQATFTWLPFGGPRMALNGEHASGPSSYDVGGSSGNAGYYSEAGPSNVGGSGGDGQADDDTTNNDDLDLASREFFMPSCDEVRLGLARFK

SEQ ID NO: 8469 - protein, 357 aa, Zea mays
  Clone ID: TF_ZmC10631_2.pep
MGRAPCCDKASVKKGPWSPDEDAKLKAYIEEHGTGGNWIALPHKIGLKRCGKSCRLRWLNYLRPNIKHGDFTEEEEHIICSLYISIGSRWSIIAAQLPGRTDNDIKNYWNTKLKKKLLGKRAPSRRARTNQDPCYLAAGAASSSSSSAATATQALSASALERIQLHMRLQGIYGALACNDDSNAAFGSAAAALPQWPKLEALSQANRLLPGSLPADAMATTVSVQPHPQHLVEVDHHQSLAAAALEGEQQLSSAGEGGFFERPKVDFYSPSAEVAAAAAASVEMNSVAPMVVGGYAGAAGFGPQHHHDELYDFLYSKYGSVGGLAHDGGHVPTLPELQCPDGAAAVVGADEKFSAWT

SEQ ID NO: 8470 - protein, 294 aa, Zea mays
  unsure (1)..(294): unsure at all Xaa locations
  Clone ID: TF_ZmC344_1.pep
MGRSPCCEKAHTNRGAWTKEEDERLVAYVRAHGEGCWRSLPRAAGLLRCGKSCRLRWINYLRPDLKRGNFTADEDDLIVKLHSLLGNNQTKQASKLKNVLRLLPCLCXRWSLIAARLPGRTDNEIKNYWNTHIRRKLLGSGIDPVTHRRVAGGAVTTIWFQPDGIEPEHRRRRRRSSSSGGGGHDQDPLVKWLLEEEPATVKAPRCPDLNLDLCISPPCQHEDDGEEEEEELDLIKPAVVKREALQAGHGHGHGLCLGCGLGGQKGAAGCSCSNGHHFLGLRTSVLDFRGLEMK

SEQ ID NO: 8471 - protein, 43 aa, Zea mays
  Clone ID: TF_6165795.pep
LNYLRPNIKHGGFSDEEDMIILSLYISIGSRWSIIAAQLPGRT

SEQ ID NO: 8472 - protein, 599 aa, Zea mays
  Clone ID: TF_ZmC1296_1.pep
GCTTNSLVHLTLRISELLHSLGQDVPGSGGSNWTDHETLLLLEALEIFKGKEWHEIAEHVATKTKEQCMLHFLQMPISEPFLDGDDFNETPQKITKQDSAETGPSDVPDKMDVDGNAEGKESTDEKAYKKADSSSAETRTKLADQNISAKEDTMKLGDDDLVASIVDEPNKSSLVDPAHKKNSANADVSGEHPSNFITNILRSTFEAVDHFLGKEDMGSFAEAGNPVMALAAFLASLVERDDAVSSCCSSLRAISEMSPALQLATEHCFILPDPPSDLKDPASTFSPCAGGESQEGADTTQNVNDTDKNNSEREDSDLALEKESATFTSQKQHLEELSDAKETFIGGPEAEAKSNSTKDSDNPIAKVGSSVASDKMRDGCNANAIPCPATSNHTTEPSSVASQEASPASTKDTAIPEQVERPSSEELLADVSLPQGKVEPKKTEPAPAASSSIQQHGCKQAGNGNTEPKSKENAAADDDPITRLQRAAGTAISAAAVKAKFLVEQEEGYIRQLAALVIEKQFQKMETKMSFLTEVGNLVLRSRDLTERMRKKLLLERSMIIASRMGAAAASRTIQHGAPVTTRLPVGHVHALNPQLRRP

SEQ ID NO: 8473 - protein, 302 aa, Zea mays
  Clone ID: TF_ZmC337_2.pep
MARKCSHCGNYGHNSRTCGLGLGLGHREIMLCEGGDDNNGRSGLRLFGVQVRIGGGGGAGSASMKKSYSMDCLQLAAPHACSSLVSSPSSSSLCSSSSPSSLLLSIDDGLQRGAADGYLSDGPHGRAVQERKKAIPWSEEEHRQFLAGLDKLGKGDWRGIARSYVPTRTPTQVASHAQKFFLRQSSMGKKKRRSSLFDMVPICENSASISDPLDVARHGVASADSERAAVDLMNSTTEGDDGRSRDVVSSASGAGTALRFPAAAAQTEPLHPSSSHGHGRGHHCSPLDLELGMSLPAPSVGT

SEQ ID NO: 8474 - protein, 207 aa, Zea mays
  Clone ID: TF_ZmC39713_1.pep
TAQEDKLLVEYVRHHGEGRWNSVAKLTGLKRSGKSCRLRWVNYLRPDLKRGKITPQEESVILQLHALWGNRWSTIARSLPGRTDNEIKNYWRTHFKKAKPSKNVERARARFLKQRREMQSQLLLLQGQDQHRQEEEQPDHDDDGASEATPGVPLEEEEEQQQQQHEDLRMMLQQDMDDLLFQFCPMASCTSSCPGGGSCAFVVSASA

SEQ ID NO: 8475 - protein, 274 aa, Zea mays
  Clone ID: TF_ZmC1193_1.pep
MGRSPCCEKAHTNKGAWTKEEDERLVAHIRAHGEGCWRSLPKAAGLLRCGKSCRLRWINYLRPDLKRGNFTEEEDELIVKLHSVLGNKWSLIAGRLPGRTDNEIKNYWNTHIRRKLLSRGIDPVTHRPVTEHHASNITISFETEVAAAARDDKKGAVFRLEEEEERNKATMVVGRDRQSQSHSHSHPAGEWGQGKRPLKCPDLNLDLCISPPCQEEEEEMEEAAMRVRPAVKREAGLCFGCSLGLPRTADCKCSSSSFLGLRTAMLDFRSLEMK

SEQ ID NO: 8476 - protein, 228 aa, Zea mays
  unsure (1)..(228): unsure at all Xaa locations
  Clone ID: TF_ZmC91622_1.pep
MDPNFNGVWSASEMDMAKSLIPSQITNKTYTNDMETKHIDFVDDLQAMFPWKEKHQVTNLYVELLVEIMRAQSNNQHVVPSSVLVNDNFGMLSKPMDNMKVIEGYLMDEMEAMRILEEQPNMLNVIHKKKRHGVKFWTTDEHMNFLRGLEAFGRGEWSNISKYFVPTRTPVDISSHAQKYFRRQECTTGKQGFNIDNVSFYGTQPWVQNNPSSCEALTFTGXCLQHLQ

SEQ ID NO: 8477 - protein, 289 aa, Zea mays
  Clone ID: TF_ZmC659_1.pep
MGRAPCCEKMGLKKGPWTPEEDKVLVAHIQSFGHSNWRALPKQAGLLRCGKSCRLRWINYLRPDIKRGNFSKEEEDAIISLHEQLGNRWSAIAARLPGRTDNEIKNVWHTHLKKRLDPTKQEQQQQHGTTPAAGAGKKHRPAAAAKRGGGGARKATADAVVVPATAAPASPERSAASSSVTESSMTEQEQEHGNTGSSPAFPKEESFTTSSSDAEEFQFDDSFWSETLSMPLDSLDDVVPMEPSDDAFGDVDVDVAAASSSSVGADGDLDYWLRVFMESGDAHPELPQI

SEQ ID NO: 8478 - protein, 294 aa, Zea mays
  Clone ID: TF_ZmC659_7.pep
MGRAPCCEKMGLKKGPWTPEEDKVLVAHIQSFGHSNWRALPKQAGLLRCGKSCRLRWINYLRPDIKRGNFSKEEEDAIISLHEQLGNRWSAIAARLPGRTDNEIKNVWHTHLKKRLDPTKQEQQQQHGTTPAAGAGKKHRPAAAAKRGGGGARKATANADAVVVPAPAPATAAPASPERSAASSSVTESSMTEQEQEHGNTGSSPAFPKEESLTTSSSDAEEFQFDDSFWSETLSMPLDSLDDVVPMEPSDDDAFGDVDVAAASSSSVGADGDLDYWLRVFMESGDAHPELPQI

SEQ ID NO: 8479 - protein, 186 aa, Zea mays
  unsure (1)..(186): unsure at all Xaa locations
  Clone ID: TF_LIB4759-123-Q1-K1-E10.pep
MTRRCSHCSHNGHNSRTCPNRGVKIFGVHLTDGSAIRKSASMGNLSLLSAGSTSGGASPADGPDLADGGGGYASDDFVQGSSSASRDRKKGVPWTEEEHRRFLLGLQKLGKGDWRGISRNFVVSRTPTQVASHAQKYXIRQSNMSRRKRRSSLFDMVPDESMDLPPLPGSQEPETXMXXSPPLPPA

SEQ ID NO: 8480 - protein, 216 aa, Zea mays
  unsure (1)..(216): unsure at all Xaa locations
  Clone ID: TF_ZmC19315_1.pep
MGRSPCCEKGHTNKGAWTKEEDERLVAYIRSHGEGCWRSLPSAAGLLRCGKSCRLRWMNYLRPDLKRGNFTDDEDELIIRLHALLGNKXSWSLIAGQLPGRTDNEIKNYWNTHIKRKLLARGIDPHAHHRPQALHHVAAAALVPAPAAKPKPKPAESSDDGGRSSCSCSGSGSSAGEPRCPDLNLDLSVGPPDAPTSPPPPCLCHRAWEACGCQAG

SEQ ID NO: 8481 - protein, 217 aa, Zea mays
  unsure (1)..(217): unsure at all Xaa locations
  Clone ID: TF_ZmC178558_1.pep
SADQLPRPDIKRXNFTPDEXXLIVRLHRELGNRWSAIAAQLPGRTDNEIKNVWHTHIKKRLEDGHGEEKKARKGKPAAKKAADAVGRSSEHGPFLTASPGLSSSGVTFSAAADSAAAVSSSADNAATTSHHPQQVGASKAESSTELDSGLSSAEFPPLDDSFWSSADVVDMGLGATDEELGLACPPPLSSSSTRDEDMEFWLNMLLEAGDMRDLSVL

SEQ ID NO: 8482 - protein, 175 aa, Zea mays
  unsure (1)..(175): unsure at all Xaa locations
  Clone ID: TF_ZmC2063_2.pep
MGRHSCCYKQKLRKGLWSPEEDEKLMNHITKHGHGCWSTVPKLAGTTIKIKIKSCTLCSTFSIVHLHCFLLLLQGLQRCGKSCRLRWINYLRPDLKRGAFSEEEEDLIVELHAVLGNRWSQIATRLPGRTDNEIKNLWNSSIKKKLRQKGIDPHTPQPLLVEVERSXAAPTTSTE

SEQ ID NO: 8483 - protein, 306 aa, Zea mays
  Clone ID: TF_ZmC3487_1.pep
MSSLLCISRRNNKKDSDGDGEYGGEQIIISTGGAAMRKGPWTDEEDEQLVRFVRLFGERRWDFLAKVSGLRRTGKSCRLRWVNYLHPGLRRGRITADEERRIVELHAQWGSRWSRIARSLPGRTDNEIKNFWRTRTRKKALEERRAAAAATSTAAESASSVMTVSSSSECRRPPVSSSSSSSSLRRDEARRSGDETEEASTPTAAPATKHDEEPQPQPQECYDFPMDQLWNEIAAADAAAMSYLVVDACWGGAAVGGHCYYYGAAAASAASPPPPASPPWEYCGSDFSLWRIDDQEYYKKMLDSSS

SEQ ID NO: 8484 - protein, 275 aa, Zea mays
  Clone ID: TF_ZmC344_4.pep
MGRQPCCDKLGVKRGPWTAEEDRKLINFILTNGHCCWRAVPKLAGLLRCGKSCRLRWTNYLRPDLKRGLLTDAEEQVVIDLHAKLGNRWSKIAAKLPGRTDNEIKNHWNTHIKKKLIKMGIDPVTHEPLDRKTTSSGPATTSQSTKSDEATKEQSPQNDDAVIRDVPADGCSPTESSTNTVSTGGSSSSGGGGHDQDPLVKWLLEEEPATGDEAWLNFTGSVDVDEFSSIAAGPELLPWDGATDWLLDYQDFGLGDSSLVDGYMVNNNSSNGAKF

SEQ ID NO: 8485 - protein, 155 aa, Zea mays
  Clone ID: TF_LIB5026-024-B1-XP1-G10.pep
PAGPRLPKNWREDQVDQIGKSCRLRWFNQLDPRINKRPFTEVEEERLLNAHRAHGNKWALIARHLPGRTDNAVKNHWHVVMARRCRDRSRHHARAASSSSPLSMNLSPRETLHVDIGDRVRHKHRRKDYHAGDSADEPLKKDVPFIDFLGVGMSS

SEQ ID NO: 8486 - protein, 134 aa, Zea mays
  Clone ID: TF_ZmC352107_1.pep
RFLPICSCGGSSGGNAFARPEQGRKKRVRPWTEEEHKLFLLGLKKYGKGDWRNISRNFVQTRTPTQVASHAQKYFIRLNKKRSSIRDTTTVNLTDDQPTSPSQSSLITDQFSALALATDVNQNSRANSPSIELA

SEQ ID NO: 8487 - protein, 308 aa, Zea mays
  unsure (1)..(308): unsure at all Xaa locations
  Clone ID: TF_ZmC3476_1.pep
MVRKPIHADDAGAKSTEASKERKGLWSPEEDERLFTHITYHGVSTWSSVAQLAGKIQFLQTDRDSRYRILFQXIDRTAQRGMINLFLNVQCTGLRRSGKSCRLRWLNYLRPDLKKEPISKREEETIISLQQSLGNRWSTIAARMPGRTDNEIKNYWNSRIRKRLNAAASRAAGCDGGDSAAEPSGAVAAGGKEDSANAATAVTAQPTPIPARFPVFGCQLPDGAGGGISSPGSGSGKSPQSSTTASMPQNEGDESEASDGGGGDSDMVHFLSFDDLDYPGDLLIDVPGAMDAWESQLCYANPMMSSLC

SEQ ID NO: 8488 - protein, 111 aa, Zea mays
  unsure (1)..(111): unsure at all Xaa locations
  Clone ID: TF_LIB3245-059-P1-KI-B7.pep
AAGLLXCCKSCRLRGMNYLGGDLKRGNFTDDEDELIIRLHALLGNKFVSRLPSVDETASFFSVSTFIFSTALPDVTRRARRWSLIAGQLPGRTDNEIKNYWNTHIKRKLLA

SEQ ID NO: 8489 - protein, 186 aa, Zea mays
  unsure (1)..(186): unsure at all Xaa locations
  Clone ID: TF_ZmC1193_9.pep
MGRLSCGGGGGGGVQPKLRKGLWSPEEDEKLYNHIIRHGVGCWSTVPKLAGLQRCGKSCRLRWINYLRPDLKRGSFSQHEEELIIRLHKILGNXWSLIASHLPGRTDNEIKNYWNTHIKRKLLARGIDPKTHRPLGAGADAAAPPGVVAHRALLHRAALVELAVKPAPAESSDDGSRSRGTSSGVR

SEQ ID NO: 8490 - protein, 166 aa, Zea mays
  unsure (1)..(166): unsure at all Xaa locations
  Clone ID: TF_ZmC1443_3.pep
MGRHSCCYKQKLRKGLWSPEEDEKLMNHITKHGHGCWSSIPKLAGLQRCGKSCRLRWINYLRPDLKRGAFSQDEEDLIIELHAVLGNXQLPGRTDNEIKNLWNSCIKKKLRQKGIDPNTHKPLTEADRSGAAPTISIERTSGSSEVNPSSAGALGNLSPLLSETAQ

SEQ ID NO: 8491 - protein, 357 aa, Zea mays
  unsure (1)..(357): unsure at all Xaa locations
  Clone ID: TF_ZmC277_2.pep
MGRSRGVLSSGDDDTGHRSKRRRVSSGGDATDSISASIGGAGEGGGKKALYHCNYCNKDISGKIRIKCSKCPDFDLCVECFSVGAEVTPHRSNHPYKVMDNLSFPLICPDWNADEEILLLEGIEMYGLGNWLEVAEHVGTKSKLQCIDHYTSAYMNSPCYPLPDMSHVNGKNRKELLAMAKVQGESKKGTLLLPGELTPKVESQFSPSRVKVEDALGEGPAGRSPSHMAVGANKKASNVGHIKDGATVSKVEEICFLKNVFFCNLSSIKKXNGDSLTLRHDVHVDRSVGVKKPRYSADEGPSLTELSGYNAKRHEFDPEYDNDAEQALAEMEFKETDSETDRELKLRVLRIYLSRLD

SEQ ID NO: 8492 - protein, 110 aa, Zea mays
  Clone ID: TF_ZmC38224_3.pep
MTVVRVDENPAPDGENSPLDDEYVSADDEHVDDEDKETDSIDDYENPSGTPQMKKGPWSPEEDKRVKDYVEVHGAGNWNKVQQNARLNRCGKSCRLRWTNHLRPDLKKEP

SEQ ID NO: 8493 - protein, 158 aa, Zea mays
  unsure (1)..(158): unsure at all Xaa locations
  Clone ID: TF_LIB4827-009-R1-N1-C11.pep
MEGVMTTRSKHRCHEEDQEMTMVELRRGPWTLEEDNLLMNYTACHGEGRWNLLARCSGLKRTGKSCRLRWLNYLKPDIKRGNLAPEEQLLILELHSKWGNRWSRIAQHLPGRTDNEIKNYWRTRVQKQARQLRVDANSAVFRDAVRXYWMPRLLEKTM

SEQ ID NO: 8494 - protein, 276 aa, Zea mays
  Clone ID: TF_ZmC984_2.pep
MPFLHFVLMGLPYRWTRSLDPAIKKQDWSEQEDLKLIRAHQIYGSQWLKMVKHFPGRTNHALKEHWRNRIKGKLNLCLASGLLEQVPDLEGQSEIPKDSQGSADRSGPPPVLRAQPKSKPELPENAGTSGEGTSDSIRPKGPNAHPTEVSEKVLAKSKQRARARRRLDFLSTPVELKLCTAAASCQRPPQKMDQPGPVAENISPSDACQDISQNVPPERADAITPLASSNHHSPTTPDDPFSLEMHEANASDLLDMSYCDGLIIDSRRDPRDGSLM

SEQ ID NO: 8495 - protein, 346 aa, Zea mays
  Clone ID: TF_ZmC300_35.pep
MNLASAVRVFLSYCLLLHRWMGSEQAGGVFDQGGHSVSLTRLDEARAPPRCAVQSSLSSAASLPPKPLLVAAPRETGEYPVILFLHGYLAVNSFYSQLFEHVASHGFIVVGPQLYTISGADTTEEINSAAAVIDWLATGLPSTLPLGVRADLTKVSISGHSRGGKVAFALALGHAKAKLAVPLAAVVAVDPVDGMGVGKQTPPPILTGRHGSLHVGAPTMVIGTGLGELPRGSLLPPCAPRGVSHAAFYDELDGAAPACHLVARDYGHTDMMDDDTPGARGMLTRTICRSGGARAPMRRFVAGATVAFLKKWVAGDAAAMDSITARPDQAPIALSVVEFGDEKAIA

SEQ ID NO: 8496 - protein, 166 aa, Zea mays
  Clone ID: TF_LIB5117-027-A1-PF1-C3.pep
MEGCDRIRGPWSPEEDGALRRLVELHGARNWTAIGRGVPGRSGKSCRLRWCNQLSPGVERRPFTAEEDTVIARAHVRIGNRWAAIARLLRGRTDNAVKNHWNCSLKRRLGDLGADGVTEGDLDERPCKRASVTPESTSGSGSGSGSGSDRSDLSHGAFGLGQVYRP

SEQ ID NO: 8497 - protein, 348 aa, Zea mays
  Clone ID: TF_ZmC79863_1.pep
MAAAAPAAGKGKRKRHLSEDDVCLLQRYNPGTILTALQEVAQHAEGRIIDWRAVVAKSATGITSAREYQMLWRYLAYHHDLNESIEAGDLPLGDDSDLELELEPNPSETKEALSEASALAKALISRSSREQASGHRINLDVPALNTQNEKIVRVPSKQLAQSHRVTNVTCPVSNPKQLSHIVPSPTHLDPNGASKKRKKAKAWSKEEDADLAAGVQKYGEGNWEVILHKCNFDKYRERPNHQLSQRWALKRPGGSTKPASTKHASVGLEERSAALKALSLAVGPMRGSSALRSGAYPQSIQHKSTVFAPKMPELRSAVTPSPAPAVPVPVAMPLRVAAQVQASAHQGH

SEQ ID NO: 8498 - protein, 169 aa, Zea mays
  unsure (1)..(169): unsure at all Xaa locations
  Clone ID: TF_LIB4745-001-R1-K2-F12.pep
MTHNFKEAAGAVHARRQATILSEMEGAMTTRSKHRRDEEDQEMTMVELRRGPWTLEEDNLLMNYIACHGEGRWNLLARCSGLKMTGKSCRLRXLNYLKPDIKRGNLAPEEQLLILELHSKWGNRWSRIAQHLPGRTDNEIKNYWRTRVQKQARQLPVDANSAVFRDAVR

SEQ ID NO: 8499 - protein, 188 aa, Zea mays
  Clone ID: TF_ZmC11894_4.pep
MAVDEASSSGGGEEGCGSWTREQEKAFENAVATMGGEEDGDARWEKLAEAVEGKTPEEVRRHYELLVEDVDGIESGRVPLPAYAADGAAEEGGGGGKKGSGGGGTHGDKGSAKSAEQERRKGIAWTEDEHRLFLLGLEKYGKGDWRSISRNFVISRTPTQVASHAQKYFIRLNSMNRERRRSSIHDIT

SEQ ID NO: 8500 - protein, 185 aa, Zea mays
  Clone ID: TF_ZmC27878_4.pep
MVSMSTTPKPLDSAVVSAAVDGGDEGGGGGGGGKKQAHGAVMAPPPMVVPAAAPAGEEEVRKVRKPYTITKSRESWTEPEHDEFLEVLQLFDRDWKKIEAYVGSKTVIQIRSHAQKYFLKVHNNGTGEHLPPPRTKRKAAHPYPQKASNNVSQAILSQHQPTQREQGSVMPMDTATERNKMRMSW

SEQ ID NO: 8501 - protein, 110 aa, Zea mays
  Clone ID: TF_LIB3594-051-Q1-K7-G7.pep
KKGPWTPEEDLMLVSYVQEHGPGNWRAVPTNTGLMRCSKSCRLRWTNYLRPGIKRGNFTEQEEKLIVHLQALLGNRWAAIASYLPKRTDNDIKNYWNTHLKKKLKNMQGG

SEQ ID NO: 8502 - protein, 241 aa, Zea mays
  unsure (1)..(241): unsure at all Xaa locations
  Clone ID: TF_ZmC1193_4.pep
MGRSPCCEKAHTNKGAWTKEEDERLVAYVRAHGEGCWRSLPKAAGLLRCGKSCRLRWMNYLRPDLKRGNFTDDEDELIIRLHSLLGNKWSLIAGQLPGRTDNEIKNYWNTHIKRKLLARGIDPKTHRPLGAGADAAAPPGVVAHRAXAPRRRSPRRARREAGAGGVIRRRRPEQRQRQQRRRRQRGGAAVPRPQPRPVRGPAMLAAQDAGGHRVDAHVASAAADDDHMTVLPPRSPQRGGL

SEQ ID NO: 8503 - protein, 302 aa, Zea mays
  Clone ID: TF_ZmC1597_1.pep
MGRPPCCDKMGVKKGPWTPEEDLMLVSYVQEHGPGNWRAVPTNTGLMRCSKSCRLRWTNYLRPGIKRGNFTEQEEKLIVHLQALLGNRWAAIASYLPKRTDNDIKNYWNTHLKKKLKNMQGGEGGAGGKRPAVPKGQWERRLQTDIHTARQALRDALSLEPSATPLAKVEPLPTAPGCATYASSADNIARLLEGWLRPGSGKGPEASGSTSTTATTRQRPQCSGEGTASASASHSGGAAANTAAQTPECSTETSKMAGSSVGAGSAPAFSMLERWLLDDGMGHAEVGLMTDVVPLGDPSEFF

SEQ ID NO: 8504 - protein, 361 aa, Zea mays
  Clone ID: TF_ZmC20648_1.pep
MGREAAATRPPKLRRGLWSPEEDEKLYNHIIRYGVGCWSSVPKLAGLERCGKSCRLRWINYLRPDLKRGSFSQQEEDLIVSLHKILGNRWSQIASQLPGRTDNEIKNFWNSCIKKKLRQQGIDPATHKPLNDDDNAAAAAAADNDAAVAPHHHRRHQDDHCGAANIDNNNNNNNNNNNRQLPSADDHCFAMSSDDPLAPHSPTVSFDPLSVTNVPTAMQQGSYGSFRSDNDHLCDYGGGGVDVVSDAATAYSAPYTGGGGGGDSSSNSNGTGTWACSGGEPMPPHVAMFGRDAAQAAAYHQFVDPAKYSPWQQHPAARLHDHNVGGAAAGFPIRSMSRDLPGSCFDLARSALEDEFSVDFL

SEQ ID NO: 8505 - protein, 308 aa, Zea mays
  Clone ID: TF_700203222_FLI.pep
MGCRSCDKPKMNYRKGLWSPEEDQRLRDYILKHGLGCWSAVPAKAGLQRNGKSCRLRWINYLRPGLKRGMFSQEEEDVVIDLQAKLGNKWSQIAMHLPGRTDNEVKNYWNSYLKKRVMQQAQGASSNSSPKSPPELTSMSTTADLSSMSMPMPMSMPMHQRHHVKNNSGGGSTTTSHDQQDDANISGSRAALSAPPPPPLAQQPFEHQAARSFVFSDWAPESYSLSTHWPAATSTSGNVTPSHGSAAAFGDQMSGTYGAGGLPPPHQDHHHSAAPATTGIAGSGYFDLLNMGDIYGGFSSTNNDDLLF

SEQ ID NO: 8506 - protein, 312 aa, Zea mays
  Clone ID: TF_ZmC2012_1.pep
MGCRSCDKPKMNYRKGLWSPEEDQRLRDYILKHGLGCWSAVPAKAGLQRNGKSCRLRWINYLRPGLKRGMFSQEEEDVVIDLQAKLGNKWSQIAMHLPGRTDNEVKNYWNSYLKKRVMQQAQGASSNSSPKSPPELTSMSTTADLSSMSMPMPMPMPMHQRHHVKNNSGGGSTATSHGQQDDANISGSHAALSAPPPPPLAQQPFEHQAARSFVFSDWAPESYSLSTHWPAATSTSGNVTPSHGSTAAAAAAAFGDQMSGTYGAGGLPPQHQDHHHSTAPATGIAGSGYFDLLNMGDIYGGFSSTNNDDLLF

SEQ ID NO: 8507 - protein, 296 aa, Zea mays
  unsure (1)..(296): unsure at all Xaa locations
  Clone ID: TF_ZmC24450_1.pep
MGRAPCCDRTKGLKKGPWTPEEDKLLVDYIQTNGHGSWRLLPKLAGLNRCGKSCRLRWTNYLRPDIKRGPFTSEEQKSIVQLHAIVGNKWSMIAAQLPGRTDNEIKNYWNTHLKKQLRRMGLDEPPPGPAAGCPSARHMAQWETARLEAEARLSLLATAASSSSCGAIAATSASSSSSTVDLKTACARPADIFXAPVELGHRGLLPPQDGRGARGQGEGRGDQAGVAGAAAGSRGRLLGRVQRDGGGGGAGGVPDVPRLRRRRAGAVSRPARRLLAVPAARRARRGVPGHGVQVKT

SEQ ID NO: 8508 - protein, 300 aa, Zea mays
  Clone ID: TF_ZmC27687_1.pep
MQKDIWNDEEDSVLIQAHKEVGNRWAEIAKRLPGRTENSIKNHWNATKRRQFARRRSRASASTSTSKGPPKPGTLLQNYIKGLGIGPVSNRSAAPLPEPTTPPPPPPSSPETPGGARSAKQAGESTTLEVERRSPSCDVLVDSSQCTTILPPTSVHGYDEYSNCSGESHQSCEVLLAPIISCGDDAFSVGMCGGGGGLFDTDDADAFLQAYGVAADDVVDGIGMGYYVFNDGHVDHAATVDAEIDMETMMMMWDDDDDYAAALGLGCAAGPAGVESAVRVKEEMDLQVETMVAATHKCGD

SEQ ID NO: 8509 - protein, 426 aa, Zea mays
  Clone ID: TF_ZmC1443_1.pep
MGRHSCCYKQKLRKGLWSPEEDEKLMNHITKHGHGCWSSVPKLAGLQRCGKSCRLRWINYLRPDLKRGAFAQDEEDLIIELHAVLGNRWSQIAAQLPGRTDNEIKNLWNSCIKKKLRQKGIDPNTHKPLTEADRSGAAPTISTERTSGSSDINPSSAGALGNLSHLLSETAQSSMLMPVYDKNRAETPNLARPKLPPKELFLEQLTAGHESPSTCHSSGQTLYFPFQQPLGYNSESGSSDGANMNSLWFNQSDFNCSTISTVMPPVSPSALSTSMGLNLPPDNPRHGGTGIGSTAVDSFYWDGTNPSSSSSTGSRGSNSMGFEPQSTSTILENSVFPWTDIGQEKDTRAHLVAELKWPDSFAETTTAMQNQSQTLYDDVIKAESQFNIEGICASWFQNQQPQQQLQVAPDMYDKDLQRMQLSFENI

SEQ ID NO: 8510 - protein, 43 aa, Zea mays
  Clone ID: TF_700451947H1.pep
STRNDYPAAKRVKLDSVRVLRQISNNRKCTSSRSSDTEENVKR

SEQ ID NO: 8511 - protein, 37 aa, Zea mays
  unsure (1)..(37): unsure at all Xaa locations
  Clone ID: TF_LIB3066-040-Q1-K1-A5.pep
MSMSFLSMVEAELPPGFRFHPRDDELXCDYLAPKLGA

SEQ ID NO: 8512 - protein, 80 aa, Zea mays
  unsure (1)..(80): unsure at all Xaa locations
  Clone ID: TF_LIB4759-104-A1-K1-B8.pep
RTNRATKSGYWKATGKDRVIHTPCSWPAAAACHHRAVVGMRKTLVFYRGSAPNGVKTSWVMHEFWMENPHTXPKEDWGLL

SEQ ID NO: 8513 - protein, 61 aa, Zea mays
  Clone ID: TF_ZmC313604_2.pep
VSGFRFHPTDEELVRFYLKRKIHQKSLPIELIRQLDIYKYDPWDLPSKLLCTSSPCTMFFS

SEQ ID NO: 8514 - protein, 103 aa, Zea mays
  Clone ID: TF_LIB3591-121-Q1-K6-E2.pep
MAAEGAPVLVRHAGGVEELRQLPPGFRFRPTDEELVVQYLRRKALGAPLPAAVIPVVRDLYSLDPWDAVDVPAAPGTYTIDDGASNHQQHPSVLSVLSSRRKN

SEQ ID NO: 8515 - protein, 69 aa, Zea mays
  unsure (1)..(69): unsure at all Xaa locations
  Clone ID: TF_LIB4977-051-Q1-K1-F2.pep
MMAIKSLSMVEASLPPGFRFHPRDDELVLDYRAKKLGGGGGPCGGEHXGCPTMVDVDLNECEPWDLPGM

SEQ ID NO: 8516 - protein, 126 aa, Zea mays
  Clone ID: TF_ZmC9425_1.pep
AASGRWKPSGKEKPVVLPRPCGGGSLLVGVKRAMTFVPRRRKKTAALPSSAALKTGWVMHEYRLAAPLHKNGCSLAQAQGEWVVCRVFQKGGNRPRRRQREASPPPSASSSCVTDASSSDLDEVSS

SEQ ID NO: 8517 - protein, 148 aa, Zea mays
  Clone ID: TF_LIB4738-128-A1-K1-E7.pep
MEARPGAWRLQQRGPGAPVAGLPIGFRFRPTDEELLLHYLRRKALACPLPAGVIPDADLARLDPSDLLLPAAAPPAGGAADDASGERFFFHRLGDRQEEEEEEEEEQHAAVESASSTSSCVTDASGTIGQDDDGDEGISGSCSVASSN

SEQ ID NO: 8518 - protein, 58 aa, Zea mays
  Clone ID: TF_LIB3062-027-Q1-K1-G5.pep
WPGRRPWRWSRDLPGFRFHPTEEELLGFYLSRVVHGKQLHFDIIGSLNIYRCLPRRTW

SEQ ID NO: 8519 - protein, 112 aa, Zea mays
  unsure (1)..(112): unsure at all Xaa locations
  Clone ID: TF_LIB4739-062-Q2-K1-D10.pep
WPNSRPDSVCTPTDEELMVHYLLMKALSMPCPVPIVPEANIYRCNPXHLPAQGVDYEKRVGYLSPPRSAXYPNMVRLNPTTGSWYWNVTSTHRSCSTCAWPLNTAAPRYCDW

SEQ ID NO: 8520 - protein, 135 aa, Zea mays
  Clone ID: TF_LIB5116-016-A1-PF1-E4.pep
MVVDPVLKGFDLNIAAVDESSPLEGIGLGLYATEFIHKYLRFNPTDQELMEWLEAKVRDGGARSDPLIDKFIPTIEVEYGYPHPQQLPGVTMDGTIKHFFCRPRAFESGRRKHRKIKAERNDRTAWHKTGKSMAL

SEQ ID NO: 8521 - protein, 102 aa, Zea mays
  Clone ID: TF_ZmC151_4.pep
KLKCFKEITSCPGREKLECRNQQRRAEESSFQKCEHRMQQVKTSAGCSASREQGNPTSRQVFGREYCETDRTKRDVGQVTERDERKLLLARLKGSRRPSKRF

SEQ ID NO: 8522 - protein, 76 aa, Zea mays
  unsure (1)..(76): unsure at all Xaa locations
  Clone ID: TF_jC-zmX019Bb09b1.pep
APLVVKTDWFMHEYRLADTGRRTKKGSLMLEXWELCLLHNKKNECEKMRFEKGADGGAAKEEEAMDMCTCHSQITH

SEQ ID NO: 8523 - protein, 37 aa, Zea mays
  Clone ID: TF_700240279H1.pep
AELNLPPGIWFYPTVDELVVHYLCALACGLCLPVSII

SEQ ID NO: 8524 - protein, 108 aa, Zea mays
  Clone ID: TF_LIB5026-014-A1-XP1-D11.pep
MSLISMMEARLPPGFRFHPRDDELVLDYLCRKLSGKGGGGGGGGAYGGIAMVDVDLNKCEPWDLPGIPSGSTLRYRVSICCRFYVAHAACTLAPINNKSPAASTGRRN

SEQ ID NO: 8525 - protein, 120 aa, Zea mays
  Clone ID: TF_LIB3245-008-P2-N1-F12.pep
MTSHARVRKLGIRLELTSRGSSRPTLVLQSTVRTKPQRIKDSMVMAPVAAQQQRRRDAVAELNLSPGLRFHPTDEELVAHYLCARASGQSPSVSMIAEVDLYRFDLWDLSERALFGRREW

SEQ ID NO: 8526 - protein, 72 aa, Zea mays
  Clone ID: TF_LIB3245-421-P1-N1-G12.pep
MVAMAAVQKQQQQRRDAEAELNLPPGFRFHPTDEELVAHYLCARAAERRPPVSIIAEVDLYRFDPCDLPERA

SEQ ID NO: 8527 - protein, 72 aa, Zea mays
  Clone ID: TF_LIB3060-022-Q1-K1-C4.pep
LSIQSVSPRSSILYCLHRFHLRSIPFHASKLHQGHDDGSYDDYDLSISACVDVAAADGVPVPPDRRGAHPAL

SEQ ID NO: 8528 - protein, 116 aa, Zea mays
  Clone ID: TF_ZmC9425_2.pep
TREKPVVLPRPCGGGSLLVGVKRAMTFVPRRRKKTAALPSAALKTGWVMHEYRLAAPLHKNGCSLAQAQGEWVVCRVFQKGGNRPRRRQREASPPPSASSSCVTDASSSDLDEVSS

SEQ ID NO: 8529 - protein, 222 aa, Zea mays
  unsure (1)..(222): unsure at all Xaa locations
  Clone ID: TF_LIB4743-073-R1-K1-G1.pep
RPGDSSAPTASWLLRPSRPIALPYYSLPTTLPLTLPPPSAATPSLDSSAGPNTALDLFAVPPPGSSSPHGGAVLVVTRGAGRARSAVRAPGLRRGEPIPSSASTCRFCSPGAGALVGVRCFCWAFICSTRPWRSGCDCAACAVVRPRWWWIRLGHCKMEVLRDMHLPPGFGFHPSDIXLVSHYLKRKILGQKIENDLIPXVDIYKHEPWDLPCRXNLPIKDN

SEQ ID NO: 8530 - protein, 121 aa, Zea mays
  unsure (1)..(121): unsure at all Xaa locations
  Clone ID: TF_jC-zmX700222002b1.pep
VLVLYYLRNREGGNTIYLDVVKDVALDKIEPWDLQMKCTIGTVDQNEWLFLGHLGEKYLMDTLTNRATTDXFWKANVRDKPIYTKRCLDSMSKTLVFYKGRAPNVPESDWIMHEIHLKTTD

SEQ ID NO: 8531 - protein, 69 aa, Zea mays
  Clone ID: TF_LIB4738-071-R1-K1-H12.pep
MGLRDIELTLPPGFRFYPSDEELVCHYLHGKVANEQLAGAGAAMVEVDLHAHEPWELPGTCTRTRCLDS

SEQ ID NO: 8532 - protein, 187 aa, Zea mays
  unsure (1)..(187): unsure at all Xaa locations
  Clone ID: TF_LIB4980-065-R1-K1-E6.pep
SGRARNRTGRGSQCVGAVPPLPPRPAFLAASTGRGRSPRATMARSWLITCRGIAKKIRYTNPGANHHISELVAEARRECPNCSYIIDNSDVAMQWPGLPAGVKFDPSELELLEHLEQKVGLGDSRPHVLIDEFIPTIDNDEGICYSHPEXLPGMKTDGSNAHFXHRVXXAYGCGQXKRRRTHHCSDH

SEQ ID NO: 8533 - protein, 48 aa, Zea mays
  Clone ID: TF_9743024.pep
GIPEVDLYKCEPWELAEKSFLPGRDSEWYFFGPRDRKYPNGCRTNRAT

SEQ ID NO: 8534 - protein, 61 aa, Zea mays
  Clone ID: TF_LIB3117-005-Q1-K1-A2.pep
TRSPTRGWDLPKFAKMGDKDWYGVYHKDRKCPTVLMANRATDAGYWKATAKDNDVYNPFAA

SEQ ID NO: 8535 - protein, 76 aa, Zea mays
  Clone ID: TF_LIB3206-117-P1-K1-E11.pep
LLRPRSNTINNIASYAYPELNLPPVLPFHPTDDDLVAHYLYARSMSRHPPVSIIVEVYLYRFDPCDLPKRSLFGLR

SEQ ID NO: 8536 - protein, 498 aa, Zea mays
  unsure (1)..(498): unsure at all Xaa locations
  Clone ID: TF_ZmC9370_13.pep
MTKSLFTTPSVAFGLASFTATVSEIRLGTSRSCISYSKNTPDPKSSTNAKSSLRGNPKTLCSPAEVQIVPPPPPPPHPQQQIXPPPHHPQAPKQEDFVDQPYRGVIHMITGGSSVDFDMKRQKRDHYHNINHVAVTGPVVQTKWSHVPLTFDARDVDLRSAPHIDAMVTNCSVAGWDLHKVLVNNGSQADIIFLHAFDRMGISHSLLKPSDNPYGFGGKGTFPVGKIELPLSFGVAPNARSEQVTFNIVDMVYPYNAIMGRGSINKFEAAIHGLYLCMKIPGPQGTIIVYGNQQAARNIERDFVPGQRNVHCLMAQCEVPESASPTAKEHDKAQLQSNDGTKTVPLDQATPKQTVTISEDLTSHDEERLLCCLSKNKGVFAWSTLDLVGVSRSIIEHSLGIDPSVRPKKQRLRKMSDEKTEAAKAEVHRLLEAKFIEPVANPTWLANVVMVQKKSDKWRMCIDFTSLNKACPKDNFPLPRIDKIVDSAXAGCEAMSLL

SEQ ID NO: 8537 - protein, 97 aa, Zea mays
  unsure (1)..(97): unsure at all Xaa locations
  Clone ID: TF_LIB4765-026-R1-K1-C2.pep
IGYSSGRDYYQWARIGTLLRCGRPEVLQWSRSRTGPWELPPGFRFHPTDEELITHYTXRQXRRRRFAXFAVAEXDLNKCEPWDCHAGEMGREEXTSS

SEQ ID NO: 8538 - protein, 326 aa, Zea mays
  Clone ID: TF_ZmC198_13.pep
MAEQLDLPGFRFHPTEEELLEFYLKQVAHGRKLKFDIIPTVHLYRHDPWELPGLARIGEREWYFFVPRDGGRPAKQHHHQSSGARPSRTTERGFWKATGSDRAVRCAHDPKRLIGLKKTLVYYEGRAPRGTKTDWVMNEYRLPDACNNNSNNNNAVPGDSSAAAASSTTTTNNSPKEDIVLCKVYRKAVSLKELEQRVAMEELARATPSASHNAGSPADSMSSSDQDQQTQLVGQGVEIMMTMPVGGISPPPPLPPPVMMSMKQEEEVAEPEAPLPAVLMRPSTLSLPQLEVAKQQQEWMQDPFLTQLRSPWMESWSPYYPSVLNF

SEQ ID NO: 8539 - protein, 322 aa, Zea mays
  Clone ID: TF_ZmC1378_1.pep
MVELEPSVKSEHGGGVGLVLPPGFRFHPTDEEVITSYLLHKFLNPSFAPHAIGEVDLNKCEPWDLPSKAKMGENSKEWYFFCHKDMKYPTGTRANRATKEGYWKATGKDREIFKPAAGRDRDRELVGMRKTLVFYMGRAPRGTKTNWVMHEFRLEGKSRHTCNDLRFNPKDEWVVCKVHHKGAEEASAAKKSAGGGGEEHYYSTATPNVSSVEGGDEFLVDSLLDYSSYFNCFATGGLPLPSTTANSAAAPATNDDDSSWSMLRHAPADQQAMVGSYSLHHQAMKAKTVGGVTSPSFSAGLPSSPVADYVGNDASGYHTNNY

SEQ ID NO: 8540 - protein, 206 aa, Zea mays
  unsure (1)..(206): unsure at all Xaa locations
  Clone ID: TF_LIB5117-019-A1-PF1-A12.pep
MGMPAVRRRERDAEAELNLPPGFRFHPTDDELVEHYLCRKAAGQRLPVPIIAEVDLYRFDPWALPDRALFGTREWYIFTPRDRKYPNGSRPNRAAGNGYWKATGADKPVAPRGGRTMGIKKALVFYAGKAPKGVKTDWIMHEYRLADAGRAAASKKGSLRLDDWVLCRLYNKKNEXEKMQLQQQGGEEMMAEPKRRTRDRHGGHLA

SEQ ID NO: 8541 - protein, 198 aa, Zea mays
  Clone ID: TF_LIB5116-031-A1-PF1-F10.pep
MHPSGGALSVPPGFRFHPTDEELLYYYLRKKVAYEAIDLDVIREIDLNKLEPWDLKDRCRIGTGPQNEWYFFSHKDKKYPTGTRTNRATTAGFWKATGRDKAIFLGSGSRRIGMRKTLVFYVGRAPHGKKTDWIMHEYRLDEDNVEVQEDGWVVCRVFTKKSYTRGVNPAEMAGYDDDELLHPFPVPSSTAGAMHMIT

SEQ ID NO: 8542 - protein, 152 aa, Zea mays
  Clone ID: TF_LIB3591-121-Q1-N6-E2.pep
MRAAKARDTSAVRPAGGVGSARRATASGRWRPAGKEKPVALPRPCGGGSLLVGVKRAMAFVPRRKKKKAAAAAALAIGWVMHEYRLAAPLHKHGCSLAQAQGEWVVCRVFQKGSGRPRRRRQRPVSPSPSSASSCVTDGSSSSSSDMDEVSS

SEQ ID NO: 8543 - protein, 44 aa, Zea mays
  Clone ID: TF_700239811H1.pep
MVAIAAVQQQQQQQRRDAEAELNLPPGFRFDATDDELVAHYLCA

SEQ ID NO: 8544 - protein, 61 aa, Zea mays
  unsure (1)..(61): unsure at all Xaa locations
  Clone ID: TF_LIB3182-016-P2-M1-F1.pep
MNDSACSGARLTPEVRFQPTDFXICTLYLTNKVLNTRLTWTDITEADLNKIAPWNLPSNAK

SEQ ID NO: 8545 - protein, 295 aa, Zea mays
  unsure (1)..(295): unsure at all Xaa locations
  Clone ID: TF_ZmC27_16.pep
MSGAGPDLQLPPGFRFHPTDEELVMHYLCRRCAGLPIAVPIIAEIDLYKFDPWQLPRMALYGEKEWYFFSPRDRKYPNGSRPNRAAGAGYWKATGADKPVGTPKPLAIKKALVFYAGKAPKGEKTNWIMHEYRLXDVDRSARKKNSLRLDDWVLCRIYNKKGGGLEKAAAPAAGGDHKPVFATAAVSSPPEQKPFVAAAGGLPPAFPELAAYYDRPSDSMPRLHADYSSCSEQVLSPEQLACDREVQSQPKISEWERTFASDPVNPAGSMLDPVVGHAGGDPLLQDILMYWGKPF

SEQ ID NO: 8546 - protein, 363 aa, Zea mays
  unsure (1)..(363): unsure at all Xaa locations
  Clone ID: TF_ZmC1509_1.pep
MEQEPHRPMELPPGFRFHPTDEELITHYLARKAADARFAALAVAEADLNKCEPWDLPSLARMGEKEWYFFCLKDRKYPTGLRTNRATEAGYWKATGKDRDVFRGKALVGSKKTLVFYTGRAPRGEKSGWVMHEYRLHAKLHGHGHGQGAAVVVVPKAAGSKNEWVLCRVFKKSLVVGGAAAAAAPTAGKRGGTETSSNSKTGDVAAIAHLPPLMDVSGSGSGAGPPXAAAHVTCFSDALEGQFLDQTTTTPPPEAATAATDDDGHLGALGASSSPFQLPGFAHYYYGGGPPHLHQHHGAASLVQLLEGSVPPCNKGGERERERLSASQDTGLTSDVNPEISSSSGQRFDHDHDHDHHLCCWGY

SEQ ID NO: 8547 - protein, 194 aa, Zea mays
  Clone ID: TF_ZmC8549_1.pep
MSMSFLSMVEAELPPGFRFHPRDDELICDYLAPKLGAKPGFSGCRPPMVDVDLNKVEPWDLPVAASVGPREWYFFSLKDRKYATGQRTNRATVSGYWKATGKDRPVVAARRGALVGMRKTLVFYQGRAPKGRKTEWVMHEYRMEPAAPLLDHQPSSSNSKQDEDWVLCRVICKKKLAAGGRAGGGSSRSLVASN

SEQ ID NO: 8548 - protein, 295 aa, Zea mays
  Clone ID: TF_ZmC27_23.pep
MSGAGPDLQLPPGFRFHPTDEELVMHYLCRRCAGLPIAVPIIAEIDLYKFDPWQLPRMALYGEKEWYFFSPRDRKYPNGSRPNRAAGAGYWKATGADKPVGTPKPLAIKKALVFYAGKAPKGEKTNWIVHEYRLADVDRSARKKNSLRLDDWVLCRIYNKKGGGLEKAAAPAAGGDHKPVFATAAVSSPPEQKPFVAAAGGLPPAFPELAAYYDRPSDSMPRLHADYSSCSEQVLSPEQLACDREVQSQPKISEWERTFASDPVNPAGSMLDPVVGHAGGDPLLQDILMYWGKPF

SEQ ID NO: 8549 - protein, 242 aa, Zea mays
  Clone ID: TF_ZmC604294_1.pep
MTQAAGRRRSMGGASGGDHPQQHGGGDDGHLQQGGGGDMVMPGFRFHPTEEELIDFYLRRRVEGKRFNIELINLVDLYRYDPWDLPALASIGDKEWYFYVPRDRKYRNGDRPNRVTPSGYWKATGADRTVYVEVKRPIGLKKTLVFYVGKAPKGLRSSWIMNEYRLPSGEADRYQKEISLCKVYKRPGIEDNFHLSTTTARSSGSKAAATMEKKHHRTSASPRMAPVFDGGHSSGYMNKPYT

SEQ ID NO: 8550 - protein, 211 aa, Zea mays
  Clone ID: TF_ZmC156397_1.pep
MSRDLEDGHGAVGNVIAAAAAAGGEAVGAGEAGDAHDNDVVMPGFRFHPTEEELIEFYLRRKVEGKRFNVELIAFLDLYRFDPWELPAMAVMGGKEWFFYVPRDRKYRNGDRPNRVTASGYWKATGADRMIRGENNRPIGLKKTLVFYSGKAPKGVRSSWIMNEYRLPPPPTDADPLIPKSEISLCRVYKRSGIDDGHGQSSSSTQASSAR

SEQ ID NO: 8551 - protein, 308 aa, Zea mays
  Clone ID: TF_ZmC1381_1.pep
MAMVASQGGGRRDAEAELNLPPGFRFHPTDEELVVHYLCRKVACQQLPVPIIAEVDLYKFDPWDLPEKALFGRKEWYFFTPRDRKYPNGSRPNRAAGRGYWKATGADKPIAPKGGGGAAGIKKALVFYSGKAPRGFKTDWIMHEYRLADADRAPGKKGSRKLDEWVLCRLYNKKNNWEKVKAEEPEAAAPLRNQQGAAEDSMSDSFQTHDSDIDNNAFGVQNGFGNMVHGQAMTMRNGIGSVARTVKEDSYWFTDLNLDDLQAPYNVTHVLNPNPVQTMNLAAGQGHGYLQSMSSPSTKMWQTILPPF

SEQ ID NO: 8552 - protein, 216 aa, Zea mays
  Clone ID: TF_ZmC5878_3.pep
MSDVTAVMDLEEEEPRLSLPPGFRFHPTDEEVVTHYLTPKAVNNAFSCLVIADVDLNKTEPWDLPGKAKMGEKEWYFFVHKDRKYPTGTRTNRATEKGYWKATGKDKEIFRGKGRDAVLVGMKKTLVFYTGRAPRGDKTPYVMHEYRLEGQLPHRLPRSAKNDWAVCRVFDKDLAAKNAPPQTAPAGRSWRTRTPFFDVDDFLTTPTCSTRRPADA

SEQ ID NO: 8553 - protein, 81 aa, Zea mays
  unsure (1)..(81): unsure at all Xaa locations
  Clone ID: TF_LIB3245-118-P1-K1-E12.pep
MIMIVATHKLLQQPHRHAEAELNLAPGFRFHPTDEELVAHYLCXRAEMRRPPVSIIADVDLYRFDPWDLSERALFGRREWY

SEQ ID NO: 8554 - protein, 211 aa, Zea mays
  Clone ID: TF_LIB4741-095-Q1-K1-A5.pep
MSLSPLDSSSPPAAAAAAATEVPLAPGFRFHPTDEELVSYYLRRRVLGRRLRVGMKKTLVFHAGRAPKGERTNWVMHEYRLLDADGPQDLHVVCRIFQKHGSGPQNGAQYGAPYMEEEWEEDDDAIENGSTHDASGQIAATTCAVDEESNEDDENAYCETNRPARVEPSHLPSVHEMLNPPEMAPLQGQDSKETSDGSWSDVAISLEEILQ

SEQ ID NO: 8555 - protein, 228 aa, Zea mays
  Clone ID: TF_LIB4974-041-A1-K1-E7.pep
SRPAGPGCPNLPPGFHFFPSDEDLVVHFLRRKAANLPCRPDIVPTILLHRYDPWELNGTALQAGNQWYFFSSHAHAHAHSAAGQTRTSPSGYWNPAGADETVVLASSSRVVGLKKTLVFCTGEPFRGFRTNWVMHEYHLQDGPAGCNVGGSSGATTPSSSSSSGSSRRSQRKRVHSSTESINSWVICRVFESSCGSQVSFHDEGTELSCLDEVFLSLDDYDEVSLPNN

SEQ ID NO: 8556 - protein, 347 aa, Zea mays
  unsure (1)..(347): unsure at all Xaa locations
  Clone ID: TF_ZmC1424_1.pep
MGAMTLPPGFRFHPTDDELVGYYLKRKVDNLKIDLEVIPVVHLYKSEPWELPEKSLLPRRDLEWFFFCPRDRKYPNGSRTNRATSTGYWKATGKDRRIACDGGVYGLRKTLVFYRGRAPGGERTAWVMHEYRLCQDLAHGTCNFIGAYALCRVIKRHEGGLPQGESYAKGAAGSARSGQMSKVSSSSSLVSNDQLSASFTPPPTLDVGTMAGSGNAFQSPVGYGYGVTTTATATATTAGLPSSALATPLLIVPSPHDTFXSAATATSSPPRPSRARSHAHLFDTVGMGMGGVSEQELKWDSFACPSTFSSGADMAAASPATLCRQASDGFDDLLAAFFFSDDNRIVF

SEQ ID NO: 8557 - protein, 247 aa, Zea mays
  Clone ID: TF_LIB5116-010-A1-PF1-D6.pep
MADFSSSNGVPPGFRFHPTDEELLLYYLKKKIGFEKFDLEVIREVDLNKIEPWDLQERCRIGSAPQNEWYFFSHKDRKYPTGSRTNRATTAGFWKATGRDKCIRTSYRKIGMRKTLVFYRGRAPHGQKSDWIMHEYRLEEIDEAQGGTSEDGWVVCRVFKKKCFFKIAGGGEGSSSQSADAGAGHMAVSSPLGGHDHADRAAMASHYMHGMHPQYHPQHASSFYYSQMQPPEAYSHHVQVQDLLTTT

SEQ ID NO: 8558 - protein, 128 aa, Zea mays
  Clone ID: TF_LIB3245-339-Q1-K1-C4.pep
KAKMGEKEWYFFCHKDRKYPTGMRTNRATASGYWKATGKDKEIFRGSSPRRVLVGMKKTLVFYTGRAPRGGKTPWVMHEYRLEGSLPPNLHRGAKVRSPGLLSSILLFFKKKKSRDRRMDGAPHGGCF

SEQ ID NO: 8559 - protein, 294 aa, Zea mays
  Clone ID: TF_ZmC12224_3.pep
MALREIESTLPPGFRFYPSDEELVCHYLHKKVANERIAQGTLVEVDLHAREPWELPEVAKLTATEWYFFSFRDRKYATGSRTNRATRTGYWKATGKDREVRSSSSATAAVVGMRKTLVFYRGRAPNGVKSGWVMHEFRLDTPHSPPREDWVLCRVFQKTKAADGDGDGGAQDGDSSSPPAAFTGPSRPRAVSEPPDHSAPPAGGGYYYGLAFGPRQVEVAQQQCYGGGGATVADHHHGFTRDSGGAAGFGATWGRGVAGGECGAGYLDMDGAFDVMMAGCFGGGDMDEFPQVWR

SEQ ID NO: 8560 - protein, 44 aa, Zea mays
  Clone ID: TF_LIB3076-012-Q1-K1-F12.pep
MVTGKDRLIRSRPACTLICVKKTLVLHRCRAPLGHRILWIMHEY

SEQ ID NO: 8561 - protein, 152 aa, Zea mays
  unsure (1)..(152): unsure at all Xaa locations
  Clone ID: TF_ZmC3782_2.pep
ASTVRPRDLPARRXYGDGEYYFFSPRDRKYPNGIRPNRAAGSGYWKATGTDKPIHDAATGEGVGVKKALVFYKGRPPRGSKTNWIMHEYRLAAVAGSTSPLAAYRPPSKFRNASMRVSRSTSIIPESYPLHDLYICSSHYLSYPWCHVELSW

SEQ ID NO: 8562 - protein, 399 aa, Zea mays
  Clone ID: TF_ZmC21867_1.pep
MARSWLITCRGIAKKIRYTNPGANHHISELVAEARRECPNCSYIIDNSDVAMQWPGLPAGVKFDPSELELLEHLEQKVGLGDSRPHVLIDEFIPTIDNDEGICYSHPENLPGMKTDGSNAHFFHRVSKAYGCGQRKRRRTINCSDHTVSDEHVRWHKTGRSKAIYENGVIKGWKKIMVLYKISQRGRKPDRAKWVMHQYHLGKEEDEKDGELVVSKIFFQLANKSMEISETETACEEPDAPASVIGPKTPKTITPQPRHPKSSPCETEQNIFIVQDQLLLDGEDEPTMPIVSLADDAMNPAWCAVAEEEQVVGEASRAQSNSDEPLLCREDPNSLNDEALLPWDYPILSQCRSEIFDRNLNGYGLPDLHNVDLGTPPDLQLADFQFGSQESLGSWLDRI

SEQ ID NO: 8563 - protein, 359 aa, Zea mays
  Clone ID: TF_ZmC27_12.pep
MDCGGALQLPPGFRFHPTDDELVMYYLLRKCGGLPLAAPVIAEVDLYKFDPWQLPEKAFGGEKEWYFFSPRDRKYPNGSRPNRAAGTGYWKATGADKPVGSPRPVAIKKALVFYAGKPPKGVKTNWIMHEYRLADVDRSAAARKKTNNALRLDDWVLCRIYNKKGVIERYDTVDDDDGDGAVAEDVKPVPAPAASKNPRASARVGAAAAAPMKVELPEYGGGYYDYDDLETPSAGMLCFDRPSAPAPADRDSNNSVPWTTHHTHTDNSSSGSERVLSPSPDLPDRDHAESQPAAAAAAAGWWPVGGDWGSAAEDGFMVDVDVDDGSSLFGPLSPGLFARVDAAAFGFGDMLASYLHKPF

SEQ ID NO: 8564 - protein, 368 aa, Zea mays
  unsure (1)..(368): unsure at all Xaa locations
  Clone ID: TF_ZmC27_20.pep
MDCGGALQLPPGFRFHPTDDELVMYYLLRKCGGLPLAAPVIAEVDLYKFDPWQLPEKAFGGEKEWYFFSPRDRKYPNGSRPNRAAGTGYWKATGADKPVGSPRPVAIKKALVFYAGKPPKGVKTNWIMHEYRLADVDRSAAARKKTNNALRPLPNTPMRXLDDWVLCRIYNKKGVIERYDTVNDDDGDGAVAEDVKPVPAPAASKNPRASARVGAAAAAPMKVELPEYGGGYYDYDDLETPSAGMLCFDRPSAPAPADRDSNNSVPWTTHHTHTDNSSSGSERVLSPSPDLPDRDHAESQPAAAAAAAGWWPVGGDWGSAAEDGFMVDVDVDDGSSLFGPLSPGLFARVDAAAFGFGDMLASYLHKPF

SEQ ID NO: 8565 - protein, 170 aa, Zea mays
  Clone ID: TF_ZmC27_7.pep
MDCGGALQLPPGFRFHPTDDELVMYYLLRKCGGLPLAAPVIAEVDLYKFDPWQLPEKAFGGEKEWYFFSPRDRKYPNGSRPNRAAGTGYWKATGADKPVGSPRPVAIKKALVFYAGKPPKGVKTNWIMHEYRLADVDRSAAARKKTNNALRVIHYTMTFLRRTYLSPPKY

SEQ ID NO: 8566 - protein, 223 aa, Zea mays
  Clone ID: TF_ZmC16461_2.pep
MTHPSSSSSSAPAAAPDDPTSLAPGFRFHPTDEELVSYYLKRKVLGRPLKVDAIAEVDLYKVEPWDLPARSRLRSRDSQWYFFSRLDRKHANRARTNRATAGGYWKTTGKDREVRHGARVVGMKKTLVFHAGRAPKGERTNWVMHEYRLEGDGAAGIPQDSFVVCRIFQKAGPGPQNGAQYGAPFVEEEWEADEDDDFGPMPVQRDVFGEHEAPGAMEKDIFR

SEQ ID NO: 8567 - protein, 304 aa, Zea mays
  Clone ID: TF_ZmC545_9.pep
MGQPVTRRRERDEEAELDLPPGFRFHPTDDELVEHYLCRKAAGQRLPVPIIAEVDLYRFDPWDLPERALFGAREWYFFTPRDRKYPNGSRPNRAAGDGYWKATGADKPVAPRAAAADARTLGIKKALVFYAGKAPRGVKTDWIMHEYRLADPGGRAKKGSLRLDDWVLCRLYNKKNEWEKMRLGKGAAAGVIGAAKEEEAMDVSISHSQTHSWGETRTPESEIVDNDPPPPAMMVPKKKRVDDGGSARTSDLFVDLSYDDIQGMYSGLDMLPPAGEDFYSSLFASPRVRGNQPTGAAGSWAPSE

SEQ ID NO: 8568 - protein, 230 aa, Zea mays
  Clone ID: TF_ZmC328_2.pep
KYPNGSRPNRTAGKGYWKATGADKSIVPMGSTRAAGIKKALVFYSGKASRGVKTDWIMHEYRVAQADHTLGKKGSHKLDEWVLCRLYNKRNNWDKVKVEEQELEAAPRRQHHRQSAEDSMSDSFQTHDLDIDNASELHNCYGNNMVQGQAMTARNDIGVVTVKEDNDWFTDMNLDDLQASYNMAHTVNPIPAQTANLVTGQGHGYLQGYGYLQYMNSPSMKMWQTILPPF

SEQ ID NO: 8569 - protein, 110 aa, Zea mays
  unsure (1)..(110): unsure at all Xaa locations
  Clone ID: TF_LIB3245-448-P1-N1-B7.pep
PRQKIKYQLIPRGAIYMGXPMELPSKSDLPMKGNQGDFFAYLDKKYPNGSRSNRATLTGYWKXTGMDRSIKLNKLTLGTKNTLLFHERRPLFCIRTEWIIHEFYIDANGF

SEQ ID NO: 8570 - protein, 176 aa, Zea mays
  unsure (1)..(176): unsure at all Xaa locations
  Clone ID: TF_ZmC27_5.pep
MDCGGALQLPPGFRFHPTDDELVMYYLLRKCGGLPLAAPVIAEVDLYKFDPWQLPEKAFGGEKEWYFFSPRDRKYPNGSRPNRAAGTGYWKATGADKPVGSPRPVAIKKALVFYAGKPPKGVKTNWIMHEYRXLADVDRSAAARKKTNNALRLDDWVLCRIYNKKGVIERYDTVND

SEQ ID NO: 8571 - protein, 78 aa, Zea mays
  Clone ID: TF_700168653H1.pep
TTPVPPFPSARAAASRQPTTEPTSQPTGHSERVKRPMVAMAAGQQQQQQQRRYARRTQPAPVLPVPPDGRGAGGSLAL

SEQ ID NO: 8572 - protein, 164 aa, Zea mays
  Clone ID: TF_ZmC17732_2.pep
RWFAGNFVDARLLSFFVLFLVSSSDFLFLVSMQADSTADYSSDNRISLDAIETIFCEVDELGPQAMVNNTNHCDSCGEYLIHPTMVARGAEQYLELNDLSFSLTDGPDSCGVLFSNGVSVEQLPDLELRFEQFSPDHISNTAIASTSTTVGSSASVPLLEDHRT

SEQ ID NO: 8573 - protein, 158 aa, Zea mays
  unsure (1)..(158): unsure at all Xaa locations
  Clone ID: TF_LIB4743-101-Q1-K1-G2.pep
MQLNKILVLIHFCRSARVDSSQNSRETLFRFPDPVVPMRCECDYANAGKSLIRSDDPEWFFLAPKDRKYPNGSRSNRATVAGYWKATGPDRNIKSKGDKSKQFTIGKKKTLVFHRGRAPKGERTGWIMHEYRTTEPQFESGXKGGYVLYRLFWNQRRN

SEQ ID NO: 8574 - protein, 445 aa, Zea mays
  Clone ID: TF_ZmC151_1.pep
MAQTSLPPGFRFHPTDVELVSYYLKRKIMGKKHIVDAIAEVDLYKFPPWDLCEKSSLRSKDLEWFFFCPRDKKYPNGSRTNRATPNGYWKTSGKDRIIMLNSRTVGMKKTLIFHEGKAPKGDRTDWVMYEYRMEDEDLVSAGFSKDAYVLCKIFKKSGLGPRIGEQYGAPFNEDEWDNAEVETSLFPLTCSEVNPTEGQRAQPTVLAGALLEPEPPLHNSSSTCAGEESSFGHATAEDLTFSYTVASSAIQDTPARMSGDGVVSVNNISNVANDMRSPRDCDEFLSELSRFMNDSPLRNTPLGECSGLPPMSEAEAHAFEVNSFGLYNELSELVELGGADNNLNTSNVETTDYLMLPPDRELSANDYMELNDLLAPDPSFPSEFSAQDNQYMQHPLAQYNGHYDLSGPSEPTMPSIFDVFPPNNGVLATDDPANYLDPAMQFPFS

SEQ ID NO: 8575 - protein, 263 aa, Zea mays
  unsure (1)..(263): unsure at all Xaa locations
  Clone ID: TF_ZmC545_14.pep
MGQPVTRRRERDAEAELDLPPGFRFHPTDDELVEHYLCRKAAGQRLPVPIIAEVDLYRFDPWDLPERALFGTREWYFFTPRDRKYPNGSRPNRAAGDGYWKATGADKPVAPRAAARTLGIKKALIFYAGKAPRGVKTDWIMHEYRLADAGRRAKKGSLRLDDWVLCRLYNKKNEWEKMRLGKGAAAGTVKEEEAMDMSTSHSQITHSWGETRTPESEIVDNDLPFPDPAMMVPKKERVDDGGSARTSDLXVDLSYDDIQSMYS

SEQ ID NO: 8576 - protein, 64 aa, Zea mays
  unsure (1)..(64): unsure at all Xaa locations
  Clone ID: TF_uC-zmflb73187e11b1.pep
EQYYVQPAPGPAVADDATCLAPDXRLHPTDEELVSYYLKRKVLRRPLKADAIADVDLDTLEPWD

SEQ ID NO: 8577 - protein, 273 aa, Zea mays
  unsure (1)..(273): unsure at all Xaa locations
  Clone ID: TF_ZmC198_10.pep
MAVMAGAASMEVEQDLPGFRFHPTEEELLGFYLSRVVHGKQLHFDIIGSLNIYRYDPWDLPAMAKIGEREWYFFVPRDRKXGSGGRPNRTTERGFWKATGSDRAIRSSGDAKRVIGLKKTLVFYQGRAPRGTKTDWVMNEYRLPDHSAAGRAAPPPPPKEDMVICKIYRKATPLKELEQRASAMEEMQTRIGGARATSLVQADGSTGDDYLSSDDTSFLQFPVLVLPRAVGRQLRRAQGGQDGGRGRHDGHGSVDVVLPTACRERCRPGGEAR

SEQ ID NO: 8578 - protein, 99 aa, Zea mays
  Clone ID: TF_LIB3151-013-Q1-K1-H9.pep
MEKVSFVKNGELRLPPGFRFHPTDEEPVLQYLKRKVFSCPLPASIIPEVDVCKSDPWDLPSDLEQERYFFSTKEAKYPNGNRSNRATNSGYWKATGLDK

SEQ ID NO: 8579 - protein, 121 aa, Zea mays
  Clone ID: TF_LIB5117-072-A1-PF1-G4.pep
MSSLSMVEARLPPGFRFHPRDDELVLDYLSRKLGGGAGGAAVASIYGCPAMVDVDLNKIEPWDLPEIACIGGKEWYFYSLRDRKYATGQRTNRATESGYWKATGKDRAISRKGLLAGMRKT

SEQ ID NO: 8580 - protein, 74 aa, Zea mays
  Clone ID: TF_700029568H1.pep
EEAMELPPGFRFHPTDEELITHYLASSSSSLVASSVRAGASSKQDEWVLCRGVKKSIEPPSVLGSKRVSSVACM

SEQ ID NO: 8581 - protein, 281 aa, Zea mays
  unsure (1)..(281): unsure at all Xaa locations
  Clone ID: TF_ZmC12224_2.pep
MGLREIESTLPPGFRFYPSDEELVCHYLYRKVANERSVQGTLVEVDLHEREPWELPXFRDRKYATGPRTNRATKTGYWKATGKDREVRDPAARAVVVGMRKTLVFYQGRAPSGVKSCWVMHEFRLDSPRTTTTPPKEDWVLCRVFQKRKVDGSEQDNGVSPSPPVFASASQSQGVVLPPDQPCVVDAYVVVDQPGSSSVGLAPPQENLGSGLDALLTNGAMWQYTSSVFGHLLPQEATNSPPVMDLGSRGGGGGGDYGCSFFYDSSFEDMANIGFRQGWMG

SEQ ID NO: 8582 - protein, 201 aa, Zea mays
  Clone ID: TF_ZmC38242_2.pep
MTGTTWIIDSQRFATKIKNASGSSDPSKQKWIGNPSKECPKCSHVIDNSDVVHQWPGLPKGVKFDPSDQELIWHLMAKHGKSGIKPHPFIDEFIPTVEEDEGICYTHPQKLPGVKQNGSVSHFFHRTFKAYNTGTRKRRRINTDDADVRWHKTGNTKPVLVDGKHLGCKKIMVLYISPLKGGKAEKTNWVIHQYHLGTGED

SEQ ID NO: 8583 - protein, 323 aa, Zea mays
  Clone ID: TF_ZmC512_1.pep
MTWCNSFNDVRAVENNLATAAAVAAAAAKKQQQQQASSHVNLIRTCPSCGHRAQYEQVQAAATIQDLPGLPAGVKFDPTDQELLEHLEGKARPDARKLHHPLIDEFIPTIEGENGICYTHPERLPGVGKDGLIRHFFHRPSKAYTTGTRKRRKVHTDEQGGETRWHKTGKTRPVFTGGKLKGYKKILVLYTNYGKQRKPEKTNWVMHQYHLGSDEEEKDGELVVSKVFYQTQPRQCGSGSATAKDAIPLAANAATDHHHHHHHDGGNGGGNNMLKEAGIVDFYSPAALISYNQAASNSRVAASAHLVPNFEVHTTSGAAGFGP

SEQ ID NO: 8584 - protein, 306 aa, Zea mays
  Clone ID: TF_ZmC545_5.pep
MVAMAAVQQKQQQQRRDAEAELNLPPGFRFHPTDEELVAHYLCARAAGRRPPVSIIAEVDLYRFDPWDLPERALFGRREWYFFTPRDRKYPNGSRPNRAAGSGYWKATGADKPVEHGGRTAGIKKALVFYHGKPSRGAPRGVKTDWLMAEYRLADAGRRAKKGSLRLDDWVLCRLYNKKNEWEKMRLGKGAAAGAGRVGEAMDMSTSHSQITHSWGETRTPESEIVDNDLPFPDPAMMVPKKERVDDGGSARTSDLFVDLSYDDIQGMYSGLDMLPPAGEDLYSSLFASPRVRGNQPTGPAGLGPF

SEQ ID NO: 8585 - protein, 254 aa, Zea mays
  Clone ID: TF_ZmC594767_1.pep
MQPPPQLPAALPVGFRFRPTDEELVLHYLKPKIAGRAHADLLLIPDVDLSACEPWELPAKALIRSDDPEWFFFAPLDRKYPGGHRSNRSTAAGYWKATGKDRLIRSRPAGTLIGVKKTLVFHRGRAPRGHRTAWIMHEYRTAEPQLPQGQNGSFVLYRLFNKNEEESEASDAADSPSTSSPPIAPEVKTENLSQPTSAKMSPHIATVSSNEPTSNQGDVNLLDVLTQLPDLHPEQAFDGFPTITSSMRPYTDHP

SEQ ID NO: 8586 - protein, 250 aa, Zea mays
  Clone ID: TF_ZmC1378_2.pep
MVEPSVKSSDQHGGGGVDVLFLPPGFRFHPTDEEVITSYLLQKLLNPSFAPHAIGEVDLNKCEPWDLPSKAKMGEEDSKEWYFFCRKGMKYPTGTRANRATKEGYWKATGKDREIFFKPVAGHDDVDRREQLVGMKKTLVFYTGRAPRGTKTNWVMHEFRLIEGRHRTTNDDLLLRFNPKDEWVVCKVHHKGGQHDASAAKAAGGGGKEQHYSSAAGTPNVSSVETGGGDDHDVPSDSCCWGYTQQLPLH

SEQ ID NO: 8587 - protein, 151 aa, Zea mays
  Clone ID: TF_LIB4741-094-Q1-K1-F10.pep
ETSSTSVGWKRNPGGRLVCAIALRPLLPLALMKDLKTKALDKSLEGSVARLTGPKEMLVKSQKEFVYHNCCREKTWKTKGGCSASREQGNPASRQVFGRECCKIDRTKRDVGQVTERVRRPQLMLRENFGWQDSKETGDQAINRQMFSETR

SEQ ID NO: 8588 - protein, 283 aa, Zea mays
  Clone ID: TF_LIB4758-097-R1-K1-B9.pep
LEPASSPSPVVRRPTSRTTERGFWKATGSDRAVRCAHDPKRLIGLKKTLVYYEGRAPRGTKTDWVMNEYRLPDACNNNNNNNNAVAGDSSTAAAASSTTTTNNSPKEDIVLCKVYRKAVSLKELEQRVAMEELARATPSAPTNAGSPADSMSSSDQDQQTQLGQGRSGDHDDDARRQHLTTACDDEHEARGGGRARGGAAAGGADEAVDAEPAAAGGGEAAAGVDAGPLLDAAAEPMGWRAGLPTTPASSTFNQCNLRISDRPSSSISSYIYMVIGPTDYTNS

SEQ ID NO: 8589 - protein, 260 aa, Zea mays
  Clone ID: TF_ZmC13898_1.pep
MERPAQAPTQLPPGFRFHPTDEELVVLYLRRKALARPLPAAVIPVVHDVAGLDPWDLPGASEGEGYFFSLRRAPATGRGSRRRRAGSGYWKATGKEEPVFLQCGGGGVGGKRQLLVGGKTALAFHRSEPSPPSSSRTGWVMHEYRLAAASRGVAEQRKKNASHGCCDAEPGEWVVCRVFLKKGARRSRPGRDGNHSRALRHRASAAPPQLREGVGGRQPLLFPAPQSPSSSCVTGVTDLSDEEDEVSSGSITRVAPQREA

SEQ ID NO: 8590 - protein, 81 aa, Zea mays
  Clone ID: TF_LIB5117-061-A1-PF1-E7.pep
MNSLSMVEARLPPGFRSHPRDDELVLDYLAKKLGGGGGGAAAAVASMYGCPTMVDVDLNKIEPWDLPEIACIGGKECYFYC

SEQ ID NO: 8591 - protein, 231 aa, Zea mays
  Clone ID: TF_ZmC3684_1.pep
APKGQKTHWVMHEYRLEGAYAYHFLPSSTRDEWVIARVFQKPGEVPPAARKHRLGALSSTTGTAAGDSCFSDSTSASIGGASSSSTPGPLFASAAAAVANAGAADGDTSSYCGGAANHGNLVTGRELVPCFSTATINGPLVAAALGIGQPYNAAPLPFEQQPPPPAFLPSLRSLQDNLQLPPFLSAGGLGGGGALHWLPAGGMEVKVEGRSAPPQMAVGPGQLDGAFGWSF

SEQ ID NO: 8592 - protein, 217 aa, Zea mays
  Clone ID: TF_LIB3912-048-Q6-N6-H8.pep
APHGQKTDWIMHEYRLEDADDDDAQGGTSEDGWVVCRVFKKKCFFKIGGGEGSTTSSQGADAGGHLATMSPPLGGHHDLAYMHPHPYYHHAASYYSQMQAPGPHATAYSHHVQVQDLLTNHRPTDDDGAGTGYDFSGLPVENQPGGGLDVGSSDGVATDDGGQLAGERRDQTTGTAADHQWQAMDGFSNGGSAEVQQMTGAQRGGGDGFVGLRKVKT

SEQ ID NO: 8593 - protein, 119 aa, Zea mays
  unsure (1)..(119): unsure at all Xaa locations
  Clone ID: TF_LIB4738-096-Q1-K1-A4.pep
MPPRQHASIAMPISGDANGDGISRRSRLMTNLPCGLRFHPTDKELMMHYLMRNYGSLPGPVPFIXQYNIYHSNRCKLPAYALFCHKDRFFFTPCYRWYTNGAPPNRATGSANWKATACD

SEQ ID NO: 8594 - protein, 157 aa, Zea mays
  unsure (1)..(157): unsure at all Xaa locations
  Clone ID: TF_LIB4739-110-Q1-K1-D7.pep
MPRSGGGGNGGGISSSSRVMPNLPAGFRFHPTDEELMVHYLMRQAASMPCPVPIIAEVNIYQCNPWDLPAKALFGDKXEGFFFSPRDRKYPNGARPNRAAXPXYWEATGTDXAXPVVVHAHEPRRRQHSSSGVRKALVFLXGRPXKGHXTDWIMHEY

SEQ ID NO: 8595 - protein, 660 aa, Zea mays
  Clone ID: TF_ZmC12473_1.pep
MVEMAVVELRTLPLGFRFHPTDEELVTHYLKGKITGRINSESEVIPEIDVCKCEPWDLPDKSLIRSDDPEWFFFAPKDRKYPNGSRSNRATEAGYWKATGKDRIIKSKGDKRKQHTIGMKKTLVFHRGRAPKGERTGWIMHEYRTTEPEFESGEQGGYVLYRLFRKQEEKTERSSPEEVDRSGYSPTPSRSSPDNLEANEEANTPLNKESPESALHESPIELPKSVETNGGSMTRWLADRNDNLMATAPDVSHIPFHGHAAGVAKVDPSVGASGHLVNPHNGNDDYNKFVSDFTPILPLENAFFTDIQQGAFGFDGIMNPLDPLDAFLNQTLVDPDEHSSTTSKVQYDSDIPTEFENHWNMKVEPQDDQCWWANIGFEPDEPNPLLPCDTTDQDILSVDSGADSFNELFNSMEETGITVRPQQLDSTVQPNHVFASQGNATRRLRLQVECREIITKDESEDEVSCVLTPDCLNDSVEESTAEKDVASDGDEAESTGIVIRSHHPAPRSSSESSFTQQGTAMQRLRLQSGLNKGQRPSTDDSSSCIIDEPGSQHKAEKAEIEEDASTNLAGSADDLPGNIHDDEQKNIPEHGAEMTSPEAKSVLRLRKTSEEGNKDVKQESCLEPHVRAPMQKGGFQSYIIWLVLPVALLLLLCVGTYGWV

SEQ ID NO: 8596 - protein, 162 aa, Zea mays
  unsure (1)..(162): unsure at all Xaa locations
  Clone ID: TF_ZmC5878_2.pep
MSEVSVINQAEVEDAGAGQLDLPPGFRFHPTDEEIISHYLAHKALNHRFVSGVIGEVDLNKCEPWDLPGRAKMGEKEWYFFCHKDRKYPTGTRTNRATETGYWKATGKDKEIFRGRGVLVGMKKTLVFYRXRAPRGEKTGWVMHEFRLEGKLPERVPRSART

SEQ ID NO: 8597 - protein, 85 aa, Zea mays
  Clone ID: TF_LIB4720-015-R1-K1-G2.pep
TSQRKQRSFDFCIIPFVFIKWSPILLSDSWTKAPKGDRTDWVMYEYRMEDEDLVSAGFSKDAYVLCKIFKKRGLGPRIGEHHGSS

SEQ ID NO: 8598 - protein, 281 aa, Zea mays
  Clone ID: TF_LIB3136-019-C9_FLI.pep
RATTAGFWKATGRDKAIFLGNASRRIGLRKTLVFYIGRAPHGKKTDWIMHEYRLDQENVEIQEDGWVVCRVFKKKSYHQRGLNPAEMAAALDDDELQPFPVPIPGSSLQPTEHKTNPTHLMQYDYPSFDPSMQLPQLMSDDQEQEQPVRPTLLPGHPGVAMASMSSLNIECSQNLTKLTSNGSDEMLHVGHGGGAGGGVVVDRFAGTTTDWSILDKLLASHQNLDRLFHGKVVTTASASPMAVPVYHQQLMELGGSSSSLQRLPLQYLGGETADLLRYHPK

SEQ ID NO: 8599 - protein, 108 aa, Zea mays
  Clone ID: TF_LIB4574-005-Q1-K1-F7.pep
LPTSCQFGPGANNCNNKAQLFWSLGAPRKGAISWSVHGEPKDFTKNQGGKKNGLGRFSVCGGVCSLIKKEAPFFFFFFFFFFFFFFFFFFFFFFFKIPFFFFFFLFFF

SEQ ID NO: 8600 - protein, 277 aa, Zea mays
  Clone ID: TF_ZmC198_11.pep
LGTSRPAKQHHHQSSGARPSRTTERGFWKATGSDRAVRCAHDPKRLIGLKKTLVYYEGRAPRGTKTDWVMNEYRLPDACNNNNNSNNTVAGDSSAAAAASSTCTTNNSPKEDIVLCKVYRKAVSLKELEQRVAMEELARATPSASHNAGSPADSMSSSDQDQQTQLGQGGVEIMMTMPVGGISPQPPLPPPVMMSMKQEEEVAEPEAAPLPAVLMRPSTLSLPQLEVAKQQQEWMQDPFLTQLRSPWMESWSPYYPSVLNFYQCNLRISDRPSSSIK

SEQ ID NO: 8601 - protein, 197 aa, Zea mays
  Clone ID: TF_ZmC13898_2.pep
MDRPAQAPTQLPPGFRFHPTDEELVVLYLHRKALARPLPAAVIPVVHDVARLDPWDVPGASEGEGYFFSLRRAPATGRRRRAGSGYWKATGKEKPVFLQCGGEQRQLLVGVKTALAFHRREPPPPSSRTGWVMHEYRLAVPRGVADQRKKNARHGYVAEPGEVGRVPGLPERQEPGRRQQNFATRRLRSAAAAAAAA

SEQ ID NO: 8602 - protein, 455 aa, Zea mays
  Clone ID: TF_ZmC13658_2.pep
MSISVNGQSVVPPGFRFHPTEEELLTYYLKKKVASERIDLDVIRDVDLNKLEPWDIQEKCRIGSGPQNDWYFFSHKDKKYPTGTRTNRATAAGFWKATGRDKAIYASPGARRIGMRKTLVFYKGRAPHGQKSDWIMHEYRLEAPVDAGAGAAHHLLLPAAEHPPYYTSPPQAPSSTTTAERKLKEGAPAGLGTDEAKQVAWTIRGAAGDQAAQEQEGWVICRVFKKKNLVHHGQSSGVKQQAEGDDHAASHTAAAAAHMDESSPSQCSSVTVISDHVHANVNDKQQQAQASLLMMHTHHSASSDDDALDHILQQYMGGGRQAPAADAKPALLELDHRLHHHHLAAAPTNTRAAAGFYGKFMKLPPLEHAGLPPSPPPGAREYGAAAAAGWDDDDDALDRLAAYDHLNGLSNDASKNMAAFFDVEPSAAAAAVDGDLWSLARSVSALHADLTMNNV

SEQ ID NO: 8603 - protein, 155 aa, Zea mays
  unsure (1)..(155): unsure at all Xaa locations
  Clone ID: TF_LIB4759-043-Q1-K1-B4.pep
MAPIKEIMAGDHGGGEGKEVVVLVGDYDYELEEEDEDMLPGFRFHPTDEELVTFYLRRKVAGKRLTIEIIKDLNIYKHDPWDLPKSSSTISGETKEWYFFCLRXRKYRNSIRPNRVTGSGFWEATGFDRPIHSAASGRAGDPIGFKKSLVFYPRQ

SEQ ID NO: 8604 - protein, 137 aa, Zea mays
  unsure (1)..(137): unsure at all Xaa locations
  Clone ID: TF_LIB4743-075-R1-K1-G11.pep
MSISVNGQSCVPPGFRFHPTEEELLNYYLRKKVASQQIDLDVIRDVDLNKLEPWDIQERCKIGSGPQNDWYFFSHKDKKYPTGTRTNRATAAGFWKATGRDKAIYSAVRRMGMRKTLVFYRGXAPYGHKSDWIMHEN

SEQ ID NO: 8605 - protein, 62 aa, Zea mays
  Clone ID: TF_LIB3088-025-Q1-K1-E9.pep
TSPTGEHTHCHPFTAGEPINIFRFHTTDTELGLHYLKKKSSSTPFSDAIIADVDMYKFDPCK

SEQ ID NO: 8606 - protein, 150 aa, Zea mays
  Clone ID: TF_ZmC198_7.pep
MAAEQQHQLDLPGFRFHPTEEELLEFYLKQAARGRKLKFDIIPTVHLYRHDPWELPSLARHRHAVRVPQHRLPRRLHVVVGDRDGARGRRLALTVSCDEHEERGGGEESAAAGPLPDAAAEPTDGELVVCLLRQRPQLLTKIHTIQQLYM

SEQ ID NO: 8607 - protein, 229 aa, Zea mays
  Clone ID: TF_LIB4759-074-R1-K2-C8.pep
MEDDEEKPSQRITNKQEEDEEDDLVFPGFRFHPTDLELVGFYLKRKVEKKGFRIDIIREIDIYKHDPWDLPNEARHVVQGAGGDKDDWYFFCLRGRKYRNSIRPNRVTGSGFWKATGIDKPIHDGGAGERVVGLKKSLVYYRGSAGRGTKTDWMMHEFRLPSAELVELHDAGIWTICRIFKKNTSYTRRCQQQKQEHGSKRSHHQQQEEQELQYYYDYYRYHHTISTVT

SEQ ID NO: 8608 - protein, 301 aa, Zea mays
  Clone ID: TF_ZmC545_1.pep
MVAMAAVQQQRRDAEAELNLPPGFRFHPTDEELVAHYLCARAAGRRPPVSIIAEVDLYRFDPWDLPERALFGRREWYFFTPRDRKYPNGSRPNRAAGSGYWKATGADKPVEHGGRTAGIKKALVFYHGKPPRGVKTEWIMHEYRLAEAGGARAKKSGAGTLRLDDWVLCRLYNKKNEWEKMQQQKEKEKEKKAMESEASLSHSHSDTRTPESEIDDDTFPELGSLPAFDDMGPAPAAAATAGVVLPKEEVEDFGDLGGDDWLAGINLDDLQMPGDAADFYGSMLVSPMAAKMEPDGGFPFF

SEQ ID NO: 8609 - protein, 302 aa, Zea mays
  Clone ID: TF_ZmC545_10.pep
MVAMAAVQQKQQQQRRDAEAELNLPPGFRFHPTDEELVAHYLCARAAGRRPPVSIIAEVDLYRFDPWDLPERALFGRREWYFFTPRDRKYPNGSRPNRAAGSGYWKATGADKPVEHGGRTAGIKKALVFYHGKPPRGVKTEWIMHEYRLAEAGGARAKKSGAGTLRLDDWVLCRLYNKKNEWEKMQQQKEKEKEKKAMESEASLSHSHSDTRTPESEIDDDPFPELGSLPAFDDMGAAPAPAGVVLPKEEVEDFGDLGGDDWLAGINLDDLQMPGDAADFYGSMLVSPMAAKMEPDGGFPFF

SEQ ID NO: 8610 - protein, 300 aa, Zea mays
  Clone ID: TF_ZmC545_3.pep
MVAMAAVQQQQQQQRRDAEAELNLPPGFRFHPTDEELVAHYLCARAAGRRPPVSIIAEVDLYRFDPWDLPERALFGRREWYFFTPRDRKYPNGSRPNRAAGSGYWKATGADKPVEHGGRTAGIKKALVFYHGKPPRGVKTEWIMHEYRLAGDAKKSGAGTLRLDDWVLCRLYNKKNEWEKMQQQKEKEKKAMESEASLSLSHSHSDTRTPESEIDDDPFPELGSLPAFDDMGPGAAPAPAGVVLPKEEVEDFGDLGGDDWLAGINLDDLQMPGDAADFYGSMLVSPMAAKMEPDGGFPFF

SEQ ID NO: 8611 - protein, 389 aa, Zea mays
  Clone ID: TF_ZmC530453_1.pep
MRSMESTDSSSGELPPQKQPSSAPDLPPGFRFHPTDEELVVHYLKKKAASVPLPVAIIAEVDLYKFDPWELPDKATFGEQEWYFFSPRDRKYPNGARPNRAATSGYWKATGTDKPIMASGGNREKVGVKKALVFYRGKPPKGLKTNWIMHEYRLADAASSTTSRPPPPCNAGGKATSLRLDDWVLCRIYKKIDKLGVGDPPRIMECGEDSVENAVAAYPTHAAAAAMAVAVAGGGGAYHTGNYTSLIHHHHEDSFLVDGLLTAEDAGGSSLSQLAAAARAAAPTDTTKQLLVPSSTTPFNWLDASALTILPPAKRFHGYNRDTTDGGGTSLPSPSERNNLQAAVGAVDSGASGGTSAVIPSFLNPLGVQGATTYHHHAIFGTPVTPEAA

SEQ ID NO: 8612 - protein, 312 aa, Zea mays
  Clone ID: TF_ZmC545_4.pep
MGLPMRRERDAEAELNLPPGFRFHPTDDELVEHYLCRKAAGQRLPVPIIAEVDLYRFDPWDLPERALFGAREWYFFTPRDRKYPNGSRPNRAAGNGYWKATGADKPVAPRGRTLGIKKALVFYAGKAPRGVKTDWIMHEYRLADAGRAAAAKKGSLRLDDWVLCRLYNKKNEWEKMQLGKTAVAGVGATKEEAMDMATSHTHSHSQSHSHSWGETRTPESEIVDNDPFPELDSFPAFQDPAMMMTVPKEEQVDGCSAKSGNLFVDLSYDDIQGMYSGLDMLPPPGEDFYSSLFASPRVKGNQPAGAAGLGQF

SEQ ID NO: 8613 - protein, 357 aa, Zea mays
  Clone ID: TF_ZmC545_6.pep
MTAQNPPTGQDTQSRATPPTIGDQQPAAGASCLKTPSRSRTEDWQAQPKPPLLVLGFIASNPDHIMGLPVTRRRERDAEAELDLPPGFRFHPTDDELVEHYLCRKAAGQRLPVPIIAEVDLYRFDPWDLPERALFGAREWYFFTPRDRKYPNGSRPNRAAGDGYWKATGADKPVAPRGARTLGIKKALVFYAGKAPRGVKTDWIMHEYRLADAGRRAKKGSLRLDDWVLCRLYNKKNEWEKMRLGKEGAAKEEAMDMSTSHSWGETRTPESEIVDNDPPFPDPPAPAMMVPKKERVDAGGSARSSDLFVDLSYDDIQGMYSGLDMLPPPGEDFYSSLFASPRVRGNQPTGAAGLGPF

SEQ ID NO: 8614 - protein, 381 aa, Zea mays
  unsure (1)..(381): unsure at all Xaa locations
  Clone ID: TF_ZmC13658_1.pep
MSISVNGQSCVPPGFRFHPTEEELLNYYLRKKVASQEIDLDVIRDVDLNKLEPWDIQEKCKIGSGPQNDWYFFSHKDKKYPTGTRTNRATAAGFWKATGRDKAIYNAVKRIGMRKTLVFYKGRAPHGQKSDWIMHEYRLDDPAAAAAAGSGDAVANDDAAATAAAAAAASSDGGQEDGWVVCRVFKKKHHHKESGGGGGNKHGSSNSEHGHGGAGKASAAAAAAAHQHQHHGGLQYSSSDEALDQILQYMGRSCKQEHELVSPAPAPPGRAAASRYLRPIETVLGGHAFMKLPALESXVPAPSPPPGAREYAAAGWDDDDALDRLAAYDHLNGLSNDDASKNMAAFFDVEPSAAAAAVDGDLWSLARSVSALHADLTMNNV

SEQ ID NO: 8615 - protein, 293 aa, Zea mays
  Clone ID: TF_ZmC27_10.pep
MSGAGPDLQLPPGFRFHPTDEELVMHYLCRRCAGLPIAVPIIAEIDLYKFDPWQLPRMALYGEKEWYFFSPRDRKYPNGSRPNRAAGAGYWKATGADKPVGTPKPLAIKKALVFYAGKAPKGEKTNWIMHEYRLADVDRSARKKNSLRLDDWVLCRIYNKKGGGLEKAPAAGGDHKPVFATAAVSSPPEQKPFVAAAGGLPPAFPELAAYYDRPSDSMPRLHADYSSCSEQVLSPEQLACDREVQSQPKISEWERTFASDPVNPAGSMLDPVVGHAGGDPLLQDILMYWGKPF

SEQ ID NO: 8616 - protein, 293 aa, Zea mays; identical to SEQ ID NO: 8615
  Clone ID: TF_ZmC27_18.pep

SEQ ID NO: 8617 - protein, 229 aa, Zea mays
  Clone ID: TF_ZmC27_2.pep
MDCGGALQLPPGFRFHPTDDELVMYYLLRKCGGLPLAAPVIAEVDLYKFDPWQLPEKAFGGEKEWYFFSPRDRKYPNGSRPNRAAGTGYWKATGADKPVGSPRPVAIKKALVFYAGKPPKGVKTNWIMHEYRLADVDRSAAARKKTNNALRLDDWVLCRIYNKKGVIERYDTVNDDDGDGAVAEDVKPVPAPAASKNPRASARVGAAAAAPNEVELPEYGGGYYDYDDL

SEQ ID NO: 8618 - protein, 295 aa, Zea mays
  Clone ID: TF_ZmC27_21.pep
MSGAGPDLQLPPGFRFHPTDEELVMHYLCRRCAGLPIAVPIIAEIDLYKFDPWQLPRMALYGEKEWYFFSPRDRKYPNGSRPNRAAGAGYWKATGADKPVGTPKPLAIKKALVFYAGKAPKGEKTNWIMHEYRLADVDRSARKKNSLRLDDWVLCRIYNKKGGGLEKAAAPAAGGDHKPVFATAAVSSPPEQKPFVAAAGGLPPAFPELAAYYDRPSDSMPRLHADYSSCSEQVLSPEQLACDREVQSQPKISEWERTFASDPVNPAGSMLDPVVGHAGGDPLLQDILMYWGKPF

SEQ ID NO: 8619 - protein, 229 aa, Zea mays
  unsure (1)..(229): unsure at all Xaa locations
  Clone ID: TF_LIB4759-095-Q1-K1-D5.pep
RPGLLNTHACALPPGAAYEPDMNREHSSSSSKLINEKLEEHRISTAKHCPHCGEKIDSKPDWVGLPAGVKFDPTDQELIEHLEAKVKDEGSRSHPLIDEFIPTIDGEDGICYTHPEKLPGVTRDGLSKHFFHRPSKAYTTGTRKRRKIQTECDVHKGETRWHKTGKTRPVMVSGRQKGCKKILVLYTNFGKHRKPEKTNWVMHQYHLGDLEEEKEGEAXWVCKIFYQTQ

SEQ ID NO: 8620 - protein, 339 aa, Zea mays
  Clone ID: TF_ZmC21043_1.pep
MHHHHQDQAMGDALWDLLGEEMAAAGGEHGLPPGFRFHPTDEELVTFYLAAKVFNGACCGIDIAEVDLNRCEPWELPDAARMGEREWYFFSLRDRKYPTGLRTNRATGAGYWKATGKDREVLNAATGALLGMKKTLVFYKGRAPRGEKTKWVLHEYRLDGDFAAARRPCKEEWVICRILHKAGDQYSKLMMVKSPYYLPMAMDPSSFCFQEDPTGHPLPNPSGCTPFHHGHPHHSMQPPPPLPPSNHAGKAVFTGAAAACCMQQEPADGSNSAVLPMPPFPPFTTIVAGKPAVPAPPPQVVNAGPQEPPPPTWLEAYLQHTGGILYEMGVGPTAAPRGA

SEQ ID NO: 8621 - protein, 315 aa, Zea mays
  Clone ID: TF_ZmC328_1.pep
MAMVAAAEGSGRRDAEAELNLPPGFRFHPTDEELVVYYLCRKVARQQVPVPIIAEVDLYKFDPWDLPEKALFGRKEWYFFTPRDRKYPNGSRPNRTAGKGYWKATGADKSIVPMGSTRAAGIKKALVFYSGKAPRGVKTDWIMHEYRVAQADHTLGKKGSHKLDEWVLCRLYNKRNNWDKVKVEEQELEAAPRRQHHLQSAEDSMSNSFQTHDSDIDNVFELQNCYGNNMVQGQAMTPRNDIGVVTVKEDNDWFTDMNLDDLQASYNMAHTVNPNPAQTANLVAGQGHGYLQGYGYLQYMNSPSMKMWQTILPPF

SEQ ID NO: 8622 - protein, 191 aa, Zea mays
  Clone ID: TF_LIB4759-059-R1-K1-C5.pep
MMAIKSLSMVEASLPPGFRFHPRDDELVLDYLAKKLGGGGGPVVVSIYGCPTMVDVDLNKCEPWDLPDIACIGGKEWYFYSLRDRKYATGQRTNRATDSGYWKATGKDRPISRKGLLVGMRKTLVFYQGRAPKGKKTEWVMHEFRMEGRDDPMKLPFKVIINYDDLISSLCILLFSVVCVDSFYSQFSNNI

SEQ ID NO: 8623 - protein, 657 aa, Zea mays
  Clone ID: TF_ZmC16461_1.pep
MSLSPLDSSSPPAAAAAAATEVPLAPGFRFHPTDEELVSYYLRRRVLGRRLRVDAIAEIDLYRLEPWDLPSLSRIRSRDAQWYFFARLDRKVAGAGAGGRGGPGNRTNRATPRGYWKTTGKDREVHHRGKPVGMKKTLVFHAGRAPKGERTNWVMHEYRLLDADGPQDLHVVCRIFQKHGSGPQNGAQYGAPYMEEEWEEDDDAIENGSTHDASGQIAATTCAVDEESNEDDENAYCETNRPARVEPSHLPSVHEMLNPPEMAPLQGQDSKETSDGSCSDVAISLEEILQEPLSNISVENMHRLEGQNATDDNISVDNLLSAYPTKDNGYVGQYNTMNGSAPADEAHARWPLRTYSNQNYVNGPLADEFFDTGNDTNGVAYSRQQQADGFPAPRQVDESMVFYDAPSDYNLVDGKDDFVYLNDILNEPLGNESLFDGDDMMAYFDATENDFKYDILGSGQGLDYPLADMPLNFAQKSDKEDKFTFEGISEVPEANPQYGASSSGSHEDLYTDTEFLGVPTDDTADKTYGNRLASMLGSIPAPPAMASEFPPSTGKSAGMLSAVSSSSIRFTAGIIQLDGLTFSSGSGQWPLQKNGDLSLLVSFAVEGDVASKLPVGLGRATRISTVPMVLRSGFYLFFMSAMILLFSYKVGSCIYSR

SEQ ID NO: 8624 - protein, 195 aa, Zea mays
  Clone ID: TF_LIB4729-016-R1-K1-B12.pep
MLMSFAGSAPDPTILMYSESWPGLPRGVEFNPSDSDLLWHLAAEVGNALAERHPFINEFIKFVDDVREFICTHPQHIPGVRQDGRASYFFHRSFEPYINENDVNNCWKKIGSPRSIILDGTLTGCKEVFALYADMPSDKRSQETDWRLHQYHLQNTVKAESEIVASKIFLASRNSLCELAEETHIESEWDVSTHK

SEQ ID NO: 8625 - protein, 374 aa, Zea mays
  unsure (1)..(374): unsure at all Xaa locations
  Clone ID: TF_ZmC79048_1.pep
MKNVAKCDTWCELQNPANHRVFERKLRPKPSGGGHVCLGVTHSWRNWPTTAAAVLLVLWCPGLATSVPSPGLRWGLHWRRAPTSYWVYICMLMSFAGSAPDPTILMYSESWPGLPRGVEFNPSDSDLLWHLAAEVGNALAERHPFINEFIKFVDDVREFICTHPQHIPGVRQDGRASYFFHRSFEPYINENDVNNCWKKIGSPRSIILDGTLTGCKEVFALYADMPSDKRSQETDWRLHQYHLQNTVKAESEIVASKIFLASRNSLCELAEETHIESEWDVSTHKDSSVEWAKGFNPEICTETDELDHISLKERYRILLXDKRLGLTTVSGGKSIMRVETSRASPKRNHEGKISKEDIFSMWXEISSAPSIDRE

SEQ ID NO: 8626 - protein, 156 aa, Zea mays
  Clone ID: TF_LIB4725-023-R2-K1-H9.pep
GPGNRTNRATPMGYWKTTGKDREVHHRGKPVGMKKTLVFHAGRAPKGERTNWVMHEYRLLDADGPQRRSSPYGFVFSQFMDLHVVCRIFQKHGSGPQNGAQYGAPYMEEEWEEDDDAIENGSTHDASGQIAATTCAVDEESNEDDENAYCETTDLL

SEQ ID NO: 8627 - protein, 131 aa, Zea mays
  Clone ID: TF_ZmC1120452_1.pep
MEASVGAAGGGGGKSKKEEESLPPGFRFHPTDEELITYYLRQKIADASFTARAIAEVDLNKCEPWDLPGKDRRKPTVYICTRTCMHTAYSVRQLFTIKSQLINSTNDSSPIFITGGKTFDLNYITRGKKRN

SEQ ID NO: 8628 - protein, 109 aa, Zea mays
  Clone ID: TF_ZmC7355_2.pep
MSAERAPVLVRHGGGGVEALRQLPPGFRFRPTDEELVVQYLRRKAIGVPLPAAVIPVFRDLYSRDPWDVVAVSAPDTRSEGEKYFFAVRPASGGKSSGAGTGSRAAADK

SEQ ID NO: 8629 - protein, 169 aa, Zea mays
  unsure (1)..(169): unsure at all Xaa locations
  Clone ID: TF_LIB5117-019-A1-PF1-G7.pep
METLRDMALPPGFGFHPKDTELVSHYLKKKIXRSNRATVAGYWKSTGKDRAIKVDKRTIGTKKTLVFHEGRPPTGKRTEWIMHEYYIDENECQACPDMKDAFVLCKVTKRIDWTSENGNEVGNNNPQPQQANVAAILAVSVEQPDTAASSIYWVMNXPSDAATVDIPAH

SEQ ID NO: 8630 - protein, 134 aa, Zea mays
  unsure (1)..(134): unsure at all Xaa locations
  Clone ID: TF_LIB3607-017-Q6-K6-E4.pep
MVEPSVKSSEHGGGGIDLLFLPPGFRFHPTDEEVITSYLLQKLLNPSFAPHAIGEVDLNKCEPWDLPSMAKMGEEDSKEWYFFCRKGXKYPAGTRANRATKEGFWKASGSVRVIFFKPAAGHDSLRRRVPLVVL

SEQ ID NO: 8631 - protein, 273 aa, Zea mays
  unsure (1)..(273): unsure at all Xaa locations
  Clone ID: TF_ZmC12224_6.pep
MGLRDIELTLPPGFRFYPSDEELVCHYLHGKVANEQLAGAGAAXVEVDLHAHEPWELPDVAKLSTNDWYFFSFRDRKYATGQRTNRATRTGYWKATGKDRAMRDPAARAVVVGMRKTLVFYQGRAPSGVKSCWVMHEFRLDSPRTTTTPPKEDWVLCRVFQKRKVDGSEQDNGVFPSPPVFAGTSQSQGVVLPPDQPSVVDAYVVVDQPGSSSVGLAPPQENLGSGLDALLTNGAMWQYTSSVFGHLLPQEATSSPPVMDLGSGGGRGRRLRV

SEQ ID NO: 8632 - protein, 265 aa, Zea mays
  Clone ID: TF_ZmC99_1.pep
MEVKKEATKATLPPGFRFRPTDEELIVHYLRRRALASPLPAAVDIPDVRILAHDPSDLLPPGGLAGFGEQERYFFTCKEAKYVKGRRANRATGAGYWKATGKEKPVAVAVRGVQGQSQSQSQAVLVGMKRSLVFYRGKPPTGSKTEWVMHEYRLAGAGLAPCRRRHADADGDGVARAPAEGWVLCRVFRKKGSAAVARRPGDRSDGEGDESACGGGGGGGRGFIDFFARADAAGRRRRAPSPAVSSRWLADASPQPEQEATSRGP

SEQ ID NO: 8633 - protein, 154 aa, Zea mays
  Clone ID: TF_ZmC519245_1.pep
MDHGFDGALQLPPGFRFHPTDEELVMYYLCRKCGGLPIAAPVIAEVDLYKFEPWRLPEKAAGGGPDAKEWYFFSPRDRKYPNGSRPNRAAGTGYWKATGADKPVGSPRPVAIKKALVFYAGKPPKGVKTNWIMHEYRLADVDRSAAARKKSNNA

SEQ ID NO: 8634 - protein, 195 aa, Zea mays
  unsure (1)..(195): unsure at all Xaa locations
  Clone ID: TF_LIB4727-007-R1-K1-G5.pep
HRDTRDFDIYKHDPWDLPXSSSISGEKEWYFFCLRGRKYRNSIRPNRVTGTGSGFWKATGIDRPVHSSGRAGGGPVVVVGLKKSLVFYRGSAGKGTKTEWMMHEFRLPPRADDTAHATPASEREAEVWTVCRVFRRNFTYKKHXQQQQQQQQMAAGGSEVSAGAGAATVAQPGESSSVTGGVESDTXDEYTNTIP

SEQ ID NO: 8635 - protein, 363 aa, Zea mays
  Clone ID: TF_ZmC38242_1.pep
VVHQWPGLPKGVKFDPSDQELIWRLMAKHGKSGIKPHPFIDEFIPTVEEDEGICYTHPQKLPGVKQNGSVSHFFHRTFKAYNTGTRKRRRINTDDADVRWHKTGKTKPVLVDGKHLGCKKIMVLYISPLKGGKAEKTNWVIHQYHLGTGEDERDGEYVVSKLFFQQQFKPGDKNAQELTTSDDLESMAAESNLPDFTTLPTDKHVGTVQEVVHNPEHNLYQLNRNCEISIEETVVLPPSVKTTKDGDNLQSQDQKLWEGDSQFELLDSQQLAEGLALCDEFLLSQSQTSCGGGDEPRETKPCLAAYAHLSAEDFKKDLEECQRLEPTDNTNLELDNTDEFRLSQIEFSQDSFMTWAAEKITDD

SEQ ID NO: 8636 - protein, 114 aa, Zea mays
  Clone ID: TF_ZmC545_12.pep
MGLPMRRERDAEAELNLPPGFRFHPTDDELVEHYLCRKAAGQRLPVPIIAEVDLYRFDPWDLPERALFGAREWYFFTPRDRKYPNGSRPNRAAGNGYWKATGADKPVVPPRRAA

SEQ ID NO: 8637 - protein, 360 aa, Zea mays
  Clone ID: TF_UC-ZMFLMO17204B05_FLI.pep
MVVKEFGREVVMSMDKVKRGGEALTAAGAGDEEKDDAVLPGFRFHPTDEELVTFYLRRKVARKPLSMEIIKEMDIYKHDPWDLPKASTAAGGEKEWYFFCLRGRKYRNSIRPNRVTGSGFWKATGIDRHIYPATANPVESVSVGLKKSLVYYRGSAGKGTKTDWMMHEFRLPPAAAASPTPTSMQEAEVWTICRIFKRNIAYKRQPQLPAWRQQQSSSNTGSFESDGGGGGDEYMNRCLPVPATATAHQIGGMLNGGGVVSATRSSSSSFFRDRESVHGGQQFHFHEQWLSRFPAAPAVEQKPQLLDPSAMAIAFHQNDDQSVATAAAASECCKDGYYWDEIARFMEVNDPTVLHDCRYA

SEQ ID NO: 8638 - protein, 368 aa, Zea mays
  Clone ID: TF_ZmC1440_1.pep
MVVKEFGREVVMSMDKVKRGGEALMAAGAGAGDEEKDDAVLPGFRFHPTDEELVTFYLRRKVARKPLSMEIIKEMDIYKHDPWDLPKASTAAGGEKEWYFFCLRGRKYRNSIRPNRVTGSGFWKATGIDRHIYPATANPVESVSVGLKKSLVYYRGSAGKGTKTDWMMHEFRLPPAAASPSPTPTSMQEAEVWTICRIFKRNIAYKRQPQLPAWRQQQQSSSNTGSFESDGGGGGDEYMNRCLPVPATATATAHQIGGMLNGGGVVSATGSSSSSFFRDRESVHGGQQFHFHEQWLSRFPAAPAVEQKPQLLDPSAMAIAFHQNDDQSVATAAAAAASECCKDGYYWDEIARFMEVNDPTVLHDCRYA

SEQ ID NO: 8639 - protein, 35 aa, Zea mays
  Clone ID: TF_ZmC176741_1.pep
MGTMTLPPGFRFHPTDDELVSYYLKRKVDNLKIEL

SEQ ID NO: 8640 - protein, 319 aa, Zea mays
  unsure (1)..(319): unsure at all Xaa locations
  Clone ID: TF_ZmC13154_1.pep
MASSSRLDLPPGFRFHPTDEEVVSHYLTHKALDSRFSCVVIADADLNKIEPWDLPSXKAKMGEKEWFFFCHKDRKYPTGMRTNRATASGYWKATGKDKEIFRGSSSSPRRVLVGMKKTLVFYTGRAPRGGKTPWVMHEYRLEGSLPPNLHRGAKDEWAVCKVINKDLAGKAGQQQMAPPPHAVSVGMERSDSLAFLDDLVLDNADDLPPLVDSTTYAAGSLFAAAGTTTTTNDDSGGYQQATKAEPQPQLPAPSNSPYQHQQQAIRRHCKAEAPAPAMVLSPSRETPGADMFQLQHVDELLQLDGGFMEDYYNMNMWKV

SEQ ID NO: 8641 - protein, 408 aa, Zea mays
  Clone ID: TF_ZmC17732_1.pep
MAKTSLPPGFRFHPTDVELTVYYLKRKLLGKHLRCNAITEIDLYKFAPWDLPERASLESNDLVWYFFCPRDRKYSSGLRTNRSTGVGYWKATGKDRPVVYNSRTVGMKRTLVFHLGKPPRGDRTDWVMYEYRLEDEEIAASGVKLDACVLCKIFQKSGPGPKIGAQYGAPFNEEDWNDASNVECSPCVPSVAPCAPESSRGGLNSAGQRLAVSYDVKVSLGSSAEGINRPAVNGVHPVRPSPDAPNDCIHIQLLAEVMRCSSTSMHVLRTAGDDGLLADSTADYSSDNRISLDAIETIFCEVDELGPQAMVNNTNHCDSCGEYLIHPTMVARGAEQYLELNDLSFSLTDGPDSCGVLFSNGVSVEQLPDLELRFEQFSPDHISNTAIASTSTTVGSSASVPLLEDHRT

SEQ ID NO: 8642 - protein, 657 aa, Zea mays
  Clone ID: TF_ZmC12473_2.pep
MALWALPVGFRFHPTDEELVSHYLKGKITGQINSEAEVIPEIDICKCEPWDLPGKSLIRSDDPEWFFLAPKDRKYPNGSRSNRATVAGYWKATGPDRNIKSKGDKSKQFTIGKKKTLVFHRGRAPKGERTGWIMHEYRTTEPQFESGKQGGYVLYRLFWKPEEKTERSSPKEMDRSGNSPTTIRSSRDNQEANEEANTPLNKKSLESALHDPIELPNSAETPAGPRKMCLADRNDNLVATAPVVSHIPFQGHAAGVAKVDPSAAASAHFVNPQNGNDDCNNFMSDFTPILPHENAFFTGTQQGAFGFDGNGIMNHPDALDAFLNQTLVDTDEHSSTTSKVQYDSDIPTEFANHWNMQDEHQDWWEKLDFEPYEPTLLPYDTTDLDVLSVDSGADSFNDLFNVTGITLRPQRLDSTVQPDCVFPDQGTALRRLKLQVVECGESITKDESEDEVSCVESPNYFDESVEFAAEKGVASYGDGADSTGIVIRSRYPAPSSSSESSFTQQGTAMRRLRLQLGLNEGTCPSSGDSSSCIVDESESQQKAEIEEDASTNLAGSVDNLPGNSHDDEQKDIPEHGVKSVLRLRKTSAESLKDVKQEDCLEPDGRAPMQRVGFQSSIIWLVLSVAVLLLLYCGVWMSMICILVRCFAHMGSWHQPDV

SEQ ID NO: 8643 - protein, 89 aa, Zea mays
  unsure (1)..(89): unsure at all Xaa locations
  Clone ID: TF_LIB3354-108-Q6-K2-B3.pep
MVAIATVQHHRRDSEAELNLPPAFRFHPTDEDLLAHYLCTRAAXRRPPVSIIAYVDLYRFYPCYLPERALFSPREYYFFIPRDRMYPNV

SEQ ID NO: 8644 - protein, 467 aa, Zea mays
  Clone ID: TF_ZmC603_1.pep
LELRAARRRNKNHPSPYRCYSCTRALPPGAAAYDPDMNRAHSSSSKLINEKLVEHRISTAKHCPHCGEKIDSKPDWVGLPAGVKFDPTDQELIEHLEAKVKDEGSRSHPLIDEFIPTIDGEDGICYTHPEKLPGVTRDGLSKHFFHRPSKAYTTGTRKRRKIQTECDVHKGETRWHKTGKTRPVMVNGRQKGCKKILVLYTNFGKHRKPEKTNWVMHQYHLGDLEEEKEGELVVCKIFYQTQPRQCSWSSDRGAAATALAATAAAAAAQEQHRRDSGSGSCSSRDHEVSATSFPAGYTVTTAVEMQQHMKQPADHFSFAPFRKTFDQEVGIGGDQVPSNQLGRSEPHHAGLGQQPHGPVLATKTAVPATAFLISRPSNPVSTIVPPAMQHASVVLDHDQFHVPAILLHHHDKFQPQQKLDRRSAGLEELIMGCTSSTSTKGDASIAHPQETEWPYTYWPPDNQDHHG

SEQ ID NO: 8645 - protein, 293 aa, Zea mays
  Clone ID: TF_ZmC12224_1.pep
MGLREIESTLPPGFRFYPSDEELVCHYLYKKVANERAAQGTLVEVDLHAREPWELPDAAKLTASEWYFFSFRDRKYATGSRTNRATKTGYWKATGKDREVRSPATRAVVAMRKTLVFYQGRAPNGVKSCWVMHEFRLDSPHTPPKEDWVLCRVFQKRKDSEQDNGGGSSSPTTFAGASSQGVVLDLPDDQPSMTMAGAYVAVDHHQPGSSAVGFALPPHAQDNGLGDGGLDALLMNGATMWQYSSSALADHFPPEEVTAAPMMGLGSRGGGDGCSFFYDSGFDGMGFPQGWMG

SEQ ID NO: 8646 - protein, 297 aa, Zea mays
  Clone ID: TF_ZmC12224_4.pep
MGLREIESTLPPGFRFYPSDEELVCHYLYKKVANERAAQGTLVEVDLHAREPWELPDAAKLTASEWYFFSFRDRKYATGSRTNRATKTGYWKATGKDREVRSPATRAVVAMRKTLVFYQGRAPNGVKSCWVMHEFRLDSPHTPPKEDWVLCRVFQKRKDSEQDNGGGSSSPPTFAGASSQGVVLDLPDDQQPSMTMAGAYVAVDHHQPGSSAVGFALPPHAQDNGLGDGGLDALLMNGATMWQYSSSALADHFPPEEVTAAPMMGLGSRGGGDGCSFFYDSGFDDMANMGFPQGWMG

SEQ ID NO: 8647 - protein, 223 aa, Zea mays
  Clone ID: TF_LIB4764-075-R1-K1-G10.pep
MGGGATNLPPGFHFFPSDEDLVVHFLRRKAANLPCRPDIVPTILLHRYDPWELNGTALQAGNQWYFFSSHAHAHAHAAAGQTRTSPSGYWNPAGADETVVLASSGRVVGLKKTLVFCTGEPFRGFRTNWVMHEYHLHDGPGCNVGGSSGATTPSSSSSSASSRRSQRKRVHSSTESNSWVICRVFESSCGSQVSFHDEGTELSCLDEVFLSLDDYDEVSLPNN

SEQ ID NO: 8648 - protein, 129 aa, Zea mays
  Clone ID: TF_700048290_FLI.pep
MSEVSVINQAEVEDAGAGQLDLPPGFRFHPTDEEIISHYLTHKALNHRFVSGVIGEVDLNKCEPWDLPGRAKMGEKEWYFFCHKDRKYPTGTRTNRATETGYWKATGKDKEIFRGRGVLVGMKKTLVFY

SEQ ID NO: 8649 - protein, 229 aa, Zea mays
  Clone ID: TF_ZmC175915_1.pep
MSSGGGGRVPAAAAAQSQELQLPPGFRFHPTDEELVVHYLCRRCAGLPISVPIIAEVDLYKHDPWQLPRMALYGEKEWYFFSPRDRKYPNGSRPNRAAGAGYWKATGADKPVGTPKPVAIKKALVFYAGKAPKGDKTNWIMHEYRLADVDRTARKKNNSLRLDDWVLCRIYNKKGALEKPTGAGGRAEASSQGALGSMSMGSPPEQKPSVNTSATATAAAADSARRTRN

SEQ ID NO: 8650 - protein, 81 aa, Zea mays
  Clone ID: TF_ZmC145568_1.pep
MNSMESCVPPGFRFHPTDEELVGYYLRKKVAAQKIDLHVIRDIDLYRIEPWDLQGHCGIGYEEQNEWYFFSYKDRKYPTGT

SEQ ID NO: 8651 - protein, 395 aa, Zea mays
  Clone ID: TF_ZmC3782_1.pep
MTMAATTTMMSAAAQAATSQLPPGFRFHPTDEELILHYLRNRAASAPCPVPIIADVDIYKFDPWDLPAKALYGDGEYYFFSPRDRKYPNGIRPNRAAGSGYWKATGTDKPIHDAATGEGVGVKKALVFYKGRPPRGSKTNWIMHEYRLAAVAGCTSPLAAYRPPSKFRNVSMRLDDWVLCRIYKKSGHASPMVPPLADYEHLDRDGPSPGGFFDDYFCGSTSLYAAAAPAIGGGAAAAGTTNTTTTPAVVMQQHQQPAALPRLPKIPSISELLWDEYALAQILDPPADVAADHASFAVHPSLNQLLAVGDDGSDLMMFSPPPAAAAGGKRKAMVAMNMSPADECAATAHQHQSPAAKRLNGGSCFDDAPQPASGLPATMSSVLGGGLNHHMLPQF

SEQ ID NO: 8652 - protein, 87 aa, Zea mays
  Clone ID: TF_LIB4759-100-A1-K1-D3.pep
MGGASGGDHPQQHGGGDDGHLQQGGGGDMVMPGFRFHPTEEELIDFYLRRRVEGKRFNIELINLVDLYRYDPWDLPGNHKPPLPLRM

SEQ ID NO: 8653 - protein, 104 aa, Zea mays
  Clone ID: TF_ZmC21253_4.pep
PSVREWYLYCLHDRKYPAVLRTNRATAAGYWKATGKDREVRNGRNGVLVGMKKRLVFYRGRAPRGQKKSWVMHEYRLDGIYAHHFLLVSTRLNLGITIHPWPLL

SEQ ID NO: 8654 - protein, 228 aa, Zea mays
  Clone ID: TF_ZmC7355_1.pep
MAAEGAPVLVRHAGGVEELRQLPPGFRFRPTDEELVVQYLRRKALGAPLPAAVIPVVRDLYSLDPWDAVDVPAAPDASSQGERYFFAVRPAGGVGSARRATASGRWRPAGKEKPVALPRPCGGGSLLVGVKRAMAFVPRRKKKKAAAAAALAIGWVMHEYRLAAPLHKHGCSLAQAQGEWVVCRVFQKGSGRPRRRRQRPVSPSPSSASSCVTDGSSSSSSDMDEVSS

SEQ ID NO: 8655 - protein, 103 aa, Zea mays
  Clone ID: TF_ZmC7355_3.pep
MSAERAPVLVRHGGGGVEALRQLPPGFRFRPTDEELVVQYLRCKAIGVPLPAAVIPVFRDLYSRDPWDVVAVSAPDTRSEGEKYFFAVRPASDGKSSGAGTGS

SEQ ID NO: 8656 - protein, 184 aa, Zea mays
  Clone ID: TF_ZmC545_18.pep
TLGIKKALVFYAGKAPRGVKTDWIMHEYRLADAGRAAAAKKGSLRLDDWVLCRLYNKKNEWEKMQLGKTAVAGVGATKEEAMDMATSHTHSHSQSHSHSHSWGETRTPESEIVDNDPFPELDSFPAFQDPAMMMTVPKEEQVDGCSAKSGNLFVDLSYDDIQGMYSGLDMLPPPGEDFYSSLFA

SEQ ID NO: 8657 - protein, 221 aa, Zea mays
  Clone ID: TF_ZmC1509_2.pep
MEQEPHRPMELPPGFRFHPTDEELITHYLARKAADARFAALAVAEADLNKCEPWDLPSLARMGEKEWYFFCLKDRKYPTGLRTNRATEAGYWKATGKDRDVFRGKALVGSKKTLVFYTGRAPRGEKSGWVMHEYRLHAKLHGHGHGQGAAVVVVPKAAGSKNEWVLCRVFKKSLVVGGAAAAAAPTAGKRGGTETSSNYKTGDVAAIAHLPPLMDVSGSGA

SEQ ID NO: 8658 - protein, 236 aa, Zea mays
  unsure (1)..(236): unsure at all Xaa locations
  Clone ID: TF_ZmC1509_3.pep
MEQEPHRPMELPPGFRFHPTDEELITHYLARKAADARFAALAVAEADLNKCEPWDLPSLARMGEKEWYFFCLKDRKYPTGLRTNRATEAGYWKATGKDRDVFRGKALVGSKKTLVFYTGRAPRGEKSGWVMHEYRLHAKLHGHGHGHGQGAAVVVVPKAAGTKNEWVLCRVFKKSLVVGGAAAAAAPTAGKRGGTETSSNSKTGDVAAISHLPPLMDVSGSXSXXPXAAAAAHVTC

SEQ ID NO: 8659 - protein, 220 aa, Zea mays
  Clone ID: TF_ZmC1509_4.pep
MEQEPHRPMELPPGFRFHPTDEELITHYLARKAADARFAALAVAEADLNKCEPWDLPSLARMGEKEWYFFCLKDRKYPTGLRTNRATEAGYWKATGKDRDVFRGKALVGSKKTLVFYTGRAPRGEKSGWVMHEYRLHAKLHGHGHGQGAAVVVVPKQAAGSKNEWVLCRVFKKSLAVGGAAAAPAAGKRGGTETSSNSKTGDVAAIAHLPPLMDVSGSGA

SEQ ID NO: 8660 - protein, 198 aa, Zea mays
  Clone ID: TF_ZmC1509_5.pep
MEQEPHRPMELPPGFRFHPTDEELITHYLARKAADARFAALAVAEADLNKCEPWDLPSLARMGEKEWYFFCLKDRKYPTGLRTNRATEAGYWKATGKDRDVFRGKALVGSKKTLVFYTGRAPRGEKSGWVMHEYRLHAKLHGHGHGQGAAVVVVPKAAGSKNEWVLCRVFKKSLVVGGAAAAAAPTAGKRGGTETSSN

SEQ ID NO: 8661 - protein, 211 aa, Zea mays
  Clone ID: TF_LIB4743-023-Q1-K1-B5.pep
MGGASDSNLLPPGFHFFPSDEELVVHFLRRKASLLPCQPDIVPTVCMNHHDPWELNGKALEAGSQWYFFSHAKQSRATPNGYWSSVCADETVLSGGGGCSVVVGLKKTLVFSTGEPSDGAETNWIMHEYHLLDGRTGGSSSSSSASSIHSSSKKSHHPNTEFSNWVICRVFDSTGGGSQANCHDDEGMELSCLDELFLSLDDYDEVSLSSN

SEQ ID NO: 8662 - protein, 164 aa, Zea mays
  Clone ID: TF_ZmC22900_1.pep
MGGASDSNLLPPGFHFFPSDEELVVHFLRRKASLLPCQPDIVPTVCMNHHDPWELNGKALEAGSQWYFFSHAKQSRATPNGYWSSVCADETVLSGGGGCSVVVGLKKTLVFSTGEPSDGAETNWIMHEYHLLDGRKGGSSSSSSTSSIHSSSKKSHHPNTVRSS

SEQ ID NO: 8663 - protein, 282 aa, Zea mays
  Clone ID: TF_ZmC1429_1.pep
MSSSISMMEARMPPGFRFHPRLDELVMDYLLQKLSGHGHHAGAAIVVDVDLNKCEPWDLPDSACVGGKEWYFFSLRDRKYATGQRTNRATHSGYWKATGKDRAVVVGGEVAVGMRKTLVFYRGRAPRGKKTEWVMHEFRLHPHAAPCLLAAAAPNKEDWVLCRVFYKSRTTSPRPESEDARDGTPSAEPQLPAALPLAPLADTYAAPTVAEQVYCFSGLPALPFRRPVSLGDLLEFDASEKESVTTAMTSVSNNTSSVLELAPNCNWNQENGMSRMWSPLGI

SEQ ID NO: 8664 - protein, 689 aa, Zea mays
  Clone ID: TF_ZmC26324_1.pep
MAPVSLPPGFRFHPTDEELIICYLKRKINGRQIELEIIPEVDLYKCEPWDLPEKSFLPSKDLEWYFFSPRDRKYPNGSRTNRATKSGYWKATGKDRKVNSHRRAVGMKKTLVYYRGRAPHGSRTDWVMHEYRLDERECETDTGLQDAYALCRVFKKTAPGPKIIEHYGAVHHPIEQTQWMGSSVERSPTLDLSSDVRGDDFDSSSFSFPTEAPMDSSMHGGLFGMQMSAPHEDAKWMQFLSEDAFNATNPFFTNPASSSFSCLPSKVDVALECARLQHRLSLPPLEVEDFPHDVSLDTKASVLRSSNPNNEVDILQEFLSVASASQELINGTSSSYAAEMWAGAGTSSTSGTHYVNELSSLFEFGVKAKEEADNFYHMDCIGTSAGFSPKPVRVDEPVRLVEIADMEEFKEEKRRVENLRGVRLHNNDDLGEIPTDCCITQYPISDTADISGEAGHLTNPTSAGGLDTAPIFSQSQPDDFAIGFSDDADPNASFDLCERVDVKHGLFVSTVGAPKTFFHHVEPSKKVSFHLNNNPVASDDDVSKATGKSRSPIISVMTTKDSGSSFSVFSKLKALIRDKFLVKKLPSSCQRSLLGSKETAAVSELLQMVVSSLLLTPTEVTGPTTMTTEQEELARKAMKPGPRRCDGSHAWLLPLPKRSKGISSMFFSGKWAFLTSALAIRAPGPGCNH

SEQ ID NO: 8665 - protein, 71 aa, Zea mays
  unsure (1)..(71): unsure at all Xaa locations
  Clone ID: TF_13150961.pep
XHERLKSSLFLXFASSXFWXGXSQLFSSNXRVLPCLXXXQXGTSCXERKRNATCCPRLEDXTLKVNPMVHA

SEQ ID NO: 8666 - protein, 458 aa, Zea mays
  unsure (1)..(458): unsure at all Xaa locations
  Clone ID: TF_ZmC151_2.pep
MAQTSLPPGFRFHPTDVELVSYYLKRKIMGKKLIVDAISEVDLYKFPPXDLPEMSSPSKPPMPSIFDVFPPQWDLEWFFFCPRDKKYPNGSRTNRATPNGYWKTSGKDRIIMLNSRTVGMKKTLIFHEGKAPKGDRTDWVMYEYRMEDEDLVSAGFSKDAYVLCKIFKKSGLGPRIGEQYGAPFNEDEWDNAEVETSLFPLTCSEVNPTEGQRAQPTVLAGALLEPEPPLHNSSSTCAGEESSFGHATAEDLTFSHSVASSAIQDTPARMSGDGVVSVNNISNVANDMRSPRDCDEFLSELSRFMNDSPLRNTPLGECSGLPPMSEAEAHAFEVNSFGLYNELSELVGLGCADNNLNTSNVETTDYLMLPPDRELSANDYMELNDLLAPDPSFPSEFSAQDNQYMQHPLAQYNGHYDLSGPSEPTMPSIFDVFPPNNGVLLTDDPANYLDPAMQFPFS

SEQ ID NO: 8667 - protein, 96 aa, Zea mays
  unsure (1)..(96): unsure at all Xaa locations
  Clone ID: TF_LIB4301-007-Q1-K1-B2.pep
MECGGALQLPPGFRFHPTDDELVMYYLCRKCGGLPLAAPVIAEVDLYKFNPWDLPERAMGGEKEWXXFSXXDREYPNGQXANRAXGTGXWKXTGAD

SEQ ID NO: 8668 - protein, 89 aa, Zea mays
  Clone ID: TF_LIB5116-032-A1-PF1-G7.pep
MEEIRSDDMEKQDEVMLPGFRFHPTDEELVRFYLKRKIQQKSLPIELIRQLDIYKFDPWDLPKLASTGEKEWYFYCPRDRKYRNSTRPN

SEQ ID NO: 8669 - protein, 282 aa, Zea mays
  Clone ID: TF_ZmC232_1.pep
MEGRRPGAPVAGLPIGFRFRPTDEELLLHYLRRKALACPLPAGVISDADLARLHPWDLLPAAAAAPGTVPLHHTPPRIAARVPYLTSTRDRIGSNPAGGSGADADGERFFFHRPATRCWRKGGGAARAAGTGVWRPSGKETLVLSPRCKRPVGTKRTLVFCPRRGRARTHWAMHEYRLLPAGLHPYGCAAGAGANAPPPTNVSSHGGDAAADWVVCRIFRRARPAHRARLGGGAREELEEEHAAEESPSSPSSCVTDASETLDQEEDDGDEGSSSSTVASSN

SEQ ID NO: 8670 - protein, 200 aa, Zea mays
  unsure (1)..(200): unsure at all Xaa locations
  Clone ID: TF_LIB3592-100-Q1-K6-E5.pep
LLCFGATHCAVCTASQLQQSPARLSAASPAPAGMDRPAQAPTQLPPGFRFHPTDEELVVLYLRRKALARPLPAAVIPVVHDVARLDPWDVTGAYYAVRVICGSIQSFPDCLVXLNRAGASEGEGYFFSLRRAPATGRRRRAGSGYWKATGKEKPVFLQCGGEQRQLLVGVKTALAFHXREPPXXSSRTGWVMHEYRLAVP

SEQ ID NO: 8671 - protein, 202 aa, Zea mays
  Clone ID: TF_ZmC99_3.pep
LAGFGEQERYFFTCKEAKYVKGRRANRATGAGYWKATGKEKPVAVAVRGVQGQSQSQSQAVLVGMKRSLVFYRGKPPTGSKTEWVMHEYRLAGAGLAPCRRRHADADGDGVARAPAEGWVLCRVFRKKGSAAVARRPGDRSDGEGDESACGGGGGGGRGFIDFFARADAAGRRRRAPSPAVSSRWLADASPQPEQEATSRGP

SEQ ID NO: 8672 - protein, 160 aa, Zea mays
  Clone ID: TF_ZmC175915_2.pep
LALYLLLTPDLGTTAVCAGMALYGEKEWYFFSPRDRKYPNGSRPNRAAGAGYWKATGADKPVGTPKPVAIKKALVFYAGKAPKGDKTNWIMHEYRLADVDRTARKKNNSLRVRCDRSSSGRRVHQNISFVSVQKIISCSYILLFVNNIYLLSLPYQQRKS

SEQ ID NO: 8673 - protein, 109 aa, Zea mays
  Clone ID: TF_ZmC545_19.pep
MGLPMRRERDAEAELNLPPGFRFHPTDDELVEHYLCRKAAGQRLPVPIIAEVDLYRFDPWDLPERALFGAREWYFFTPRDRKYPNGSRPNRAAGNGYWKATGADKPVAP

SEQ ID NO: 8674 - protein, 143 aa, Zea mays
  Clone ID: TF_ZmC2195_14.pep
METLRDMALPPGFGFHPKDTELVAHYLKKKILGQKIEYDIIPEVDIYKHEPWDLPAKCNVPTQDNKWHFFAARDRKYPNGARSNRATVAGYWKSTGKDRAIKVDKRTIGTKKTLVFHEGRPPTGKRTEWIMHEYYIDENECQS

SEQ ID NO: 8675 - protein, 144 aa, Zea mays
  Clone ID: TF_LIB4741-044-R1-K1-H12.pep
MSEVSVINQAEVEDAGAGQLMDLPPGFRFHPTDEEIISHYLTHKALDHRFVSGVIGEVDLNRIEPWDLPGRAKMGEKEWYFFCHKDRKYPTGTRTNRATETGYWKATGKDKEIFRGRGVLVGMKKTLVFYRGRAPRGEKTGWVM

SEQ ID NO: 8676 - protein, 216 aa, Zea mays
  Clone ID: TF_ZmC13043_3.pep
MTHPSSPSSSAPPPPPAAAAAAAAAEATSLAPGFRFHPTDEELVSYYLKRKVLGRPLKVDAIAEVDLYKLEPWDLPPRSRLRSRDSQWYFFSRLDRKHANRARTNRATSGGYWKTTGKDREVRHGPRVVGMKKTLVFHAGRAPKGERTNWVMHEYRLEGDAAVEIPQDSFVVCRIFQKAGPGPQNGAQYGAPFVEEEWGGDDAVGLLPVGDAAVDP

SEQ ID NO: 8677 - protein, 102 aa, Zea mays
  unsure (1)..(102): unsure at all Xaa locations
  Clone ID: TF_LIB3595-041-Q1-N6-B1.pep
WYLYQHKDKKDPTGTQSNRAIDAWFWKGTAXSKHIYASTXRGAVCLMNTLVYYNGRASFGHXXDWIMHHYRLHQGCQRTLVYPAVMLHAGLHLKMEPSCMTL

SEQ ID NO: 8678 - protein, 175 aa, Zea mays
  Clone ID: TF_LIB5116-070-A1-PF1-B2.pep
MVESVAASPSEEQGRGGGLSLPPGFRFHPTDEEIITSYLLREFLDPSFVSRAVGEVDLNSCEPRDLPGKANKGEKEWYFFVHKDLKYPTGSRANRATKEGYWKATGKDREIFKPRARELVGMKKTLVFYTGRAPRGAKSEWVMHEFRLEGKSRGQTMNNPKDEWVVCKVFNKKGE

SEQ ID NO: 8679 - protein, 197 aa, Zea mays
  unsure (1)..(197): unsure at all Xaa locations
  Clone ID: TF_ZmC5878_1.pep
MSEVSVINQAEVEDAGAGQLMDLPPGFRFHPTDEEIISHYLTHKALDHRFVSGVIGEVDLNRIEPWDLPGRAKMGEKEWYFFCHKDRKYPTGTRTNRATETGYWKATGKDKEIFRGRGVLVGMKKTLVFYRGRAPRGEKTGWVMHEFRLEGRLPQPLPRSAKDEWAVVQVFNKELXAARSEPLRGRRGTRARGLAGL

SEQ ID NO: 8680 - protein, 164 aa, Zea mays
  unsure (1)..(164): unsure at all Xaa locations
  Clone ID: TF_ZmC3395_2.pep
MEARPGAWRLQQRGPGAPVAGLPIGFRFRPTDEELLLHYLRRKALACPLPAGVIPDADLARLDPSDLLLPAAAPPAGGAADDASGEHFFFHRPATRCWRRGGGAARAAGAGVWRPSGKETVVVSPRCKRPVGTKRTLVFCPRRRGGGGARTDWVMHEYXLLPAG

SEQ ID NO: 8681 - protein, 320 aa, Zea mays
  Clone ID: TF_ZmC16864_1.pep
MDQAAEESCVPPGFRFHPTEEELVGYYLARKVASQRIDLDIIQEVDLYRIEPWDLQERCKPQHAGGGHDEQTQEWYFFSYKDRKYPSGTRTNRATAAGFWKATGRDKPVLSSSTRTTRCSRVIGMRKTLVFYKGRAPNGRKSDWIMHEYRLQSNEHAPAQEEGWVVCRAFQKPIPNQRPFFPTSYAGYYDHNLSTTARLHVDGDRHFLAGSSAAAAALLQQPPGLAGSSFPQLYSDDDLESKKQLLSIPPLESPTAMACCSDAGGYAQRSSYDEHEMMMMMIQQGGGGGEQAAAAIDWNFLDSLLSATSQLHGPSGSLLQ

SEQ ID NO: 8682 - protein, 184 aa, Zea mays
  unsure (1)..(184): unsure at all Xaa locations
  Clone ID: TF_ZmC593119_1.pep
MMESSGGSGSSDPLLLAPGFRFYPTEEELLTFYLRHRLAGTKPVVEHLIPVMDIYGYHPSELQAMAGAANVCDTEQWFFFCPRAERELHGGRPARTTPSGYWKATGSPSYVYSSSPNNRVIGEKRTMVFYQGRAPTGNRTRWKMNEYKAVADMCAAAARXPVMLRNDFSVCRVYISTGTLRSFD

SEQ ID NO: 8683 - protein, 100 aa, Zea mays
  Clone ID: TF_jC-zmX700098954b1.pep
HKDRGDLKGMRGITATGSGYWKATGKNKEIFHGRRTSRVLVRKKKTLSLYTGHAPSGGKTMWEMHECRLEGSLSPNLHRGDKDEWADCEVINKDSAAKVG

SEQ ID NO: 8684 - protein, 132 aa, Zea mays
  Clone ID: TF_ZmC232_4.pep
MEGRRPGAPVAGLPIGFRFRPTDEELLLHYLRRKALACPLPAGVIPDADLARLHPWDLLPAAAPGGSGADADGERFFFHRPATQCWRKGGGAARAAGTGVWRPSGKETLVLSPRCKRPVGTKRTLVFCPRPA

SEQ ID NO: 8685 - protein, 356 aa, Zea mays
  Clone ID: TF_ZmC566_1.pep
MARPPSAALKPPYPAFQSHPSDLELVNFYLRPWVETGVKTGAFIHDADVYAADPNYLTRQFAPAVAQDGERAWYFYTPLRHKSVHGTRKTRTVATGGGCWHNEAKARPVYMVSNGMHQIAHRQSFSFVEKDGGVRVRTGWLMMELRLVEDGAAGQKPEEDGALGSRVLCKVYRSPRNPEPSGIEAATAPGQKAEADDDESCDDESSDATLDDDDSSNASLAAASGPKRESDEVESSDATVAAPSRHSAPNDEISGRSAVAPGRKEKTEIGEVSTETSAAVRKRRKADGSSSPGTPVSTTDMHCPQCGTHLMLTLNMAESKSETGLAKDESATAAPDQGGTGESSQKDVRVRFHQFL

SEQ ID NO: 8686 - protein, 275 aa, Zea mays
  unsure (1)..(275): unsure at all Xaa locations
  Clone ID: TF_ZmC151182_1.pep
MDAFTHVPPXFRFHPTDEELXDYYLRKKXXLKKIDLDVIKDVDLXKIEXWDLQEKCRIGSEEQNEWYFFSHKDKKYPTXTRTNRATTXGFWKATGRDKXIYVKNCLXGMRKTLVFYKGRAPNGQKSDWIMHEYRLETNNNGIPHEEGWVVCRVFRKRLATVQRMVGDSPYWFNDHAGFMAPELGSPRQAAHHQQNVMMYHRQQSSYSYPCKVELEYHHLLPQEHFLQQLPQLESPKLPDLIGQVDTTLQPACGLTQEHGAPRYTLQELQAEPLYL

SEQ ID NO: 8687 - protein, 165 aa, Zea mays
  Clone ID: TF_LIB5117-066-A1-PF1-B2.pep
MEHSEQEQHAMDLPPGFRFHPTDEELITHYLAKKVADARFAALAVSVADLNKCEPWDLPSLARMGEKEWYFFCLKDRKYPTGLRTNRATESGYWKATGKDKDIFRGKALVGMKKTLVFYTGRAPKGDKSGWVMHEYRLNAKLHAARTRRGSLSGGQAGVGPPTSG

SEQ ID NO: 8688 - protein, 94 aa, Zea mays
  Clone ID: TF_LIB3245-008-P1-F12.pep
MVMAPAAAQQQRRRDADAELNLPPGFRFHPTDEELVAHYLFARASGRPPPVSIIAEVDLYRFDPWDLPERALFGRREWYFFTPRDRKYPNGSRP

SEQ ID NO: 8689 - protein, 118 aa, Zea mays
  Clone ID: TF_LIB3061-086-Q1-K6-B4.pep
PRVRPRVRPRVRKEWYFFYQKDRKYPTGLRANRATEAGYWKATGKDKEVYNAAEGVAVLVGMKKTLVFYRGRAPRGDKTNWVMHEYRLEGQRQAPRRPRVRNRLNRRQRRGGLESFCL

SEQ ID NO: 8690 - protein, 300 aa, Zea mays
  Clone ID: TF_ZmC545_7.pep
MVAMAAVQQQQQQQRRDAEAELNLPPGFRFHPTDEELVAHYLCARAAGRRPPVSIIAEVDLYRFDPWDLPERALFGRREWYFFTPRDRKYPNGSRPNRAAGSGYWKATGADKPVEHEGRTAGIKKALVFYHGKPPRGVKTEWIMHEYRLAEAGGARAKKSGAGTLRLDDWVLCRLYNKKNEWEKMQQQKEKEKKAMESEASLSHSHSDTRTPESEIDDDPFPELGSLPAFDDMGAAPAPAGVVLPKEEVEDFGDLGGDDWLAGINLDDLQMPGDAADFYGSMLVSPMAAKMEPDGGFPFF

SEQ ID NO: 8691 - protein, 665 aa, Zea mays
  Clone ID: TF_ZmC13043_1.pep
MNHPSSSSSSAQPPPAPAAAAEATSLAPGFRFHPTDEELVSYYLKRKVLGRPLKVDAIADVDLYKLEPWDLPARSRLRSRDSQWYFFSRLDRKHANRARTNRATSGGYWKTTGKDREVRHGPRLVGMKKTLVFHAGRAPKGERTNWVMHEYRLEGDDAAGIPQDSFVVCRIFQKAGPGPQNGAQYGAPFVEEEWEEDDTDDGLLPVEGVAAADPEVPLASVEIPGALDRGYLQMSDLIQGLDDQNGNGTPSLPVSDTSNNSNHSEDVDGNSGDILSDPNLGSNFLQCVEPGEQNSLMLNGTIISNANAGDFFDNSSHSDGFLELKDFADAANLDFPLGNGSSIWPLDGWAWKTPDSAESVNGANDEIPPLPDDQTFQPDELEQLLQSIQEDSHLGSSIIDPPHSSMTNSVLPDEDCLMFYDAPFDSTMCDDGFAQNGILGSAATNLSGIGMVDDGMPYFDAMDGNLFNDILGSIQQPDGSSSHAFNGPVLTQEVNNTMFTYSPTQKVLEPNILVGAPSSARLPEAGSQLNCVVLPDGQAKSSTIGKGFVRILDSISAPPAFAGEFPAIHRKSLAHISGGRPNTLHVSAEVIRVGSLAVPSGADKWALQKDQGMELVFSADFEPDARIHCGCNTITAVLRGGFCLFFVSAIMLLVSYEVGMCIYGK

SEQ ID NO: 8692 - protein, 301 aa, Zea mays
  Clone ID: TF_ZmC24820_1.pep
SLEATTMHGRQRKAHLDLKLKSAGIGADAQLRACLDIVHHQVAVCLARHRPQPDGAELDADGHAGPHGERHEPGRPLLQQLRRDGAVEPRLPRERDARVHGGAVALVQRREGAAAQHGAVEGRRHVAAVVVDPDAAVRVVGRHVHVERVGHRGRRAVHVEAGHRQAVHVERRDLGPEHQVQDPRGGAQRNGEQNEGEDGVAHAPAAAAALAPRRRGRGRGRRRRGRGCHRQLVVAGFLAAPRRLLRRRGRRRRRARAHWVDPVVVCHARIVRVHALLSNPRRARSCTKNARTQAAAARLDR

SEQ ID NO: 8693 - protein, 263 aa, Zea mays
  unsure (1)..(263): unsure at all Xaa locations
  Clone ID: TF_ZmC58420_1.pep
MELPPGFRFHPTDEELITHYLARKAADPRFAPRAVGEADLNKCEPWDLPSRATMGDKEWYFFCVKDRKYPTGLKANRATESGYWKATGKDREIFRGKALVGMKKTLVFYTGRAPRGGKTGWVMHEYRLQGKHAAASSSSSLVPSSVSCGASSQQDEWVLCRVFKKSIEPPSVPGSKRSSSVACMGTEGTGVGVGPSSMSTEDDFAACAALPPLMDVSGGSGANMSLSAAAAAAFIEVTPPAGAAPAPHVTCFSXAPLEGQFLN

SEQ ID NO: 8694 - protein, 373 aa, Zea mays
  Clone ID: TF_ZmC1367_1.pep
MVMANPDMLPPGFRFHPTDEELILHYLRNRAANAPCPVAIIADVDIYKFDPWDLPSRAAYGDKEWYFFSPRDRKYPNGIRPNRAAGSGYWKATGTDKPIHSSTTAGESVGVKKALVFYEGRPPKGTKTNWIMHEYRLAADAQAAHAYRPMKFRNASMRLDDWVLCRIYKKASCQVPAMAAVPQLSDHDQDEHCGFDDNPYAAMLLQGASYSYPAPPHAAAGAQRMPRIPSLTELFNDPSLAHFFEEGGGMQDMARLSNPQQQQQHAPLLGRAVTSQQLLLNNGHSMPGGGQAQMDPHPPAAAASTSSAAAGNNKRKRSSTTTDAGALSSSQASEAKKPNGSCFGATFQIGNGLQGPSLGHHHMPLHSNMGTMN

SEQ ID NO: 8695 - protein, 171 aa, Zea mays
  Clone ID: TF_ZmC13898_3.pep
MLQQSPARLSAASPAPAGMDRPAQAPTQLPPGFRFHPTDEELVVLYLRRKALARPLPAAVIPVVHDVARLDPWDVTGASEGEGYFFSLRRAPATGRRRRAESGYWKATGKEKPGFLQSGGVGGEHRQLLVGVKTELCFHRREAPASSRTGWIMHEYRLDVPRGVADQRKKM

SEQ ID NO: 8696 - protein, 129 aa, Zea mays
  unsure (1)..(129): unsure at all Xaa locations
  Clone ID: TF_LIB3060-026-Q1-K1-A3.pep
SGLRRTLELYRYDPWELPSMAAIGEKEGXFYVPRDRKYRNGDRPNRVTASGYWKATGADRTIKADNSXPIGLKKTLVFYSGKAPKGXRSSWIMNEYRLPPDDTDRYHKTEISFCRVYKRTGIDNGGHGH

SEQ ID NO: 8697 - protein, 517 aa, Zea mays
  Clone ID: TF_ZmC2195_3.pep
MEVLRDMHLPPGFGFHPSDIELVSHYLKRKILGQKIEYDLIPEVDIYKHEPWDLPAKCNLPIKDNKWHFFASRDRKYPTGSRSNRATLAGYWKSTGKDRAIKLNKLTLGTKKTLVFHEGRPPSGRRTEWIMHEYYIDENGCKVSPDMKDAFVLCRVTKRNDWSLDNDNEVGNRSSHLEQPDAATSVVSTVKPEDVAASVICPEESNHATTPIGSAELSNDVAQAAITPAAITPDSTTPNGGNELETWLQELLDPSPPFNLVADTGSADVCPTEQYAESSNLQNPGSMAPNIRPGHASPIQDGTDATDYLFTDDLPEDLYSMLYPGTDQFNDSIFLEQTGQEGNNNQTNYMMGIGSYVLPNNFENETPNAELQLDHENNKMDMSNENIDTGITIRRRRATAPPANISLAAGKIKMQVGIKRMVTSNSESINQTMKFTDNSGRRLDLRTDVEHQKKNANNVISAKQSDAANHEAHSNQGYLEGFKRCSSAGFRAYIFVALFVVGVAALVLHYHRSNANL

SEQ ID NO: 8698 - protein, 472 aa, Zea mays
  Clone ID: TF_ZmC24893_1.pep
MGSWQQGELQGAAMDGAAAAATGSGGGHRVVGSRNEEHGKYLSESSCCPRCGHKLDPKLDWLGLPAGVKFDPTDQELIEHLQAKVWPASAAAPSHPLIDEFIPTIEGEDGICYTHPERLPGLTKDGLSRHFFHRPSKAYTTGTRKRRKIQPPVADASSSSALPAQQQHQQQQRSETRWHKTGKTRPVVVAGRQRGCKKILVLYTNFGKNRKPDKTNWVMHQYHLGDKEEEREGELVVSKIFYQTQPRQCGVAAEPAATAASSDTVEEAADPPAPEGLVVPPPPDVAGAFQGAAGIDEFSFAQFRSSFEEVDVGASVQVSMRDEEEMHAAHLNLHQDHNLHRNQFGNQEHRRRMAATAAAFHINTPVEPITTMITSSPVVHGSAILQHPEAYGHGSSTYCHHQHQMEEDEQLHQQPQNFDGRRSTSGLEEVIMGCSSRRSKRAEASGPGGNKESRGWQYPSFWPSGSQQDHHG

SEQ ID NO: 8699 - protein, 112 aa, Zea mays
  Clone ID: TF_LIB5115-005-B2-PF1-D6.pep
MDAIRSDDIEKQDEVMLPGFRFHPTDEELVRFYLKRKIQQKSLPIELIRQLDIYKYDPWDLPKLASTGEKEWYFYCPRDRKYRNSTRPNRVTGAGFWKATGTDRPIYSSDGS

SEQ ID NO: 8700 - protein, 356 aa, Zea mays
  Clone ID: TF_ZmC345_1.pep
MDTFSHVPPGFRFHPTDEELVDYYLRNKVASNKIDLDVIKDVDLYKIEPWDLQEKCKIGTEEQNEWYFFSHKDKKYPTGTRTNRATTAGFWKATGRDKPIYTKSCLVGMRKTLVFYRGRAPNGHKSDWIMHEYRLETTENVTAAPEEGWVVCRVFIKKRVEAVRRMADGAPPWFDGHVPGGFMAPAGLGSPRQLMHHHPNPAAAAPLLYSGQQLYHCKPELEYHHLLQPSQEALLQQLPQLVESPKPPPPAFIDQGSCSLQSPDEASGYNTTPQQPPPMTTEAAYMDDDSVTDWRVLDKFVASQLFSHGDGMAKEDGYPNPGQALFQAENKQPEEALDYASTSASGGGGGEANMWK

SEQ ID NO: 8701 - protein, 160 aa, Zea mays
  Clone ID: TF_ZmC58420_2.pep
MEHDVHHQHQQAMELPPGFRFHPTDEELITHYLARKAADARFAPRAVGEADLNKCEPWDLPSRATMGEKEWYFFCVKYRKYPTGLRTNRATESGYWKATGKDREIFRSKALVGMKKTLVFYTGRAPRGGKTGWVMHEYRLHGKHASSSRLMPSSVRAGAS

SEQ ID NO: 8702 - protein, 225 aa, Zea mays
  Clone ID: TF_ZmC218_42.pep
METPPRGRWPPGFRFSPTDEELVLYFLKRRIASGRPCPYVADVEVYKSHPSHLPERSALQTGDRQWFFFSRMDRKYPNGSRASRTTGDGYWKATGKDRFICGGGRAVGNKKTLVYHHGRAPRGERTDWVMHEYTLLADALPPAAQGREFYALYKLFQKSGAGPKNGEQYGAPFREEDWLDDDDERVIAGAAANPVPNTNSPPSTMEEHAITDRELPIEGLDQPLS

SEQ ID NO: 8703 - protein, 475 aa, Zea mays
  Clone ID: TF_ZmC151_3.pep
FEIVSYYLKRNMGKKLIVDAISEVDLYKFPPWDLPEKSSLRSKDLEWFFFCPCDKKYPNGSRTNRATPNGYWKTSGKDRIIMLNSRTVGMKKTLIFHEGKPPKGDRTDWVMYEYKMEDEYLVSTGFSKDTYVLCKIFKKSGLGPRIGEQYGAPFDEAEWDNAEAETSIFPLMTSSEVVNPTEGPHTQPVAPAGALQEPLHNSSATCVVEGSPFDHATANTCAEGVTFGYTVASSAIEDMPAQLSGDGVVSMNNISSEVNDMYSPHDCDEFLLEEMSRFLNDPPMRNTPYGECSGLPPMSEAEAHAFEVNSFDLYKELSGLIELGGMDNNFNTSNVETTDYLVLPPDRELSTDGYMELNDLLASDSSFPIPVNFLLRTINLCSILWLSTMCIMMSLLCQVLWNQQCLAFSTIFLPIMDPMSQMRKTTTWTRPSLSRDWSNNMPALFCVLTCLDCSDVATCSSLLLQLYPPWMSRYC

SEQ ID NO: 8704 - protein, 218 aa, Zea mays
  Clone ID: TF_ZmC1229_1.pep
APRGEKTGWVMHEFRLEGRLPQPLPRSAKDEWAVCKVFNKELQAARSEPLLAAAGAAELERVGSLGFLNELLDSAELPALVGADVDEVIDFKGPAPASVPDASYLPVKMEEHALLQMQQCQYQPPPPMFYPSQYFSLPAMNSGHLPPAIRRYCKAEQQVVSAQTASVISPSRETGLSTDPNAAGGYAEISSAATPSSSHQFLPELDDPALNLADLWKY

SEQ ID NO: 8705 - protein, 262 aa, Zea mays
  Clone ID: TF_UC-ZMFLMO17336E02_FLI.pep
MEVKKEATKATLPPGFRFRPTDEELIVHYLRRRALASPLPAAVDIPDVRILAHDPSDLLPPGFGEQERYFFTCKEAKYVKGRRANRATGAGYWKATGKEKPVAVAVHRGVQGQSQGQAVLVGMKRSLVFYRGKPPTGSKTEWVMHEYRLAGAGLAPCRRRHADADADADAVARAPAEGWVLCRVFRKKGSAAAAAVARRPGDRSDGEGDESAGGGGGRGFIDFFARADAAGRRRRAPSPAVSSRWLADASPQPEQEATSRGP

SEQ ID NO: 8706 - protein, 159 aa, Zea mays
  Clone ID: TF_LIB3960-012-Q1-N6-H1.pep
APCPAPVIAEVDIYKFDPWDLPAKAVFGEAEWYFFSPRDRKYPNGVRPNRAAGSGYWKATGTDKPITLSSSSSAAAAAGMIGVKKALVFYRGRPPKGVKTSWIMHEYRLAEALHAVVNAYRPTRFKNNASSSMRLDDWVLCRIYKKTTPQLAYSMSAAA

SEQ ID NO: 8707 - protein, 74 aa, Zea mays
  Clone ID: TF_cC-zmpo148030h05a1.pep
MENPVGLRFPPTDKDIVFYYLRPKNSDRDTSHVDRVISTVTIRSFDPWELPCKCFYEFSSSTIGYFLSLGFFSL

SEQ ID NO: 8708 - protein, 151 aa, Zea mays
  Clone ID: TF_ZmC119_1404.pep
ARNRATKSGYWKATDKDHVIHTPCSWPAAAAGHHRTVVGMYKTLVFYRGRAPNGVKTSWVMHEFRMENPHTPPKEDWVLCRVFYKKKADAMDYADCSDQDAIAVHMACGSADPRGAAVAASDRGGRQQGGGEAPTATARGGRPRDGVATRG

SEQ ID NO: 8709 - protein, 161 aa, Zea mays
  Clone ID: TF_ZmC2195_10.pep
MEVLRDMHLPPGFGFHPSDTELVSHYLKRKILGQKIEYDLIPEVDINKHEPWDLPAKCNLPIEDNKWHFFASRDRKYPTGSRSNRATLAGYWKSTGKDRAIKLKKRTLGTKKTLVFHEGRPPSGRRTEWIMHEYYIDENECKVSPDMKDAFVLCRVTKRSD

SEQ ID NO: 8710 - protein, 99 aa, Zea mays
  unsure (1)..(99): unsure at all Xaa locations
  Clone ID: TF_ZmC1343_1.pep
ADRPALLHRNISRGPGESTKNPSADHSTAACSIWTLPTDSVRLSATEPGFRFDPTDEELVVHYLKKKAAIIXLYKFDPWELPCKYPVIYNHAKNSEIVV

SEQ ID NO: 8711 - protein, 276 aa, Zea mays
  unsure (1)..(276): unsure at all Xaa locations
  Clone ID: TF_ZmC198_15.pep
PPPPPTPTPTPGPPSGGGVASIITEDLFERMLKHRNEPDCKARGFYTYDAFITAADAFRGFGTTGSTEVQKRELAAFLGQTGHETTGGWPNAPDGAFTWGYCYKEENGATADYCDMTGEYAQWPCVAGKKYFGRGPIQLSYNYNYGPAGEDATIAQDLLSNPELVASDAXSISFKTAIWFWMTAQPPKPSCHDVATEQWTPSAADKAAGRLPGYGVITNIINGIECGKGYNEKVANRTFFYTSYCDILGISYGDNLDCYNQRPFNSAXPCWNRCSR

SEQ ID NO: 8712 - protein, 225 aa, Zea mays
  Clone ID: TF_ZmC586250_1.pep
MTVMELKALPLGFRFHPTDEELVRHYLKGKITGQIKNEVEVIPEIDVCKCEPWDLPDKALIRSEDPEWFFFAPKDRKYPNGSRSNRATEAGYWKATGKDRVIKSKGEKKKQHMIGMKKTLVFHRGRAPKGERTGWIMHEYRTTEPEFESGEQGGYVLYRLFQKQLEKTERSIPEEMDRSGYSPTPSRSTPDNMEANEEAITLINKESPESGLHGCPIELPGTIDT

SEQ ID NO: 8713 - protein, 173 aa, Zea mays
  unsure (1)..(173): unsure at all Xaa locations
  Clone ID: TF_ZmC3395_1.pep
MEARPGAWRLQQRGPGAPVAGLPIGFRFRPTDEELLLHYLRRKALACPLPAGVIPDADLARLDPSDLLLPAAAPPAGGAADDASGEHFFFHRPATRCWHEVRLGRRRVGGAAXRWRPSGKETVVVSPRCKRPVGTKRTLVFCPRRRGGGGARTDWVMHEYRLLPAVEVEAGGE

SEQ ID NO: 8714 - protein, 303 aa, Zea mays
  Clone ID: TF_ZmC545_8.pep
MVMAPAAAQQQRRRDAEAELNLPPGFRFHPTDEELVAHYLCARAAGRRPPVSIIAEVDLYRFDPWDLPERALFGRREWYFFTPRDRKYPNGSRPNRAAGSGYWKATGADKPVEHGGRTVGVKKALVFYHGKPPRGVKTEWIMHEYRLADAGARARARKPGTGTLRLDDWVLCRLYNKKNEWEKTQQQQEKKQNQKQMESEASLSHSHSDTRTPESEIDDDPFPELASLPALDDMMGPAAAAPAGAILPKEEVEDLGGLGGDDWLAGINLDDLQIPGEADFYGSMLVSPMAAKMEQDAAGFPFF

SEQ ID NO: 8715 - protein, 356 aa, Zea mays
  Clone ID: TF_ZmC227_1.pep
MAADQQPQLQEEMNDAAGGGLRLPPGFRFHPSDFEIVSFYLTNKVLNTRFTCTAITEADLNKIEPWDLPSKAKMGEKEWYFFYQKDRKYPTGLRANRATEAGYWKATGKDKEVYNAAEGVAVLVGMKKTLVFYRGRAPRGDKTNWVMHEYRLEGSGRLPAGLASATGSAAANAAAALKASAYKDEWVVCRVFHKTTGIKKTTTAAPAYQVAMAGAEMDQNQNNIPFPMPMQFSMLPDFSLDPVPPYYPYPNAGAGMPMLPMAAGIGGGAGGLHLNGAALFGNPMAAPQPMSFYHQMGTGTACAGGFDVSAPESRPSSMVSQKDDQANGAEISSMMSVAGPGPATTTTIEMDGVWKY

SEQ ID NO: 8716 - protein, 68 aa, Zea mays
  Clone ID: TF_LIB4738-084-R1-K1-H3.pep
MEHDVHHQQDMELPPGFRFHPTDEELITHYLARKAVDARFAPRAVGEADLNNREPWHLPSRAPMGEKE

SEQ ID NO: 8717 - protein, 58 aa, Zea mays
  Clone ID: TF_ZmC124792_1.pep
MNDASGGGLKLASGFRFHPSDFEIVRFYLNNKVLNTRFNWTGITEGDLNKIEPLDLPS

SEQ ID NO: 8718 - protein, 167 aa, Zea mays
  Clone ID: TF_LIB4759-009-R1-K1-A10.pep
LLEWPSRRLLASCIKSIHDIYTSDIDRTPDRLSWQVERSTMVAKVKRDGEVLVAAATGDSEEQDDLVLPGFRFHPTDEELVSFYLRRKVARKPLSMEIIKEMDIYKHDPWDLPKASTVGGEKEWYFFCLRGRKYRNSIRPNRVTGSGFWKATGIDRPIYPAAAGESG

SEQ ID NO: 8719 - protein, 356 aa, Zea mays
  unsure (1)..(356): unsure at all Xaa locations
  Clone ID: TF_ZmC750_1.pep
MHPGGGPLSVPPGFRFHPTDEELLYYYLRKKVAYEPIDLDVIREIDLNKLEPWDLKERCKIGTGPQNDWYFFSHKDKKYPTGTRTNRATTAGFWKATGRDKAIFLGSARRIGLRKTLVFYIGRAPHGKKTDWIMHEYRLDQENVEIQEDGWVVCRVFKKKSYEQRGHDVAEMVALDDEELQPFTVPVPXGTSSLPTTDHKNNPHLMQYDFPSFDPSMQLPQLMSADQPVPTLFPSHPGVATAMSSSIDVECSQNLLTMLTSNGSDGMLHVRAGGAGAGVDRFAGTTDWSILDKLLASHQNLDQLFHGKVTAASASPMAPYHQQLMELGGSSSSSSLQRLPLQYLSGETTDLLRFPK

SEQ ID NO: 8720 - protein, 91 aa, Zea mays
  unsure (1)..(91): unsure at all Xaa locations
  Clone ID: TF_LIB3182-009-P2-M1-B4.pep
AIMDADLNKNVPWDLPIKEKKGDKECYLFYQNDPKFPTELRANRANXDGYWKETGEDNEVYNAAERVAVLITMKMNLGLYTGGDTTSDKIN

SEQ ID NO: 8721 - protein, 85 aa, Zea mays
  Clone ID: TF_LIB4766-005-R1-M1-G2.pep
NGNGIIKKGSNRALVEESFFSWFGDTELKSLADGVQDEVAEIIKEDLWPNPLKYFNNEVDDEFEGDEDDDDLDGDDDDEGDDLEN

SEQ ID NO: 8722 - protein, 99 aa, Zea mays
  unsure (1)..(99): unsure at all Xaa locations
  Clone ID: TF_LIB4315-023-R1-N1-G8.pep
KGKGLANGVILEKNGTKRALPEESFFTWFSDAHPKEDVEDXMQNEVADFIKEDLWPNPFPYFNNDADEKDFYGADDGDEEEKKGAFDEDDAEKDEVGEE

SEQ ID NO: 8723 - protein, 150 aa, Zea mays
  unsure (1)..(150): unsure at all Xaa locations
  Clone ID: TF_LIB3632-022-Q1-K6-D5.pep
ARPRYLGDINWSTIEDPTGFNLGWWFDTNPFLKNFVLSKTFHMXDEDDPILEKAIGTVIEWYSGXINLSHMILTKKATMGXMNTKAITKTEDWDSFFNFLNPPHVPEDDDDLDEDTAVELLCLMXHDCDIGTLLRDKIIPQSLGWFTGDA

SEQ ID NO: 8724 - protein, 141 aa, Zea mays
  Clone ID: TF_ZmC7683_2.pep
QKVLKKKPRKGSKNTKPITKTEDCESFFPFERPPQVPDDDEEIDEDIAEQLQNEMEQDYDIGSTIRDKIIPHAVSWFTGEAAQDEEFEVMDGEDDDDEDNDDEDEDDEDDDDDDDYDSKKTKGTAGGEGQQGERPAECKQQ

SEQ ID NO: 8725 - protein, 63 aa, Zea mays
  Clone ID: TF_ZmC13098_5.pep
FGDTELKSLADGVQDEVAEIIKEDLWPNPLKYFNNEVDDEFEGDEDDDDLDGDDDDEGDDLEN

SEQ ID NO: 8726 - protein, 199 aa, Zea mays
  Clone ID: TF_ZmC518259_1.pep
MGGEKENLDLSDLNTSLPAAAAALSAEDRVGLVNALKDKLQSLAGQHADVLESLSPNVRTRVEFLRGIQSQHDEIETKFFEERAALEAKYQKLYEPLYAKRYDIVNGVVEVDGVAKEPTTENAAEGGDSDAKGVPDFWLTALKTNDVLTEEIQERDEPVLKYLKDIKWSRIDDPKGFKLEFFFDTNPFFKNSVLTNPII

SEQ ID NO: 8727 - protein, 183 aa, Zea mays
  unsure (1)..(183): unsure at all Xaa locations
  Clone ID: TF_LIB4073-015-Q6-K1-B10.pep
KVDIEYPFTFEGXXEIYKCVGCNIDWHKGKNLTVKTIKRKQKHKARGAVRTVTKQVPADSFFNFFKPPVIQENQDESKIDLEDQAILSTDFEIGHFLRARVIPKAALYYTGDIVEDDDDDDYDEEEEEEEEEGDEEEDEESESDQESRPTGKQQQRVHGVANKKKSGSGAGGANQTPAECKQQ

SEQ ID NO: 8728 - protein, 251 aa, Zea mays
  Clone ID: TF_ZmC13098_1.pep
MTAPADKGKKAKTDADGGEENEQIDGVLVLSIEKLQEIQDELEKVNEEASDKVMEVEQKYSEIRRPVYLKRGDIIKTIPDFWLTAFMSHPLLSELLTEEDQKIFKYLDSIDVDDSDVKAGYSIHLNFSENPYFEDTKLAKTYIFADDGTTTIKASEIKWKEGMGPANGNGINKKGSKRPLVEESFFSWFGDTELKSLADGVQDEVAEIIKEDLWPNPLKYFNNEVDDEFEGDEDDDDLDGDDDDEGDDLEN

SEQ ID NO: 8729 - protein, 95 aa, Zea mays
  unsure (1)..(95): unsure at all Xaa locations
  Clone ID: TF_700336790H1.pep
EKEDPKGIPEYTLTVFSXVDLLSDMVQEHNEPILKHLKDIKVKFSDAGQPMSFVLEFHFEPNEYFTNEVLTKTYRMRSEPDDSDPFSFDGPEIMG

SEQ ID NO: 8730 - protein, 215 aa, Zea mays
  Clone ID: TF_ZmC502799_1.pep
MAPKRQSAILPQPKKPRPAAAPKLEDKSASPGLPKGEKEQQEAIEHIDEVQNEIDRLNEQASEEILKVEQKYNKLRQPFFQKRSELIAKIPNFWVTTFVNHPQVSALLGEEDEEALHYLTRVEVTEFEDIKSGYRIDFYFDENPYFENKVLSKEFHLNESGDPSSKSTEIKWKSGKDLTKRSSQTQNKASRKRQHEEPESFFTWVTDHSDAGADE

SEQ ID NO: 8731 - protein, 398 aa, Zea mays
  Clone ID: TF_ZmC23984_1.pep
MDVPRSNKQPTSTPQNTPANAAPISSRAQQPNVGTIKEEELDRAAAGLFAANPALVSMMQAKLGSLVGRSSGYIESLPGSVRRRVAGLKGVQKEHSKLEAEFQEEVLQLEKKYFAKFTPLYEQRAKIVNGSTEPTEEQVKVGEQQDEDDEDDEEAGEKELNKDEGKGVKGIPEFWLSAMKNQISLAEMITDRDEAALKHLTDVRMEYLDRPGFRLIFEFEENEFFTNKTITKTYFYQEENGYGGDFIYDHAEGDKIDWKTGKDLTVRVESKKQRNKNTKQTRVVKKTVPTESFFNFFDPPSPPQDEDDDASSDIEERLELDYQLGEDIKEKLIPRAIDWFTGEALQYENIEDFDEGEFEDEDDEDEDGLSDDRDEDEESDDENDGTKPKQEAAECKQS

SEQ ID NO: 8732 - protein, 114 aa, Zea mays
  unsure (1)..(114): unsure at all Xaa locations
  Clone ID: TF_LIB3150-004-Q1-N1-D4.pep
MDGENEPYVISDLNASLPAAAAALSAEDRAGLVNALKDKLQSLAGQHADVLKTLSPNVRKRVEFLRGIQSQHDXIDGKFFEERVALEAKYHKALXKPLYTKRVLKLVKGENGGR

SEQ ID NO: 8733 - protein, 380 aa, Zea mays
  Clone ID: TF_ZmC2218_1.pep
MGGEKETFDTSDLNASLPAAAAALSAEDRAGLVNALKDKLQSLAGQHADVLETLSPNVRKRVEFLREIQSQHDEIEAKFFEERAALEAKYQKLYEPLYTKRYGIVNGEVEVDGVCDEPASENTVEGKEPDAKGVPDFWLTAMKTNEVLSEEIQERDEAALKYLKDIKWSRIEDPKGFKLDFFFDTNPFFKNSVLTKTYHMVDEDDPILEKAIGTEIEWYPGKNLTQKILKKKPKKGSKNTKPITKTEDCESFFNFFNPPQVPEDDDDIDEDTADELQSQMEHDYDIGTTIRDKIIPHAVSWFTGEAVQGEDFGELGDDDEDDDDEDDDEDDEDEEEDDDEEEDDEEESKPARKSGSGRRHKAPQKVSQGNAEQPAECKQQ

SEQ ID NO: 8734 - protein, 370 aa, Zea mays
  Clone ID: TF_ZmC7683_1.pep
MSDGKDSLDLSALGAAIPNSAELSAEDKANLVASIKNTLEGLASRHTDVLENLEPKVRKRVEKLREIQGEHDELEAKFFEERAALEAKYQKLYEPLYSKRYEIVNGVVEIEGITKESAAETPEEQKSGDETSAEQKEEKGVPAFWLNAMKNHEILAEEIQERDEEALKYLKDIKWYRISEPKGFKLEFHFGTNMFFKNSVLTKTYHMIDEDEPILEKAIGTEIEWYPGKCLTQKVLKKKPRKGSKNTKPITKTEDCESFFNFFSPPQVPDDDEEIDEDTAEQLQNQMEQDYDIGSTIRDKIIPHAVSWFTGEAAQDEDFEVMDGEDDDDEDDDDEDDEDEDDDDYDTKKTKGTAGGEGQQGERPAECKQQ

SEQ ID NO: 8735 - protein, 181 aa, Zea mays
  Clone ID: TF_LIB5116-017-A1-PF1-G8.pep
MGGEKENLDLSDLSAEDRVGLVNALKDKLQSLAGQHADVLESLSPNVRRRVEFLRGIQSQHDEIETKFFEERAALGAKYQKLYEPLYAKRYDIVNGVVEVDGVAKEPTTENAAEGGDSDAKGVPDFWLTALKTNDVLTEEIQERDEPVLKYLKDIKWSRIDDPKGFKLEFFFDTNPFFKNS

SEQ ID NO: 8736 - protein, 115 aa, Zea mays
  unsure (1)..(115): unsure at all Xaa locations
  Clone ID: TF_LIB3088-035-Q1-K1-G12.pep
GLDVEEGALKETTPDGEGDHEKGVPAFWLTAMKNIEVLAEEISERDEGALKYLKDIKWSRIENPKGFKLELFFDTNPYFINSDLTXTYHMIDEDEPILEKAIGTEIQWAPGKCLT

SEQ ID NO: 8737 - protein, 258 aa, Zea mays
  Clone ID: TF_ZmC13098_2.pep
MTAPADKGKKAKTDADGGEENEQIDGALVFSIEKLQEIQDELEKVNEEASDKVMEVEQKYSEIRRPVYLKRGDIIKTIPDFWLTAFLSHPLLSELLTEEDQKIFKYLDSIDVDDSDVKAGYSIYLNFSENPYFEDTKLTKTYSFVDDGTTTIKASQIKWKDGMGPANGNGINKKGNKRPLVVESFFSWFSDTELKSLADGVQDEVAEIIKEDLWPNPLKYFNNEVEDEFEGDEEDDDDDDDDDNLDGDDNDDDGDQEN

SEQ ID NO: 8738 - protein, 275 aa, Zea mays
  unsure (1)..(275): unsure at all Xaa locations
  Clone ID: TF_ZmC2218_4.pep
GATQARDYPLSLSINKRRRRNYAKGVPDFWLTAMKTNEVLSEEIQERDEAALKYLKDIKWSRIEDPKGFKLDFFFDTNPFFKNSVLTKTYHMVDEDDPILEKAIGTEIEWYPGKNLTQKILKKKPKKGSKNTKPITKTEDCESFFNFFNPPQVPEDDDDIDEDTADELQSQMEHDYDIGTTIRDKIIPHAVSWFTGEAVQGEDFAELGDDDDDDDDEDDDEEXREEDDDEEEMRRKKASQQGIGIRSQTEGAAGSVAALQGNAEQPAECKQRSAR

SEQ ID NO: 8739 - protein, 139 aa, Zea mays
  Clone ID: TF_ZmC2218_2.pep
LGTSRPAGFNFFNPPQVPEDDDDIDEDTADELQSQMEHDYDIGTTIRDKIIPHAVSWFTGEAVQGEDFGELGDDDEDDDDEDDDEDDEDEEEDDDEEEDDEEESKPASQDLVADIRCHRRCRREMLNNQRSASSSRMAC

SEQ ID NO: 8740 - protein, 192 aa, Zea mays
  unsure (1)..(192): unsure at all Xaa locations
  Clone ID: TF_LIB4172-012-Q1-L1-E5.pep
MTAMEESQSDISLELPLSQETFSGLWKLLPPEDILPSPHCMDDLLLPQDVEEFFEGPSEALRVSGAPAAQDPVTETPGPVAPAPATPWPLSSFVPSQKTYQGNYGFHLGFLQSGTAKSVMCTYSPPLNKLFCQLAKTCPVQXWVSATPSAGSRVRAMXIYKRXQHMTEVVRXXPHHERCSDGDGLAPPQHLI

SEQ ID NO: 8741 - protein, 280 aa, Zea mays
  Clone ID: TF_ZmC1197832_1.pep
RLEDPRFRLGFLHSGTAKSVTCTYSPALNKMFCQLAKTCPVQLWVDSTPPPGTRVRAMAIYKQSQHMTEVVRRCPHHERCSDSDGLAPPQHLIRVEGNLRVEYLDDRNTFRHSVVVPYEPPEVGSDCTTIHYNYMCNSSCMGGMNRRPILTIITLEDSSGNLLGRNSFEVRVCACPGRDRRTEEENLRKKGEPHHELPPGSTKRALPNNTSSSPQPKKKPLDGEYFTLQIRGRERFEMFRELNEALELKDAQAGKEPGGSRAHSSHLKSKKGQSRVPSSN

SEQ ID NO: 8742 - protein, 190 aa, Zea mays
  Clone ID: TF_LIB4745-011-Q1-K1-A10.pep
SPSPPSLSDHCISSPPGRRSDGAMDIKVCGVCGSGSNSALIVKCVRCNDYEHRYCMKVVARVSPQEWYCAKCQEHTNRGPKPSQGGQTELQKPCHGRDMTSERETSKLHLSQSSVVHQIISPKSLNRFENAKVKFISSEEVALLSRERPPSVTSRFTLSQPSKASSPPTTKHLSNMNCVSPSRVIKMCKP

SEQ ID NO: 8743 - protein, 306 aa, Zea mays
  Clone ID: TF_ZmC36928_1.pep
METIDHLLVSWVFARNYWFKLLTKFNLILVKQNMYRRAAEFWAELRLELLSASELFADGNSNQIWRLYWASHQRFFRHMCMSAKVPAVVRLAKEALAENKCVVIGLQSTGEARTEEAVTKYGVEMEDFVSGPRELLLKLVEENYPLPPKPDSFQQGEETVTEIQRKRALDVSFKGRVRKVAKVVDVSDDDTDDYSPSESDHESTESDEEFHMCQICNTEEEQSLLLHCSGCSRHVHPHCLSPPWTGTITDDWACYTCKIVEDEEKKQDAHVADCLKRISLLMSMKRIPCSGGKDVVISCMELPEKD

SEQ ID NO: 8744 - protein, 500 aa, Zea mays
  Clone ID: TF_ZmC4701_1.pep
MGHRATPGVAFAPPKPTFINHNEIAKNVLQFLHQPANHPSWTPPSTEYMHSRLCCQICKVDIIGTDNLLVCDACERGVHLKCLHQYGNKGVPKAEWHCSACLTQSKGKPLPPKYGKVTRTVVASKTAPPGGGAQLSLQESAENMAAKENHQKLAANGNLMKPFSIHGGSTVPDSNVLALSAVMAGSQSQLVSTLRPSIVVKAETPSNGKEGTGQPCNTAIQPNVRSSSLNNRLRSDSCLNPADSANEIMHGKHAAEISGVEAKVKSEANSEVVVSTDEELVHSSGTSIETERAKVVAIEENRAQSTFETDKMKVGETTINTGTTDQCINTEEKLPSLATSEAHTITDVKMTSNTGIPVQQHNIATIEEKTQIDAVSDPHPHAIQDIQDMEMGTNNGPPIDQTSSLVEENPPGQSSSIADACVTANTGIPTDQTQHPNESTENAVKKSPNRELYKEKPGCNITSDITQKVTSNGIMCPEDKTLCVHEDKAVGCDTEAKEEN

SEQ ID NO: 8745 - protein, 426 aa, Zea mays
  Clone ID: TF_ZmC299_1.pep
HLYDVIIVDICFVSSNCWTFVSLYCLKRSHKEKRSSYAPESGVRYDGVYRIEKCWRKIGIQGKFKVCRYLFVRCDNEPAPWTSDDHGDRPRPLPKIKELQGATDITERKGRPSWDYDDKDGWKWVVPPPVSRKPVLSGDPETDKQIRRATKRVHLSVAERLLKEFACSICRAVIKEPLTTPCAHNFCKTCLLGAYDSQSSIRERSRGGRTLRAQKIVKTCPSCPTDICDFLENPQINREMMELIETLQRKAVEEAKMTSDDAEECGDGDSEENDGDLVKGEDVSGLNEGEQDSADADANVEGSVKIVVEIKEEGKDDKRSKMGATEVVDVLVDEDAVKQTKKRKVDAEAGTNGGKRMKSSSTVEEVAVCVTPVKRSRKSGDMDDERNGSPAVSSGRRVTRSSVDDTGSADSPARRTRSRARADAGC

SEQ ID NO: 8746 - protein, 49 aa, Zea mays
  Clone ID: TF_LIB3632-035-Q1-N6-H10.pep
EACKAWFHPSCMAMAIAQAKKLDPFVCSACLKENGSKSLSNVYAPSSNF

SEQ ID NO: 8747 - protein, 150 aa, Zea mays
  Clone ID: TF_LIB3069-027-Q1-K1-H9.pep
KVQEFQHKRFYGSDMSLKGRVSELGKKEDVSEDGGDEYPPPDSDHESTESDEDFYMCQICNTEEEKNSLFCCCICASRVHPGCLTPPSTDIVNDDWSCYGCKEKVKSYLKERDAYLTELSKRYDAALDRKSKILDIIPSLDLPSNPLDDI

SEQ ID NO: 8748 - protein, 183 aa, Zea mays
  Clone ID: TF_LIB3960-010-Q1-N6-B6.pep
APPIPAPNPTDDWVDGSWTVDCSCGVTFDDGEEMVSCDECSVWVHTRCARYVRGVHTSFSCHKCRRSKRVPSSADEAEVAELLAELPTHRPPPLYRRWAEVPLPARVHVHGLPGGGDGALFRGAPAFSAALWRCTGYVPKRFGFRYCEFPSWADDNDGADALFALAREKPREMTDDVLIGTEP

SEQ ID NO: 8749 - protein, 391 aa, Zea mays
  unsure (1)..(391): unsure at all Xaa locations
  Clone ID: TF_ZmC10069_1.pep
MEPLVGEEEEVAALEGEDYCFVCKDGGDLRVCDFRGCQKAYHPACVGKDSGFLNSDEEFICEWHTCFICKGRSRYYCFCCPWQAFCQNCVKQAEFVPVLRKTKGFCTNCLRMAIMIEKNVDVDSDGERVDFNDRATYEFLFKEELQFQYSKVYXEINKRCFAALVRHNIDLIYLKKSLVVDLLREPDTFGSKVIGCLVRIKIDLNDYNSYMHKKVHQHRKLYQLGRXNRHGYVGWGSKELMEFLSSIGKDTLNSLDQHGATEVVKVYIQQKGLLARDKKKLVICDDKLKILFRRSKVRYNRIYSLLGKHIAVNMTSEDETFANSDDNNETFVRKKARIGNYSSSTPKCTPEINKRCFAALVRHNIDLIYLKKSLVVDLLREPDTFGSKVIG

SEQ ID NO: 8750 - protein, 442 aa, Zea mays
  Clone ID: TF_ZmC1921_1.pep
MTPKWSACSSNSYRELPLHENGECKSTLTESVPSPTSCFGLHTANTMCSLSSQKKDGNVYKRRKMDKDSNSPITFEEAKEMATQSCTISDDHSSLLLPIISSESEALLLNSTAGVAGPILDCEEPADVPLEPNSGTDDRCFISNMSPTSMTPDKKNAAECSSSNIGPTESITEHISPRDLCIAILMKDGLINESRTRMAHKEEFTDNDANPLLACNNCGCLEHSLKMLICDSCEAGFHLSCCIPCIKELPTDEWYCAPCLCKKPKSLYGKLSEGRINPSRNTNTRPHGMSHIEYMLKDAEPYVTGVRLGRDFQAEVPEWSGPSSSSDVYFDEPCAIDSAELTTFNLCKMSNQSHSSIGNWIQCRETLNPGDSDKQVVCGKWRRAPLYVVQSDNWDCFCCLLWDPVHADCAVPQELKTSEVLKQLKFVNMLKNQLVDQNQKPA

SEQ ID NO: 8751 - protein, 489 aa, Zea mays
  unsure (1)..(489): unsure at all Xaa locations
  Clone ID: TF_ZmC3525_1.pep
DENCSPQAEYELQDSKRSRYSSNDLRSHVALHKRTSGGTKNRRTSVSLARIKKFGSKSVCYSGSDKDNAVLAHEVNARRYSGRLSSNSPCCVCGISDLEPCNRLIECSKCYIKVHQACYGVLKVPRGQWFCRPCKNNTMDTVCVLCAIPGPXKYYSSLLGPQPMQWVHMVCGLWTPGTKCPNDTTMSAFDVSGASPAKRNTACSICDRTGGSFVKCRAVNCLVFFHAWCAHQRGLLQSEPEGEHNENIGFYGRCVSHAIVFSSHVNPKKEYFRNNNWTCARTEGFKGRKGEGFSDSSHKKYEEYSGEFGVSQEQINAWLRINGSKPCGRGQKEYIHYKQLKGWKHLVVYKSGIHGLGLYTSVFIPRGSMVVEYVGEIVGQRVADRREIEYQSGKRQQYKSACYFFKIDREHIIDATRKGGIARFVNHSCQPNCVAKIISVRNEKKVMFFAERHINPGEEITYDYHFNREDEGQRILCFCRSRYCRRYLN

SEQ ID NO: 8752 - protein, 209 aa, Zea mays
  Clone ID: TF_ZmC62111_1.pep
LVGRERGSDDDELNEAVVARSEPKNLVQPNASVPLTSQGFNQLLDQPGPSDPSVVYKDSICNRCGKVAGAGSVLKCYRCMLPCHISCIEATGSPISTGRWCCKNCSAGTKEPVEGDMVLAHGNPNCLHESCVVCDRLAACRSPKCDNSRALVISSVDPEIDTCYSCKICGGTEEDEKRFLICGNVLCRYMYYHIGCLKSMQISTSVERG

SEQ ID NO: 8753 - protein, 486 aa, Zea mays
  unsure (1)..(486): unsure at all Xaa locations
  Clone ID: TF_ZmC89463_1.pep
LVGGPPHKKTAPKKLSPKKKQKIQKKQSRKIETRRNQIVLKCKXKFGKRGKRGRPRKNPTDLSKNEPSKIHESEPSNVSKNEPVKRISKRLHDKYMKSNSNVSENAASSSKRKRTVSQYSYWLNGLRWSQNPHDERARSFRKERVVFPSEDAEISEVSPVCCLCEKCYNEEDIYIACEKCEDWFHGDIYSVNIENVNNLIGFKCHRCRRISLPVCPYAETVTVVKGQSDEDHCIKFVDQCVGKFVEDEDPNCPKDLGAPGSLQELHDHEIEQGLNVHITEIEFSYDNCLEELNDHGCSKEFDAHSTEKDLEDDKSLKKVDIHNELRALDDLGSEKEPGDHYNNWKALDSYNSWKLLDSHNSQEELDCTTNSKFSPKEIPCPMELDGFSSLKLVSHNILEELDNHNCLKENGNENSSKELDNNGSPKDSGDCLAEHFNSSRISGNEALVLTPETDSVNESLGLQSKDDPGKSVPTEHEIDLQVVVTL

SEQ ID NO: 8754 - protein, 187 aa, Zea mays
  Clone ID: TF_ZmC1247420_1.pep
NNYGNKDDSGDDCDGSSDDGDGSSDDDVTDQICALCDDGGHLLSCDGPCKRSFHPTKKDGRESKCESLHYTSAEVKRIGTYLCANCKNKQHQCFRCGELEPSHGPNAKVFQCNQASCGYFYHPKCIAQLLDPNATDGELERRIMAGMSFPCPIHWCFKCGHMENKAQRALQLAVCRRCPRAYHRECL

SEQ ID NO: 8755 - protein, 197 aa, Zea mays
  Clone ID: TF_LIB4766-109-A1-K1-G9.pep
MADTGRDAFPDEAEPAFTLDEYMEDIEAVELEADLVLGGDEGKECTYAGGYLKRQAVFSCLTCVPDGVAGVCTACSLACHDGHEIVELWTKRKFRCDCGNSKFGGHLCKLCPEKDSENSANTYNHNFKGSYCTCGRPYPDPEAKEQVEMIQCSICEDWFHGDHIGLNSIEEIPRDEEGEPLYEELICHKCSSGLHFL

SEQ ID NO: 8756 - protein, 168 aa, Zea mays
  Clone ID: TF_LIB3912-027-Q6-K6-F9.pep
MNIVCEVCGDIGYRQLLLCCGDCKRYAVHQYCLDKVVFDATLLEWFCYECLQRRGEVTCVASLEQVSSESPLSHAHFGPLVHQRTTKRVESVTGPYSPSDDCEELFSYPGIESIPSVQEISVDPIKTSSISEHDTIEAAASSERFTECQKASSCREITVKMAMAPSSY

SEQ ID NO: 8757 - protein, 231 aa, Zea mays
  Clone ID: TF_ZmC2557_18.pep
MDMAPASVYFNPRSVEEIFKDFSGRRAGLVRALTSDVDDFCRLCDPDKENLCLYGLPNGSWEVSPPAEEVPPELPEPALGINFARDGMQRRDWLTLVAVHSDSWLISVAFFYGARLNGNDRKRLFSMMSDLPSVLEAFADRKHGRDRSGVDSSGKSRHSSKRGKDGHAKSFRAAAPAAKEYDEDDDEEDEEEHTETFCGSCGGLYNASEFWIGCDICERWFHGKCVRITPA

SEQ ID NO: 8758 - protein, 239 aa, Zea mays
  unsure (1)..(239): unsure at all Xaa locations
  Clone ID: TF_LIB4980-054-R1-K1-A2.pep
MVCRVTSPPEVDLLHCSTCATPWHSPCLSKAPALADAASWSCPDCSLDSATVAAPSAPANTLVAAIRAIESDNTLSDQEKARRRQALLAGDAPDVADDDDAVDDTFEIVGKNFSCVFCMKLPERPVTTPCGHNFCLKCFQKWIQNKKRTCGKCRAPIPAKMAEQPRINSALVEVIRMAKISKNHNSAGSAVPYHYMRNDDRPDKAFTTDRAKKAGKANASSGQIFVTIAPDHLXLYLQK

SEQ ID NO: 8759 - protein, 329 aa, Zea mays
  Clone ID: TF_ZmC3769_1.pep
EVLSQQGLCIKCGEGGQLLECNGCFLAAHSSCFGSSATFEGTNFFYCPVCLYKKATEAYKKAKITYCETRKNLVAFLGTAQATNQPDKQLNGAQPGAANRDEEPHDEQHSKGCGASKGAHENEVYNLAHQDEEHHQQRKKQKINAIGKSYPKEVLTEKVLFQNSDPASINKHSVLQNNNKTPVKDPEKKQQAGDEEARKEAGNENSSHETGASSPRRCDPPSNQDVEADQDDSLTTSNQSGGSDEIEATSSNDSAKQSSPPWRGMGHNKKGLHEKEPAVSSKSRKGIGKQDQHMHTSRRKKKLHTCKSAIPILLRHLEDAKNSVGQKKK

SEQ ID NO: 8760 - protein, 412 aa, Zea mays
  Clone ID: TF_ZmC8733_1.pep
MADTGRDAFPDEAEPAFTLDEYMEDIEAVELEADLVLGGDEGKECTYAGGYLKRQAVFSCLTCVPDGVAGVCTACSLACHDGHEIVELWTKRKFRCDCGNSKFGGHLCKLCPEKDSENSANTYNHNFKGSYCTCGRPYPDPEAKEQVEMIQCSICEDWFHGDHIGLNSIEEIPRDEEGEPLYEELICHKCSSVCHFLKLYPDTIWASGKPNLAVETDASDSNVMKKPSGHADPEKHENGALVDNTVGEKTSVENDSTKAIAVPEEANLGSSSGNNCKLGVDVNTMPAITDKSEPFFMSKGWRETLCRCETCFNFYAQRGIAYLIDKEDSIEEYEKIAKQKREMKLEQQQGAETNFLNSLNHVQKIEMISGINDMKNEFQSFLESFDASKPVTSDDIHSFFENLAKKKKQRLS

SEQ ID NO: 8761 - protein, 240 aa, Zea mays
  Clone ID: TF_ZmC8733_5.pep
PRTTKGVGRLRQLEADLVLGGDEGKECTYAGGYLKRQAVFSCLTCVPDGVAGVCTACSLACHDGHEIVELWTKRKFRCDCGNSKFGGHLCKLCPEKDYENSANTYNHNFKGSYCTCGRPYPDPEAKEQVEMIQCSICEDWFHGDHIGLNSIEEIPRDEEGEPLYEELICHKCSSVCHFLKLYPDTIWASGKPNLAVETDASDSNVMKKPSGMLTLRNMKMVLLWIIRVARRPLVGKDSTK

SEQ ID NO: 8762 - protein, 135 aa, Zea mays
  unsure (1)..(135): unsure at all Xaa locations
  Clone ID: TF_LIB4743-111-Q1-K1-G10.pep
LITNSVESVRDAGPWRDRKNESIATKYPSLNITYPSIKKHTKKKPIVKPMVNCTNTKVRMAKVTTHTSAEASRSCETIGTESSKSNHVKNQQVDHANPVALNTEQSCPLIVNSLSTLXDNHQYHLLYTTEGLACK

SEQ ID NO: 8763 - protein, 1087 aa, Zea mays
  Clone ID: TF_ZmC133_37.pep
MEASAGLVAGSHNRNELVVIRRDGDPGPKPPREQNGQVCQICGDDVGLAPGGDPFVACNECAFPVCRDCYEYERREGTQNCPQCKTRYKRLKGCQRVTGDEEEDGVDDLDNEFNWDGHDSQSVAESMLYGHMSYGRGGDPNGAPQAFQLNPNVPLLTNGQMVDDIPPEQHALVPSFMGGGGKRIHPLPYADPSLPVQPRSMDPSKDLAAYGYGSVAWKERMENWKQRQERMHQTGNDGGGDDGDDADLPLMDEARQQLSRKIPLPSSQINPYRMIIIIRLVVLGFFFHYRVMHPVNDAFALWLISVICEIWFAMSWILDQFPKWFPIERETYLDRLSLRFDKEGQPSQLAPIDFFVSTVDPLKEPPLVTTNTVLSILSVDYPVDKVSCYVSDDGAAMLTFEALSETSEFAKKWVPFCKRYNIEPRAPEWYFQQKIDYLKDKVAANFVRERRAMKREYEEFKVRINALVAKAQKVPEEGWTMQDGTPWPGNNVRDHPGMIQVFLGQSGGLDCEGNELPRLVYVSREKRPGYNHHKKAGAMNALVRVSAVLTNAPYLLNLDCDHYINNSKAIKEAMCFMMDPLLGKKVCYVQFPQRFDGIDRHDRYANRNVVFFDINMKGLDGIQGPIYVGTGCVFRRQALYGYDAPKTKKPPSRTCNCWPKWCFCCCCFGNRKQKKKTTKPKTEKKKLLFFKKEENQSPAYALGEIDEAAPGAENEKAGIVNQQKLEKKFGQSSVFVTSTLLENGGTLKSASPASLLKEAIHVISCGYEDKTDWGKEIGWIYGSVTEDILTGFKMHCHGWRSIYCIPKRVAFKGSAPLNLSDRLHQVLRWALGSIEIFFSNHCPLWYGYGGGLKFLERFSYINSIVYPWTSIPLLAYCTLPAICLLTGKFITPELNNVASLWFMSLFICIFATSILEMRWSGVGIDDWWRNEQFWVIGGVSSHLFAVFQGLLKVIAGVDTSFTVTSKGGDDEEFSELYTFKWTTLLIPPTTLLLLNFIGVVAGVSNAINNGYESWGPLFGKLFFAFWVIVHLYPFLKGLVGRQNRTPTIVIVWSILLASIFSLLWVRIDPFLAKDDGPLLEECGLDCN

SEQ ID NO: 8764 - protein, 225 aa, Zea mays
  Clone ID: TF_ZmC1236834_1.pep
MEANRGMVAGSRGGVVTIRHDGDGAAAKQLKNVNEQICQICGDTLGLSATGDIFVACNECAFPVCRPCYEYERKEGNQCCPQCKTRYKRHKGSPRVRGDEEEDGVDDLDNEFNYTQGNVQGPQWQLQGQGEDVDISSSSRHEPHHRIPRLTTGQQMSGDIPDASPDRNSIRSPTPSYVDPSIPVPVRIVDPSKDLNSYGVGSVDWKERVESWKVRQDKNMIQVRR

SEQ ID NO: 8765 - protein, 284 aa, Zea mays
  Clone ID: TF_ZmC313479_1.pep
RFHPMVQEQDAPNALASDADHPAPPPRLLSKHRPRRRAAAPRPPLPPPAPPLPARRLPDLSQCHCCGFRFRTPQPGARPKRRPLCPLSSLWRVVLLCAECLSLVRCGAVCSYCLSLDNLPPEDSAVVCRRCNRYVHRSCIPAEHRTAVIQPVDVEDFLCVDCRPTVRSKNGGFNLGLNLDACIWDRTSVARENALRKAVEVKPASKRGNDAVGGSGLVGRGSDVPVLPDEELALQLHLAMNGSQRISRSGGASADPAKGKNDGVASRICNTNQDISRNKYDGSA

SEQ ID NO: 8766 - protein, 198 aa, Zea mays
  Clone ID: TF_ZmC2027_16.pep
MAANKGMVAGSHNRNEFVMIRHDGDAPVPAKPTKSANGQVCQICGDTVGVSATGDVFVACNECAFPVCRPCYEYERKEGNQCCPQCKTRYKRQKGSPRVHGDDEEEDVDDLDNEFNYKQGNGKGPEWQLQGDDADLSSSARHDPFLKGLMGRQNRTPTIVIVWSILLASIFSLLWVKIDPFISPTQKTAALGQCGVNC

SEQ ID NO: 8767 - protein, 152 aa, Zea mays
  Clone ID: TF_5006147.pep
VCMVCGVAAPSEVDLLRCSTCATPWHSPCLSNPPALSEAAIWSCPDCSGDPVAPAAPAAGGELVAAVRAIEADTTLSDAEKARRRQNILAGRSAASAPDDDVDDSAEDDVLNIFGRSFSCAFCMKLLDRPVTVLQMSLIRSMLASMFKINNC

SEQ ID NO: 8768 - protein, 318 aa, Zea mays
  Clone ID: TF_ZmC531693_1.pep
MARKKATVEQLRTLNKVREFKRRRNMHKAAGAGPGNKGENVCAICDDGGNLTCCEGCCQRSFHLDNEHNCIKTLGLTIQEAKNIIEKGDFICKNCQYKQHQCFICGSLGSSDDTDTASQQVFQCEHDDCARFYHPKCVAQMLYPDSQELFELHVAAGESFTCPMHECIVCKEVDNKKDKSMQFAVCRRCPTVYHRKCLPRDIIFKPKKGRRGPMRRAWKNMLPDRILIFCMKHEIVRELQTPARNHIVFPESNVLKTFQALYAQREAPDHSSSKQTHSSPPPAARDQNQCYCSSPLCSFAPSSVFMRPHPGSSGWLDD

SEQ ID NO: 8769 - protein, 63 aa, Zea mays
  Clone ID: TF_LIB4171-042-Q1-K1-E2.pep
KKEEGVTPFCGSCGTKDGKGEFWICCEKCDRWFHGKCVKIPPARVEPLKPSKCPDCSPKRARA

SEQ ID NO: 8770 - protein, 256 aa, Zea mays
  Clone ID: TF_ZmC24647_1.pep
MDPGAGAHYSARTAEEVFRDFRGRRAGMIKALTNDVEKFYQLCDPEKENLCLYGYPNETWEVTLPAEEVPPEIPEPALGINFARDGMNEKDWLALVAVHSDAWLLAVAFYFAARFGFDKEARRRLFNMINNLPTIFEVATGVAKKQNKEKEPNSTSKSNKPSSKMTTRPESHLKATKVAPPKDEDDESGEEYEEEEERDNTLCGSCGTNDGKDEFWICCDSCERWYHGKCVKITPARAEHIKHYKCPDCNNKRAGA

SEQ ID NO: 8771 - protein, 138 aa, Zea mays
  Clone ID: TF_ZmC62616_2.pep
MLLDSESYESGVRIGTKFQAEVPKWSGPISSREDEFAEPTELDRSKTTMLSFEDKKTSIGNWIQCREVLDTGVVCGKWRRAPLFVVQSSDWDCSCSVVWDPIHADCAVPQELETVKVHEQLKYINKLKNRLGDSNQKR

SEQ ID NO: 8772 - protein, 252 aa, Zea mays
  Clone ID: TF_ZmC211414_1.pep
LRAAHWMVQRENGNTLHQEYANSAPYCVPFDFVHKNSRMFYNPFNGNISSQPEPSPPYISGGILADEMGLGKTVELLACIFAHRRPISLDFSVFQNKTEMDQIKRQKVERVECICGAASESSAYTGLWVQCDICDAWQHADCVGYSPKRNILFADTTEDVVSTNKKSTMKSGFRRKKKPRCSIVETEDKYICALCLELIEATQTNILSHATLIVCPAPILAQWHSEITRHTRPGSLKVCIYEGARNLDPSTI

SEQ ID NO: 8773 - protein, 155 aa, Zea mays
  unsure (1)..(155): unsure at all Xaa locations
  Clone ID: TF_21216428.pep
RGALVAVHSDSWLVSVAFYYAARLNRSDRKRLFGMMNDLPTXXEVVSSGVKQSKERDRSGTDNGGRNKLSVKQTSEPRLENNAREPDEGYDEDDSNHSETLCGTCGGIYSADEFWIGCDVCEKWYHGKCVKITPAKAESIKQYKCPSCCNXPRPI

SEQ ID NO: 8774 - protein, 73 aa, Zea mays
  Clone ID: TF_LIB3689-230-Q1-N6-A12.pep
SYQGRLQWHPSQCLATLCGTCGGIYSADEFWIGCDVCEKWYHGKCVKITPAKAESIKQYKCPSCCNSKRPRPL

SEQ ID NO: 8775 - protein, 297 aa, Zea mays
  Clone ID: TF_ZmC17187_1.pep
MPPLAARVVSSLGSRPHRDQSSLSLPAFLLRLALAGGQAHRRRAMDASYRRAGTGSGSAPRSVEDIYKDYRSRRSAILRALTHDVEEFYALCDPEKENLCLYGYANEAWEVALPAEEVPTELPEPALGINFARDGMNRGDWLALVAVHSDSWLVSVAFYYAARLNRSDRKRLFGMMNDLPTVFEVVSSGVKQSKERDRSGTDNGGRNKLSVKQTSEPRLENNAREPDEGYDEDDSNHSETLCGTCGGIYSADEFWIGCDVCEKWYHGKCVKITPAKAESIKQYKCPSCCNSKRPRPI

SEQ ID NO: 8776 - protein, 228 aa, Zea mays
  Clone ID: TF_ZmC17187_2.pep
MDASYRRAGTGSGSAPRSVEDIYKDYRSRRSAILRALTHDVEEFYALCDPEKENLCLYGYANEAWEVALPAEEVPTELPEPALGINFAFYYAARLNRSDRKRLFGMMNDLPTVFEVVSSGVKQSKERDRSGTDNGGRNKLSVKQTSEPRLENNAREPDEGYDEDDSNHSETLCGTCGGIYSADEFWIGCDVCEKWYHGKCVKITPAKAESIKQYKCPSCCNSKRPRPI

SEQ ID NO: 8777 - protein, 250 aa, Zea mays
  Clone ID: TF_ZmC2557_29.pep
MDMAPAAVSSNPRSVEEIFKDFSGRRAGLVRALTSDVDDFCSFCDPDKENLCLYGLPNGSWEVSPPADEVPPELPEPALGINFARDGMQRRDWLSLVAVHSDSWLISVAFFYGARLNANDRKRLFSMISDLPSVFEAFADRKHVRDRSGVDSSGKSRHSSKRGNDGHAKNSRAAAPAAKEYDDDDDEEDEEHTETFCGSCGGLYNANEFWIGCDICERWFHGKCVRITPAKADHIKHYKCPDCSSKKIRQ

SEQ ID NO: 8778 - protein, 250 aa, Zea mays; identical to SEQ ID NO: 8777
  Clone ID: TF_ZmC2557_30.pep

SEQ ID NO: 8779 - protein, 131 aa, Zea mays
  Clone ID: TF_LIB4757-014-Q1-K1-A10.pep
LGPSGRPEKNYCKRRLLHELSISLLKGQKMSNRQSDDLCSICSDGGQLLLCDTCPRAFHRECVGLSSATKGTWCCRYCENRQQRESCLAYNNNAIAAGRVEGVDALEQIFTRSIRIATTLETGFGGCALCK

SEQ ID NO: 8780 - protein, 93 aa, Zea mays
  Clone ID: TF_jC-zmXLIB3526P054bg08a1.pep
EVPSLNLFLDTGKSYSLCQLQAWSIEQKVRKEHAKDPMSLQADQNDDTCGSCGDGGELICCDNCPASYHQACLSCQVCYPDVIRFIWTFYLGK

SEQ ID NO: 8781 - protein, 184 aa, Zea mays
  Clone ID: TF_LIB3354-003-P1-K1-A4.pep
SESSSDSEFVVSGKELEELREPEPPKAAPNLHVSLRRICITRHGEGKGKEKQEHEEAGKPICGICLSEELRATVQGVLNCCSHYFCFACIMEWSRVESRCPLCKQRFTTITKSSKVDLGLGVRKAVVKVEERDQVYQPTEEEIRRWLDPYENVVCIECNQGGDDNLMLLCDICDSSAHTYCVGL

SEQ ID NO: 8782 - protein, 218 aa, Zea mays
  unsure (1)..(218): unsure at all Xaa locations
  Clone ID: TF_LIB3279-224-Q6-K6-A4.pep
GIKEGSISRDGIKCMCCNELFTVENFEVHAGSSTPLPSSHMFLKDGRSLSQCLVEFMGGNKPRDPLHVRLKGSSSDLESDSICSVCHDGGDLLLCDNCPSSYHHDCVGLEVEAIPEGSWYCPSCRCGICNLSDYDPDTSQFTEKTIVYCDQCEREYHVGCTRNSDHQLICRPEGCWXCSRGCSNVFQHLQEVIGKQVPTPIEGLSCTILKFCRANGGD

SEQ ID NO: 8783 - protein, 255 aa, Zea mays
  Clone ID: TF_ZmC21748_1.pep
MDGDGGGAGALHHHTRSPEDVFRDFRARRAGIVKALTTDVEKFYQQCDPEKENLCLYGLPNETWEVTLPAEEVPPELPEPALGINFARDGMVEKDWLSLVAVHSDAWLLSVAFYFGARFGFDKDARRRLFTMINNLPTVYEVVTGVAKKQSKAPNGSSKSSKPNSKPSKLTNSNSKPAKPAHPKEEEDSGREDAEEDQAYLCGSCGESYANGEFWICCDVCEKWFHGKCVRITPAKAEHIKQYKCPSCSTKRSRE

SEQ ID NO: 8784 - protein, 241 aa, Zea mays
  unsure (1)..(241): unsure at all Xaa locations
  Clone ID: TF_ZmC21748_4.pep
MDGDGGGAGALHHHTRSPEDVFRDFRARRAGIVKALTTDVEKFYQQCDPEKEXLCLYGLPNETWEVTLPAEEVPPELPEPALGINFARDGMVEKDWLSLVAVHSDAWLLSVAFYFGARFGFDKDARRRLFTMINNLPTVYEVVTGVAKKQSKAPNGSSKSSKPNSKXHPKEEEDSGREDAEEDQAYLCGSCGESYANGEFWICCDVCEKWFHGKCVRITPAKAEHIKQYKCPSCSTKRSRE

SEQ ID NO: 8785 - protein, 301 aa, Zea mays
  Clone ID: TF_ZmC1977_1.pep
PLFSSSDHLLLLALRLPNLAAVSWAWDSRSAICVRVWPATAPPEAALPSAPLREAWPSPTSSPTRDAAAAPAPTPATAPSRLAPTPLKWYCPSCVEPDVALKHKNHGRSHEGCDVCEWLVVKPEEPAEDVSEPELAVKTQESSVSSMGEDSEPDLSTTALANLCKNCGTCEDEDRKFMVCGHGLCSFKFYHVLCLKERQIASEKQKNLKCWYCPSCLCRRCFKDKDDEKIVLCDGCDEAYHIYCMDPPCESVPRGKWFCTRCSARRSVQGMQRYEKSILEKVKRAPGANGPKVQASAGPEK

SEQ ID NO: 8786 - protein, 93 aa, Zea mays
  unsure (1)..(93): unsure at all Xaa locations
  Clone ID: TF_LIB4760-024-R1-K1-C1.pep
MGRAAPSSSPSSPQLGRKRTAAPTPEPPTPQRHCSMVDVMRRSRAVAAPPPVARARVYTYYETLLCETCGLGDRDDQMLXCDRCDRGCHTFCL

SEQ ID NO: 8787 - protein, 256 aa, Zea mays
  Clone ID: TF_ZmC24647_2.pep
MDPGAGAHYSVRTAEEVFRDFRGRRAGMIKALTNDVEKFYQLCDPEKENLCLYGYPNETWEVTLPAEEVPPEIPEPALGINFARDGMNEKDWLALVAVHSDSWLLAVAFYFAARFGFDKEARRRLFNMINNLPTIFEVVTGVANKQNKEKGPNSTSKSNKTSSKMTSRPESHSKATKVAVPPKDDDDESGEEYEEEERDNTLCGSGGTNDGKDEFWICCDSCERWYHGKCVKITPARAEHIKHYKCPDCNNKRARA

SEQ ID NO: 8788 - protein, 341 aa, Zea mays
  Clone ID: TF_ZmC4031_2.pep
SLQADQNDDTCASCGDGGELICCDNCPASYHQACLSCQDIPDGNWYCSSCLCDICGEVIDSKELVTSLPALDCSQCERQYHVKCVSAKVPCNEDGSGTWFCGRKCHEIYMTFRSRVGVPDHMDDDLCFTVLRNNGDKKVRTAEEIALMAECNMKLMIATSIMEECFLPILDPRTGIDIIPSILYNWRSDLHFNYKGFYTVVLESDDSMVSVASIRLHGAILAEMPLVATSKENRQQGMCRRLMDYIEEMLKSLKVEMLLLSAIPHLAETWTSTFGFREIDESDKKRLSKVRLAAVPGTVLLKKDLLCECSGADAGEPPSPKPFQVYSRVPGARTGLDAVCQ

SEQ ID NO: 8789 - protein, 331 aa, Zea mays
  Clone ID: TF_ZmC28160_1.pep
MCSFCSLLQSEDQLKNQLSVKMSKGNCPALAAPRPLISSAKGLYTGIEEINLLKEIVDKARNLNAYLMQILDDSDCYHGEDLTVIFKSLLVALKATSASGLYDDNVSCRIESVLSRYLWKKQIHKLLYGGKKSSIQEVLCLDEEGSHLEICDQDFFKLEISKIKETSLQWLAKAEEVACDSGELALDLVYGLIAEGENLSVDFEKELKLLRDRSVLYCICCKPDDNRAMIACDQCDEWYHFDCINLLGPPPESFFCPACHPNNGEESVSLARSEDDEDRSSTGAGAHTPPDRVVERDLIKLLSCHSGSSWSESRRAPHRTARRRSSFVGLL

SEQ ID NO: 8790 - protein, 203 aa, Zea mays
  Clone ID: TF_jC-zmshLIB3587P047b02b1.pep
ELLYKRFTTITKSSKVDLGLGVRKAVVKVEERDQVYQPTEEEIRRWLDPYENVVCIECNQGGDDNLMLLCDICDSSAHTYCVGLGREVPEGNWYCGGCRLGDEGPSYTGIQRTVAYERQNYRSHVGSSVSFGMAVPGGTFERPSSINPRHSFQGIDLNLSPREFPGESHPAESQVSTDSVSTPTGRAGKTISGRRELQRYIQS

SEQ ID NO: 8791 - protein, 489 aa, Zea mays
  unsure (1)..(489): unsure at all Xaa locations
  Clone ID: TF_ZmC877_1.pep
VDDDDDDFIVDDEVIVNRHPXKKARIGSGRETVVDPQVSIEEETWPDLESDSSDFEFATSDEEPNNVETPVAEQTTVRKGGRRGXSESESSSDSEFVVSGKELEELREPEPPKAAPNLHVSLRRICITRHGEGKGKEKQEQEEAGKPICGICLSPTRPPTRXEELKATVQGVLNCCSHYFCFACIMEWSRVESRCPLCKQRFTTITKSSKVDLGLGVRRAVIKVEERDQVYQPTEEEIRRWLDPYENVVCIECNQGGDDNLMLLCDICDSSAHTYCVGLGREVPEGNWYCGGCRLGDEGPSYTGIQRTVAYERQNYRSHVDSSSVSFGMAAPGGTFERPSSINPRHSFQGIDLNLSPREFPGESHPAESQVSTDSVSTPTGRAGRTISGRREIQRYIQSLFRPSLPSRPDTYHNIAQNSGGVSRNEPNRWNFPSSSEANTSQNLPDGIQNHHSDLPFVQAHSNFAPFMSLDGDDFQQIEGVKSNLRNMQ

SEQ ID NO: 8792 - protein, 161 aa, Zea mays
  Clone ID: TF_ZmC311_1.pep
QNNNNNNLLAWGSQKNSRKEITGQGTNISSSIHRDKSACPLGCHHLRLHKPTGLLPTYTQPILRLLDSVCQSNAYTFRGTRILSFLFVPSHPQRRCLFSWSSSCCLHLGPFGIRNTLDALQDRLLIPLHPVRRPPCTTRRAEPFTSRDRTARWIHAVSVVS

SEQ ID NO: 8793 - protein, 260 aa, Zea mays
  Clone ID: TF_ZmC350427_1.pep
REYLTACIEAGKFVDEEPFEWFGTGFNDGRTISFDAPRKWRNIRQQMGHGAFYGMQIVAYGQFILPTLDTVKRAVKAGDGAVLATSPPYTRFLDSGVDFAVVSESISRTDAWVQEFISHGIPCVSADYLVEYVCKPGQPLDRHVLFETNCVASKSLEKLTKKQVEMATAEKSEPSEDDDPEDLSCSACGRRDRGDVMLICGDEAGEAGCGIGMHIDCCDPPLDAVPDDDWMCPRCAVPEPETETKHARGTERRGRGSRRR

SEQ ID NO: 8794 - protein, 255 aa, Zea mays
  Clone ID: TF_ZmC21748_2.pep
MDGDREGAAAVHHHARSPEDVFRDFRARRAGIVKALTTDVEKFYQQCDPEKENLCLYGLPNETWEVTLPAEEVPPELPEPALGINFARDGMVEKDWLSLVAVHSDAWLLSVAFYFGARFGFDKDARRRLFTMINNLPTVYEVVTGVAKKQSKAPNGSSKSSKSNSKPSKQINSNSKPVKPAHPNEEEDSGREDAEEDQAYLCGSCGESYANGEFWICCDICEKWFHGKCVRITPAKAEHIKQYKCPSCSTKRSRE

SEQ ID NO: 8795 - protein, 52 aa, Zea mays
  Clone ID: TF_LIB3591-115-Q1-K6-A4F2B.pep
AWGKTYANGEFWFCCHVCEKGFHGKCVGITPPKAERINQYKCPGSSSKRSRE

SEQ ID NO: 8796 - protein, 257 aa, Zea mays
  unsure (1)..(257): unsure at all Xaa locations
  Clone ID: TF_ZmC1446_1.pep
MNGGGSGLAPNAAHTADEVFRDYKGRRAGMIKALTTDVERFFKLCDPXEKENLCLYGYPDETWEVTLPAEEVPPEIPEPALGINFARDGMNEKDWLALVAVHSDSWLLSVAFYFGARFGFDRETRRRLFSLINNMPTIFEVVTGAAKKQAKEKTPNSSSKSNRPSSKVQSRAESRSKAKVPQDEEESGDDDEDEEADEHNNTLCGTCGTNDSKDQFWICCDNCEKWYHGKCVKITPARAEHIKQYKCPDCTNKRARA

SEQ ID NO: 8797 - protein, 288 aa, Zea mays
  Clone ID: TF_ZmC1446_2.pep
MNGGGSGLAPNAAHTADEVFRDYKGRRAGMIKALTTDVERFFKLCDPGECARSLWFLAPGCGVIAEEASVVFLLGLRCFEKENLCLYGYPDETWEVTLPAEEVPPEIPEPALGINFARDGMNEKDWLALVAVHSDSWLLSVAFYFGARFGFDRETRRRLFSLINNMPTIFEVVTGAAKKQAKEKTPNSSSKSNRPSSKVQSRAESRSKAKVPQDEEESGDDDEDEEADEHNNTLCGTCGTNDSKDQFWICCDNCEKWYHGKCVKITPARAEHIKQYKCPDCTNKRARA

SEQ ID NO: 8798 - protein, 195 aa, Zea mays
  unsure (1)..(195): unsure at all Xaa locations
  Clone ID: TF_ZmC831741_1.pep
VRAQSPFRHGSAAASRHRPQRGPAAAVERHPAGAGPVAAAGVGSARPSSSSSSSSAAAAAVSSSPAAAAAPGCAQPTGAAPAGGPRRGASGPPPPRTEEYTFWAHRERARRLAPWSGAAAAPSAAAGASPWGGGGXGNPPAPCSXCXRQEILGGTLVCDACDRGFHPNCVRVWPALFPPPPPPNEGLDLPCVGKA

SEQ ID NO: 8799 - protein, 135 aa, Zea mays
  Clone ID: TF_LIB3059-004-Q1-K1-G10.pep
FPGRPTRPPTRPGDTILGYRAVQVNWKDLDYCNVCDMDEEYEDNLFLQCDKCRMMVHARCYGELKQLDGGLWLCNLCRPGAPRVSPKCCLCPVTGGAMNPTTDGRWAHLACAIWIPETCLKDVKRMEPIDGLSII

SEQ ID NO: 8800 - protein, 257 aa, Zea mays
  unsure (1)..(257): unsure at all Xaa locations
  Clone ID: TF_ZmC1446_3.pep
MDGGGSGPAPNAAHTAEEVFRDYKARRAGMIKALTTDVERFFKLCDPEKENLCLYGYPDETWEVTLPAEEVPPEIPEPALGINFARDGMXEKDWLALVAVHSDSWLLSVAFYFGARFGFDREARRRLFSLINNMPTIFEVVTGAVKKQQAKEKTPNSSSKSNKPSSKVQSRAESRSKAKVPKDEEESGDDDGDEEAEEHDNTLCGTCGTNDGKDQFWICCDNCEKWYHGKCVKITPARAEHIKQYKCPDCTNKRVRA

SEQ ID NO: 8801 - protein, 588 aa, Zea mays
  Clone ID: TF_ZmC4031_1.pep
KQKANIASLNNCVSMDNLTVNPIDPVVLNEGEQTGTAITEQVPVPLNLVLENKNDKDQGEQSSETSEQLMSKEPQKRDIKRQKRTWSHTCKFDDDDLLMTAVIYKLTARYRNSFHRKLRNKFGFRRLPTYRWENEDKGDRKKFPGEARTVLNKLLEMGIVARVDILQCHGPGGKNVLKDGNITASGIQCQCCGTTFTMSKFKCHAGLRQEVPSLNLFLDTGKSYSLCQLQAWSIEQKVRKEHAKDTMSLQADQNDDTCGSCGDGGELICCDNCPASYHQACLSCQDIPDGNWYCSSCLCDICGEVIDSKELVTSLPALECSQCERQYHVKRVSAKVPCNEDGSGTWFCGRKCHEIYMTFRSRVGVPDHMDDDLCFTVLRNNGDKKVRTAEEIALMAECNMKLMIATSIMEECFLPILDPRTGIDIIPSILYNWRSDLHFNYKGFYTIVLESDDSMVSVASIRLHGAIVAEMPLVATSKENRQQGMCRRLMDYIEEMLKSLKVEMLLLSAIPHLAETWTSTFGFREIDESDKKRLSKVRLAAVPGTVLLKKDLLCECSGADAGEPPSPKPFQVYSRVPRGRTGLDAVCQ

SEQ ID NO: 8802 - protein, 592 aa, Zea mays
  unsure (1)..(592): unsure at all Xaa locations
  Clone ID: TF_ZmC37301_1.pep
HGPYLCPKHTRCHSCGSGVPGSGHSTRWFLGYTCCDACGRLFVKGNYCPICLKVYRDSEVIPMVCCDVCEKWVHIECDGISEEKYQQFQADQNLQYTCAACRGECSQIRDTEDAIRELWKRRDVADHELMATLRAAAALPSLEDVSPPYQNSDDEKLGAYALKNESRNTLKFSLKSNSSKPPPDTPEQEKIVFKSSGSNKKPSKKKSGQANKTVDGHDEIFLERRHAVKSSNSCLGDQTIDDNHDMSPFKNDDNAYISSSTRSSEKNLKSPSMKAVTNNADMIPKVKIKGSKVSSLHYKDGEENTSKTDTGKATKLVIHLGSRHKTRSGSPKSELSNYQREQDLGSIHGRKIDVTSQLKGSRSEVKERSVMKLVRETGVQQRNSLLGDLGTSKKHATGKRSNALISGMENGNETGTRNRPFAQKQSHSSQVDENQGTADSPDNLKPSLLKLKFKRPHYEQLNTQASQPEEPTSWVSQQEEQLNVAKGQRSKRKRPSMEKADGLDGITPAKRXSRARDEVMDANWILRKLGKDAIGKRIEVHLTSDGKWHQGMVSNVMGGTLCIRLDNGRSENVELGKQAIRLIASRSKGGKR

SEQ ID NO: 8803 - protein, 555 aa, Zea mays
  Clone ID: TF_ZmC1977_2.pep
MACDGAARGRPPKRPASGGLAQPNVVTYKRRRRGTGANAGHSAVTSGPDPAEMSAVVHAIDSQQGGRQTLGRHWRNWRDTLEGVLQSTAGKQGSGGIQSCIRAALRFSGCPPTEHGNLAHDGGAGRDDPVGAVHSEENSGALVQLEDGTAAPLEANKTMCHNALFDILISEKFAMLCDLLAATFHVSKPDDVIGLQIIDAKMRNGDYAQNHALLDHDIKQIWKKFEHVGQEMAGLASSLLLISQASNQKQASGVSEIDVAEHKIEETSLVGVARKALRELTPQCDSGYSTIPKRTGRSGSDGICKDCGRKADSKGRIICDRCEAAYHVSCLKLAIDEEAPAKWYCPSCVEPDVALKHKNHGRSHEGCDVCEWLVVKPEEPAEDVSEPELAVKTQESSVSSMGEDSEPDLSTTALANLCKNCGTCEDEDRKFMVCGHGLCSFKFYHVLCLKERQIASEKQKNLKCWYCPSCLCRRCFKDKDDEKIVLCDGCDEAYHIYCMDPPCESVPRGKWFCTRCSARRSVQGMQRYEKSILEKVKRAPGANGPKVQASAGPEK

SEQ ID NO: 8804 - protein, 310 aa, Zea mays
  Clone ID: TF_ZmC17187_3.pep
MDASYRRAGAGSGSAPRSVEDIYKDYRARRSAVLRALTHDVEEFYALCDPEKENLCLYGYANEAWEVALPAEEVPTELPEPALGINFARDGMNRRDWLALVAVHSDSWLISVAFYYAARLNRSDRKRLFGMMNDLPTVFEVVSGGVKQSKERDRSGTDNSGRNKLSAKQTSEPRLENNAREPDEGYDEDDGYHSETLCGTCGGIYSADEFWIGCDVCEKWYHGKCVKITPAKAESIKQYKCPSCSFKEGEAVAKPMNAGSLRMWDVWCRRGALQSLQAGEGQETSIYKIRTILLSSLCLMLTFFTYDKLM

SEQ ID NO: 8805 - protein, 177 aa, Zea mays
  unsure (1)..(177): unsure at all Xaa locations
  Clone ID: TF_LIB3689-236-Q1-K6-B3.pep
QTSWDNRLHKLVFNVLLDGTEVAYYVDGQRKVDGYIKDHRIYCNHCNRVVSPSAFEAHAGMXNIFTSNGVSLHELAMKISKDMELSERETDDLCRECGQGGDIFPCKICPRSFHPACVGLSKVPAEWYCDSCRNLVQKEKALAXNKNAKAAGRQAGVDSIEQXMKRAIRIVPISDDL

SEQ ID NO: 8806 - protein, 112 aa, Zea mays
  unsure (1)..(112): unsure at all Xaa locations
  Clone ID: TF_ZmC229769_1.pep
MGSPCWYCPSCLCRCLCDKDDDLSILCDSCDEAYHIYCITPSHTSIPKGQWYCSSCSVERAXEGMRQYERRTLKLHRKEDAGLQSWNFDGVDLLLSAAEQLRIDEQLETRTD

SEQ ID NO: 8807 - protein, 273 aa, Zea mays
  Clone ID: TF_ZmC26156_3.pep
IRHEAHAGSEVNKPYRNILVDGLDIDLLHCLINAWNMQSDAERQDFFPVSIEGDDPNDDTCGICGDGGNLICCDGCPSTFHMSCLGLEALPTDYWCCSNCSCKFCHEHSSDDAEDTADVDSSLHTCSQCEEQYHGACSPDIDSIATNLSSQTGNLFCQQSCRLLFEELQNLLAVKKDLEPEYSCRVVQRIHEEVPEEVLALDKRVECNSKIAVALSLMDECFLPIVDQRTGINLIRNVVYNCGYAAIFLQAKKNPYSFKYPLYNMQAVGTMAF

SEQ ID NO: 8808 - protein, 235 aa, Zea mays
  Clone ID: TF_ZmC147944_1.pep
MAALADIDSSALPPSESSKGKGKMDEEEEDEAEGAEKMCGICYLDGRRAIRGELDCCAHFFCFVCIMAWGRVESRCPFCRARFHTIRRPPVAGRFPDERIVSIQERNQVHHPQGNGSSIVGGDPYVNTICTVCSSSSDDELLLLCELCDSAAHTYCVGLGTTVPEGDWFCKDCGTIRDDQLRWQAENQGEFEISMDVPGAEPVPAPSISGVVDEDHDLERHMRVVARRMTRFLHL

SEQ ID NO: 8809 - protein, 168 aa, Zea mays
  unsure (1)..(168): unsure at all Xaa locations
  Clone ID: TF_LIB4726-021-R1-K1-B8.pep
LIRALTTDVEKFYVMCDPEKDNLCLYGLPNETWEVNLPAEEVPPELPXIYEVVTGTAKKESKEKTPKSSNKTNKSGSKPSRQVEPNSRVPKMPPPKDEESEGEEGEPQEDHESALCGACGLGYDDFWICCDLCETWFHGKCVKITPNKAEHIKQYKCPSCTGSKRAKA

SEQ ID NO: 8810 - protein, 256 aa, Zea mays
  Clone ID: TF_ZmC183_1.pep
MDGGAGFPGTPVPRSPEDVFRDYRARQAGLIRALTTDVEKFYVMCDPEKDNLCLYGLPNETWEVNLPAEEVPPELPEPALGINFARDGMNEKDWLSLVAVHSDSWLMSVAFYFGARFGFDKESRKRLFTMINNLPSIYEVVTGTAKKESKEKTPKSSNKTNKSGSKPSRQVEPNSRVPKMPPPKDEESEGEEGEPQEDHESALCGACGLGYDDFWICCDLCETWFHGKCVKITPNKAEHIKQYKCPSCTGSKRAKA

SEQ ID NO: 8811 - protein, 147 aa, Zea mays
  Clone ID: TF_ZmC183_3.pep
LKQSDGVTFGWLRCRKRLFTMINNLPSIYEVVTGTAKKESKEKTPKSSNKTNKSGSKPSRQVEPNSRVPKMPPPKDEENEGEEGEPQEDHESALCGACGLGYDDFWICCDLCETWFHGKCVKITPNKAEHIKQYKCPSCTGSKRAKA

SEQ ID NO: 8812 - protein, 245 aa, Zea mays
  Clone ID: TF_ZmC183_4.pep
MDGGAGFPGTPVPRSPEDVFRDYRARQAGLIRALTTEKDNLCLYGLPNETWEVNLPAEEVPPELPEPALGINFARDGMNEKDWLSLVAVHSDSWLMSVAFYFGARFGFDKESRKRLFTMINNLPSIYEVVTGTAKKESKEKTPKSSNKTNKSGSKPSRQVEPNSRVPKMPPPKDEESEGEEGEPQEDHESALCGACGLGYDDFWICCDLCETWFHGKCVKITPNKAEHIKQYKCPSCTGSKRAKA

SEQ ID NO: 8813 - protein, 173 aa, Zea mays
  Clone ID: TF_ZmC13516_1.pep
MDPSELPELSRTAMLICCKVCGGPEEVDKRFLICDHYLCLYKYYHISCLTTEQIASDVQMGSQRWYCPSCLCRVCLCDTDDDQIILCDCCDQGYHLYCLSPPRRKVPKGHWDCEPCKERREKEKRILMLHRKDYDEDILKSGEFHGPNLLLKAAKKVKRDEEVKVAKTKSTRK

SEQ ID NO: 8814 - protein, 268 aa, Zea mays
  Clone ID: TF_ZmC2619_1.pep
RPVTGRARNPPAAQPEASPSPAPPLTVVAGPVSSAPRTVEDIYKDYAARRAGLVRALTSDVDGFYSMCDPEKENLCLYGLPNGGWEVSLPVEEVPPEMPEPALGINFARDGMRRRDWLSLVAVHSDAWLVSVAFFFAAKLNGNDRKRLFNMINDHPSVYEIMADRKGRENNPGVDNSSKSRHSTKRSNDGKIKNSRVAVGECRYENDEDHSETLCGSCSGLYNSSEFWIGCDICERWFHGKCVRITPAKAEQIKHYKCPDCSYKKSRQ

SEQ ID NO: 8815 - protein, 77 aa, Zea mays
  Clone ID: TF_LIB3957-003-Q1-K6-G5.pep
KDEDDSGGEEEEEEEDHENTLCGSCGDNYGQDEFWICCDACETWFHGKCVKITPAKAEHIKHYKCPNCSGSGKRARA

SEQ ID NO: 8816 - protein, 540 aa, Zea mays
  Clone ID: TF_ZmC26156_1.pep
KRTTKVEIQRLRQKKEKKNTTNSTRLHLGNERKKRGGCALLVRGSNKESGSTTDGFVPYEWKRTIFSWLIDLNVLSVNTKLNCLDESHSKVLLEGFVTRDGINCSCCSEVISVPEFVTHAGSEVNKPYRNILGDGLDIDLLHCLINAWNMQSDAERQDFFPVSIEGDDPNDDTCGICGDGGNLICCDGCPSTFHMSCLGLEALPSDYWCCANCSCKFCHEHSSDGAEDTADVDYSLHTCSQCEEQYHEACSPETDSITNLSSQTGNLFCQQSCRLLFEELQNLLAVKKDLEPEYSCRVVQRIHEDVPEEVLALDKRVECNSRIAVALSLMDECFLPIIDQRTGINLIRNVVYSCGSNFARLDFRGFYIFILERGDEIIAAASVRIHGTKLAEMPFIGTRNMYRRQGMCRRLVDGIEMILSSLNVEKLIIPAITELVDTWTSKFGFSPLEDSEKQEVKSISMLVFPGTGLLQKPLLKALPNEEQCSQGDKTEKSSDVVNEDSPCSDASADPLGLGVKEHEDSSKDADGTCNGDVSQECPHS

SEQ ID NO: 8817 - protein, 254 aa, Zea mays
  Clone ID: TF_ZmC3619_1.pep
MDGGGTHRTPEDVFRDFRARRAGMIKALTTDVEKFYQQCDPEKENLCLYGLPNETWEVNLPAEEVPPELPEPALGINFARDGMDEKDWLSLVAVHSDAWLLAVAFYFGARFGFDKESRKRLFVMINNLPTIYEVVTGTAKKQTKEKTPKSSSKSNKAGPKPPRQPEPNSRGSKMPPPKDEDDSGGEEEEEEEDHENTLCGSCGDNYGQDEFWICCDACETWFHGKCVKITPAKAEHIKHYKCPNCSGSGKRARA

SEQ ID NO: 8818 - protein, 644 aa, Zea mays
  Clone ID: TF_ZmC1774_1.pep
LHSWGLLVAKFCAVAETRPEDNIDISFFFPVKRAVLRGVIKRIGILCSCSSCKGRKVVSPYYFEVHAGSTKKHPSDYIFLENGNNLHDVLRACTNATLDMLEPAIRKAIGPAPQERISRCKSCKSSFSTLRSGKFALFCDSCLESKGAKNNISSSKVGRSQTSSAKVYKSASPGAKSSSVGRLTRKDKGMHKVVFMSGILPEGTDVGYYVGGKRLLDGYIKELGIYCHCCSTVVSPSQFEGHAGRAARRKPYHNIYMSNGVSLHELSISLLKGQKMSNRQSDDLCSICSDGGQLLLCDTCPRAFHRECVGLSSATKGTWCCRYCENRQQRESCLAYNNNAIAAGRVEGVDALEQIFTRSIRIATTLETGFGGCALCKLHDFSKKKFSTRTVLLCDQCGREYHVGCLKEHNMADLTALPEGAWYCSTDCVRINQTLQDLLNSGGEPVLAMDLDVIKKKREVKGFNDDDADLDVRWRVLKDKSSDDSKLVLSKAVAIFHETFDPIIQVSTGRDLIPAMVYGRSARDQDYTGMYCTVLTVNNIVVSAGLFRIMGSEIAELPLVATSRDRQGLGYFQALFSCIERLLSSLEVKHFVLPAAEEAESIWTERFGFAKISQDELREYLKGGRTTVFQGTSNLHKLVAKLEC

SEQ ID NO: 8819 - protein, 116 aa, Zea mays
  Clone ID: TF_LIB5116-009-A1-PF1-G2.pep
MNNGSIKKRSKHDTSISTSAKKIRGHDGYFYECVECDLGGNLLCCDSCPRTYHLECLNPPLKRAPPGNWQWPRCRTKQVSLKLLGNADADTSKRERTKRMRTSTIADSPSPHNKSL

SEQ ID NO: 8820 - protein, 251 aa, Zea mays
  Clone ID: TF_ZmC2557_16.pep
MDMAPASVYFNPRSVEEIFKDFSGRRAGLVRALTSDVDDFCSLCDPDKDNLCLYGLPNGSWEVSPPAEEVPPELPEPALGINFARDGMQRRDWLTLVAVHSDSWLISVAFFYGARLNGNDRKRLFSMMSDLPSVLEAFADRKQDRDRSGVDSSGKSRHSSKRGKDGHAKSSRAAAPAAKEYDEDDDEEDEEEHTETFCGSCGGLYNASEFWIGCDICERWFHGKCVRITPAKADHIKHYKCPDCSSKKMRQ

SEQ ID NO: 8821 - protein, 251 aa, Zea mays
  Clone ID: TF_ZmC2557_28.pep
MDMAPASVYFNPRSVEEIFKDFSGRRAGLVRALTSDVDDFCSLCDPDKENLCLYGLPNGSWEVSPPAEEVPPELPEPALGINFARDGMQRRDWLTLVAVHSDSWLISVAFFYGARLNGNDRKRLFSMMSDLPSVLEAFADRKHGRDRSGVDSSGKSRHSSKRGKDGHAKSFRAAAPAAKEYDEDDDEEDEEEHTETFCGSCGGLYNASEFWIGCDICERWFHGKCVRITPAKADHIKHYKCPDCSSKKMRQ

SEQ ID NO: 8822 - protein, 617 aa, Zea mays
  Clone ID: TF_ZmC113_1.pep
QSKQYCGICKKIWHHTDGGNWVCCDECQIWVHVECDLTCNNVEDLENADYFCPDCKSKSKTVPATENLNTSTSECASTSKGKLTAMIAVCCNGEDALYVPEKHMILCQCKSCKERMMSLNEWEKHTGSRKKNWKMSIRQKSTGELLINLLDDIPCGTSKYSNPGIKKEELLQLQANPYSPVCAKWTTERCAVCRWVEDWDYNKIIICNRCQIAVHQECYGACAVQDLTTWLCRACESPQQKRECCLCPVKGGALKPTDIDGLWVHVTCAWFQPKVSFPVDETMEPAMGIMSIPVEYFKKTCVICKQMHGACTQCYKCSTYYHAICASRAGYCMELQCSERSGRHITKMVSYCDFHSTPDPDNVLIVKTPEGVFSTKFFLQNGEKQTAARLVRKENHQEKVLPPIISDCLVAKCLTYEMSKYKKQPGEAIAHRIMGPRHHSQDFIDGLNACMDRKDDQSFSTFKERLRYLQKTENLRVSCGRSGIHGWGLFAARNIQEGQMVIEYRGEQVRRCVADLREAQYHREKKDCYLFKISEDVVIDATDKGNIARLINHSCMSNCYARIMTVSDDRSEIILIAKRDVSAGEELTYDYLFDPDESEDCRVPCLCKAPNCRGYMN

SEQ ID NO: 8823 - protein, 467 aa, Zea mays
  Clone ID: TF_ZmC1899_1.pep
YIPLRSIIKDGMVTWEGIVCNCCKKNLSVSDFMAHAGRSHPQSSLGLFLESGKSYTLCLVEAWSAESMSRRSNAWGRKVEAIDESDDTCGFCGDGGELLCCDNCPSTYHQACLSAKELPEGSWYCHNCTCQVCGGPFSEKEVSTFSAIFKCFQCGDAYHDTCIEQEKLPLEDQISQTWFCGKYCKEIFIGLRSHVGTDNILDSDLSWSILRCNNDGQKLHSVQKIACLAECNMKLAVALTLLEECFIRMVDPRTGVDMIPHVLYNKGSNFARVDYQGFYTVILEKGDEILCVASIRVHGTKAGELPFIATSVDFRRQGMCRILMSIIEKMLCSFNVKMLVLSAIPELVSTWVSGFGFKPIEDAERKQLHNVNLMLFPGTSLLTKRLDGFIMATKPGEEKDIHEVSGVPNLKRMPNGKANEHFKLHDLDLSGTEFKAEVSVNGPFRTLKHECGSAAWFQSTKLAVGEV

SEQ ID NO: 8824 - protein, 243 aa, Zea mays
  Clone ID: TF_ZmC2849_3.pep
PPFWPPAHLPPLRNTHGRIDCKQFIKHYDEHALRTPSNPFLLCVRCSIELLDHPKDYTTPPEELVLLPASATLGDLKVQASKAFQETYLMFQSFQTEQLPDFPNFSDTTPVKHVLGSGQLLRVRGRCTGDYRRIVQFRMERGLENWTVDCSCGAKDDDGERMLACDICGVWQHTRCSGISDFEEVPENFICRKCASPRKGDGRGGGGSNGGGTMEVTASGRCKDEIGASVGGAGKYGRMATVG

SEQ ID NO: 8825 - protein, 137 aa, Zea mays
  Clone ID: TF_ZM4317.C4.o3.fg.pep
MKLNIKIERRRLHMMINNHPTVSEVVIGSGEKQPKACNTNYETKSSSIKEPSSSSKLAEEPLPKKERQIIKEDGGGEDEAYPCGTCGGMYSENGVFWIGCDICDKWYHGDCVRITPAEATHIDQYSCPACSNKRSRE

SEQ ID NO: 8826 - protein, 249 aa, Zea mays
  Clone ID: TF_ZmC1419_1.pep
MGFLEDFQASVEALPSMLHRNYSLMRELDKSLHGVQLENEQRCQQEIEDIKHGLESGSITYDPAKLKFSEEAMEEQKHCVRIADEKVALATQTYDLVDAHIQQLDQFMRKLEEIRQEKEAAAAVTAGTAVATTATPTVNAGATTADANPKSGRSGERGRGGRKKAKVPTEQSVPVPVPLPPIDLELPVDPNEPTYCLCNQVSYGEMVACDNPNCKIEWYHYGCVGVKEQPKGKWYCPNCIGFQKKRKGK

SEQ ID NO: 8827 - protein, 241 aa, Zea mays
  Clone ID: TF_ZmC17187_4.pep
MADAASGRGHVVYPPRSAEDIFKDYRARRSAILRALTHEVEDFYAQCDPDKENLCLYGYANEAWEVALPAEEVPTELPEPALGINFARDGMNRRDWLALVAVHSDSWLLSVAFYYAARLNRNDRKRLFGMINELQTVFEVVSGARQQQSKERSSMDNGGRAKPVKIENNGKVTDEAYEDDSDHGETLCGTCGGIYNADEFWIGCDMCERWYHGKCVKITPAKAESIKHYKCPSCSSKRARQ

SEQ ID NO: 8828 - protein, 90 aa, Zea mays
  Clone ID: TF_ZmC3042_5.pep
LACDELGTRFLSRYCKCEMPYNPDDLMVQCDACKHWFHPSCVAMTIEQAKKLDHFVCSDCFKENGSKRLSNAYATSPNFEPKAEPKRQRR

SEQ ID NO: 8829 - protein, 118 aa, Zea mays
  Clone ID: TF_21211304.pep
VVTGTAKKEPKEKTPKSNIKTNKSGSKPSRHTEQPNSRVPKMPPPKDEESEEEEGEPQEDQESALCGACGLGYDDFWICCDLCETWFHGKCVKITPAKADHIKQYKCPSCTGSKRAKV

SEQ ID NO: 8830 - protein, 148 aa, Zea mays
  Clone ID: TF_LIB4740-015-R1-K1-E12.pep
AFYFGARFGFDKESRKRLFTMINNLPSIYEVVTGTAKKEPKEKTPKSNIKTNKSGSKPSRHAEQPNSRVPKMPPPKDEESEEEEGEPQEDQESALCGACGLGYDDFWICCDLCETWFHGKCVKITPAKADHIKQYKCPSCTGSKRAKV

SEQ ID NO: 8831 - protein, 234 aa, Zea mays
  Clone ID: TF_ZmC183_2.pep
IGYLERGLIGALTTDVEKFYVMCDPEKENLCLYGLPNETWEINLPAEEVPPELPEPALGINFARDGMDEKDWLSLVAVHSDSWLMSVAFYFGARFGFDKESRKRLFTMINNLPSIYEVVTGTAKKEPKEKTPKSNIKTNKSGSKPSRHTEPNSRVPKMPPPKDEESEEEEGEPQEDQESALCGACGLGYDDFWICCDLCETWFHGKCVKITPAKADHIKQYKCPSCTGSKRAKV

SEQ ID NO: 8832 - protein, 101 aa, Zea mays
  Clone ID: TF_uC-zmflteosinte083c04b1.pep
MADAEHLTHTQPSRHAEPNSRVPKMPPPKDEESEEEEGEPQEDQESALCGACGLGYDDFWICCDLCETWFHGKCVKITPAKADHIKQYKCPSCTGSTRAKV

SEQ ID NO: 8833 - protein, 102 aa, Zea mays
  unsure (1)..(102): unsure at all Xaa locations
  Clone ID: TF_LIB3632-049-Q6-K6-H9.pep
SSSKSXKPSSKVQSRAESRSKAKVPKDEEESGDDDGDEEAEEHDNXXLCGTCGTNDGKDQFWICCDNCEKWYHGKCVKITPARAEHIKQYKCPDCTNKRVRA

SEQ ID NO: 8834 - protein, 505 aa, Zea mays
  Clone ID: TF_ZmC1927_1.pep
LESKQPQDPLTTSYTCNGSSSLTPSSKEALLKNISSGKKGGSAGKVTNKDNRLHKLVFNVLLDGTEVAYYVDGQRKVDGYIKDQRIYCNHCNKVVSPSAFEAHAGEGSRRKPYDNIFTSNGVSLHELAMKISKDMELSERETDDLCRECGQGGDIFPCKICPRSFHPACVGLSKVPSEWYCDNCRNLVQKEKALAENKNAKAAGRQAGVDSIEQIMKRAIRIVPISDDLGGCALCKQKDFNNAVFDERTVILCDQCEKEYHVGCLKNQWQVELKELPEGEWFCCSSCSETRSSLDKIISDGAQLLVEPDLEIIKKKHVTRGLCMDTSKDLKWQLLSGKRTTEDGSILLSAAVPIFHQSFDPIREALTGRDLIPEMVNGRGPKEGMPGQDYSGMYCALLTVGSTVVSAALLRVMGGDVAELPLVATSQDVQGLGYFQALFSCIERMLVSLKIKHFVLPAAHEAEGIWMKKFGFSRTTPEELEAYLNGAHLTIFHGTSYLYKAVPMS

SEQ ID NO: 8835 - protein, 550 aa, Zea mays
  Clone ID: TF_ZmC2398_1.pep
MAATVRRAASSVLSRFLLTKPSPSPASAAGNNSALLGSGAAALHRFSTAPASAAAAAEEPIQPAVEVKHTQLLINGNFVDAASGKTFPTLDPRTGEVIARVAEGDSEDIDRAVAAARRAFDEGPWPRMTAYERCRVLLRFADLIERHAEEVAALETWDNGKTLAQAAGAEVPMVARCVRYYAGWADKIHGLVAPADGAHHVQVLHEPVGVAGQIIPWNFPLLMFAWKVGPALACGNTVVLKTAEQTPLSALYVANLLLEAGLPEGVLNVVSGFGPTAGAALSSHMGVDKLAFTGSTGTGQIVLELAARSNLKPVTLELGGKSPFIVMDDADVDQAVELAHQAVFFNQGQCCCAGSRTFVHERVYDEFVEKSKARALKRVVGDPFRDGVEQGPQIDGEQFNKILRYVQSGVDSGATLVAGGDRVGDRGFYIQPTVFADAKDEMKIAREEIFGPVQTILKFSGVEEVIRRANATPYGLAAGVFTRSLDAANTLSRALRAGTVWVNCYDVFDATIPFGGYKMSGVGREKGIYALRNYLQTKAVVTPIKNPAWL

SEQ ID NO: 8836 - protein, 246 aa, Zea mays
  Clone ID: TF_LIB4738-035-Q1-K1-E6.pep
MEVAVAVAAAAEAEEDEAAAAAATSTLQQSGRKQPRAIGSGRYRSVSRDLEEAAPKKPLPPSSQGLDLGGLPVLDVFQVYSCLRSFSKQFFLSTFSLETFVAALWSTYVNPLIDWVHFTLLRALKSHLEDSANEGDPSAVHCIRNLNWELLDLATWPIYLTEYLLTRGSELRLSESDGNDEGFKSTGVRRKKRGRGSSAKVAVGSSQFPEGSTEVDDGNSDECYLCGMDGNLLCCDGCPAAFHSKC

SEQ ID NO: 8837 - protein, 297 aa, Zea mays
  Clone ID: TF_ZmC13126_1.pep
CARGKEFKKPEKPINHKGTKEQVSMKPRSPPREGKHLEKPCEIVDVEQYEAVAEALRKSDEAADAKGASLKDVTRNGADEVAGQEQGREQEPVDVEDDDDGVRCAVCASTDGDPSDPIVFCDGCDLMVHASCYGNPLARAIPDGDWFCSPCVAGRGKPAAARRRSCCLCPAGGGAMKRTTEGKWAHISCALLVPEVFFRDPDGRDGIDCSRVPAHRFARGCYVCGGNNNGCALECSQPKCGLGFHVSCGLGAGLCIEYQEGKGGGGAIVAGFCREHTELWEKQQLTGKYKIVARGQE

SEQ ID NO: 8838 - protein, 102 aa, Zea mays
  Clone ID: TF_LIB4073-010-Q6-K2-B4.pep
MVRYRVRSLSERSHEVYRQQLHGQEQGHHGQEEQGLSPEHVEVYERTHGQSHYRRRHCSRRRLHRIHRRQHRSCRRRKRRSCRHRRRHRRGCRTRKRTCRRH

SEQ ID NO: 8839 - protein, 128 aa, Zea mays
  unsure (1)..(128): unsure at all Xaa locations
  Clone ID: TF_LIB3357-002-P1-K1-H2.pep
MASVGGAVAGGVGAPTPHVLAVDDSSVDRAIIAAILRSSRFRVTAVESGKRALELLXEPNVSMIITDYCMPEMTGYELLKKVKESSKLKQIPVVIMSSENVSTRIRRCLEEGAEDFLVKPVRASDVSR

SEQ ID NO: 8840 - protein, 401 aa, Zea mays
  Clone ID: TF_ZmC617_1.pep
MDNALRITDASSRRPTNLGKDLAMTEPAADRKCQSLVMENNAVKEKNPGEKSKSAVIGHADSYPSQFLETNLGKQQYRNGYKNQEFREKDIFNHSNSSAFSRYGNKRIEPSGEIQFFPSPCVIGQGHVHGKNPVFQPNGVLLPPNEHNTGESTRQARISLDSRTEGAAILCSTSAREDAGANSSSHRKDSMSHPSYGFIPVPIPVGAMMPYHCGAILQPVYYPQGPLMHCNSSAINKATIHQTSGQSNYREDCGSGRPSQVDEHKQSEEKHQLHHSRQIHRESGQPVDMVRAHMDHANQSASCSRDICKGSGCTGSGEADTNANTTVALESGNESGIQNSDRSRREAALMKFRMKRKDRCFDKKVRYHSRKKLAEQRPRVKGQFVSQKLKAAMATEAETDS

SEQ ID NO: 8841 - protein, 67 aa, Zea mays
  unsure (1)..(67): unsure at all Xaa locations
  Clone ID: TF_LIB3180-050-P2-M1-A9.pep
CFFFLLESTIMEHDAFKNIPIIMMSSHDSVSIDFKCMLKGAAYFLVXPIRKIELRNLWHLDWRKTTC

SEQ ID NO: 8842 - protein, 194 aa, Zea mays
  Clone ID: TF_ZmC8_2.pep
MFHPVIAVDSARKAMEFLGLKDGGEEQAVDMVLTDYCMPEMTGYDLLKAIKALNPLEPIPVVVMSSEDEPQRISRRCLSAGAEDFIVKPLQSKDVQRLRNCSAAARPSKGAAPCEAAVVAKRNQKPPHPAGAASPSGRRASLAGVAMVLHSSGVEYLPLLLKLVVLAYAALCLGELLHRWASSDGRCSLSPWCA

SEQ ID NO: 8843 - protein, 73 aa, Zea mays
  Clone ID: TF_uC-zmrob73055d04b1.pep
SPPASASAAANGRALVRWDQILPRRFLRVLLVEHDDSTRHIVTALLRKCGYRVDDVADRMKACDVMLERAYDF

SEQ ID NO: 8844 - protein, 131 aa, Zea mays
  unsure (1)..(131): unsure at all Xaa locations
  Clone ID: TF_LIB4172-033-R1-K1-B10.pep
PHRAVTPRLLEKLGFRVPSVASGVQSTRSFAPEPSFQVVVLGLPLQRTDGLKMARPIRKFSNKNWLPLIVALTARIDSKVPNGCPRSGINGLIQKPAPLTALGNXLYRVLQNRLKGPPMVFLAFKIFKKPL

SEQ ID NO: 8845 - protein, 356 aa, Zea mays
  unsure (1)..(356): unsure at all Xaa locations
  Clone ID: TF_700170928_FLI.pep
MVWFEYLVVEVKVAFRRRSVPSQKVPSLELSLKRSRSCGDGANDTVNDDEQRNSALRRSNLSAFTRYHTSAASNQGGTGLVGSCSPHDNSSEAVKTDSTYNMKSNSDAAAIKQGSNGSSXNNDMGSTTKDVVTKPSTNNERVMLPSAIKANGYTSTFHPVQQWMVPDNATAGKAKADEVANNAGRNSHPGDVQSNLTQQHRPTLHYVHFENSGSGALQCGSSNVFDPPLEGQATNNYGVKAGSNSGSNKGQNNGSTAGASTAAANAGRTDTEIRAIDKSGPGGGSGSGNDTYVRRLAASMTPRQEQLKKYREKKKDRNFGKKVRYQSRKRLADQRPRVRGQFVKQAVQNQEGDGER

SEQ ID NO: 8846 - protein, 169 aa, Zea mays
  unsure (1)..(169): unsure at all Xaa locations
  Clone ID: TF_ZmC751_14.pep
MTVDELKLQARASGGHGAKDQFPVGMRVLAVDDDPTCLKILENLLLRCQYHXATALKLLREKKDQFDLVISDVHMPDMDGFKLLELVGLEMDLPVIMLSANGETQTVMKGITHXACDYLLKPVGIGIRKKIKKKKKKKKKCEKKKKKKKQKKKKKKKIKQKKKKKMKHT

SEQ ID NO: 8847 - protein, 109 aa, Zea mays
  Clone ID: TF_ZmC2028_4.pep
VTHRLLEKLGCRVLSVASGVQCTSSFAAEPSFQLVVLDLALQRTDGLEVARAIRKFSSNSWLPLIVALAARIDDKVRDGCQRSGISGLIQKPATLAALGDELYRVLQNS

SEQ ID NO: 8848 - protein, 135 aa, Zea mays
  Clone ID: TF_11041691.pep
MASRKCLGGEGSAPAPHVLAVDDSSVDRAVIAGILRSSQFRVTAVDSGKRALELLGTEPNVSMIITDYWMPEMTGYELLKKIKESSRLKEIPVVIMSSENVPTRINRCLEEGAEDFLLKPVRPSDVSRLCSRVLR

SEQ ID NO: 8849 - protein, 61 aa, Zea mays
  Clone ID: TF_ZmC8939_5.pep
SSEFGSRAHWHVPILAMTADVIQATFEKCMQCGMDGYVSKPFEEQQLYSAVAHFLETDEIE

SEQ ID NO: 8850 - protein, 279 aa, Zea mays
  Clone ID: TF_ZmC5787_2.pep
MAARLRRSPISSPIPPPSLCISLYPPPHSSVETTYPACSTYLRSPAMTVLDAESRFHVLAVDDSIIDRKLIEMLLKSSSYQVTTVESGNKALELLGLRDNGAEDASPPSSSSSSSSSSSPDHQEIDVSLIITDYCMPGMTGYDLLKRVKGSSSLKDIPVVIMSSENVPARISRCLQDGAEEFFLKPVKPADMKKLKSHLLKRKQPNQKNKPQAQAVESPEQQLDPHPQPVHEPEEAAADRNGVNKRKAAAMEEGLTVVVTAPESTKPRRLSTSSLTVET

SEQ ID NO: 8851 - protein, 235 aa, Zea mays
  unsure (1)..(235): unsure at all Xaa locations
  Clone ID: TF_ZmC5787_4.pep
MTVLDAESRFHVLAVDDSIIDRKLIEMLLKSSSYQVTTVESGNKALELLGLRDNGAEDASPPSSSXSSSSSSSPDHQEIDVSLIITDYCMPGMTGYDLLKRVKGSSSLKDIPVVIMSSENVPARISRCLQDGAEEFFLKPVKPADMKKLKSHLLKRKQPKQKNKPQAQAVESPEQQLDPHPQPVHELELEEAAADRNGVNKRKAAAMEEGLTVVVTAPESTKPRRLSTSSLTVET

SEQ ID NO: 8852 - protein, 235 aa, Zea mays
  Clone ID: TF_ZmC8_3.pep
MEAAAGGVEAEGVMRVLVVDDSPVDRRVAQLLLSSDSCAGSFHVIAVDSARKAMEFLGLKDGGEEQAVDMVLTDYCMPEMTGYDLLKAIKALNPLEPIPVVVMSSEDEPQRISRCLSAGAEDFIVKPLQSKDVQRLRNCSAAARPSKGATQCEAAVVAKRNHKPHPAAAGAGAASPSGRRASLAGVAMVLHSSGVEYLPLLLKLVVLAYAALCLGELLHRWASSDGRCSLSPWCA

SEQ ID NO: 8853 - protein, 158 aa, Zea mays
  Clone ID: TF_ZmC339_6.pep
MAAAAAAPTSVVPSPSPAPKASDSRKTVVPVDASELEKHVLAVDDSSVDRAVIARILRGSRYKVTAVESATRALELLALGLLPDVSMIITDYWMPGMTGYELLKRVKESAALRGIPVVIMSSENVPTRITRCLEEGAEGFLLKPVRPADVSRLCSRIR

SEQ ID NO: 8854 - protein, 176 aa, Zea mays
  Clone ID: TF_ZmC10160_1.pep
RQTMQGNIWAVLDGQGLPESMTLVLRFQLQPSLASSNLLGGSFDQEHYSSLPSNQIAGLKVLLIDDDEINLVVARKLLERLGCTVSSGSGLMDSSSACASFQLVMVNLEMSAIDPLDAASRIRQQYRSSHWPLVMAMTSEQNVWEKCAQSGINGVLKKPLVLLEVKEELERILQNT

SEQ ID NO: 8855 - protein, 124 aa, Zea mays
  Clone ID: TF_ZmC33_1.pep
MATQSPHVLVVDHSRVDCLVASIVLNSFNIRVTVAGGAMEALEFLDANNSHVDLILTDYCMPDMTGYDLLREVKESPRLKHIPVVITCTDVIPERIIECFEGGAEEYMIKPLKVSDVPRILSYM

SEQ ID NO: 8856 - protein, 566 aa, Zea mays
  Clone ID: TF_ZmC131_1.pep
LGMLQMLMDTDLDTTQQDYVRTAQASGKTLVSLINEVLDQAKIESGKLELEVVPFDLRTVCDDILSLFCGKAQEKGLELAVFVSDQVPQTLIGDPGRIRQIITNLVGNSIKFTEKGHIYLTVHVVEEIMHCLEVETGTQYTNTLSGYPVANRKRSWENFRLFSRELNSSEMPFAPIASDSISLMISVEDTGAGIPFDAQSRVFTPFMQVGPSIARIHGGTGIGLSISKCLVGLMRGEIGFASKPQVGSTFTFTAVLTRVHSSRNENKSSEFKEINALVVDHRPVRAKVTKYHLQRLGVQTELTTDLDQYISKNNCGSQIAKLVLIDKETWLKESHSMPLLVTKLRNKDQPDSTKLFLLENPKSSVKSNSHIFREYNLNVIMKPLRASMLQVSLQRALGGIDKLHCRNGVVGNSTLGSLLHKKRIIVVDDNIVNLKVAAGALKKYGAEVTCADSGKKAITLLKPPHSFDACFMDIQMPEMDGFEATKRIRVMERDLNEQIERGEAPPECAGLRQWRTPILAMTADVIQATHEQCLKSEMEGNVSKPFEGEQLYREVARHFSNRGELQ

SEQ ID NO: 8857 - protein, 157 aa, Zea mays
  Clone ID: TF_ZmC339_3.pep
MAAAAPAPASVAPSSAPKATGDSRKTVVSVDASELEKHVLAVDDSSVDRAVIARILRGSRYRVTAVESATRALELLALGLLPDVSMIITDYWMPGMTGYELLKCVKESAALRGIPVVIMSSENVPTRITRCLEEGAEGFLLKPVRPADVSRLCSRIR

SEQ ID NO: 8858 - protein, 153 aa, Zea mays
  Clone ID: TF_ZmC353097_1.pep
LGRGVALSGLVKASSVRPPMAGAAAERKAIRVLLVEDEEIHRVLARALLRSACGGVELHEAGTGAEAVRRVRDGGAAAAYDLIITDWKMPVMDGHEATRQIRAMGVTTPIVGLSSDTLPPDVDAFIKAGADDFTPKPLSKEKLVRILTKFHLA

SEQ ID NO: 8859 - protein, 540 aa, Zea mays
  Clone ID: TF_ZmC745_1.pep
FDLRSILDDVISLFSSKSREKGIELAVYVSERVPELLLGDPGRFRQIITNLVGNSIKFTERGHIFVQVHLADHSNLATEPKVESVANGMNGHKDEKTAVATSVSLNTLSGFEAADSRNSWENFKLLLSYEKNEMPYESVSDKVTLVVSVEDTGIGIPLDAQAKVFTPFMQADSSTSRTYGGTGIGLSISKCLVELMGGQINFVSRPHVGSTFTFTAVLKRCDRSAIGDSKPVMLHPLPSSFKGLSALLVDRRPVRATVTKYHLQRLGIACDVVATIELALGVLSGRNGSSLTSMKQPCMLLIESDSWGFNIDVSLRSRLLEMKQNGHTHVLPKIILLAAAESGKLKEHYAVDSVITKPLKASALAACLFQTLGIKQSSNERSDNSGSLYGLLLGKNILVVDDNKVNLRVAAGTLKKFGAKVECVESGKDALALLQVPYKFHLCLMDIQMPEMDGFEATKQIRAMEAKANEQAVACDDSEIDGATRAARWRLPVLAMTADVIQATHEECTKCGMDGYVTKPFEEKQLFQALQKFLDPGMSC

SEQ ID NO: 8860 - protein, 148 aa, Zea mays
  Clone ID: TF_LIB4977-010-R1-K1-B10.pep
MEVAGACCHAGEERKVAVPIGNDAEVEPCVIAVDDSSVDRAIVTALLRRSKYRVTAVDSGKRALEILGSEPNVSMIITDYWMPEMTGYDLLKKVKESSKLKRIPVVIMSSENVPTRITRCLEEGAEDFLLKPVRPSDISRITTRMLLH

SEQ ID NO: 8861 - protein, 75 aa, Zea mays
  unsure (1)..(75): unsure at all Xaa locations
  Clone ID: TF_ZmC8939_3.pep
EKKIXDMIMMGEISANNYGNKAHWHVPILAMTADVIQATFEKCMQCGMDGYVSKPFEEQQLYFAVAHFLETDETE

SEQ ID NO: 8862 - protein, 767 aa, Zea mays
  Clone ID: TF_ZmC2028_1.pep
MVVGTALLRGVSSAWILLFLSSLLLSPSAASVDFGHCGGCDDADDGALSSTYNILQCQKVSDFLIAAAYFSIPLELLYFATCSDLFPLKWIVLQFGAFIVLCGLTHLITVFTYEPHSFHLVLALTVAKFLTALVSFATAITLLTLIPQLLRVKVRENFLMNKARELDREVGRMKRKEEASWHVRMLTQEIRKSLDRHTILYTTMVELSKALELQNCAVWMPDETRSTMILTHQLRERDIMDPQKHSIPIDDPDVQEIKATKDAKVLGPDSALGVSSRSKHEAGPVAAIRMPMLRVSNFKGGTPEVMQTSYAILVLVLPNDGSLGWGRRELEIVEVVADQVAVALSHAALLEESQLMREKLAEQHRDLLQAKDEAMRAGDARNSFQTAMYDGMRRPMHSILGLVSMMQQESMNPEQRLVMDAIAKTSSVASTLMNDVMQTSTMNCEHLSLVRRPFNLHSFIKEVVGVVRCLTGCKGVEFEFQVENSLPERIIGDEKRVFHIVLHMVGTLTDRCNAGCISLYVNVHNEVEDRHNHDWMLRRANFSGGYVCVKFEIRIRKSKGYLLSSSSSQISQGSKPNNSEMGLSFNMCKKIVQMMNGNIWSVSDSKSIGETIMLVLQFQLEPVTPVSGASSDLYRSSAIPNFNGLRVLLADSDCTNRAVTHRLLEKLGCRVLSVASGVQCISSFAAESSFQLVVLDLDMQTMDGFEVARAIRKFSSNSWLPLIIALAARIDDNIRDRCQRSGVNGLIQKPVTLAALGDELYRVLQNN

SEQ ID NO: 8863 - protein, 768 aa, Zea mays
  Clone ID: TF_ZmC2028_2.pep
MVVGTAPCGVSVSSVWILLLLSSLLLSPSAASVDFGHCGGCDDADDGALSSTYNILQCQKVSDFLIAAAYFSIPLELLYFATCSDLFPLKWIVLQFGAFIVLCGLTHLITVFTYEPHSFHLVLALTVAKFLTALVSFATAITLLTLIPQLLRVKVRENFLMNKARELDREVGRMKRKEEASWHVRMLTQEIRKSLDRHTILYTTMVELSKALELQNCAVWMPDETRSTMILTHQLRERDIMDPQKHSIPIDDPDVQEIKATKDAKVLGPDSALGVSSRSKHEAGPVAAIRMPMLRVSNFKGGTPEVMQTSYAILVLVLPNDGSLGWGRRELEIVEVVADQVAVALSHAALLEESQLMREKLAEQHRDLLQAKDEAMRAGDARNSFQTAMYDGMRRPMHSILGLVSMMQQESMNPEQRLVMDAIAKTSSVASTLMNDVMQTSTMNCEHLSLVRRPFNLHSFIKEVVGVVRCLTGCKGVEFEFQVENSLPERIIGDEKRVFHIVLHMVGTLTDRCNAGCISLYVNVHNEVEDRHNHDWMLRRANFSGGYVCVKFEIRIRKSKGYLLSSSSSQISQGSKPNNSEMGLSFNMCKKIVQMMNGNIWSVSDSKSIGETIMLVLQFQLEPVTPVSGASSDLYRSSAIPNFNGLRVLLADSDCTNRAVTHRLLEKLGCRVLSVASGVQCISSFAAESSFQLVVLDLDMQTMDGFEVARAIRKFSSNSWLPLIIALAARIDDNIRDRCQRSGVNGLIQKPVTLAALGDELYRVLQNN

SEQ ID NO: 8864 - protein, 167 aa, Zea mays
  Clone ID: TF_ZmC745_2.pep
ITQSSNERRDNSGSLHGLLLGKNILVVDDNKVNLRVAAGTLKKFGAKVECVESGKDALASLQVPHKFHLCLMDIQMPEMDGFEATKQIRAMEAKANEQAVACDDSETDGATRAARWHLPVLAMTADVIQATHEECTKYGMDGYVTKPFEEKQLFQALQKFLDPGMSS

SEQ ID NO: 8865 - protein, 58 aa, Zea mays
  Clone ID: TF_uC-zmroteosinte077a02a1.pep
VGVRQWRTPILAMTADVIQATHEQCLKSEMDGYVSKPFEGEQLYREVARFFLNQDQVQ

SEQ ID NO: 8866 - protein, 785 aa, Zea mays
  Clone ID: TF_ZmC8939_1.pep
YSRSTGKGALTSPFKLLKSNHLGVVLTFTVYKYDLPPNATPQERIHATLGYLGASFDVPSLVDKLLEQLASKRKIVVNLYDTTNHTSPIEMYGSDFTPSGDLHISSIDFGDPTRKHEMHCRFKHEPSLPWSAIIISTAVAIIVLLVGHIIYATLNSLEKAEHDYRVMRELKGQAEAADIAKSQFLATVSHEIRTPMNGVLGMLQMLMDTELDTTQQDFVVTAQESGKVLINLINEVLDLAKIESGRIELEAVPFDVRDILDNVISLFYDKSQAKGIELAVLVSDQVPDVLIGDPWRFRQIITNLVGNSMKFTEQGHIFVQVHLVKELNRKGNNFCDVSAHNREILYDSDNSMLWNTLSGLEVADSWRSLENFTMFKNSNGETDTIRLAVRVEDTGIGITKDAQMRIFTPFMQADSSTSRTYGGTGIGLSITKRLVELMGGEIGFTSKSGVGSTFSFTAIFKENRGCPGDMKRYYSEPTPLDFQGMRALIIDGRSARAEVTMYHLRRLGIQCSLVATSESESASSALMKACTSSKNNPDMVLVDTEAWGKGSGLAFYHRFVDCQLKGAHKFSQPMPKTILLGSSISPVESDYLRLTGFGDCIRKPLRLSTIVACLRKTLGVGVTRQQSRDQSLVLQSVLTGKQILVVDDNAVNRKVAAGSLKKYGSKVTCVDSGSDAIDMLKPPHTFDACFMDVQMPEMDGFEATRLIRSIEKKINDMIMMGEISANNYGNKAHWHVPILAMTADVIQATFEKCMQCGMDGYVSKPFEEQQLYFAVAHFLETDETE

SEQ ID NO: 8867 - protein, 479 aa, Zea mays
  Clone ID: TF_ZmC131_2.pep
PQTLIGDPGRIRQIITNLVGNSIKFTEKGHIYLTVHVVEEIMHCLEVETGTQYTNTLSGYPVANRKRSWENFRLFSRELNSSEMPFAPIASDSISLMISVEDTGAGIPFDAQSRVFTPFMQVGPSIARIHGGTGIGLSISKCLVGLMKGEIGFASKPQVGSTFTFTAVLTRVHSSRNENKSSEFKEINALVVDHRPVRAKVTKYHLQRLGVQTELTTDLDQYISKNNCGSQIAKLVLIDKETWLKESHSMPLLVTKLRNKDQPDSTKLFLLENPKSSVKSNSHIFREYNLNVIMKPLRASMLQVSLQRALGGIDKLHCRNGVVGNSTLGSLLHKKRIIVVDDNIVNLKVAAGALKKYGAEVTCADSGKEAITLLKPPHNFDACFMDIQMPEMDGFEATKRIRVMERDLNEQIECGEAPPECVGVRQWRTPILAMTADVIQATHEQCLKSEMDGYVSKPFEGEQLYREVARFFLNQDQVQ

SEQ ID NO: 8868 - protein, 200 aa, Zea mays
  Clone ID: TF_ZmC779_1.pep
MVLELNSQAERVSSSRGDLVSVSGAAPCKVPEEQSLHKKSKCSPTSNKAKILLVEDNKVNIIVAKSMSQQLGHGIDIVNNGMQAIRAVQQHQYDLILMDVHMPEMDGLQATKLIRSFENTGCWDVSVKPEDNPMITDSAISSDSAHAKKQGQRVPIIAMTANSFAESAEECLAAGMDSYISKPVNFQNINECLQRYLVSQ

SEQ ID NO: 8869 - protein, 738 aa, Zea mays
  Clone ID: TF_ZmC887_1.pep
QFIGNTTTSCARNKDIEVTGYDVTNASDAMVLYGPSSLDEQVPFLHVSMLDFGDPFRKHEMRCRYRQKLPMPWSAITNPLGTFVIWMLLGYSIAAAYSRYDKVTEDCRKMEELKTQAEAADVAKSQFLATVSHEIRTPMNGVLGMLDMLLGTDLTMTQKDYAQTAQMCGRALITLINDVLDRAKIEAGKLELEAVPFDLRSLMDDVVSLFSSKSREKCIELAVFVCDNVPKVVIGDPWRFRQILTNLVGNAVKFTERGHVFVRVCLAENSNMEANQVLHGAMNGKGGRVESTANGAFNTLSGFEAADRRNSWQYFKLLLSDKESLLDDLEGENSNQSDSDRVTLAISIEDTGVGIPLQAQDRVFTPFMQADSSTSRNYGGTGIGLSISKCLAELMGGQISFTSHPSVGSTFTFSATLKHSYKDISGDSSRSLTEALPTAFKGMKAILVDGRPVRSAVTRYHLKRLGILLQVVNNMNAVVKAFPGQNGAAGSREKASILFIESDFWRPETDVQLLNHLREQKNGQLSDGHKVVLLVTSEADKDKYGSIFDIVMCKPIRASTIASSIQQLLKVEIAERKDNQNRPSFLRSLLVGKNILVVDDNKVNLRVAAAALKKYGANVSCVESGKDAISLLQPPHRFDACFMDVQMPEMDGFEATGQIRQMELKANEERKNKLAPIEGATTAEYHLPVLAMTADVIQATYEECIKSGMDGYVSKPFDEEQLYQAVSRLVVGTTDSAV

SEQ ID NO: 8870 - protein, 156 aa, Zea mays
  Clone ID: TF_ZmC339_1.pep
MAAAAAAPASVAPSSPKAAGDNRKTVVSVDASELEKHVLAVDDSSVDRAVIARILRGSRYKVTAVESATRALELLALGLLPDVSMIITDYWMPGMTGYELLKRVKESAALRGIPVVIMSSENVSTRITRCLEEGAEGFLLKPVRPADVSRLCSRIR

SEQ ID NO: 8871 - protein, 686 aa, Zea mays
  Clone ID: TF_ZmC4195_2.pep
MPANDHHPNGLLQESAPGLQHDDMENQQQQVCWERFLLKDTLNVLLVESDASTRQVVSALLRCCMYQVISAKNGQQAWSYLEDKGNNIDLVLTEVFMPGVSGISLLNRIMRHSVFKNIPVIMMSSSDDMSTVFKCLSKGAVDFLVKPIRKNELKNLWQHVWRQRCHSSSGSGSESGIQTQKCAKSKGVNESGNNSGSNDDEAGMGLNARDDSDNGSGTQAQNLWTKLAVEIDSPQATSLDQLADPPNSTCAQVIHSKSEICSNRWLPDKSNRNCKKPKNTNDDFKGKDLEIGGPENLYMGHQSSPNGRSIKAADHENNSKESMMENLEEPTVRAADLIGSMAKNMDTQQAARAAEDTPNFSSKVPEGKGKNNQNDKYVLPSLELSLKRSRSCGDGANNKNTVKDDEQRNCVLRRSNLSAFTRYHTSAASNQGGTGLVGSCSPHDNSSEAVKTDSTYNMKSNSDAAPIKQGSNGSSNDNDMGSTTKDVVTKPMLPSAIKANGYTSAFHPVQQWMVPANATAGKTKADENTARNHYVHFENGGSGALQCGSSNVFDPPLEGQATNNYGGVKAGSNSGSNKGQNNGSTAAANAGLAETEIQAMDKSGVGGGNGNGSGSGSGNDTYVRRLAANMTPRQAQLKKYREKKKDRNFGKKVRYQSRKRLADQRPRVRGQFVKQAVQNQDGARER

SEQ ID NO: 8872 - protein, 186 aa, Zea mays
  Clone ID: TF_ZmC887_2.pep
CKPIRASMIASSIQQLLKVEMPERRDNQNRPSFLRSLLVGKNILVVDDNKVNLRVAAAALKKYGANVSCVESGKDAISLLQPPHCFDACFMDVQMPEMDGFEATRQIRQTEMRVNEERKNKLVLIEGSTFVEYHLPVLAMTADVIQATYEKCIKSGMDGYVSKPFDEEQLYQAVSRLIVGTTDSTV

SEQ ID NO: 8873 - protein, 816 aa, Zea mays
  unsure (1)..(816): unsure at all Xaa locations
  Clone ID: TF_ZmC4195_1.pep
MPANDHHPNGLLQESAPGLQHDDMENQQQQVCWERFLLKDTLNVLLVESDDSTRQVVSALLRCCMYQVISAENGQQAWAYLEDKRNNIDLVLTEVFMPGVSGISLLSRIMSHNICKNIPVIMMSSSDAMSTVFKCLSKGAVDFLVKPIRKNELKNQWQHNXRQHRHILSCVFEKKKMFSYLEHSLEVVEEKVAIRRCSSLLIILIAKNVLTVEARWKKLVRDPMQVTSVRVLIIINRRTHYXNYVVQIDCPQAISLDQLSDSATRTGAPVIHSKSEICSHRWLPGSSNRNCKKQKYTNDDFKGKDLEIDGPGNLYMDHQSSPNERPIKAADHENNSKESMMGNLGDATVRAADLIGSMAKNMDAQQAARAADTPNFSSEVPEGKGKNDDFKGKDLEIGGPRNLYMDHQSSPNERPIKAADHENNSKESMIENLEEPTVRAADLIGSMAKNMDTQQAARAAEDTPNFSSKVPEGKGKNDQHDNYVLPSLELSLKRSRSCGDGANDTVNDDEQRNSALRRSNLSAFTRYHTSAASNQGGTGLVGSCSPHDNSSEAVKTDSTYNMKSNSDAAAIKQGSNGSSNNNDMGSTTKDVVTKPSTNNERVMLPSAIKANGYTSTFHPVQQWMVPDNATAGKAKADEVANNAGRNSHPGDVQSNLTQQHRPTLHYVHFENSGSGALQCGSSNVFDPPLEGQATNNYGVKAGSNSGSNKGQNNGSTAGASTAAANAGRTDTEIRAIDKSGPGGGSGSGNDTYVRRLAASMTPRQEQLKKYREKKKDRNFGKKVRYQSRKRLADQRPRVRGQFVKQAVQNQEGDGER

SEQ ID NO: 8874 - protein, 128 aa, Zea mays
  Clone ID: TF_ZmC131_3.pep
GALKKYGAEVTCADSGKKAITQLKPPHSFDACFMDIQMPEMDGFEATKRIRVMERDLNEQIERGEAPPECAGLRQWRTPILAMTADVIQATHEQCLKSEMDGYVSKPFEGEQLYREVARFFQNQDQVQ

SEQ ID NO: 8875 - protein, 157 aa, Zea mays
  Clone ID: TF_ZmC311956_1.pep
MGTQIVREQTSGSLTAIVVDENLCHARAASCMLANLQCKVIVYASPVDALKFLKDHQRDTDFALVEVNMKEMHGFQFLDMSRKLHKSLQVIMMSADTTWPTMKRSVELGARFLIKKPLDANTMNNLWQHLDLKFQRTDKIKALFPGWSYCDMFSFSF

SEQ ID NO: 8876 - protein, 97 aa, Zea mays
  Clone ID: TF_LIB5117-009-Q1-PF1-H11.pep
PSMDGLQATKLIRCFENTGCWDASVKPEDNEMIANSAISSDCVQDKKGKRVPIIAMTANSFAESADECLAAGMDSYISKPMNFQKTKECLQRYLLSQ

SEQ ID NO: 8877 - protein, 107 aa, Zea mays
  unsure (1)..(107): unsure at all Xaa locations
  Clone ID: TF_ZmC353097_2.pep
ALLRSPVGGVELDEARTGXEAVRRVRDGGAAGAYDLIITDGKMPVMDGREATRQIRAMGVTTPIVGLSSDTFPSDVDAFLKAGADDFTPKPLSKEKLVRILAKFNLA

SEQ ID NO: 8878 - protein, 61 aa, Zea mays
  Clone ID: TF_LIB3205-080-P1-N1-G10.pep
ATLRHTPFHSIHLPCFMDSTELPKTPSELMNYMLLIQFLLTFLLGLVLNLICSHSTLYFPH

SEQ ID NO: 8879 - protein, 336 aa, Zea mays
  unsure (1)..(336): unsure at all Xaa locations
  Clone ID: TF_ZmC9712_3.pep
MQLPLLIKILLLCHQLPLPVINWDQGRVNEHTSVCRINRRFHQLPEFDQLKKSCRKRLAGHNERRRRPPPGPLASRYGRHAASLGGNQKLVFTLXCRLGDQSSRLFFVTANVHVLGPEEPGRLRSFMLDFSYPRVSSAMRGGFPAVRPGGERVPGGIQWQAGLDPRHHQGAVAGYGAHYGSEGGSSSSARPPVFPGPELPPGGCLAGVPADSSCALSLLSTQPWDAAHSHSHSHAAPTAGFDGGSPVAPSLMAASSYIAPSPWTETDSWGHEGGRSVPQLPPDDVPLGEVHSGSSSHHGQFSGELELALQGNRPAPGSAAPPAPRNNQGSAGTFDQ

SEQ ID NO: 8880 - protein, 274 aa, Zea mays
  Clone ID: TF_ZmC14746_1.pep
DADKRSCRKRLDGHNRRRRKPQPDTMASASFIASQQGTRFSPFAHPRLEASWPPGVMKTEESPYHITHQIPLGSSSSSRQQHFVALGAATPAYAKEGRRFPFLQEGEISFATGVVLEPPAAAPACQPLLRTGAPSESSGAGGSKMFSDQGLARVLDSDCALSLLSAPANSSGIDVSRMVRPTEHVPMAQQPVVPGLQFGSASWFPRPQASTGGSFVPSCPAAVEGEQQLNAVLGPNDSEVSMNYGGMFHVGGGSGGGEGSSDGGTSSSMPFSWQ

SEQ ID NO: 8881 - protein, 76 aa, Zea mays
  Clone ID: TF_cC-zmle189110e02d1.pep
TMKTTTREGLKKRGKWSFIMSTTDQSVNVSYKLVYNFSFSRCCINSSTLHLGSPTPLQLVPETKGIANFSSLFISC

SEQ ID NO: 8882 - protein, 68 aa, Zea mays
  Clone ID: TF_ZmC200243_1.pep
MSSEEWITHVFQCGPHPFRFHQLLEFDQLKESYHRRLIGHNERRRRPPPGPLVSHYGRLAALFGGDKS

SEQ ID NO: 8883 - protein, 47 aa, Zea mays
  Clone ID: TF_ZM5059.C4.o2.fg.pep
MIYRADLSKCRDYRRRHKVCEAHSKTLVVVVAGREMRFCQQCSSLFI

SEQ ID NO: 8884 - protein, 56 aa, Zea mays
  unsure (1)..(56): unsure at all Xaa locations
  Clone ID: TF_LIB3069-037-Q1-K1-C4.pep
STRPASCCRFHLLGEFDKVKRSCRKRLDGHNRXRRKPQPDPLNPAGLFGNHHGVTR

SEQ ID NO: 8885 - protein, 177 aa, Zea mays
  Clone ID: TF_ZmC18262_3.pep
AASGDGSDDSGAANNNGALPLPLPPPHGVEDNNSPAELAGAGGTSRAVARRVAAAGASPAAAARRGAALNAAAAGGAGPSCQVERCSADMGVEKRYNRRHKVCDAHRKASVVLLAGLRQRFCQQCSRFHELSHFDDTKRSCRLRLAGHNERRRRNPAEAQDQHGGRGDPGSHHLQIR

SEQ ID NO: 8886 - protein, 161 aa, Zea mays
  Clone ID: TF_ZmC182445_1.pep
PGHAQQAAPACSVQGCDADLSQCRDYHRRHKVCVAHSKAPFVTVAGQQQRFCQQCSRFHLLEEFDEVKRSCRKRLDGHNRRRRKPQPDPLNPAAGLFGNHHHGGVTRFTSYPHRFTKSIAKPEWAVVKTETDAFQDQYYPAVHLNGAGAGALFHDKDRKHF

SEQ ID NO: 8887 - protein, 311 aa, Zea mays
  Clone ID: TF_ZmC1701_1.pep
QVEGCKVDLSSAKEYHRKHRVCEPHSKAPKVVVAGLERRFCQQCSRFHGLAEFDQKKKSCRRRLNDHNARRRKPQPEALSFGSSRLSAMFYDTRQHTSLLFGQGPYGQMRSCASSSWDNPGGGFKFAETKGPWLRAGGVDGLHQSSQQVWNNFMPHGVHQDFDGFTAFKGTNAKVLHQGVEASAVASNQNGAPQPDLHRALSLLSNSWAGAGTDQHPTAQLRHHAALSSSLAASSVSVAQASPAGLWQDGGGGAALSHHDYAHAQARFQAIDALGGAGAAAAVAAGQELLQLPRPPSPYDDGSSSRYDLMR

SEQ ID NO: 8888 - protein, 244 aa, Zea mays
  unsure (1)..(244): unsure at all Xaa locations
  Clone ID: TF_ZmC18238_6.pep
MQREVGPQVAPPLFLHQIQPMPPHAAAAAKKRGHPWPAAGAAEAGAGNWNPRLWDWDSRALTARPSSDALRLAGGQPQPAAEAQRQGARRXLNLQLGLREDSTTPMDASPTPPAASLSPSPPASGQDPVVRPSKRVRSGSPGSAGGDGGGAANGGAGYPMCQVDDCRADLTGAKDYHRRHKVCETHSKTIRAVVANQAQRFCQQCSRFHPLAEFDEGKRSCRRRLAGPNPRRRKTPPADVFFAS

SEQ ID NO: 8889 - protein, 297 aa, Zea mays
  Clone ID: TF_ZmC735_1.pep
PPTRPPTRPVNGLELRFCQQCSRFHNLAEFDQQKKSCRKRLAGHNERRRRPPPGPLASRYGRLAAPLGEEPGGRFRSFMLDFSYPRVPSAMRDGFPAVRPGGERVPGSNIQWQAASLDPPPPHHQSAAAGYGAHSYGSPGSSSSSRPPVFPAGPELPPGGGCLAGVPTDSSCALSLLSTQPWDAAGHSAGHGHGHAASLPATAGFDGNPVAMASSYIAPPSPWTDSRAHEGGRRNVPQLPPDVPLGDVHSGPGTHHGQFSGELELALQGNRPAPAPRNGQGSAGAFDQAGSTTEWSL

SEQ ID NO: 8890 - protein, 123 aa, Zea mays
  Clone ID: TF_ZmC18262_1.pep
VRASCMTEEREHADVVGFYLIWRWWLPGSPRPPCWSCASAGFLRRRSLCPARRRRQTTSSTHRACTGHRTFGTGPATYRDYTSDNRTTIPIRTINYAIYSSALLNCLQVTLHLTTSRLRGRSA

SEQ ID NO: 8891 - protein, 329 aa, Zea mays
  Clone ID: TF_ZmC117363_1.pep
MDWAAASGSPSWGAAATDPGPTMLSFAGPSSSAADAEVRLQDFAAGLAQSSRPTGAAPGAGRRSRAAVGGAGAEACSVDGCRSDLSRCREYHRLHKVCEAHSKAPVVVVGGQERRFCQQCSRFHMLSEFDEEKRSCRKRLDGHNRRRRKPQHDLTNLGGFFPYQVNQFEFPQTIPTVGQNSDAVHLVGRQQPFSISFSRTPPDEFPHPQGQGGGSSVLHHLHAARPGHHAEGSSSHTGSSTRDNALSGTLGPECALSLLSSSLRRPSTAGVPAVGQPQVTASSTTAAAVSQAATAAVATAAFAASAGHHVFVPDAMFEDPSQALPFSWQ

SEQ ID NO: 8892 - protein, 82 aa, Zea mays
  Clone ID: TF_jC-zmXLIB3527P102Dc10d1.pep
GQATGGGTYTLISNDDITHLLCVRGGRTSAYIIPRKSASASTSSCCQIDGSRAPVSVASDHHAMHNGCRPLTTRTALYTPCA

SEQ ID NO: 8893 - protein, 681 aa, Zea mays
  unsure (1)..(681): unsure at all Xaa locations
  Clone ID: TF_ZmC749_1.pep
FCQQCSRFQLLQEFDEGKKSCRSRLAQHNGRRRKVQPQAVVNGNSMSENQSLSSTLILLLKQLSRLESGSSSEPINHPNSLVNLLKNLAAIASTQSYQDILKNANSNSILSNDGNNAANGSTVHEQTIRSIPISGESLAEEPAVKSRVHDFDLNDACFEEVESRTDKIVFKLFGKEPKDFPVDLREQILHWLSHYPTDMESYIRPGCVILTIYLRLPNWMWDELDDDPASWIEKLISLSNDGLWRKGWLYARVQDCLTLSYNGSLMFASPWQLVIGDKHQRLCVTPIAVAXCASSVKVSVKGRAHVSVTMPSTIDTVGKHASRMKPADQITFGVEKKQLSINQTLSCRQCVQQAQQLAFXIPEQIRFLSNRTAMLSLVSIAAVCVCVGLIMKSLPQVGCMKPFLWXQYRLGPQLIDCRRASPICIRCMMKMFAPSEASFFKAFTCFKKKKKKQNVLLTAVKKRSKPLVEFLLRYTATDYAPVGGGAGAPVQFLFTPAMTGLSNITPLHIAATISDATGVLDALTDDPRQLGIKAWKNARDATGFTPEEYARKRGHISYIQLVQDKIDRRVSRAHVSVTIPSTIDTAGKHASRLKPADQITFGVEKKQRGMNQTLSCRQCVQQVQQLAFHPRTNRFLSNRTAMLSLVSIAAVCVCVGLIMKSLPQVGCMKPFLWDNIRWGPN

SEQ ID NO: 8894 - protein, 317 aa, Zea mays
  Clone ID: TF_ZmC229717_1.pep
GPSRPAGLEFDEAKRSCRKRLDGHNRRRRKPQPDTMSSGSFMTSQQGLFSSAGTRLSSFPAPRPEPSWSGVIKSEDSSYYTHHPVLSNRPHFAGTSTSPAYSKEGRRFPFLQDGDQVSFSASGAGTLEVSTVCQPLLKTTAAVAPPPPESSKMLAPVLDSDCALSLLSSPANSSSVDVSRMVQPAERIPMAQPLVPGLQHHQFGVSPVPDWFACSQAGSGAVPTRRRVRLPPGRGERAAQHRPGAELRRGGHEMNYHGIFHVGGDGSSDGTSPSLPFSWQKLAFRFKRPAVYRFSCTSGHRTSSLFFPRFSNLFSAP

SEQ ID NO: 8895 - protein, 135 aa, Zea mays
  Clone ID: TF_ZmC18262_2.pep
EVQGLQLRSTSYASYAGLLLLRRHRRHGPLELGGAGPSCQVERCSADMGVEKRYNRRHKVCDAHRKASVVLLAGLRQRFCQQCSRFHELSHFDDTKRSCRLRLAGHNERRRRNPAEAQDQHGGRGDPGSHHLQIR

SEQ ID NO: 8896 - protein, 405 aa, Zea mays
  unsure (1)..(405): unsure at all Xaa locations
  Clone ID: TF_ZmC9712_2.pep
AGGASGGDEGDGQLHGLKFGKKIYFEDAGGSSSSGGSGSASATAPPATQQPSPPAASPRAAPGGGRRGRAAAGGAGPSLPPAPPRCLVDGCNADLTDAKPAYYCRHKVCEMHSKEPRVLVNGLELRFCQQCSRFHQLPEFDQLKKSCRKRLAGHNXXXXXXXXGPLASRYGRHAASLGEPGRLRSFMLDFSYPRVSSAMRGGFPAVRPGGERVPGGIQWQAGLDPRHHQGAVAGYGAHYGSEGGSSSSARPPVFPGPELXXGGCLAGVPADSXXXXXXXXXXXXXXXXXXXXXXAAPTAGFDGGSPVAPSLMAASSYIAPSPWTETDSWGHEGGRSVPQLPPDDXXXGEVHSGSSSHHGQFSGELELALQGNRPAPGXXXRAAPRNNQGSAGTFDQAGNTMDWSL

SEQ ID NO: 8897 - protein, 69 aa, Zea mays
  Clone ID: TF_ZmC120974_1.pep
MKRPRLRPGGAGGAQCPSCAVDGWGADLSKCRDYHRRHKVCETHSKTPIVVVTGREMRFCQQCSRVLYS

SEQ ID NO: 8898 - protein, 445 aa, Zea mays
  Clone ID: TF_5931779.pep
MMMMNTSAAMSPASTDVVVVDDFSLGVGVGAMHQPYVVGFDADAGMGIIMPSVVVDRPLLQQNTNLLEEYDSFDFAAAAGLLLPFQELPAGLLPPANYLPPPTPISMAMAMSPPSLLLTTLPGVPVPTAAAADVVYGGLGGGGAGGLSFVLKREAGGGGGMIGGLNLGRRTYFSPAAVDRLLGGGGLGVGLGMSVLGLGVGAAAHQQQQQPPPRCQAEGCKADLSAAKHYHRRHKVCEFHTKASAVAAAGKQQRFCQQCSRFHVLAEFDEAKRSCRKRLTEHNRRRRRKPISEQGNDHSSLPPPPPKTADTCMTTSYNDDPNSASNTAAAKSAAISQNGGVSCLDVLDNEQRGGSGADGAISGRAAPAAASREGREPGLRAMMQRRVHWSMAGGWTTTNRRFITSLVVMQTQQQSSTAATSCRARRSVSDQQNGGCNGFFEVDFI

SEQ ID NO: 8899 - protein, 440 aa, Zea mays
  Clone ID: TF_5931777.pep
MMMNTNAMSPTASTDADFSFGPLQPYVGFDVAGMGMPSVVVERSSSLLQHNTSSSSHNNNLGLYDSFDFAAAAGLPFQESGLLPPASLPLAPSPPSMAAMAMPPSSLLLTLPGVPAAADVVYNPFGGGGAGGFLKREDGGPLVDAAGGGGRIGLNLGRRTYFSPADVLAVDRLLTRSRLAGGGVGVGLGMGLGMGVLGLGAAHHQQPPPRCQAEGCKADLSAAKHYHRRHKVCEYHAKASAVAAAGKQQRFCQQCSRFHVLAEFDEAKRSCRKRLTEHNRRRRKPSSAQDEDSSPPPPKKLDTCITNTASYNDDLKSASNTAAAAISPNGSGVSCLDVMDNGQTSSAAAPTALSLAAPPPPPLHEKDGSLDSMLMQRVLQGRREDDDDEQRRHFITSLVMQTTQQQHSGGGGAGNILSCSSVSDQHNGGGCNGFFEVDFI

SEQ ID NO: 8900 - protein, 134 aa, Zea mays
  Clone ID: TF_LIB4746-102-R1-K1-C4.pep
MEWTAPKPASSPPLLWDWGDHAATGSGSSSDAPARRGGKEREAKRARAGEDRGGGELRCQVEGCGLDLSRVKDYHRKHRVCEAHTKSPRVIVAGQERRFCQQCSRWVAFLLAFACPLHASALACSVRLLPSSFL

SEQ ID NO: 8901 - protein, 435 aa, Zea mays
  Clone ID: TF_5931781.pep
MMTGRLNVATSSSPGGDDFLFMPMQQHQPPPPPPPPYVGFEHGHGVAGGGSQRVAGGVQHHLYDGLDFAAAALQFQQQAEAPHLHQQQLLTLPSSLGPMAPPPPPPPPLPMPMPVPGMPGDHVYPALGMVKREGGGADGRIGLNLGRRTYFSPGDMMAVDRLLMRSRLGGGGGAFGLGFGFGFGGAHHQAPPARCQAEGCKADLSGAKHYHRRHKVCEYHAKASVVATGGKQQRFCQQCSRFHVLSEFDEVKRSCRKRLAEHNRRRRKPPTTASSKDAASPPANKKPNCGSITSSYSTDNKNLNTAKSTMSSNTGSVISCLDQAAGNKQLQARPTLTLGASPDKDQQQQQQLRAMLQAQAAAGGGHHHHHQEQHFITSLQVHNNDGCGGGNSSSNNNIILSCSSVCSSALPSANGEVSDQNNAGGMHNLFEVDFM

SEQ ID NO: 8902 - protein, 222 aa, Zea mays
  Clone ID: TF_LIB4171-035-R1-L1-D5.pep
KFGTRLRSPNPELTSPNRRPGAWSGRSRSPPHRLPSSGNWGDHAATGSGSSSDAPARRGGKEREAKRARAGEDRGGGELRCQVEGCGLDLSRVKDYHRKHRVCEAHTKSPRVIVAGQERRFCQQCSRFHALSEFDQKKRSCRRRLSDHNARRRKPQPDAFTFASAKLPSTLFDDRRQISFVWNKAPVSHVRPFTSPWDSSSDLKPPYAKEISDVSTKVGTIT

SEQ ID NO: 8903 - protein, 201 aa, Zea mays
  Clone ID: TF_ZmC5424_29.pep
PTRPASCCRFHLLGEFDEVKRSCRKRLDGHNRRRRKPQPDPLNPAGLFGNHHGVTRFTSYPQLFAASMEQPKWSVVKTEADVFQDQYYPAVHLNGAGGGAIGSHFHGKERKHFPFLTSHSNGGGGGDVATAAALGCQPFTITTTAASESDSKQSNGNCALSLLSDNPTSAQTVMIPTTAQSLAAVMQHGGRLPGSVSAQRR

SEQ ID NO: 8904 - protein, 113 aa, Zea mays
  Clone ID: TF_LIB4969-009-A1-XP1-H2.pep
MEWTVPKRARADDGEVRCQVEGCGLDLSRVKEYHRKHRVCEAHTKSPRVVVAGQERRFCQQCSRFHALSEFDQKKRSCRRRLSDHNARRRKPQPDAFAFASARLPSFGNVFIS

SEQ ID NO: 8905 - protein, 331 aa, Zea mays
  Clone ID: TF_ZmC9188_2.pep
MEWTAPKRAASPPSPPLLWDWGGDHAGATGSGSGSSGDAPARRGGREREAKRARADDGEVRCQVEGCGLDLSRVKEYHRKHRVCEAHTKSPRVVVAGQERRFCQQCSRFHALSEFDQKKRSCRRRLSDHNARRRKPQPDAFAFASARLPSSSFDDRRQISFVWNKAPVSHPFTSPWDSSSELPHAKEIREVSTKVGTITGQVHLDKSYVSNAVPSLTHGKDEPWPMKGPDMSIAASKFDGAPDLQRALSLLSVGACGLPDPVHQTSCVIQFTSASENSGDLHLSHGANSGLASCGDGQHIASQPQAQLVRFTMDTSNSVYEPSFFSVNQIN

SEQ ID NO: 8906 - protein, 440 aa, Zea mays
  Clone ID: TF_ZmC3282_1.pep
MGSFGMNWNQKDPMVWDWEHLVPSVSNAVTRHGSANSSGGTLTSNSELGHGSSKSSISASIDSPSGVGNSLEFNFAAVERHVKNTGTNGRVDDSGNSPSSMIAFNQGEPLISLKLGKRAYFENACGGQDAKVSAASDVTSAATVVKKTKVSQQNAKNWYCQVEGCKVDLSSAKDYNRKHKVCVVHSKATKVVVAGLERRFCQQCSRFHGLAEFDQNKRSCRRRLMHHNARRRKPQADTISFNSSTMFYDTRQRTNLFFSQPLYGQVRSNAGSSWDNLGGLKFMETKHPPVHPTKTASPDELHFSALQITSAAAHTGHHHDLDGFMAFKGTSTKVLNQGVEAWAAASSSNNGGPEGGRALSLLSDGSWGSSSAVIQQPTSHADAGALLPPFATVAVSNAAAAAAGHPLDPSPGRFWPQDDHPPLVDGPATQIPELAHLRIW

SEQ ID NO: 8907 - protein, 343 aa, Zea mays
  Clone ID: TF_ZmC9712_1.pep
SQTKQAGNPHKAADGSERWRWPARCQVDGCNVDLTDVKPAYYCRHKVCKMHSKEPRVLVNGLEQRFCQQCSRFHQLPEFDQLKKSCRKRLAGHNERRRRPPPGPLASRYGRHAASLGEPGRLRSFMLDFSYPRVSSAMRGGFPAVRPGGERVPGGIQWQAGLDPRHHQGAVAGYGAHYGSEGGSSSSARPPVFPGPELPPGGCLAGVPADSSCALSLLSTQPWDAAHSHSHSHAAPTAGFDGSPVAPSLMAASSYIAPSPWTETDSWGHEGGRSVPQLPPDDVPLGEVHSGSSSHHGQFSGELELALQGNRPAPGSAAPPAPRNNQGSAGTFDQAGNTMDWSL

SEQ ID NO: 8908 - protein, 142 aa, Zea mays
  Clone ID: TF_ZmC1835_47.pep
MGRVRTKTVKKTSRQVIEKYYSRMTLDFHTNKKVLEEVSILPSKRLRNKVAGFSTHLMRRIQRGPVRGISLKLQEEERERRMDFVPEKSALEVEEIRVDKETMEMLAALGMADLPGVERQAEVSNAPAYGRPQYGGPRRDRV

SEQ ID NO: 8909 - protein, 367 aa, Zea mays
  Clone ID: TF_ZmC39687_1.pep
GVDLSAVKQYYCRHKVCNMHSKEPRVFVAGIEQRFCQQCSRFHQLHEFDQGKRSCRRRLIGHNERRRKPPPGPLTSRYGRLAASLQEPGRFRSFLLDFSYPRVPSSVRDAWPGIQHGGDRMLGTVQWHGHQEPPHPHRSAAAGYGNHAAYNCHGGLVAGGAPMLSSAAFELPPGGCVAGVAATPACALSLLSTQPWDTTFPRPPVPSNARGRRLRRHPGGAVRHGEQLRGVERLDGLAGPRCRRRQERAASRRCSAPGPPRLRGGPLLRRARARPAGKRRAATPAARRPWRLRRRHLQPFHHQRDELVPVAALPAFIRSPRHEMWREHFCIGHHPGFVRLTLPFSFFQGGETGIPNHSRSTVNSLPV

SEQ ID NO: 8910 - protein, 845 aa, Zea mays
  Clone ID: TF_ZmC353_1.pep
MENGDVNEDERNGKKIRVQGGGSSGPACQVEGCGADLTAAKDYHRRHKVCEMHAKATTAVVGNTVQRFCQQCSRFHLLQEFDERKRSCRRRLAGHNKRRRKTRPDTASCGTASIEDKISNYLLLSLIGICANLNSDNVQHSNGQELLSTLLKNLGSVAKSLEPKELCKLLEAYQSLQNGSNAGTSGTANATEEAAGPSNSKLPFVNGSHCGHASSSVVPVQSKATIVVTPEPASCKLKDFDLNDTCNDMEGFEDRQEGSPTPAFKTADSPNCASWMQQDSTQSPPQTSGNSDSTSTQSLSSSNGDAQCRTDKIVFKLFDKVPSDLPPVLRSQILGWLSSSPTDIESHIRPGCIILTIYLRLVESAWQELSENMSLHLDKLLSSSTDNFWASGLVFVMVRRRLAFMLNGQIMLDRPLAPSSHHYCKILCVKPVAAPYSATINFRVEGSNLLSTSSRLICSFEGRCIFQEDTDSVAENDEYEDRAIECLSFCCSVPGPRGRGFIEVEDSGFSNGFFPFIIAEKDICFEVSELESIFESSSIEHADANDNAREQALEFLNELGWLLHRANRMSKENVTDTSVATFSMWRFRNLGVFAMEREWCAVIKMLLDFLFIGLVDVGSRSPEEVVLSENLLHAAVRRKSVNMVRFLLRYRPNKNSKGTAQTYLFRPDALGPSMITPLHIAAATSDAEDVLDVLTDDPGLIGISAWSNARDGTGFTPEDYARQRGNDAYLNLVQKKIDKHLGKGRVVLGVPSSICSVITDGVKPGDVSLEICMPMSASVPGCLLCSRQARVYPNSTSRTFLYRPAMLTVMGVAVVCVCVGILLHTFPRVYAAPTFRWELLERGPM

SEQ ID NO: 8911 - protein, 412 aa, Zea mays
  unsure (1)..(412): unsure at all Xaa locations
  Clone ID: TF_ZmC3704_1.pep
MEASFLRKDGGDQASAATMSGEHRNKGLDWDLNDWRWDANLFLATPAAIAPSESISRELSRGQGEIDFGVVVDKRRRLSPEEDGSGGCSNSAVADGDNSHVVCVQRGRNTEETRPRKGANSSTTPSCQVDGCQADLSGARDYHKRHKVCEAHTRTTVVCINNVEHRFCQQCSRFHLLHEFDDGKKSCRSRLAQHNGRRRKVQPQPAVNGNSMNEDQSLSSTLFLLLKQLSGLESGSSSEQINHPNSLVNLLKNLAAIASTHAYQDVLKNATSISSNDGNNAANGSIMHEQTIRSIPVRRESLAEEPAVKRRVQDFDLNDSCIEEAESRTDKIAFKLFGKEPKDFPVYLREQILNWLWHYPTDMXSYIRPGXVILTIYLDLPNWMCDEFNDDPSSWIENLISSSNDGFWRTGW

SEQ ID NO: 8912 - protein, 424 aa, Zea mays
  Clone ID: TF_ZmC37965_1.pep
MMSGRLNAATPASPGDDFSFAPMQMPPPPPYVGFEHGGGGQRGAGAMQAQQHHLYDGLDFASALQFQQEASSHSHHHQLLTLPSSLGPMAPSMPMPMPMPLPMQMPVPGDHVYHPALGTMVKREGGGADGGRIGLNLGRRTYFSPGDMLAVDRLLMRSRLGGVFGLGFGGAHQHQVPRCQAEGCKADLSGAKHYHRRHKVCEYHAKASVVAANGKQQRFCQQCSRFHVLSEFDEVKRSCRKRLAEHNRRRRKPATTASSKDAASPPAANKKTNGGSITCSYSTENKNDDLSCRAKSTMSSNTSSVISCQLDQPGNKHQLARPTLTLGASQDNKDHQQQLSTMLHVQAAGGYHHQEQQHFITSLQVHNNGGSGNNNNNNIILSCSSVCSSLPPPPSAPNGEVSDQNTAANNGNGNMHNLFEVDFM

SEQ ID NO: 8913 - protein, 348 aa, Zea mays
  Clone ID: TF_ZmC229717_2.pep
GSESVIKLVLLCASTKHRGRRICAVVFCFDKNPQIFKPHLFKLLHTFHLLAEFDEAKRSCRKRLDGHNRRRRKPQPDTMSSGSFMTSHAGTRFSSFPVPRPEPSWPGVIKSEDSGSYYAHQRHPVLSSRPHFAGGGGSTPPAYSSKEGRRFPFLQDGCDQQQVGGFNAGAGAGAQQLEVSSTSTVCQPLLKAAAAAAPPPPPESSSSNKMFSDGLAPAVLDSDCALSLLSSPANSSSVDVGRMVVHQPAEHIPMAQPLVPGGLQQQQQHHPFGGSPAWFACSQAGSSAVSAGGFACPPGVESEQLNTVLVPSSDGGGHDMNMNYHGIFHVGGDGSSDGTSPSLPFSWQ

SEQ ID NO: 8914 - protein, 34 aa, Zea mays
  Clone ID: TF_700381372H1.pep
AALWDPGPEAARLRFRCFRYEEATGTQQALAQLR

SEQ ID NO: 8915 - protein, 386 aa, Zea mays
  unsure (1)..(386): unsure at all Xaa locations
  Clone ID: TF_ZmC1439_6.pep
MTASTSSTLTSSRGYSGRASSRKRGIEAVSDSNIFVENLVEKEEFLHTFSKECEYIRTAVTNGSAIKHDGSYESDPAVEIVRVELQGAAAFLXYSRLVPLVLLLVEGSTPIYIGEHGWEMLLVVKKATQEAGSKFELLGFASVHNFYHYPESIRLRISQILVLPPYQGEGHGLGLLEAINYIAQSENIYDVTIESPSDYLQYVRSSIDCLCLLMFDPIKPALGAIVSSLKETNLSKRAQSLRMVPPVDLMETVRXKLKIKKKQFLRCWEILVFLSLDSQDHKSMDNFRACIYDLMKGEILGSASGTNRKRLLQMPTSFNKEASFAVYWTHEIGDVDEQTVXQQPEDLRTQEQQLNELVDIQIEEIDGVAKNVTSRGKDKMAELAVQ

SEQ ID NO: 8916 - protein, 188 aa, Zea mays
  Clone ID: TF_ZmC79675_1.pep
RSLESLHIDDLGIAADEAVAINSVLELHCVVKESRGALNSVLQTIRKLSPKAFVLVEQDAGHNGPFFLGRFMEALHYYAAVFDALDAALPRYDARRARVEQFHFGAEIRNVVGCEGAARVERHERADQWRRRMSRAGFQSMPIRMAARAREWLEENAGGGGYTVAEEKGCLVLGWKGKPVIAASCWKC

SEQ ID NO: 8917 - protein, 158 aa, Zea mays
  unsure (1)..(158): unsure at all Xaa locations
  Clone ID: TF_LIB4976-049-A1-K1-B8.pep
MMQFTHTAPPPPPLHPNGHAGGLGLGLFLDVGAPRAARPWPGSFPTPASKISLGNLNSTSCMEQLLVHCANAIEANDATLTQQILWVLNNIAPPDGDSNQRLTAAFLCALVARASGTGXCKGFTAAVAXXRRVXRAHVTGFTAVELASFVDLXPWHRF

SEQ ID NO: 8918 - protein, 190 aa, Zea mays
  Clone ID: TF_ZmC189640_1.pep
TRFAADLGISFEFNAVAFDPLDPLPPTGLSVAPGDAVAVHLSVGSGVPSAATFRVVKELRPAVVVCVDHGCHRGDLPLSHHALSVVRSSAAFLESLDAAGAPADAVARLEEYVVRPRVERLLLGDRMPPWRTMLDSAGFAPVQLSNAAEAQAECLVRRTPTPGFHVEKRQAALALRWQDSELVMVSAWRC

SEQ ID NO: 8919 - protein, 124 aa, Zea mays
  unsure (1)..(124): unsure at all Xaa locations
  Clone ID: TF_LIB3918-030-Q2-N1-H7.pep
RFRGAFFPFPPLFYMLGGTFPRGPDQRVFFESPLFGXRAIPVFSFQGLERMERPQTFNQWRVGFQKIGFRQLPFNQGFFKGVSQKVRCFPKGFLFFKNPRWFFQGWKGRLVLGLSPWKPDPRFF

SEQ ID NO: 8920 - protein, 82 aa, Zea mays
  unsure (1)..(82): unsure at all Xaa locations
  Clone ID: TF_LIB3116-007-Q1-K1-E8.pep
SVNLVACEGFERLERDEVLGKWXALLRMPVFXPFLLSILVNFTINTLLQSYSVYYKLDXRECVLYLHWKNMPRIVLSVCALC

SEQ ID NO: 8921 - protein, 361 aa, Zea mays
  unsure (1)..(361): unsure at all Xaa locations
  Clone ID: TF_ZmC1583_5.pep
IQDELAAEAKAAEVGNSISGREILVRLNQQLPPIWKPFLRSASYLKEALLLALTDGHRGSTHLSSPLDVALKLGAYKSFSDLSPVLQFANFTTTQALLDEITSTTSSCIHIIDFDLGVGGQWTSFLQDLAHCRGTGNAXLPMLKLTVFVSSASHNPLELHLTRENLTQFVVDLGIPFEFTNINLDVFDPTELIAPSXNEVVVVCLPVGCSARTPPLPMLLQLVKQLAPKIVVAIDHGSYRGDLPFSQHFMNCFQSCMFLLDSLDAAGTNVDAASRIERFLIQPRVEDAVLGRWKAEKAMAWWAVFTSAGFAPVPLNNLAEAQADCLLKRVQVXGFHVEKCGMGLALYWQSSELVSVSVWWS

SEQ ID NO: 8922 - protein, 75 aa, Zea mays
  Clone ID: TF_700051838H1.pep
TMTFSTPGGWMRGSSLASALRRGVRRRGCGCAGGRHSSMVNAYEMFSRDIRNAVACEAAYRFERHEIFTWWLHAC

SEQ ID NO: 8923 - protein, 37 aa, Zea mays
  Clone ID: TF_LIB3069-022-Q1-K1-E10.R1.pep
PYLKFEHLIAKQAIVEVFAGCRDSHVVDFGIKEGTKW

SEQ ID NO: 8924 - protein, 98 aa, Zea mays
  Clone ID: TF_LIB3245-575-P1-K1-B1.pep
GLYVAGRWVEKFVEHCAARFAFRTLAANIEYFTAGMLHRRPVQALIVNSALLIHHLPDESVSIMNQHDRLFYMANDLLPKLVTLGEHVSNTNTSSFYS

SEQ ID NO: 8925 - protein, 172 aa, Zea mays
  unsure (1)..(172): unsure at all Xaa locations
  Clone ID: TF_700205405_FLI.pep
AELIAPSADEVVAVCLPVGCSARTPPLPMLLQLVKQLAPKIVVAIDHGSDRGDLPFSQHFMNCFQSCMFLLDSLDAAGTNADAASKIERFLIQPRVEDAVLGRRKXEKAMAWRAVFTSAGFAPVPLSNLAEAQADCLLKRVQVRGFHVEKCGMGLALYWQRGELVSVSAWRC

SEQ ID NO: 8926 - protein, 179 aa, Zea mays
  Clone ID: TF_ZmC1583_2.pep
GRRAQSRAAAAAAEERLQSAIPITQRQQARTPPLPMLLQLVKQLAPKIVVAIDHGSDRGDLPFSQHFMNCFQSCMFLLDSLDAAGTNADAASKIERFLIQPRVEDAVLGRRKAEKAMAWRAVFTSAGFAPVPLSNLAEAQADCLLKRVQVRGFHVEKCGMGLALYWQRGELVSVSAWRC

SEQ ID NO: 8927 - protein, 60 aa, Zea mays
  Clone ID: TF_LIB3136-038-P1-K1-F6.pep
HGVELERHVQPLRLLGQRHGRLRQHVPVLVHGGKAEVRRALGPRGQQVQQLDPLRGVGAA

SEQ ID NO: 8928 - protein, 527 aa, Zea mays
  Clone ID: TF_ZmC3661_2.pep
MVMDAGLHEPCALLPGSKRDSHMLVYPQIAAAANGFTAQELESLLFLSPDGITLAAGSGGGGGGGSYLNVAPTTVVPPAPTNRASPPRDVSAAPPSVGQPDDSEAFSDIVLGYINRMLMAEDIDDKFEHYPEHPAVLAAEKPFLEILAERPSSSGGSAVESPGGSSVGNSCYSARSCTCATATAASDAFGAVLTPALDFPSAAFLQPPQLYQDLSPEGSVVDAGGAWPYDSTEFYQLHSNPSSFASSNGSCATISDGFESLLSSPGVMPDVGFADFAVQSQQAMQFCRGFEEASKFLPDESKLVIDLEKPASVTSLVANIKGENRFAEVKAEKADVQAEIHRGKKHFYGDDLDAEEGRRSKHSAPAIDTDHLVREMMDKVLLCNGETCSKGVKELREALQHDVAKNSHGVHGKGSGHGKGRGKKQPKKEVVDLETLLVHCAQSVATDDRRGATELLKQIRQHASPNGDGDQRLAHCFANGLEARLAGNGSQIYKSLIMTKDNRWLLQGWKGRIVLALSTWKPDHRSP

SEQ ID NO: 8929 - protein, 117 aa, Zea mays
  Clone ID: TF_ZmC5037_1.pep
RFLEALHYYSAIFDSLDATFPADSAQRMKVEQCLLAPEIRNVVACEGAERVARHERLDRWRRIMEGRGFEPVPLSPAAVAQSQVLLGLYGAGDGYRLTEDRGCLLLGWQDRATIAAS

SEQ ID NO: 8930 - protein, 205 aa, Zea mays
  unsure (1)..(205): unsure at all Xaa locations
  Clone ID: TF_ZmC5771_4.pep
DAWADAWADAWADAWADAWADAWARLCCEPGEAVAVNLAFALSHVPDESVSPANPRDELLRRVRALGPQVVTLVEQELNTNTAPLAARFTDACAHYGAILESLDATLGRETAEKARAEAALSRKAANAVGRDGPDRLEXCEVFGKWRARFGMAGFRPVSLGSSIAEQMVAPRVGPVPPGFTVKAENGVLRLCWMGRVVTVASAWR

SEQ ID NO: 8931 - protein, 162 aa, Zea mays
  Clone ID: TF_ZmC1310_2.pep
ESPRDIGLNNIRNMRPHTFIHAIVNGSFSAPFFVTRFREALFFYSALFDALDATTPRDSNQRMLIEENLFGRAALNVIACEGTDRVERPETYKQWQVRNQRAGLKQQPLNPDVVQVVRNKVKDCYHKDFVIDVDHRWLLQGWKGRILYAVSTWVANDAPSYI

SEQ ID NO: 8932 - protein, 671 aa, Zea mays
  unsure (1)..(671): unsure at all Xaa locations
  Clone ID: TF_ZmC5771_1.pep
MEPGAPWRDPRQGYSYGVGSAMQLQLQLQQRADAAAGGGVLKRSLGELERWQHHQQQQVAAQQALYLRAVRQRTAAAVDIAALLGGTPAQPLVLPGSSFGGGLASPSSTLSSSLTTASRAAVPLMQPQLQRQVPLTTSSPQTQPFGLSTAPLPQPSVSSELFILQELEKQLLDDDDDDEPVAAMSGTGSAVTNSEWEETIQQLSSIAAAPSPGPPAAATPTNNNNNNVGMTRSPSNSSSSTASSSASCSPPTPGAASRQLLSEAAVAIADGRAQARDDEVTVKLLHGVLDIVLLAADPRGRVELVIPWSSSGYRGSXHEASASHLAALKRAANQHGDAEQRLIAMMVAALSSRIAPAASAPSQLLADLCSVEQRAGSQLLQDLSPCFRVALHAASAAIVEAVGDHRAIHLVDFDVSFPQHAALIQYLADRRVQGRSLKVTAVTDPSSPFTQSLTASLPAIEERLKKLAERAGVEYRFTVVSCRAAELDASRLCCEPGEAVAVNLAFALSHVPDESVSPANPRDELLRRVRALGPQVVTLVEQELNTNTAPLAARFTDACAHYGAILESLDATLAREIAEKARAEAALSKKAANAVGRDGPDRLERCEVFGKWRARFGMAGFRPVSLGSSIAEELVGARVGHVPPGFTVKAENGVLRFCWMGRAVTVASAWR

SEQ ID NO: 8933 - protein, 413 aa, Zea mays
  Clone ID: TF_ZmC14418_1.pep
PQPKRPHPMAGAPAPKLPSFPGPVAQAGGGFVSALKPKAEAGNDEAAAAVDQLAEAARLAEAGDAFGAREILARLNYRLPAVPTAGTPLLRSAFYFKEALRVALSPTGEALAPPAVSTPYDVVLKLGAYKAFSEVSPVLQFAHLTCVQAVLDELGAAGRIHVLDLDIGMGEQWASLMQELAQRSPAATLKVTALVSPASHHPLELNLIHENLSGFARELGVFLQFAAYNVDALDPAELVAITSGDAVAVHLPVGSAHVAAMPAVLRLVKRLGAKVVVSVDRGCDRTELSFSTHLLQAFQSCVSLLDSIDAVGGADAEAVGRIERFMVQPDVERRVVSRHRAAVAVDKPPPLPWRTVLASAGFVPVQASTFAESQAEALLKRMALMGFRVEKRGGALCLYWQRGELVSVSAWRC

SEQ ID NO: 8934 - protein, 96 aa, Zea mays
  unsure (1)..(96): unsure at all Xaa locations
  Clone ID: TF_701163921H1.pep
SFLGAVNHRLKPSIVVVMEQDADHKRPAVSGRXVEAFGYYAALFGRLDAVAAATATASAAGDRAQVERMCLGEEIKNVLLCEGAGRLERHERLSQW

SEQ ID NO: 8935 - protein, 355 aa, Zea mays
  unsure (1)..(355): unsure at all Xaa locations
  Clone ID: TF_ZmC586135_1.pep
MSFVGRVDPSTTYADNIYVHKFGAPNSNFAARRFGSDTQLFRYGPEPFNSEDYGHMGFPEAPSAAFQSSFYNQQASLTPCSDAAKDSPVCSNISQQNSQSISDNQSSGLEVEFDDEIRLKLQELEHALLDDGDDILFEVSQAGCISDEWADPMKDVSLANSPKESESSISCAGSNSGEARTPKQLLFDCATALAEYNVDEAQAIITDLRQMVSIQGDPSHRIAAYLVEGLAARIVASGTGIYKALTCKDPPTLYQLSAMQXILFEICPCXIDLVSWXANYAILEACKGEERMHIIDFDINQGSQYXTLMQFMKDDANKTRHLRITGXVDDHETVQRTVGGLKVIGQRLEKLAEDC

SEQ ID NO: 8936 - protein, 136 aa, Zea mays
  unsure (1)..(136): unsure at all Xaa locations
  Clone ID: TF_jC-zmshLIB3569P012b04b1.pep
AALVEVALRRCRLERRRRYGSIGRRGGSVRGSIFVVAIRYYXALFDSLDTSYGASYSEDSPERHAVEQLLLSREIRNLLVVGGPAPTDDVKFDGWHSTXFHEASLASSPAAQASLLLGMPLYACSPRQLRGINSRL

SEQ ID NO: 8937 - protein, 316 aa, Zea mays
  Clone ID: TF_ZmC1310_1.pep
AKRTSAADILQAYQLYMAAICFKRVVFVFSNNTIYNAALGKMKIHIVDYGIHYGFQWPCFLRWIADREGGPPEVRITGIDLPQPGFRPTQRIEETGRRLSKYAQQFGVPFKYQAIAASKMESIRVEDLNLDPEEVLIVNCLYQFKNLMDESVVIESPRDIVLNNIRNMRPHTFIHAIVNGSFSAPFFVTRFREALFFYSALFDALDATTPRDSNQRMLIEENLFGRAALNVIACEGTDRVERPETYKQWQVRNQRAGLKQQPLNPDVVQVVRNKVKDCYHKDFVIDIDHHWLLQGWKGRILYAISTWVANDAPSYF

SEQ ID NO: 8938 - protein, 139 aa, Zea mays
  Clone ID: TF_ZmC26211_1.pep
MLQGVLSRAPATDAAAAMKAKRAGASPGEEEEGDGRSARGKRQQLLGLGPATALASAAAAEEGPETRGLRLLSLLLRCAEAVAMDQLTEARELLPEIAELASPFGSSPERVAAYFGDALCARVLSSYLGAYSPLALRPL

SEQ ID NO: 8939 - protein, 508 aa, Zea mays
  Clone ID: TF_ZmC5786_1.pep
MDAHTTHIVARKNTSLSFTSNELMDHFPFAWLPMDPFTAMALSGTLSPSFSTTSTNDTMYNLNPALYASLVPPIRKPATPTTVEVGRQCKEEEDASIRLVHLLITCTSAIETGDYSIAQGNLSEARKILGEIPTSTGIGRVGKHFIDALVQRLFPAYPHAAPPSPSPSTSIDLHNNFYDAGPYLKFAYSTANQAILKAIKGYNHVHIIDFSLMQGLQWPALMDVFSAREGGPPKLRITGIGPNPIGGRDELHEVGIRLAKYAHSVGIDFTFQGVCVDQLDRLCDWMLLKPIKGEAVAINSILQLHRLLVDPDANPVVPAPIDILLKLVIKINPMIFTVVEHEADHNRPPLLERFTNALFHYATMFDSLEAMHRCTSGRDITDSLTEVYLRGEIFDIVCGEGSARTERHELFGHWRERLTYAGLTQVWFDPDEVDTLKDQLIHVTSLSGSGFNILVCDGSLALAWHNRPLYVATAWCVTGGNAASSMVGNICKGTNDSRRKENRNGPME

SEQ ID NO: 8940 - protein, 146 aa, Zea mays
  Clone ID: TF_701163921_FLI.pep
NHNAPPFSARFAEALGYYAALFDSLDAVAAATATASAAGDRAQVERMVLGEEIKNVLLCEGAGRLERHERLSQWAMYMDASGFRRVPLSFRAIRESELKLASFGMSGCRYQVESDGLLLGWGSTRLYSVSAWRPNKSGTRECTFRS

SEQ ID NO: 8941 - protein, 350 aa, Zea mays
  Clone ID: TF_ZmC10148_1.pep
HLAVLKTAANPRGDAEQRLVAMMAGALSSRIRRPPASHQHLAGLCGAEQRAEWQLLQHVSPCFGLALHGANLAILDAVADQRAIHLIDFDVSVAQHTALIDSLASRRVAGTCLKVTAVTDPTSPFTPALAQALAATGQRLKEHARQAGVEFRFRAVSCVAGEVEASRSRLGCDETGEALVVNLAFALSRVPDESVSPANPRDALLRGVRGLRPRVVTLVEQELGANTAPLAARFADACAHYGAVLESLDATLGRDSAQRARAEAALASKAANAVAREGPDRVERCEVFGKWRARFGMAGLRPVAIGQGVADRVKGRLGPAARPGFDVKLDSGRLAIGWMGRVVTVASAWR

SEQ ID NO: 8942 - protein, 417 aa, Zea mays
  Clone ID: TF_ZmC5043_1.pep
MQDLRIAMDSESEKSVRRVSGKGARGKQHGNEFVDLHTMLIHCAQAMATGDRRSATEMLKQIKQHSSLRGDATQRLAYCFAEGLEVRLAGTGSQVYQSLMAKRTSVVEFLKAYKLFLAAISLNKVHIIFSNGNIVDAVAGRSKLHIVAYGVQYGLQWPGLLHFLAGREGGPPEVRFTGIDLPQPGFRPAYQIEETGRRLSNCAREFGVPFKFHAIAAKWEMVSAEDLNIDPDEVLVVNSDCHLSNLMDEGVDADTPSPRDLVLNNIRKMRPDIFIQIVNSGTYGAPFFLTRFREALFYYSALFDMLDATIPRDNDERLLIERDIVGRSALNVIACEGADRLDRPETYKQWQVRNHRAGLKQLPLNPEVVKLARDKVKKYYHKDFLIDEDRQWLLQGWKGRVLFAMSTWVAEDNNSTF

SEQ ID NO: 8943 - protein, 734 aa, Zea mays
  Clone ID: TF_ZmC2910_1.pep
MGLDNTYGDLSGMFYGGLSYDGYTDHSSANDYFRFADPLPATVPQMAAEACSNPSSTVSRANTETDNPEDWEFISDESLDYISRMLMEEDIDEKVSMYQAESAALRAAAKPFYDILGHKFPPSPDRQLISWSMDSPSESSSSICTQSVASTVTSSSFGTRVDSNRRYDVGLSEQLEAFRGLCGQASNPLVGTSSDASNAVDELEDLLITNGGIPEYLFESLPTWDFRRGIEEAQKSLPVSDKLVIDLETGGIARPQEARKDVPLNAKKDDVLKAKKNRQSEDLDLMEGRNIKQSAFCSDEPGWIEMFDDLLRQTEKKATVLRELMRSEASKNSQVTQTKGPSGPRPRGRKPTKNDVVDLRTILIHCAQAVAADDRRTANELLKQIRHHSKPNGDGTQRLAHCFADGLEARLAGTGSQLYRKLIAKRTTASDMLKAYHLFLAASPFKRLSHFLSNQTILSLTKNASKVHIIDFGIYFGFQWPCLIRRLSKREGGPPVLRITGIDVPQPGFRPTERIEETGQRLAEYAEKFKVPFEYQGIASKWESIRVEDLKVGKDEVVIVNCLYRFRNLIDETVAVDSPRNRVLNTIRQVNPAIFIHGIVNGSYSVPFFITRFREALFHFSALFDMLETTVPRDDAQRALIEREMFGREALNVIACEGSDRVERPETYKQWQVRNLRAGFVQSPLNQEIVMKAMDKVKDIYHKDFVIDEDSGWLLQGWKGRILYAISTWKPKNN

SEQ ID NO: 8944 - protein, 600 aa, Zea mays
  unsure (1)..(600): unsure at all Xaa locations
  Clone ID: TF_ZmC1155_3.pep
MLAGCSFSSSRHQMSTAQRFDILPYGFSKRASNRGDGSGAAPRVAAPDARSGGGGGTCSFRAHPAPPVTQAVSWGAKPEPGGNGAAWERSRAVKRAHEEDAGEEYGGPVVRAKRTRMGGDGDKVWFHRSIAGTVQAAGSGDGHEAEEEKAFLVPSAAAFPHGMSAAAAGPSLAVAKKEEFSKSPSNSPASSGGTDGGSSAVPWPEQLHAQNGAAARVEAMELVVALTACADSVAACNHDAANYYLVGLGEMVSPAGITPSTAVXAYSSEALTLLRMLKVLTSYNVPILRIIKDLHPIPPILHFNLNERGGRAFDGHDRVHVIDFDIKQGLQWPGLLQSLATRVAPPAHVRITGVGESRQELQEXTGARLGRVVAALGLAFEFHAVVDRLEDVRLWMLHVKRGECVAVNCVLGAHRPLRDETGAGVXNFVGVTRSTGAAILLLGEHEDALNSGRWEARFARALRYYAAAFDAVEAAGLADASPARAKAEEMFAREIRNAVAFEAADRFERHETFTGWRQRMQEGGFQNAGIGDREALQGRMIARMFAPGNYSVQVQGDGEGLTLRWMDQAMYTVSAWTPVSDGGSTVSASVSTTASHSQHS

SEQ ID NO: 8945 - protein, 310 aa, Zea mays
  Clone ID: TF_ZmC5780_1.pep
QSRRVAVAFQAYNALSPLVKFSHFTANQAILQALDGEDCLHVIDLDIMQGLQWPGLFHILASRPRKPRSLRITGLGASLDVLEATGRRLADFAASLGLPFEFRPIEGKIGHVADAAALLGSRQRRRDDEATVVHWMHHCLYDVTGSDVGTVRLLRSLRPKLITIVEQDLGHSGDFLGRFVEALHYYSALFDALGDGAGAAEEESAERYAVERQLLGAEIRNIVAVGGPKRTGEVRVERWSHELRQAGFRPVSLAGSPAAQARLLLGMYPWKGYTLVEEDACLKLGWKDLSLLTASAWEPADDAAASAPTG

SEQ ID NO: 8946 - protein, 311 aa, Zea mays
  Clone ID: TF_ZmC3644_1.pep
PYLKFAHFTANQAILEAVQGCKHVHIIDFSIMQGLQWPALIQALALRPGGPPSLRLTGIGPPSPPGRDDLRDVGVRLADLARSVRVHFSFRGVAANRLDEVRPWMLQVSQGEAVAVNSVLQLHRLLADAPSSGDARAPIDAVLECVASVRPRVFTVVEQEADHNKPGFLDRFTEALFYYSAVFDSLDAASGGAGDAAAEAYLEREICDIVCGEGAGRRERHEPLWRWRDRLGRTGLAAVPLGANALRQARMLVGLFSGEGHCVEEAEGCLTLGWHGRPLFSASAWRAEENNQSDSRSRSSGSEESNISCSS

SEQ ID NO: 8947 - protein, 290 aa, Zea mays
  Clone ID: TF_ZmC3871_1.pep
FSNLAICKAVGGGGRKKVHIVDYGDHYYGLQWPSLLGYWGSLEAGPPEVRITAIDFPEPGFRPDARLQATGRRLTCFARRHGVPLRFHGIAARWDAVSVDELSIERDEVLVVNGLFSLGRMQEQEQDDVDRDSRPSPRDTVLGNVRKMRPDVFVLCVENSSYGAPLFVTRFREALFYYSALFDMMDAVAARDDDDRVLVEQHLFGQRALNAIACEGSDRVERPETYRQWQVRNERAGLRQLPLDPDAVRAIRRKVKDKYHRDLFIDEDQQWLLQGWKGRVLYAMSAWAAK

SEQ ID NO: 8948 - protein, 344 aa, Zea mays
  Clone ID: TF_ZmC6882_1.pep
QRLAHCFAMGLEARLAGTGSQAYQSLMAQHTSVVEFLKAYSLYMAASCFMKVRFIFSNMTICNAVAGRSKLHIVEYGVQHGFQYPGLFHLLARREGGPPEVRVTAIAVPQPGFRPAHQIEETGRRLSNIAREMGVPFKFRGIAAKWEAVRAKDLNIDPDEVLAVNSECYIGNLMDESVLVDSPSPRDTVLNNIREMRPNVFVHTVVNGTYGAPFFLTRFREALFFFSAQFDMIDATIPRDNNERLLIERDIFGTFALNVIACEGADRVERPETYKQWQVRNHRAGLRQLPLNPEVVKASRDKVKNYYHRDFLIDEDNRWLLLGWKGRVLYAMSTWVAEDNKPIF

SEQ ID NO: 8949 - protein, 147 aa, Zea mays
  Clone ID: TF_ZmC5784_2.pep
PKVVTMVEQNLRQSGSFLARFVDAIHYYWALFDSLDASYGEDSPERHVVEQQLLAREIRNVLAVGGPARAGAGGARFGSWREELARSGFRAASLAGGAAAQASLLLGMFPSDGYTLVEEKGALRLGWKDLCLLTASAWRPVQTPPCR

SEQ ID NO: 8950 - protein, 156 aa, Zea mays
  Clone ID: TF_UC-ZMFLB73073F08_FLI.pep
TNEDQFNNLHGISQLEHQKSDALALYRLEYKSSSSKRSVRSKLSSSPLNEIQQQMGRLTADSPVENKRTARSKPKANQKDTNANIHPHVNAPNQVNAPNAYQATPQVNQMTLMNGNVVYGPHLPHSEDVIYGPHLPHGYSAEGSSFFWNTSDYQYT

SEQ ID NO: 8951 - protein, 100 aa, Zea mays
  Clone ID: TF_ZmC12034_1.pep
HASARVERWLLGEEVKNIVACDGADRRERHERLDRWAARMEGAGFARVPLSYYALLQARRAAQGLGCDGFKVREEKGAFFLCWQERAIFSVSAWRGRRFD

SEQ ID NO: 8952 - protein, 253 aa, Zea mays
  unsure (1)..(253): unsure at all Xaa locations
  Clone ID: TF_LIB4766-041-R1-K1-G12.pep
LGPRAGLSPIPRAPSRGKVRSDGARRGVALHAASAAIVEAVGDHRAIHLVDFDVSFPQHAALIQYLADRRVQGRSLKVTAVTDPSSPFTQSLTASLPAIEERLKKLAERAGVEYRFTVVSCRAAELDASRLCCEPGEAVAVNLAFALSHVPDESVSPANPRDELLRRVRALGPQVVTLVEQELNTNTAPLATRFTDACAHYGAILESLDATLAREIAEKARAEAALSXXAANAVGRDGPDRLERCEVFGKWRA

SEQ ID NO: 8953 - protein, 96 aa, Zea mays
  Clone ID: TF_LIB3205-014-P1-N1-C1.pep
VTGSDSNTLWLIQRLAPKVVTMVEQDLSQSGSLLARFMDAIHYYLALFDSLDASYGEDSPERHVVEQQLLAREIRNVLAVGGPARAAGGQLLSQLS

SEQ ID NO: 8954 - protein, 107 aa, Zea mays
  Clone ID: TF_LIB3591-101-Q1-K6-E2.pep
SDIPGPRRSRQRFMVERGFFRQCALNVVACEGVDRVERPETYRQWQARNRRAGLRQLPLDPDTVRALREKVREQYHRDFVIDTDRDWILQGWKVRILYTMKTWVVDD

SEQ ID NO: 8955 - protein, 370 aa, Zea mays
  Clone ID: TF_ZmC1420_1.pep
RHSSPTGDAAQRLAHCFADGLEARLAGTGSRLYQSLMLRRTSVADFLRAYRLYMTTCCCKRVAFAFANKTIHDAFALAGRRRRLHIVDYGLGYGFQWPGLLRGLAAREGGPPELVRITGIDLPQPGFRPAQQIEDTGRRLSDCARQLGVPFEFRGIAAKREAVSPEDLGIDPAAEVLVVISLCHFRLLTDEIEVEISSSAAAAGPSGRRRPTARDQVLCNIRRMRPDVFIHGVVSGGYGTTYFPTIRHEAMFHYSAQFDLLDATVPRDSPERLLLERDIFGRAAMNVIACEGADRVERPETYRQWQARNRRAGLKQLQLQADVVKVVRDKVKDKYHRDFGIDEDQGWLLHTWKGRVLYGLSTWVAQHADP

SEQ ID NO: 8956 - protein, 137 aa, Zea mays
  unsure (1)..(137): unsure at all Xaa locations
  Clone ID: TF_LIB4767-051-R1-K1-A11.pep
MTASTSSTLTSSRGYSGRASSRKRGIEAVSDSNIFVENLVEKEEFLHTFSKECEYIRTAVTNGSAIKHDGSYESDPAVEIVRVELQGAAAFLXYSRLVPLVLLLVEGSTPIYIGEHGWGMLLVXKRXTQEAGSKLNC

SEQ ID NO: 8957 - protein, 351 aa, Zea mays
  unsure (1)..(351): unsure at all Xaa locations
  Clone ID: TF_ZmC1439_7.pep
LENLVEKEEFLHTFSKECEYIRTAVTNGSAIKHDGSYESDPAVEIVRVELQGAAAFLXYSRLVPLVLLLVEGSTPIYIGEHGWEMLLVVKKATQEAGSKFELLGFASVHNFYHYPESIRLRISQILVLPPYQGEGHGLGLLEAINYIAQSENIYDVTIESPSDYLQYVRSSIDCLCLLMFDPIKPALGAIVSSLKETNLSKRAQSLRMVPPVDLMETVRXKLKIKKKQFLRCWEILVFLSLDSQDHKSMDNFRACIYDLMKGEILGSASGTNRKRLLQMPTSFNKEASFAVYWTHEIGDVDEQTVXQQPEDLRTQEQQLNELVDIQIEEIDGVAKNVTSRGKDKMAELAVQ

SEQ ID NO: 8958 - protein, 205 aa, Zea mays
  Clone ID: TF_ZmC490712_1.pep
IAQSCCLPFEFNAVNAASHEVTLEHLDIRKGEAIAVNFAYQLHHTPDESVCIENHRDRILRMVKSLSPRVVTLVEQEANTNTAPFFSRYMETLDYYTAMFEAIDVACPRDDKVRMSTEQHCVARDIVNLIACEGAERVERHGPFGKWRSRFAMAGFRPYPLSALVNNTIRTLLNDYNSYYKLEEKDGVIYLGWKNRKLVVSSAWQ

SEQ ID NO: 8959 - protein, 102 aa, Zea mays
  unsure (1)..(102): unsure at all Xaa locations
  Clone ID: TF_LIB3069-022-Q1-K1-E10.pep
ADLLHAQLCESXRYLKFVHWIANQAILEVFAGCRRVHIIYLRIXQGMQWPALLQALALQPGCPMSFRLTRVRPPXPDETDALQLVGCKLAQLEHTMLVDLQY

SEQ ID NO: 8960 - protein, 184 aa, Zea mays
  Clone ID: TF_LIB4729-117-A1-K1-F2.pep
VAAAFQVFNGISPFVKFSHFTANQAIQEAFEREERVHIIDLDIMQGLQWPGLFHILASRPGGPPRVRLTGLGASMEALEATGKRLSDFADTLGLPFEFCAVAEKAGNVDPEKLGVTRREAVAVHWLHHSLYDVTGSDSNTLWLIHYYSALFDSLDASYGEDSPERHVVEQQLLSREIRNVLAVG

SEQ ID NO: 8961 - protein, 132 aa, Zea mays
  Clone ID: TF_LIB4738-094-Q1-K1-E4.pep
TLGLPFEFCAVAEKADNVDPQKLGVTRREAVAVHWLHHSLYDVTGSDSNTLWLIQRLAPKVVTMVEQDLSQSGSFLARFVDAIHYYSALFDSLDASYGEDSPERHVVEQQLLAREIRNVLAVGDPRRRRSAT

SEQ ID NO: 8962 - protein, 448 aa, Zea mays
  Clone ID: TF_ZmC5045_1.pep
MEMEGRKSKQSALCDEETVREMFDKVLLCTDKNCEFHSPMPADAQISGGYVKGSRNKRGRRRGRSGPGAEEEPVDLTTLLIHCAQAAAIDDHRNSSELLKQIRKHSSATGDAGQRLAHYFADGLEARLAGSGSSIYRSLAAKRTSTGDILKAFSLYVKACPFRILSHYVANTTILNATKSATRLHIIDYGIMYGFQWPVLMQRLSKRPGGPPYLRITGIDFPLSGFRPAERVEATGRRLHEYARMFNVPFEYQAIAAKWDTIQVKDLNMKSDEFVVVNCLYRMRSMVGRTVADDSPRTRVLNTIRKLNPHLFVHGIVNGTYNAPFFVTRFKEAMFFFSSIFDMLEANALRMDEHRLLIEREFFGREAVNVIACEGTERIERPETYKQWQMRNLRAGFRQLALDREIMKRARYKVSKSYQGDFLVDEDNKWMLQGWKGRIIYALSAWTS

SEQ ID NO: 8963 - protein, 476 aa, Zea mays
  Clone ID: TF_ZmC1583_1.pep
MPFHDGADIKPAHLGVPSASLLLNQHQALSAASFMPLPSFPDHQHQPHLPPPPKRHHSMPENLFLLQNQLQPPPPPPQGLRFPPLHTTAPFQLQPSLQPPRGSMKTTPAAQQHQQLLDELAAAAKAAEVGNSIGGREILARLNQQLPPIGKPFLRSASYLKEALLLALTDGHQGSTHLSSPLDVALKLGAYKSFSDLSPVLQFANFTATQALLDEIASTTSSCIHIIDFDLGVGGQWASFLQEFAHRRGTGNAPLPMLKLTAFVSSASHHPLELHLTRENLTQFAVDLGIPFEFTDINLDAFDPAEFIAPSPNEVVAVCIPVGCSARTPPLPMLLQLVKQLAPKIAVAIDHGSDRGDLPFSQHFMNCFQSCMFLLDSLDAAGTNADAASKIERFLIQPRVEDAVLGRRKAENAMAWRAVFTSAGFAPVPLSNLAEAQADCLLKRVQVRGFHVEKCGMGLALYWQSGELVSVSAWRC

SEQ ID NO: 8964 - protein, 669 aa, Zea mays
  Clone ID: TF_ZmC3661_1.pep
RGTAPGPAAPVHPGPLLARSAQALVLPQGLPHRRRQQVVTARVERTHRAGALNVEARSQVSLAPPRGRLHGCRSSPEGSVVDAGGAWPYDSTEFYQLHSNPSSFASSNGSCATISDGFESLLSSPGVMPDVGFADFAVQSQQAMQFCRGFEEASKFLPDESKLVIDLEKPASVTSLVANIKGENRFAEVKAEKADVQAEIHRGKKHFYGDDLDAEEGRRSKHSAPAIDTDHLVREMMDKVLLCNGETCSKGVKELREALQHDVAKNSHGVHGKGSGHGKGRGKKQPKKEVVDLETLLVHCAQSVATDDRRGATELLKQIRQHASPNGDGDQRLAHCFANGLEARLAGNGSQIYKSLIMTRFPCTDVLKAYQLYLAACPFKKISHFFANQTIMNAVEKAKKVHIVDYGIYYGFQWPCLIQRLSTRPGGPPRLRITAIDTPHPGFRPAERIEETGRYLKDYAETFNVPFEFRAIPSRFEAVQIEDLHIAKDELLIVNSMFKFKTLMDESVVAESPRNMVLSTIRKMNPHLFIHGIINGSYNAPFFASRFREALYHYSAIFDMLETNIPRDNEQRLLIESALFGREAINVISCEGLERMERPETYKQWQVRYQRAGFRQLPINQDIMKRAREKVRCYHKDFLIDEDNRWLLQGWKGRIVLALSTWKPDHRSS

SEQ ID NO: 8965 - protein, 96 aa, Zea mays
  unsure (1)..(96): unsure at all Xaa locations
  Clone ID: TF_LIB3152-020-P1-K1-F10.pep
PDWIEMFDDLLLQTEKKATDLLELMRNEAFKNSQVTQTKGPSGPRPLXRKPTKKDVVDLRTILIHCAQAVAADDRMTANELLKHIMHHSKPNGVGT

SEQ ID NO: 8966 - protein, 161 aa, Zea mays
  unsure (1)..(161): unsure at all Xaa locations
  Clone ID: TF_LIB4766-127-A1-K1-C3.pep
GSLASRVHSQPQPPRLSPLRFTRSRHRGGVPERQPPSPAPPRGRPRRVVRLPVALLDLVPVGRRREHERENEQRITRRRRRRASFPANHRLRHEPRRAAANQGAAGAAAASTFHGQSPVLLRGVRLAAQVPPRRQRREDRHRERPPGAWRSATGXGFWFVN

SEQ ID NO: 8967 - protein, 306 aa, Zea mays
  Clone ID: TF_ZmC3528_1.pep
RFAPDELTLCYKTLNDACPYSKFAHLTANQAILEATGAATKIHIVDFGIVQGIQWAALLQALATRPGEKPSRVRISGVPSPYLGPKPAASLAATSARLRDFAKLLGVDFEFVPLLRPVHELDRSDFLVEPDETVAVNFMLQLYHLLGDSDEPVRRVLRLVKSLDPSVVTLGEYEVSLNRAGFVDRFSNALLYYKPVFESLDVAMPRDSPERVRVERCMFGERIRRAIGPEEGAERTDRMAASREWQTLMEWCGFEPVRLSNYAMSQADLLLWNYDSKYKYSLVELPPAFLSLAWEKQPLLTVSAWR

SEQ ID NO: 8968 - protein, 91 aa, Zea mays
  Clone ID: TF_LIB3067-053-Q1-K1-C4.pep
EEPDPAPQSRKVATAAASAAAAKERKEVQRRKQRDEEGLHLLTLLLQCAEAVNADNLDDAHQTLLEIAELATPFGTSTQRVAGYFAEAMSA

SEQ ID NO: 8969 - protein, 354 aa, Zea mays
  unsure (1)..(354): unsure at all Xaa locations
  Clone ID: TF_ZmC5771_2.pep
LWSPSNSSVASSSASCSPPTXGAASRQLLSEAAVAISDNNHDTAASHLAALKRAANQHGDAEQRLIAMMVAALSSRIAPAASAPSQLLADLCSVEQRAGSQLLQDLSPCFRVALHAASAAIVEAVGDHRAIHLVDFDVSFPQHAALIQYLADRRVQGRSLKVTAVTDPSSPFTQSLTASLPAIEERLKKLAERAGVEYRFTVVSCRAAELDASRLCCEPGEAVAVNLAFALSHVPDESVSPANPRDELLRRVRALGPQVVTLVEQELNTNTAPLAARFTDACAHYGAILESLDATLAREIAEKARAEAALSKKAANAVPYWCSVPARRGSPPAGPARARGGAARRGGWPERRSR

SEQ ID NO: 8970 - protein, 100 aa, Zea mays
  Clone ID: TF_LIB4767-027-Q2-K1-H11.pep
GSWSTRVGGPPEVRITGIDFPQPGFRSATRTEGAGRRLSDFARQCGVPFKFRSIVATKWEMIFAEDLEIEPDEVLVVSGLFYFGKLMDVRRGRRRRLPEP

SEQ ID NO: 8971 - protein, 137 aa, Zea mays
  Clone ID: TF_ZmC1155_7.pep
TPSRAAIARPLVRRLSCSYRSSPSGLVFAREIRNAVAFEAADRFERHETFAGWRQRMQEGGFQNAGIGDREALQGRMIARMFAPGNYSVQVQGDGEGLTLRWMDQAMYTVSAWTPVSDGGSTVSASVSTTASHSQHS

SEQ ID NO: 8972 - protein, 180 aa, Zea mays
  Clone ID: TF_ZmC10887_1.pep
MDMFQEDTLSSATSSPASSLCTPSPHPHGSSWVQELSHDQQGLRLISLLYQCAAEVAAGAFDRANLYLEQITQLASLDAPHTLQRLAAVFADALARKLLNLVPGLSRALLPTGPGSPAEAHLVPAARRHLFDVLPFMKLAYLTTNHAVLEAMEGERFVHVVDLSGPAANPVQWIALFHAF

SEQ ID NO: 8973 - protein, 443 aa, Zea mays
  Clone ID: TF_ZmC5027_1.pep
MSIPSFPSYNQHSPLIHPPPKRHQSIGGDLYLARTRLLPPPPTGQGHAFPPLNGPAPFQLQPSPPLPHGAMKRTAAEAAQQQLLDELAAAAKAAEAGNSIGAREILARLNHQLPLLGKPFLRSASYLKEALLLALAEGHHGGCHLTSPLDVALKLAAYKTFSDHSPVLQFTNFTATQALIDEIARSTSSCIHVIDFDLGVGGQWASFLQELAHRRGAGGAALPSVKLTAFVSAASHHPLELRLTRDNIAQFAADLGIPFEFSAISADTINPAELVSATADEVVAVVLPVGCSARAPPLPAILRLVKQLAPKIVIAIDHGADRADLPFSQHFLNCFQSCMFLLDSLDAAGIDADSTCKIEKFLIQPRIEDAVLGRGKVDKPIAWRSAFAAAGFAPVPPSNLAEAQADCLLKRVQVRGFHVEKCGVGLTLYWQCGELVTVSAWRC

SEQ ID NO: 8974 - protein, 414 aa, Zea mays
  Clone ID: TF_ZmC5784_1.pep
EEPDPVPQSPKVPTAEETAAASAAAAKERKEVQRRKQRDEEGLHLLTLLLQCAEAVNADNLDDAHQTLLEIAELATPFGTSTQRVAAYFAEAMSARVVSSCLGLYAPLPPGSPAAARLHGRVAAAFQVFNGISPFVKFSHFTANQAIQEAFEREERVHIIDLDIMQGLQWPGLFHILASRPGGPPRVRLTGLGASMEALEATGKRLSDFADTLGLPFEFCAVDEKVGNVDPQKLGVTRREAVAVHWLHHSLYDVTGSDSNTLRLIQRLAPKVVTMVEQDLSQSGSFLARFVDAIHYYSALFDSLDASYGEDSPERHVVEQQLLAREIRNVLAVGGPARTGDGKFGSWREKLAQSGFRAASLAGSAAAQASLLLGMFPSDGYTLVEENGALKLGWKDLCLLTASAWRPIQVPPCR

SEQ ID NO: 8975 - protein, 184 aa, Zea mays
  unsure (1)..(184): unsure at all Xaa locations
  Clone ID: TF_ZmC12356_2.pep
ARDEVPHHFTYTTQVEHLKPLSSVKPLQGCRCLSVCLPGDANCCCAQRNGGSLPYSSSGLLVCRKTMVYECGESCRCSFNCRNRVTQKGVRIHFEVFKTGNRGWGLRSWDAIRAGSFICEYVGEVIDDANINLNDIEDDYIFQMSCPGEXTLKWNFGPELIREQSTNVSADSFETLXIKISAKR

SEQ ID NO: 8976 - protein, 84 aa, Zea mays
  Clone ID: TF_700432452H1.pep
NAEMQEVGVGLYPSISLLNHSCDPNCSIVFNGPHLLLRAVRDIEVGEELTICYLDMLMTSEERRKQLRDQYCFECDCFRCQTQD

SEQ ID NO: 8977 - protein, 123 aa, Zea mays
  Clone ID: TF_ZmC3525_2.pep
MFQVVEYVGEIVGQRVADRREIEYQSGKRQQYKSACYFFKIDREHIIDATRKGGIARFVNHSCQPNCVAKIISVRNEKKVMFFAERHINPGEEITYDYHFNREDEGQRILCFCRSRYCRRYLN

SEQ ID NO: 8978 - protein, 44 aa, Zea mays
  Clone ID: TF_uC-zmflb73150d09b1.pep
SWSWDRCCRDKVLQKGLLVKLELCRTVNKGWASRAAEPIPQGTF

SEQ ID NO: 8979 - protein, 52 aa, Zea mays
  unsure (1)..(52): unsure at all Xaa locations
  Clone ID: TF_jC-zmX700049670a1.pep
HSSNPNCYAKVILMSTNPPLXIYAKEHIEASEELFYDYPYGPDQAPSWANIP

SEQ ID NO: 8980 - protein, 130 aa, Zea mays
  Clone ID: TF_LIB3606-016-Q6-K6-B5.pep
KGKHKHQVLLDAGWGSGVLRDEDALSLDGSFYGNVGRFINHRCYDANLVQIPVEVETPDHHYYHLAFFTNKKVEAFEELTWDYGIGFDDTEGPSKPFRCMCGSRYCRDPNNLSMLPFSMHKSMKRGIMYV

SEQ ID NO: 8981 - protein, 46 aa, Zea mays
  Clone ID: TF_LIB3689-220-Q1-K6-A12.pep
NFYMCKVSKDFVIDAAFTEHASRFFNHSCQPNCRLEKWNQRVCFGP

SEQ ID NO: 8982 - protein, 227 aa, Zea mays
  unsure (1)..(227): unsure at all Xaa locations
  Clone ID: TF_ZmC3614_2.pep
YHPTIHGLLACCWTVTGSQASRGYLARAGAPCACAAAECGGIQRVCADVEADAAGPGFEAGMGSLRECGDGCASAPSCGNRRTQRGVAVRLCVVCHLHKGWGLHAAEXLNCGQFVCKYAGKEAGSFLTTEEARRQHKLYDELASGGKLCPAQIVIREHIPSSKACLRVNIDATIVGNVARFIIQLPSCDGGNLHPMLVRSSDSLLPRLCFFAAKDIVEGEELTFSCC

SEQ ID NO: 8983 - protein, 459 aa, Zea mays
  unsure (1)..(459): unsure at all Xaa locations
  Clone ID: TF_ZmC2220_1.pep
MSLKCSVGSSNFSISMEEVFKMVEEKCLHSYKMLPSDLSIGKLLSEVCQSVVQLGTMHSEVNRDSGSLHNEVVAPFVKPISCEAAVGISDDVAGGSSVLESSEPCLQNSLVAWYPELAHCKQKTTHDTTDISKGEERVRIPLVNEFGSEXCPPSFYYVPRNLVFQNAYVNISIARIGDEDCCADCSGNCLSSLVPCGCARVTGGEFPYTPEGLLKTEFLDECTSVNHFPQEHHRFYCTVCPLERSKNKASPGPCKGHLMRKFIKECWSKCGCGMQCGNRVIQRGITCKLQVFFTREGKGWGVRTVEDLPKGSFVCEYVGEVLTSSELHERAIENARNGKHKHQVLLDAGWGSGVLRDEDALSLDGSFYGNVGRFINHRCYDANLVQIPVEVETPDHHYYHLAFFTNKKVEAFEELTWDYGIGFDDTEGPSKPFRCMCGSRYCRDPNNLRRMARAAAKRK

SEQ ID NO: 8984 - protein, 511 aa, Zea mays
  unsure (1)..(511): unsure at all Xaa locations
  Clone ID: TF_ZmC3477_2.pep
MYRASXFIPDPNQVLLDAKPLRSLAPMFPAPMGVNVNQSSTPPLVCVTPVGQFSAGFGAGNLPAFGSFTTFSATSNGVSYAGIDYMTSKFGNDEDSVAICIVSAGGYENDDDDTDVLVYSGQGGNSRNTEERHDQKLERGNLALERSLHRKNGIRVVRGFKDPAMVAGKIYIYDGLYKIQESWTERTKFGVNCFKYRLQREPGQRDGAAIWKMTQRWIDDPATRGRVILADLSSEAESIPVCLVNEVDHEKGPGQFTYTNQVKYVRPLSSMTPLQGCGCQSVCLPGDASCACGQHNGGDLPYSSLGLLSCRKPMIYECGESCNCSTNCRNRVTQKGPRLHFEVFRTTNRGWGLRCWEPVRAGSFICEYAGEVIDELKVNLNDTEDDYIFQTVCPGEKTLKWNCGPELLGEASTYVSADEFEPLPIKISAKNMGNVSRFMNHSCSPNVFWQPVQYDHGDDGHPHIMFFALKHIPPMTELTYDYGVAGAESSGSGSRRTKNCMCGSQNCRGLF

SEQ ID NO: 8985 - protein, 189 aa, Zea mays
  unsure (1)..(189): unsure at all Xaa locations
  Clone ID: TF_21211472.pep
MVVSYIMFVELIFSMSIFACDICQQGLLQSEPEGEHNENIGFYGRCVSHAIVFSSHVNPKKEYFRNNNWTCARTEGFKGRKGEGFSDSSHKKYEEYSGEFGVSQEQINAWLRINGSKPCGRGQKEYIHYKQLKGWKHLVVYKSGIHGLGLYTSVFIPRGSMVVEYXGEIVGQRVADXREIEXQGETATI

SEQ ID NO: 8986 - protein, 84 aa, Zea mays
  unsure (1)..(84): unsure at all Xaa locations
  Clone ID: TF_700196512_FLI.pep
ATGKGNIARLINHSCMPSCYARIVTVSGDRSQIILIAKRDVSAGEELTXVPQPCQYNYLFDPDESEDCKVPCLCKAPNCRGYMN

SEQ ID NO: 8987 - protein, 319 aa, Zea mays
  Clone ID: TF_ZmC3767_1.pep
QLTSMALVQVRFTRAEAPTTISELPGLVCDDISGGQENIPIPATNLVDDPPVPPSGFKYLKSLQIPKDIKIPSSIIGCDCEGGCASNKKCLCAQRNGSDLPYVSYKNIGRLVEPKAVVFECGANCSCNHDCVNRTSQQGLQYRLEVFKTASKGWGVRTWDTILPGAPICEYTGVLRRTEDLDGSQNNYCFDIDCLQTMKGLDGREKRAGSEMHLPNLHPENDSDAQPAPEYCIDAHSIGNFARFINHSCQPNLFVQCVLSSHNDVKLAKVMLFAADTILPLQELSYDYGYRLDSVVGPDGKIVKLACHCGAPDCRKRLY

SEQ ID NO: 8988 - protein, 563 aa, Zea mays
  unsure (1)..(563): unsure at all Xaa locations
  Clone ID: TF_ZmC10178_1.pep
PVPHAHRTAPGGRGEVSAEKGVKPDQPGLVCFDVFCSYLPACEFILWQLDACNRPKALLLECERHSGCRSKNWRSSIKLKGSLMPFGKWIDRHQPGVCPTNPPKRSSRLMXLQKLIDLLNDPYDPVHVTLLTGYYAVCXWLFQKTANGRVCFGRSXIPVEQECYGXRGKQDFTSWVCRACEKPEQKRECCLCPVKGGALKPTNVDNLWVHVTCAWFQSQVAFASDELMEPAIGILNIQPLLFMKMCVVCKQIHGSCTQCYRCSTYYHAICASRAGYRMELHCLEKNGRQTTKKISYCAQHRSPNPDNVLIIQTPAGTFSSKKLVHSNGKVAASRLIRKDIPLDLPSEVKISENLSAARCRVYVRKDLKRSREGTIVHHVRGPCQHRWEEIDNLNPPREERDPESFCTFKERLCYLQKTEHGRVCFGRSGIHRWGLFARRDIQEGEMVLEYRGEQVRRSVADLREEKYRVQGKDCYLFKISEEVVVDATDKGNVARLINHSCTPNCYARIMSVGHDESRIVLIAKKKVCAGDELTYDYLFDPDEADERKVPCLCQTANCRKFMN

SEQ ID NO: 8989 - protein, 469 aa, Zea mays
  Clone ID: TF_ZmC4118_3.pep
MDASSVSPCDLDREFALQIAQLLATPPLQSAQEYYGELIRSKKLDGIRVSYSGKHGKGVYANRDFGEDDLVLKDQMLVGAQDSLNKIDCVVCSYCFHFIGSIEYQIGRRLYLQSLGGSGDGTTERHCHGSDVGSSTGCSGASNGNSNAVPQEVLLSLMDGNTLLPLTDQFCLPPVVACPGGCEGELYCSQSCADSDWDSYHSLLCAGSKTEPLRKSALQKFVGHANETNDIFLVAAKAITSTLLRYRKLKRQHVSHESSSSLLLEAWKPLSMGFKKRWWECVALPEDVDSSEEELFRQQIRDLAFTSLQLLKDAIFDPECAPLFSLDIYGHIIGMFELNNLDLVVASPVEDYFIYIDGLPESDKEEAEKVTGPFLDALGEDYLVPCEGTAFFPLQSCMNHSCRPNAKAFKRDEDKDGHAVIIALRPISKDEEITIAYIDEDLPYEERQAQLADYGFTCTCLKCQEERPV

SEQ ID NO: 8990 - protein, 269 aa, Zea mays
  Clone ID: TF_ZmC2742_2.pep
DEDPCIRLLSYCKKHRQPSAAERPSLESDPPEPIQVVQTDMASSSGCARTEPYNLHRRRGQKQPQVVATASLKRLYVENRPHIVSGYCQNRVGNTCGESIQPFGLSDAVQQEAIGNVSSMVEKYTIVKATFRKRLTFGKSKIHGYGVFAKVAHKAGDMMVEYIGEIVRPPISDTRERRIYNSLVGAGTYMFRIDDERVIDATRVGSIARLINHSCEPNCYSRAITILGDEHIIIFAKRDIDPWEELTYDYRLHHIGWDMTCLCDMLASA

SEQ ID NO: 8991 - protein, 122 aa, Zea mays
  unsure (1)..(122): unsure at all Xaa locations
  Clone ID: TF_LIB4704-006-R1-M1-C10.pep
QTVCPGEKTLKWNCGPELIGEDSTYVSADEFEPLPIKISAKNMGNVSRFMNHSCSPNVFWQPVQYDHGDDGHPHXMFFALKHIPPMTELTYDYGVAGAESSGSGSRRTKNCMCGSQNCRGLF

SEQ ID NO: 8992 - protein, 886 aa, Zea mays
  Clone ID: TF_ZmC3517_1.pep
METGAAAAPASRADGVRRCKILVPWRFQPGFVRQPLKQAANDAAVNGDGGNTAGAPDAKSCRADGAASDGGETNVFRDAKKFGSGRATRGKNGEVDGGEEHSERCTSSQSLKSPDVENGGRPGPGDACNLGESVRGGWVKSSPLEGTGNSRGANGGVEAGEDYNLGSSNCDASWKDARTQEFRGAGDGAACDPEVIESNVGAEKCFAKGLKKPFMDQTGSKSNGSSAPGLESEDPEGNVGLEDSSYQAAKGCSMGDGAAKENEATANGCSSATPGSIGNGTYVRKGRKAAVPWRFQARYKRSFSDAFGSNNESPDLPAYMFDSSSTQCTPATRSTVRCYASAHSGVRVSAMNNFSVKGDTECKKRKTNNDYQDESMLNNGGVVVRERIMRSLQDLRLIYRDLLDEEDNSREKVLNVRPDLKAYRIFRERFCTDFDDEKYIGSVPGIYPGDIFHLRVELCVVGLHRPHRVGIDCTKKDDGTTVAVSIVSCAQSHDIKYNLDAFVYTGLVAVAVNQRIEGTNLALKKSMDTNTPVRVIHGFTTFNGKKKFPAYIYGGLYLVEKYWREKEHGDRYVYMFRLRRMEGQKHIDIQEILQTGNSGSNDNVIIKDLSRGLERVPLPVVNKISDERPMPYCYISHLRYPRNYRPTPPAGCNCVGGCSDSNKCACAVKNGGEIPFNDKGRIVEAKPLVYECGPSCKCPPTCHNRVGQHGLKFRLQIFKTKSMGWGVRTLEFIPSGSFVCEYIGEVLEDEEAQKRTNDEYLFAIGHNYYDKSLWEGLSRSIPSLQKGPGKDDENETGFAVDASEMGNFAKFINHNCTPNIYAQNVLYDHEDISVPHIMFFACDDIRPNQELAYHYNYKIDQVHDANGNIKKKKCLCGSVECDGWLY

SEQ ID NO: 8993 - protein, 186 aa, Zea mays
  Clone ID: TF_ZmC2220_2.pep
QCGNRVIQRGITCKLQVFFTREGKGWGVRTVEDLPRGAFVCEYVGEILTSAELHERAIENARNGKHMHQVLLDAGWGSGVVLRDEDACSLDGSFYGNVGRFINHRCYNANLVQIPVEVETPDHHYHHLAFFTNKKVEAFEELTWDYGIDFDDMEGPSKPFRCMCGCRYCRDPNNPRRMGRAAAKRK

SEQ ID NO: 8994 - protein, 85 aa, Zea mays
  Clone ID: TF_700456152H1.pep
RFMNHNSQPKCETLKWTVNGDTRVGLFAVCDIPAGTELTFNYNLDCLGNEKTVCRCGASNCSGFLGDRPKTSTTLSSEEKGKKTK

SEQ ID NO: 8995 - protein, 931 aa, Zea mays
  Clone ID: TF_UC-ZMFLB73179F11_FLI.pep
MEAEAAAAVVASSASASASAGRSRPSSSAAQVTSNSAVRAGEENAASLYVLSVIDSLKKRITADRLTYIKNRIGENKTNISSYTQRTYNLSKNRQISTSKGTDSASNLLTKRQDDALCTLHSLDIIPVDKDGGTFQDESPFSSSNVMFGGNLGPKNAIIRPIKLPEVPKLPPYTTWIFLDRNQRMTEDQSVLGRRRIYYDTSCGEALICSDSEDEAIEDEEEKKEFKHSEDHIIRMTVQECGMSDAVLQTLARHMERAADDIKARYEILHGEKTKDSCKKGTEHNVKVEDLYCDKDLDAALDSFDNLFCRRCLVFDCKLHGCSQDLVFPTEKQPAWSGVDDSVPCGIHCHKLASEPDAAAGADHMLFDVEEPTHSSDNVMNQPGSNRKKNGSSGRKTKSQQSESSSTARVISESSDSEVHPISNKSPQHSPSPSKVKIGPKGGIRKITNRRIAERILMSVKKGQREMASSDSNFVSGYLLARDMKLRSDTRNGNKELIVSSQQSSPSTRSSKKKSTPQIGNSSAFAEAHNDSTEEANNRHSATDGYDSSRKEEFVNENLCKQEVYLRSWKAIEQGLLVKGLEIFGRNSCLIARNLLGGMKTCKDVFQYMNYIENNSASGALSGVDSLVKGYIKGTELRTRSRYFRRRGKVRRLKYTWKSAGYNFKRITERKDQPCRQYNPCGCQSTCGKQCPCLSNGTCCEKYCGCPKICKNRFRGCHCAKSQCRSRQCPCFAADRECDPDVCRNCWVGCGDGTLGVPNQRGDNYECRNMKLLLKQQQRVLLGRSDVSGWGAFLKNSVSKHEYLGEYTGELISHKEADKRGKIYDRENSSFLFNLNNEYVLDAYRMGDKLKFANHAPDPNCYAKVIMVTGDHRVGIFAKERILAGEELFYDYRYEPDRAPAWARKPEASGAKDDGQPFNGRAKKLAQNNRG

SEQ ID NO: 8996 - protein, 931 aa, Zea mays; identical to SEQ ID NO: 8995
  Clone ID: TF_ZmC12902_2.pep

SEQ ID NO: 8997 - protein, 249 aa, Zea mays
  unsure (1)..(249): unsure at all Xaa locations
  Clone ID: TF_ZmC3767_6.pep
QLTSMALVQVRFTRAEAPTTISELPGLVCDDISGGQENIPIPATNLVDDPPVPPSGFKYLKSLQIPKDIKIPSSIIKTASKGWGVRTWDTILPGAPICEYTGXVLRRTEDLDGSQNNYCFDIDCLQPMRVLDGREXRAGSEMHLPNLHPENDSDAHPAPEYCIDAHSIGNFARFINHSCQPNLFVQCVLSSHNDVKLAKVMLFAADTILPLQELSYDYGYRLDSVVGPDGKIVKLACHCGAPDCRKRLY

SEQ ID NO: 8998 - protein, 448 aa, Zea mays
  unsure (1)..(448): unsure at all Xaa locations
  Clone ID: TF_700203210_FLI.pep
MLMEEECVEAPSYIHIDSNAFSYRKHKSQTEEDIAVCECQYDILDPESPCGDRCLNLLTNTECTPGYCRCGVYCKNQRFQKCQYARTRLVRTGGRGWGLVADENIMAGQFVIEYCGEVISWKEAKRRAQAYETQCLKDAYIIYLNADESIDATRKGNLARFINHSXEATYLWEDDDDRFSVENIPLYDSADDEPTSINKEILVSSDGMVTQYSNISRVQSTENPGNTGTNEFAPIIVDELTTSSNGLAPMNVEPLTVSSNEFTPSNAMPMVARLVENGSTGYSAQDTHDASQNSAPKAANHANQTGPQNNSNHSTLVPVKPAPKRRGRKPKRVVHKQLDIPDICDRLTSSVACEEILYCEEVKNHAVSEIDALYDEIRPAVEEHERDSQDSVSTSLAEKWIEASCRKYKAEFDLYAAVLKNVASTPLRSKDDVGPREQNGLKYLENGS

SEQ ID NO: 8999 - protein, 696 aa, Zea mays
  Clone ID: TF_ZmC3767_4.pep
MANMDSVVVMEVAPVPIPTFMDATPLNPPLPLVVEELVLRRSARYLNRPTRPNYADQEPPKNPGGRGRGKRKRDEEKPELAAQQGTKTPGRNDSNVEAGERKPMPVTAAVPACCAGVAAEDDATPTGKSAKLRVKETLRAFNSHYLHFVQEEQKRAQAAIQEIEAKGGLKRQTKGGKKKSSKQEAEAEEKEKRPSKRPDLKAITKMQEMNAVLYQEKTIGHLPGLDVGDQFYSRAEMVVLGIHSHWLNGIDYMGMKYQGKKEYANLTFPLATCIVMSGIYEDDLDKADEIIYTGQGGNDLLGNHRQIGSQQLKRGNLALKNSRKNGNPVRVIRGHLSKNSYTGKVYTYDGLYKVVDDWVQNGVQGHVVFKFKLKRLEGQPSLTTSEVRFTRAEAPTTISELPGLVCDDISGGQENIPIPATNLVDDPPVPPSGFTYLKSLKIPKDIKIPSSIIGCDCEGDCASNKNCSCAQRNGSDLPYVSYKNIGRLVEPKAVVFECGANCSCNHDCVNRTSQQGLQYHLEVFKTASKGWGVRTWDTILPGAPICEYTGVLRRTEDLDGSQNNYCFDIDCLQTMKGLDGREKRAGSEMHLPNLYPENDSDAPPAPEYCIDGSSIGNFARFINHSCQPNLFVQCVMSSHNDVKLAKVMLFAADTILPLQELSYDYGYRLDSVVGPDGKIVKLPCHCGAPDCRKRLY

SEQ ID NO: 9000 - protein, 152 aa, Zea mays
  unsure (1)..(152): unsure at all Xaa locations
  Clone ID: TF_jC-zmXLIB3526P036bd01b1.pep
LTFGKSKIHGFGVFAKVAHKAGNLMVEYLGEIVKPPFSNTKKRQIYNSLVGAGTYLFRINNKRVLNAIRVESLARLINNXCKPNCFXRAITIFGNKHIIIFAKRDINPWEKLTYNYRFFSSDKQLPCFWGFPKCRGVFNDFKAKKHPVKIQV

SEQ ID NO: 9001 - protein, 576 aa, Zea mays
  unsure (1)..(576): unsure at all Xaa locations
  Clone ID: TF_ZmC7397_2.pep
PLASSFRLPPARSLPSGTSSVQSSELGSVYSSSSLVDPECLKFWPSCYCLLFHSRRITRVLMEEECVEAPSYIHIDSNAFSYRKXEHLTEEDIAVCECPPDFLGPESPCGDRRLDLNPPNPTQSTXGLRANRTRPKKKSRFQKCQYARTRLVRTGGRGWGLVADENIMAGQFVIEYCGEVISWKEAKRRAQAYETPSASDAYIIYLNADESIDATRKGNLARFINHSCQPNCETRKWNVLGEVRVGIFAKQNIPFGTELSYDYNFEWYGGVMVRCLCGAASCSGFLGAKSRGFQEATYLWEDDDDRFSVENIPLYDSADDEPTSINKEILVSSDGMVTQYSNISRVQSTENPGNTGTNEFAPIIVDELTTSSNGLAPMNVEPLTVSSNEFTPSNAMPMVARLVENGSTGYSAQDTHDASQNSAPKAANHANQTGPQNNSNHSTLVPVKPAPKRRGRKPKRVVHKQLDIPDICDRLTSSVACEEILYCEEVKNHAVSEIDALYDEIRPAVEEHERDSQDSVSTSLAEKWIEASCRKYKAEFDLYAAVLKNVASTPLRSKDDVGPREQNGLKYLENGS

SEQ ID NO: 9002 - protein, 910 aa, Zea mays
  unsure (1)..(910): unsure at all Xaa locations
  Clone ID: TF_ZmC13490_1.pep
ASVPPLPPRAAWVFCDDCQKWRCIPAELADVIGETNCRWTCKDNGDKTFADCSIPQEKSNAEINAELDLSDASADEADNGGSNSKACKPPSWTLVRSNLFLHRNRRTQSIDESMVCNCKPPQDGRMGCRDGCLNRMLNIECVKRTCPCGEQCSNQKFQRRSYAKLRWFHSGKKGYGLQLQEDVTEGRFLIEYVGEVLDITSYESRQRYYACKGQKHFYFMALNGGEVIDACTKGNLGRFINHSCSPNCCTEKWMVNGEVCIGIFALRSIKKGEELTFDYNYVRVSGAAPQKCFCGTAKCRGYLGGDISIVDTIITQDDTEADHFEQMVVDKDSKELLGPNESDSDGSHPNISEPEFSIQGEDLHDCSAAKVELDLLEGTRGTSLETSEPEHPLEAWSPPEDEDVIRTPVHVSRTFESSLQKFSVHDTQSSDLLRKTANSMEGSKAPNITNGSTLGSDFRGNXCLLSDLLREKNLKQHKNQKRQPSSPIDNEHILGVEGTLNSLLDVDGGISKRKDATKGYLKLLVVTAAEDGSAGGTSKSLRDLSLILEALLKTKSHSVLLDIINKNGLQMLHNILKQSRGIFHRRPIIRKLLKVLEFLAQKGILTSEHINGGPRFAGVESFRDLMLSLTRHSDIQVQQIARSFRDRWIPPNNARSEPTEYPHTSTFVHDIQGTNTVWSSARRKRKSRWDYQPDEHYKMPGLKIQKVCSGHGEFDVQFGFMKNKLKRNQGANNYHNDVLGMGSSTEGEDDEAPPPGFESQLDRRPAQLSIGSEVAPGLCMERYQSSLSISYGVPVTLVQHFGTPESEGGQCHKKWKVAPGVPFSPFPPLPPYPRGNPCPSTSSSQMFQHDGTPQVKHNNSGQRGRIMGRDGRVHRSWRNESRTKWQYHHQGRRFSSTHHRFERSEPARPQ

SEQ ID NO: 9003 - protein, 148 aa, Zea mays
  Clone ID: TF_LIB3075-013-Q1-K1-F1.pep
CCSGCFGDCLAEPLPCACARETGGDFAYTRDGLLKEGFLDACVSMLREPLKQPHFYCKGVCPIEQIMKGVSSAKPDACKGHLIKKFIKECWIKCGCTRNCGNRVVQRGITRKLQVFLASRKKGWGLRSAENLPRGAFVCEYVGEILTN

SEQ ID NO: 9004 - protein, 358 aa, Zea mays
  unsure (1)..(358): unsure at all Xaa locations
  Clone ID: TF_ZmC3752_1.pep
LWKLHENGPPNSTTHQQAHLVLPPNGCTHDLSDISKGXERLSISAVNEFGSENCLPSFYYIPRNLVSQDSYVNSVETIGDKDCCSDCSGNCLYASEPCACARKTGGEFAYTRDGLVRTKFLDECISMTPRPEKHNMFFCKSCPLESIRNEPSPELCRGHIIRNFIKECGSKCGCNAQCGNRVVQRGITCNLQVFSTREGKGWGLRTLDELPKGAFVCEYVGELLTNTKLHEMTTQNMHNARYSVLLDAGWGPDGVLKDEEALFLDATFCGNVGRFINHRCYDANLVEIPVEKETPDHHYYHFAFFTTKKVEAFEELTWDYGIDFDGDKHPVKSFECLCGSRYCRGRKHSRTRGKAASK

SEQ ID NO: 9005 - protein, 513 aa, Zea mays
  Clone ID: TF_ZmC7397_1.pep
MLMEEECVEAPSYIHIDSNAFSYRKHKSQTEEDIAVCECQYDILDPESPCGDRCLNLLTNTECTPGYCRCGVYCKNQRFQKCQYARTRLVRTGGRGWGLVADENIMAGQFVIEYCGEVISWKEAKRRAQAYETQCLKDAYIIYLNADESIDATRKGNLARFINHSCQPNCETRKWNVLGEVRVGIFAKQNIPFGTELSYDYNFEWYGGVMVRCLCGAASCSGFLGAKSRGFQEATYLWEDDDDRFSVENIPLYDSADDEPTSINKEILVSSDGMVTQYSNISRVQSTENPGNTGTNEFAPIIVDELTSSNGLAPMNVEPLTVSSNEFTPSNAMPMVARLVENGSTGYSAQDTHDASQNSAPKAANHANQTGPQNNSNHSALVPVKPAPKRRGRKPKRVVHKQLDIPDICDRLTSSVACEEILYCEEVKNHAVSEIDALYDEIRPAVEEHERDSQDSVSTSLAEKWIEASCRKYKAEFDLYAAVLKNVASTPLRSKDDVGPREQNGLKYLENGS

SEQ ID NO: 9006 - protein, 117 aa, Zea mays
  Clone ID: TF_ZmC113_2.pep
VIEYRGEQVRQRVADLREARYHREKKDCYLFKISEDVVIDATGKGNIARLINHSCMPSCYARIVTVSGDRSQIILIAKRDVSAGEELTYNYLFDPDESEDCKVPCLCKAPNCRGYMN

SEQ ID NO: 9007 - protein, 302 aa, Zea mays
  unsure (1)..(302): unsure at all Xaa locations
  Clone ID: TF_ZmC2742_1.pep
THAXEDEDPCIRLLSYCKKHRQPSAAERPSLESDPPEPIQVVQTDMASSSGCARTEPYNLHRRRGQKQPQVVATASLKRLYVENRPHIVSGYCQNRVGNTCGESIQPFGLSDAVQQEAIGNVSSMVEKYTIVKATFRKRLTFGKSKIHGYGVFAKVAHKAGDMMVEYIGEIVRPPISDTRERRIYNSLVGAGTYMFRIDDERVIDATRVGSIARLINHSCEPNCYSRAITILGDEHIIIFAKRDIDPWEELTYDYRFFSSDQRLPCFCGFPKCRGVVNDVEAEEQSAKIRVKRSELFEKSEK

SEQ ID NO: 9008 - protein, 767 aa, Zea mays
  Clone ID: TF_ZmC12356_1.pep
MNGPSNFMPTPEQDVLDVKPLRTLAPMFPASLGVNTFNHSTTPPLIFVTPSGQFQGGFGDWNNSAAKSFFAFSSKDARGGKADTFSDQNTGTGKAATFGDQDAFGSQNVFASDHSTGTGKAATFGDQDAFGSQNVATGVQDAAKGQTATDWTDVSANANPNGPIDAIAISAYRSTQPNVISLDDDDDDDDEPYAANKTSASGRKIKRPSHLSGYNVSDALVSDSSNSMKVKRPKSSHGKAAADNEHALLPPSEDPREIVEAVLMTFEALRRRHLQLDEAQETNKRADLKASAILMSSNIRANPGKRIGVVPGVEIGDIFYFRMELCIIGLHAPSMAGIDYMTAKFGDEDDSVAICIVAAGGYDNNDDDTDVLVYSGSGGNSKNSEEKHDQKLERGNLALERSLSRKNVIRVVRGYKDPGCLTGKVYIYDGLYRIHESWKEKTKSGIFCFKYKLLREPGQPDGVAIWKMSQKWVQNPLTRGSVLNPDLSSGAENLPVCLVNDIDSDEVPHHFTYTTQVEHLKPLSSVKPLQGCRCLSVCLPGDANCCCAQRNGGSLPYSSSGLLVCRKTMVYECGESCRCSFNCRNRVTQKGVRIHFEVFKTGNRGWGLRSWDAIRAGSFICEYVGEVIDDANINLNDIEDDYIFQMSCPGERTLKWNFGPELIGEQSTNVSADSFETLPIKISAKRIGNISRFMNHSCAPNVFWQPVQFDHEDDHRPHIMFFALKHIPPMTELTYDYGDVGADPSGVRSPRAKNCLCESSNCRGFFI

SEQ ID NO: 9009 - protein, 163 aa, Zea mays
  Clone ID: TF_ZmC2742_3.pep
LTFGKSKIHGYGVFAKVAHKAGDMMVEYIGEIVRPPISDTRERRIYNSLVGAGTYMFRIDDERVIDATRVGSIARLINHSCEPNCYSRAITILGDEHIIIFAKRDIDPWEELTYDYRFFSSDQRLPCFCGFPKCRGVVNDVEAEEQSAKIRVKRSELFEKSEK

SEQ ID NO: 9010 - protein, 610 aa, Zea mays
  Clone ID: TF_ZmC3477_1.pep
GGNFPASSNGVLYSGKRIIGECDATRISAYKTRSSISLKDGDDDPYSGNQSLASERKPRRGRPPGSGRDGSNGKLKRPKPTYKNFVAGKELVFLSSTSDPRDIVESVHMTFEALRRRHLQMDETQDASRRADLKAGAIMMASNIRANSGKRVGTVPGVEIGDIFYFRMELCVIGLHAPSMGGIDYMTTKFGKDEDSVAICIVSAGGYENEDDDTDVLVYSGQGGNNRNTEERHDQKLERGNLALERSLHRKNEIRVVRGFKDPFCLTGKIYIYDGLKIHESWKERTKYGVNVLLQVLLREPGQRDGAALWKMVTRRWDNPATRGRVLLADLSSKAEILPVCLVNEVDHEKGPVHFTYTNQVKYLRPLSSMKKLQGCGCQSVCLPGDASCACGQHNGGDLPFSSSGLLSCRKPIVYECGESCNCSTNCRNRVTQKGSRLHFEVFRTTNRGWGLRCWEPIRAGSFICEYAGEVIDELKFNLNDSEDDYIFQTVCPGEKTLKWNYGPELIGEVSTYVSPDEFEPLPVKISAKNMGNVSRFMNHSCSPNVFWQPVQYDHGDDGHPHIMFFALKHIPPMTELTYDYGVAGAESSGSGSRRTKNCVCGSQNCRGLF

SEQ ID NO: 9011 - protein, 343 aa, Zea mays
  Clone ID: TF_ZmC12905_1.pep
NGHSKGKQTSIFIYDGLYEVLECWQEGPKGERVFKYKLQRIAGQPELALHAVKATRKSKVREGLCLPDISQGRERIPICVINTIDDMKPAPFKYITEVIYPDWYEKEPPKGCNCTNGCSDSITCACAVKNGGEIMFNFNGAIVEARPLIYECGPSCRCPPTCHNRVSQHGVKIPLEIFKTGKTGWGVRSLSSISSGSFICEYTGELLEDEEAEKRENDEYLFDIGHNYHDKELWEGLKSVVGLGSATSSSETMEGFTIDASECGNVGRFINHSCSPNLYAQNVLWDHDDMRMPHVMFFAVENIPPLQELTYHYNYKIGEVYINGEEKVKHCYCGASDCCGRLY

SEQ ID NO: 9012 - protein, 60 aa, Zea mays
  Clone ID: TF_uC-zmromo17102d10a1.pep
NCYPRIMSVEHDESRIVLIAKKNVCAGDELTYDYLFDPDEGDEREVPCLCQTANCRKFMN

SEQ ID NO: 9013 - protein, 253 aa, Zea mays
  Clone ID: TF_ZmC3531_1.pep
PRPVKKKKGRNISSETSQKVKPVISCPESDGCARASINGWEWRNWARNATPSERARVRGYHVRTILSASNDNVWKNSQAKVSSARTNRVKLRNLLAAAEGSELLKITQMKARKKRLRFQRSKIHDWGLVALESIEAEDFVIEYVGQLIHRRVSDIRESQYEKSGIGSSYLFRLDDDFVVDATKRGGLARFINHSCEPNCYTKVITVDGQKKIFIYAKRRIYAGEEITYNYKFPLEEKKIPCHCGSRRCRGSMN

SEQ ID NO: 9014 - protein, 742 aa, Zea mays
  unsure (1)..(742): unsure at all Xaa locations
  Clone ID: TF_ZmC204_1.pep
EPGESVTDDRILGARMTKASCVSSVPRKYEVVEEELSVXDLGELQRQLIVALPEVYSEKFVSKKNGTENLELPEVKDYQPRKVAGDEILEQEVYGIDPYTHNLLSDIMPADLELSPTDKHIFIEELLLNTLNKQVRHFTGSGNTPMTYNLRPVIEEIQRSAEDNGDRRTSKMCLGMLKTMRNRSEQNFVAYRKGLGVVCNKKGGFGVDDFVVEFFGEVYPSWRWYEKQDGIKHIQNNSEDQAPEFYNIMLERPKGDGDGYDLVFVDAMHKANYASRICHSCNPNCEAKVTAVNGKYQIGVYTLRPIAEGEEITFDYNSVTESKEEHEASVCLCGSQVCRGSYLNFSGEGAFEKVLMEFHGVLDRHSLLLQACETDSVSQQDLIDLGRAGLGTCLLAGLPGWLVAYTAHLVRFIYLERQKLPDEILRHNVDEKRQFLIEINMDSEKNDAEVQAEGVLNSRLQQIVHTLDKVRYVMRCIFGDPKNAPPPLVRLSGKSLVSAIWKGDSSIVAELIQSMEPHVEEEVLSDLKAKIRAHDPSESEDIEGGIRNSLLWLRDELRTLSCTYKCRHDAAADLIHLYAYTKCFFRVRDYKTVKSPPVHISPLDLGPKYADKLGPGFQEYCKTYPENYCLAQLIYWYSQNSEPESRLTRARKGCMSLPDVSSFYVKSAKPSQERAYGNRTVRFMLSRMEKQAQRPWPKDRIWVFKSDPRFFGSPMMDTVLNNSPLDKEMVHWLKTRPNVFLG

SEQ ID NO: 9015 - protein, 543 aa, Zea mays
  Clone ID: TF_ZmC1758_2.pep
SVVKKRRPRSSELVRVSSLGVQDQIYFRDLVRRARITFECPRGLLLRDDERAESLGLAGAAGFGVARDRRRARADMRAAALMADHDLWLNRDRRIVGPMPGISVGDAFFFRMELCVLGLHGQVQAGIDYVSAGRSASGEPIATSIIVSGGYEDDDDHGDVHSARGHGGRDPNLHKHCVDQKLEGGNLALERSMAYGIEIRVIRAVKSRRSPVGKVYFYDGLYKVVDYWLDRGKSGFGVYKYRLLRIEGQEPMGSVNYRVAEQLKVDVFAIRPTGYLSFDISMGRDTLPVALYNDVDDDQDPLLFEYLTRPIFPTSAVQGKFAEGGGGGGCDCAEICSIGCNCAGRNGGEFAYNKTGTLLRGKPLVYECGPYCRCPPSCPNRVSQKGLQHRLEVFRSRETGWGVRSLDLIKAGTFICEFSGIVLTHQQSEVMAANGDCLVRPNRFPPRWLDWGDISDVYPDYVAPDHPVIPELNFAIDVSRARNVACYFSHSCSPNVFIQFVLFDHYNVSYPHLMIFAMENIPPLRELSIDYGMVDEWTGQLTM

SEQ ID NO: 9016 - protein, 585 aa, Zea mays
  Clone ID: TF_ZmC487_1.pep
MPDLSTSYLPPFPELSLDAGALAVDHAGNAAAAASADAASAYASSSASVGSGVDDLVIPAECRWKGHVRTFDMAGAGAVTTCPAARRGGGKKLSLIPSLEPARTQASASAPTLEERVSEWAAKKAAAGVPTHHCVLPFLTGAPMAVECRLCSKIIYVGEEIKCSVKKCPQMFHLKCVAEDTSNFTVESFRCPQHGCMVCKQKMFFWRCGRCTVAAHTKCAPWPVVHLKNDQGSAICWRHPSDWLLQNKNADFTNSVEEVFCRLPLPYVNEDLNIDSIIRDYAEAVYKPPPYTSIRRNVYLIKKKRTGVRVDIGCTNCRADSTCKEDCECRGLSMSCSKNCRCSDLCTNRPFRKDKKIKIVKTKRCGWGAVALEPLERGDFVIEYVGEVIDDATCEQRLWDIRRRGDKNFYMCEISKDFTIDATFKGNVSRFLNHSCEPNCKLEKWQVDGETRVGVFASRSIEVGEPLTYDYRFVHFGEKVKCHCEAVNCQGYLGSQIKNPIQSILATVAPQVQLREYSPMHHEAPRLKPINHLLPWTNCIEVSFNLRSKRKIDRLCWARKKKRTSLVPSSTSMPASPSEVPAADF

SEQ ID NO: 9017 - protein, 132 aa, Zea mays
  Clone ID: TF_ZmC3614_1.pep
APPGEFLTTEEARRRHKVYDELASGGKLCPALIVIREHLPSGKACLRVNIDATRVGNVARFINHSCDGGNLHPVLVRSSGLLLPRLCFFAARDIVEGEELTFSYGDARVRPKGLPCFCGSSGCSGVLPSEET

SEQ ID NO: 9018 - protein, 276 aa, Zea mays
  Clone ID: TF_LIB3245-301-B3_FLI.pep
ASACRALRAAVTAVTARRAGDAARGLEPLPIPFRNYVDSKPYAYFLYTPFSLTRLAPGASAPSAQPWGAAWTRPPRPTWPRPNLDGLPSAVYGCACAAAECGGTQCACADVEADAAGSGLEAGMGSLTECGDVCACAPSCGNRRTQRGVAVRLCVVRHLHKGWGLHAAEALSCGQFVCEYAGEFLTTEEARRRHKVYDELASGGKLCPALIVIREHLPSGKACLRVNIDATRVGNVARFINHSCDGGNLHPVLVRSSGLLLPRLCFFAARDIVEGE

SEQ ID NO: 9019 - protein, 253 aa, Zea mays
  Clone ID: TF_ZmC1285417_1.pep
ICVINTVDDVQPGPFQYTTRIRYPFGLTEKHNQGCDCTNGCSDSESCACAVKNGGEIPFDLSGAILNEKSVIFECGSSCKCPPSCRNRVSQHDTKIPLEVFRTTKTGWGVRSLWSIPAGSFICEYIGELQHQKAADKRRNNNYLFDVGLNYDDENVSSVLLSNVSGLNSSSSCSQAMEDVRFTIDASVYGNIGRFISHSCSPNLQAQNILWDHGDKRMPHIMFFAAETIPPLQELTYDYNNSEIDRVQGVNCE

SEQ ID NO: 9020 - protein, 643 aa, Zea mays
  Clone ID: TF_ZmC499_1.pep
RPSAAASGPACVLSVTATNGLGGLGLGLPGAHYLQSALVIRCMSCNSNFLNTDLLYPHIVSDHSQQFRLLDVPQRPSGQSAQQTEGMSGLPLYDSHNVEDENGSQKFVCRLCGLKFDLLPDLGRHHKVAHMVSGAVGHIPLGRGKYQLNRGRHYYSAFKKSLRPTSTLKKSSSSGIDKNLKFQISGLTSQIVESETSSLGKLQDFQCSDVAQTLFSKIQKTRPHPSNFDVLSVARSVCCKTSLLAALEVKYGPLPENIFVKAAKLCSDNGVQIDWHQEGFICPKGCKSRYNSNALLPMQLTAVDFLEAPVDSRNDDEMWGMEEYHYVLDSKHFGWKPKNESVVLCEDISFGREKVPIVCVIDVDAKDSLGMKPEELLPHGSSLPWEGFHYITNRVMDSSLIDSENSMPGCACSHPECSPENCGHVSLFDGVYNSLVDINGTPMHGRFAYDEDSKIILQEGYPIYECNSSCICDSSCQNKVLQKGLLVKLELFRSENKGWAIRAAEPILQGTFVCEYIGEVVKADKAMKNAESVSSKGGCSYLFSIASQIDRERVRTVGAIEYFIDATRSGNVSRYISHSCSPNLSTRLVLVESKDCQLAHIGLFANQDIAVGEELAYDYRQKLVAGDGCPCHCGTTNCRGRVY

SEQ ID NO: 9021 - protein, 121 aa, Zea mays
  Clone ID: TF_ZmC181406_1.pep
EFVMFDRSKLSRVDWKYIIIDEAQRMKDRDSVLARDLDRYRCQRRLLLTGTPLQNDLKELWSLLNLLLPEVFDSSKAFSDWFSKPFQRDGPTHNEEEDDWLETEKKVIIIHRLHQILEPFM

SEQ ID NO: 9022 - protein, 217 aa, Zea mays
  unsure (1)..(217): unsure at all Xaa locations
  Clone ID: TF_LIB4172-030-R1-L1-E12.pep
PVSVELLDFKLLVQIKDYNTKHRALLTGTSFHTNLNELLMLIHFLEGERCGSITDLQEEVKDINQDNQIEKLHGMLNPHLLGRFKNDVMKELPAKKEWILQRELTRXHKEYYKAILTKNYEQLARRNGGHTCLINVGMEVHTLCCHGFMIDEPDLEPANPQXGLKTLLYSSGKMQLLHKMMEKLXXQXHRSLIYSQFHHMLDLLEDYLNYRKWTYER

SEQ ID NO: 9023 - protein, 963 aa, Zea mays
  unsure (1)..(963): unsure at all Xaa locations
  Clone ID: TF_ZmC170_1.pep
IYDWIKSTGTIRVDPEDEKRRAQRNPMYQVKTYKNLNNKCMELRKVCNHPLLSYPFLNHGKDFMIRSCGKLWNLDRILIKLHKSGHRVLLFSTMTKLLDIMEDYLQWRRLVYRRIDGTTSLEDRESAIVDFNRPGSDCFIFLLSIRAAGRGLNLQSADTVVIYDPDPNPQNEEQAVARAHRIGQTREVKVIYMEAVVDNISSYQKEDELRNGGSGDLEDDLAGKDRYMGSIESLIRNNIQQYKIDMADEVINAGRFDQRTTHEERRMTLETLLHDEERYQDSVHDVPSLQEVNRMIARTESEVELFDQMDEDFDWTGDMTKHHQVPKWLRVNSNEVDAVVASLSKKPSRNMSSGGIALDTNETLEXKRGRPRGTGKYSIYREIDDEDLEESDEDSEERNTASLPGEGEVGEFEDEEDNDDSVPDNKDESEEEEPMNDDVYEFTEGLRGRKANRMEEAGSTGSSSGSRRLPPPVPSSSSKKIXSLSALDARPGTLSKRTPDDLEEGEIAMSGDSHMDLQQSGSWNHERDDGEDEQVLQPKIKRKRSIRLRPKPNAEKQEDRSGEGAFPQRAARQQDAVHPIVKQKRNMSSRKVSPASRSGKLSHLSGSGEGSAELSKENWSSKAIDSTAPEFGGTKMSDSMQRKCKNVISKLWRRIDKEGHQMIPNISSWWRRNENSSFRGPAGSTLDLQKIEQRVDGLEYGAVTEFIADMQQMLKSVVQHFSYRHEVRIEAETLHNLFFNIMKIAFPDSDFMEAKNAMSFSNPGSGAAAAPSSSKHAAPSLKRSRASASASASEAEQQHGSGHSSRHNQPSEAVPPSRSHSSRSERDPRHGGSRDQHLQDGAAGLLHPSDMFIVKKKRQERARSGIGSPSSSGRGAGPLSPANPGRPGPAPSPRGARTPFQRDPPPHPSQQSMHSAGSGWGSGGAHSDHQAGASSSAPGIGDIQWAKPAKRLRTDRAGRGGRA

SEQ ID NO: 9024 - protein, 307 aa, Zea mays
  Clone ID: TF_ZM4624.C5.o1.fg.pep
MGGPLTAAGGRGDGGAKAVEPLRPPPPPDPKTMARWYQLEALERAVRGNTLAFLETGSGKTLIAVMLLRAYAHRVRRPDSRRFAVFLVPTVVLVGQQARVVEQHTDLVVKQFCGEMGVDFWDAATWRSQLEDGEVLVMTPQILLDNLRHSFFRLQDIALLIFDECHHARGNTPYACIFKEFYHPQLNSSASDPLPRIFGMSASLIYSKDLNPHNYSKQISEIENLMNSKVYTVDSESALSEYIPFASTKIVDFDDSNISSELHANILSCLNRLNKKLSGKTRHGGQFGVRYKGEVGTFGMPTEGNRD

SEQ ID NO: 9025 - protein, 226 aa, Zea mays
  unsure (1)..(226): unsure at all Xaa locations
  Clone ID: TF_ZmC504615_1.pep
GYPPGRPGLKDNVTMINSETXKALLWLAKLSPKNXLEMEFVGLTRPVLDTRATTGKGAHPYYKIFQAFGLVRKIEKXQRHVSSDTLNVFVWGDHKKPSAHNLAWDYDIVITTFSRLSAEWGPQKRSPLKQIHWFRVILDEGHTLGSSLALTNKLQMAVALVASNRWILTGTPTPNTPTSQVAHLHLMLKFLHDETYGQNYQSWDSGIHRPFEAQMEEGRAHPVPLL

SEQ ID NO: 9026 - protein, 520 aa, Zea mays
  Clone ID: TF_ZmC9159_1.pep
FGTRVLLTGTPLQNNIGEMYNLLNFLQPTSFPSLSSFEEKFNDLTTAEKVEELKKLVAPHMLRRLKKDAMQNIPPKIERMVPVELTSIQAEYYRAMLTKNYQVLRNIGKGGAHQSLLNIVMQLRKVCNHPYLIPGTEPESGSPEFLHEMRIKASAKLTLLHSMLKILHKEGHRVLIFSQMTKLLDILEDYLTLEFGPKTFERVDGSVSVAERQAAIARFNQDKTRFVFLLSTRSCGLGINLATADTVIIYDSDFNPHADIQAMNRAHRIGQSNRLLVYRLVVRASVEERILQLAKKKLMLDQLFVNKSESQKEVEDIIRWGTEELFGSSDSVDGKDSSEAPGSVADVEFKHRRKTGGLGDVYEDKCIGGSTKLVWDENAILKLLDRSNLPSSVAESTDGDLDNDMLGTVKSIDWNDELNDHPGTNEDIAPIDNDGSELASESKQGATNRLEENEWDKLLRVRWEQYQIEEEASLGRGKRLRKAVSYRETFATLPNEALSEGSDEGDEPKREYTAAGLVLK

SEQ ID NO: 9027 - protein, 217 aa, Zea mays
  unsure (1)..(217): unsure at all Xaa locations
  Clone ID: TF_LIB4172-009-Q1-L1-B9.pep
MFKEMIVHRXNVLLTTYEYLMNKHDRPKLSKIQWHYIIIDEGHRIKNASCKLNADLKLYRSSHRILLTGTPLQNNLEELWALLNFLLPNIFNSSEDFSQWFNKPFESNGDNSPDEALLSEEENLLIINRLHQVLRPFVLRRLKHKVENELPEKIERLVRCEASAYQKLLMTRVEENLGGIGAVKVRFVHNSVMELXNIXHHPYLSQLHXERDEGYLP

SEQ ID NO: 9028 - protein, 193 aa, Zea mays
  Clone ID: TF_20337019.pep
TVQAMAFLSHLAEDKNIWGPFLVVAPASVVNNWAEELIRFCPDLKILPYWGPERMILRKNINPKRLYRRDASFHILITNYQILVNEEKLLRRVKWQYMVLDEAQAIKSSSSQRWKTLLSFSCRNRLLLTGTPIQNNMAELWALLHFIMPTLFDSHEQFNEWFSKGIEGHAEHGGALNEHQLSRLHAILKPFML

SEQ ID NO: 9029 - protein, 119 aa, Zea mays
  unsure (1)..(119): unsure at all Xaa locations
  Clone ID: TF_LIB4978-050-A1-K1-E11.pep
PSTQKXKQIGRRYSIRRRLLLXGTPIQNRLQELRXLLNSLLPKXXHSSHXXEERXNAPFACDASLNDERXLLIIHXSHQAXRXPXLLRRNTDDLQNYLPAKTQAILTRDPSAWQKAHYQ

SEQ ID NO: 9030 - protein, 132 aa, Zea mays
  Clone ID: TF_ZmC137038_1.pep
RTRVDEGHRLLNKDSKLFGQRKDYNTKHRVLLTGTPVQNNLDELFMLMHFLEGESFGSITDLQEEFKDINQDKQIEKLHGMLKPHLLRRFKKDVMKELPPKKELILRVELTRKQKEYYKPSHENYDVPASRD

SEQ ID NO: 9031 - protein, 656 aa, Zea mays
  unsure (1)..(656): unsure at all Xaa locations
  Clone ID: TF_ZmC38421_1.pep
HSAPRHSTLVDVPGRELSRLRPILKPFMLRRVKIDVIAEMTKKKEEIVPCKLSSRQQVFYQAIKNKISLNELLAGSRGSLNDKKLLSLMNIVMQLRKVCNHPELFERNEGSSYFNFAEIPNSLLSPPFGELQDVHYAGKRNPIIFEIPKLVYEGIISNMENSGNICGFQNGYLNRLFNIFLPSNIYRSAIPEVSSSKESLLSSGAFGFTRLSNLCPVEASFLATASLFERLVFSVMQWNRNYTAEILDEFLDSEDTGIQSSQNDSTKVRAVARLLLSSTKAKPSLLRTKIGTGPIDGPYEALVLSHRDRLASNIRLLRSAYAFIPPARAPPINVWCADRNFAYKFTDEMYDPWAKKLFLGFARTSEFNGPRQPIAPHXLIQELNTDLPIIEPMLQLPYRIFGSSPPMSNFDPAKMLTDSGKLHTLDMLLRRLRAEGHRVLLFAQMTKMLDILEDYMNFRKFKYFRLDGSSAISDRRDMVRDFQNRNDIFVFLLSTRAGGLGINLTAADTVIFYEIDWNPTQDQQAMDRTHRLGQTKEVTVYRLICKDTIEEKILQRAKQKNAVQELVMKGKHVQDDHLMRQEDVVSLLIDDTQIAHKLKEISMQAKDRQKRRRAKGIKVDKEGDLTLEDLDDATAEAVDQDKTTSKKKHRAQKDQN

SEQ ID NO: 9032 - protein, 380 aa, Zea mays
  unsure (1)..(380): unsure at all Xaa locations
  Clone ID: TF_ZmC1082_1.pep
PRVRQNDLHELWSLLEFMMPDIFATGDVDLKKLLNAEDRELISQIKSILGPFILRRLKSDVMQQLVPKIQHVKFVVMGTEQSEAYKNAINEYRAACQARSAKSSDGISNNVAGLIPKRQISNYFTQFRKIANHPLLIRCIYGDKDVDRIXRLRYPKGAFGFQCSLERAIQELKNYSDFNIHQLLLSYGDVGTKGALKDEHVFASAKCQALGELLPSLANDGHRVLIFSQWTTMLDILEWALEIIGVTYRRLDGGTAVTERQTIVDTFNNDLSIFACLLSTRAGGQGLNLVGADTVIIHDMDFNPQMDRQAEDRCHRIGQQKPVTIYRLVTKDSVDENIYEIARRKLVLDAAILHSGAELDNSTDVPEKTMGEILASLLLV

SEQ ID NO: 9033 - protein, 645 aa, Zea mays
  unsure (1)..(645): unsure at all Xaa locations
  Clone ID: TF_ZmC38173_1.pep
DAWVKGGVLLIGYSSFRNLSLGKHVKDKNSANEITYALQCGPDILVCDEAHMIKNRRADITQALKQVRTQRRIALTGSPLQNNLMEYYCMVDFVREGFLGSTHEFRNRFQNPIENGQHTNSTSDDVKIMNQRSHILFEQLKGFVQRKSMNVVKNDLPPKKVFVITVKLSQLQRKLYKRFLDVHGFSSSGYSEKSHRSFFAKYQTLSQVWNHPGLLQMAKEQRGNLRREDAVENFMMDESSSDDNVENYLPNGEKQKDKADQQSKKSNIIMNEESNWWEELLDENTYMKADYSGKMTLLLDILSKSSELGDKVLVFSQSLTTLDLVEFYLAKLQINGKEGKHWKRGKDWYRLDGSTPSSDRQNLVEMFNDLENTRVKCTLISTRAGSLGINLHAANRVVLLDGSWNPTHDLQAIYRVWRYGQTKPVYAYPLMAHQTXNQFIYKRQVTKEGLAARVVDRQQVSRTISKEEMLHLFEFGEEELMEQNENGSTMIEKPSTSNTIKTSVPVPVDSLMLSLLSEQTRWISGYHEHEALLQENEEEKLTKEEQDLALSEWESLRKAASDPERKSSMSAVPTYPNPVRPLKPASRSRQLQQPKANSNNQKKCTNLTHLLTLRSHGTKAGCTTTCNECGQEISWETLNRDGRSR

SEQ ID NO: 9034 - protein, 953 aa, Zea mays
  Clone ID: TF_ZmC262_6.pep
MSQSPGGREGIYYSRQRKPERNGSVFTPIAAMYSSGHALPVANRSHGLVFGSLSKDWDDIRQRKDQLVNFLASLERASGDSAAAGKIEDSKLASPSVEPTEQKEKAAIIVLDSDDEDGNGSGNSKLASETNKELGTSGLINNIAERMAFNGSQAFGTVHTYGDKNTQIVPYGQCSALVNQFPLQTSWQPSIQFERVVLQKRPEEQRMQDLVAASIAEKRAETQVFLSLPTEKKRRRSDPSLHASDDTATVPKQRKSKGATVVAAANLSLVSQQTATSPEPDMVIEEEEKHKNESDGLDDYWKDFALAVESTKLDEVDEAAIEKEDNGKMEDIDCNHDIRIHEDLGHVCRVCGMIVRRADSIIDYQWKKASRRRTNGYGGHSKDADEIDCGTVKLSEDFIVADIAIHPRHARIMKPHQLEGFNFLVKNLIGDKPGGCILAHAPGTGKTFMLISFIQSFMARYPSARPLVVLPKGILGIWKTEIKRWQVQDIPVYDFYSVKAEKRVEQLQILKSWEDKMSILFLGYKQFSTIVTDDGGSNVTAACRDRLLKVPNLLILDEGHTPRNRETNVLESLNRVETPRKVVLSGTLFQNHVEEVFNILNLVRPKFLRMESSRPTARRIMSQVEIVGRSSKGLADGAFTKAVEETLLNDENFKRKAHVIRGLRELTKDVLHYYKGDILDELPGLVDFSVFLKLTPKQKDIIYKLEAHDRFKRNAVGSALYIHPCLSELSEVNAEHRANTFRDDLVDSLVDSITVRDGVKANFFMNILSLANSAGEKVLAFSQYISPMIFFERLLVKKKGWHVGKEIFMISGDTSQEDRELATDHFNNSADAKIMFGSIKACGEGISLVGASRVVILDVHLNPSVTRQAIGRAFRPGQQKKVFVYRLVAADSDEVKVHETAFKKEVIPKLWFEWSEHCTTEDFKLGQIDIDDSGDELLDTKAIRKDIKALYRR

SEQ ID NO: 9035 - protein, 837 aa, Zea mays
  Clone ID: TF_ZmC2934_1.pep
VLAWHVRARQRISRQEKNRINLLKTGDQEAYMRMVEESKNERLKMLLDKTNELLEGIGKAVQRQKDAEHVSKPEGGSEVPKGSESEDCSQISGIKSESAEESTSDDDGDLPGPADESKFNAGRRLDVTVHSIEEKVTEQPSALEGGELRPYQLEGLQWMLSLFNNNLNGILADEMGLGKTIQTIALIAYLLEKKEVAGPHLIIAPKAVLPNWSNEFKTWAPSIGTILYDGRPEERRLLRDKNFDGEQFNVLLTHYDLILKDKKFLKKVHWHYLIVDEGHRLKNHECALARTLVSGYKIRRRLLLTGTPIQNSLQELWSLLNFILPNIFNSSQNFEEWFNAPFACDVSLNDEEQLLIIHRLHQVLRPFLLRRKKDEVEKYLPVKTQVILKCDMSAWQKAYYEQVTSREKVALGYGLRKKALQNLSMQLRKCCNHPYLFVEHYNMYQREEIVRASGKFELLDRLLPKLQRAGHRVLLFSQMTKLLDVLEIYLQMYNFKYMRLDGSTKTEERGRLLADFNKKDSEYFMFLLSTRAGGLGLNLQTADTVIIFDSDWNPQMDQQAEDRAHRIGQKNEVRVFVLVSVGSIEEEILDRAKQKMGIDAKVIQAGLFNTTSTAQDRRALLQEILRRGTSSLGTDIPSEREINRLAARNDEEFRLFEKMDEERRLRENYKSRLMDGNEVPNWVFANDNETLRKKTVADEFRNIIVGSKRRRKEVVYSDSFGDQWMKSDEGFEEIAKMTPRVKRTAYSPDIQVEYNERRKRPKSVENSADGASNPTRTPDKGRAGVSSYSKDETEDDGEDEVITSGLQKGNSFTWKTLGRKRSSHLSSSSDSKGRPPF

SEQ ID NO: 9036 - protein, 170 aa, Zea mays
  Clone ID: TF_19436653.pep
MDGICPEISIGSKRKKQRKPKKKNKPSNSEGGPLARVRWFRVVLDEAQTIKNYRTQVSRACCGLRAQRRWCLSGTPIQNKIDDLYSYFCFLKYEPYSKFSNFKYMIKHQITRDSVRGYKKLQAILRIILLRRTKETLIDGEPILKLPPKTIQLNKIDFTQEERAFYLTLE

SEQ ID NO: 9037 - protein, 579 aa, Zea mays
  Clone ID: TF_ZmC3777_1.pep
ELTKYDVVLTTYSIVSMEVPKQSNPDSDGEEKGKPDPYGAPVSSSGSKKRKASSSKKTKNKSVAESCLPEKPLAKVAWFRVILDEAQSIKNYRTQVARACWGLRAKRRWCLSGTPIQNAVEDLYSYFRFLRYNPYAVYKQFCTLIKIPISRNPNNGYKKLQAVLKPVMLRRTKATMLDGEPIISLPPKTVSLKTVDFTSEERGFYNTLEVESREQFKEYAAAGTVKQNYVNILLMLLRLRQACDHPHLVRGYDSCSSWMSSLEMVKKLPMERQHKLLICLQSCSAFCALCNDAPEDPVVTLCGHVFCNQCILEQLTGDDSVCPVSNCRVRLNTSSLFSRGTLECSLSKLASDFKSDDTCMEMIHAEKRPGMDSSYASSKLRAALDILLSLPKIDPTIDSKCSIGIESEKFDGKGISEQTDTKLTEKAIVFSQWTRMLDLLEVHLKASHVTYRRLDGTMSVAARDKAVNDFNMVPEVTVMIMSLKAASLGLNMVAACHVLMLDLWWNPTTEDQAVDRAHRIGQKRPVTVSRLTIKDTVEDRILALQEKKREMVASAFGEDKSGSRQTRLTVEDLNYLFMV

SEQ ID NO: 9038 - protein, 112 aa, Zea mays
  unsure (1)..(112): unsure at all Xaa locations
  Clone ID: TF_LIB3245-229-P1-N1-A10.pep
GVSEQQEGGQGLHXVFRPFLLTRLTSDVXKGLPPKTETLLKVGMPQMQKQHYRALLQKDSEVINAGGERTRLLNIAMHLLKCXNHSYLFQGAEPGPPYTTGEHLIENAGQMV

SEQ ID NO: 9039 - protein, 645 aa, Zea mays
  Clone ID: TF_ZmC10254_1.pep
DAWADAWADAWAKTLNPCWSAYNIADRRAPPVYVNLFTGQATTQFPSMTETVRGGILADAMGLGKTVMTIALILSNPRGEFSNCIKGDTRYLGDRATRGYTSTSSVRGGTLVVCPMSLLGQWKDELEAHSAQGALSVFVHYAGDKTSSLMLMAQHDVVLTTYGVLSAACKTECNSIFHRMDWYRIVLDEAHTIKSPKTKSAQAAYRLKSECRWCLTGTPLQNNLEDLYSLLCFLHVEPWCNAKWWQRLIQKPYENGDDRGLKLVRAILRPLMLRRTKETKDKIGNPILVLPPARIEVVECEQTDHERDFYEALFRRSKVQFDKFVAQGSVLNNYANILELLLRLRQCCDHPFLVISRADPKKYADLNQLAQQFLEGVQQSSSGRQNVVPSLAYVEGVVEEIRQGATMECPICLESASDDPVHEACAHRMCGECLVSSWRTPEGGPCPLCRRHISKSDLIILPAQSRFQVDAKNNWKDSCKVKTLVTMLESLQRKQEKSIVFSQFTSFFDLLEIRFTQKGIKFLRFDGKLSQKHKEKVLKEFSESQDKLVLMMSLKAGGVGLNLTAASNVFMMDPWWNPAVEEQAIMRIHRIGQKREVRVRRFIVKGTVEERMQQVQMRKQRMVSGALTDEEIRGARIEHLKMLFK

SEQ ID NO: 9040 - protein, 742 aa, Zea mays
  Clone ID: TF_ZmC13100_1.pep
DCKKMALAWMVSKENSSHCAGGILADDQGLGKTVSTIALIQKQRMEQSKFMFVDSDRLKSEALNLDEDDEGEQTVSNEPKKDQGACSLSTSAGTSAELFVNQPNNVVNKMVETKAERKKKAKVSTSSASTSRSMTRPAAGTLVVCPASVLKQWSNELTDKVSESAKLSVLVYHGGARTKDPRELAKYDVVVTTYTIVANEVPKQMADDDADQKNSEEPSASNKRKPSANMQTKAKKKKKKLKDSNFDLDSGPIARVRWFGVVLDEAQSIKNFRTVVARACCGLRAKRRWCLSGTPIQNAIDDLFSYFRFLKYDPYCTYNSFCTMIKHPIARDAINGYKKLQAVLKVVLLRRTKETVINGKPIINLPPKTINLNKVDFTQEERSFYLMLEERSRQQFKAFAAAGTLKQNYANILLMLLRLRQACDHPILVKGNQSEYGGDGSIEMAKKLPKEVVIDLLAKLEVGSTLCGLCNDTPEDAIVTICGHVFCYQCIHERITTDENMCPAPNCSRTLGLELLFSSGALKICISGKSSSAVASSSSDNESSSISQSSFVSSKIQAAIDILNSIIVMDPLTESYTMESSRSGLGPVKAIVFSQWTGMLDLLELSLNINCIQYRRLDGTMSLNLREKNVKDFNTDPEVRVMIMSLKAGNLGLNMVSACHVILLDLWWNPYAEDQAVDRAHRIGQTRPVTVSRLTVKDTVEDRILALQEEKRTMVNSAFGDDKAGGHATRLTVEDLRYLFRI

SEQ ID NO: 9041 - protein, 269 aa, Zea mays
  Clone ID: TF_ZmC31890_1.pep
LPKLWDCLTEFLRPVKTEDGIPEDDASIAQLGRSYEDKDPQSLINNIQVVRSISPHLAEPLRPQLLNLLPSILGCVRHPHVAVRLAAARCITSMAKSLTDDVMVLVIENVIPMLSDLSSVCARQGAGILLSLLVQGLAVELVPYAPFLVVPLLKCMSDPDGSVRQTVTHSFAALVPLLPLSRGASLPCGLSERLSSSAEDVQFLEQLLDNTQIDDFKLNIDLNVELRRYQQEGINWLAFLRRFKLHGILCDDMGLGKTLQASAIVASDI

SEQ ID NO: 9042 - protein, 1106 aa, Zea mays
  Clone ID: TF_ZmC14226_1.pep
MAKPVKYDDEEEISSSSAEEEDDQSAAAASGSGEEGDDDEEDAAALPTEEEEAEGEGQQEEEVDEEEIEAVTTGAGAEDGEDASAATAAEGEEESQSTEDDESVAKDKAIGAETDAVVGKREKTRLKEIQKLTQHKIREKLDTQKAAIDADMNYKGNGRLKYLLQHKEELAHFASASRTNYVYPPSWIKGKTHDSEEEEDEEYLKEEEDALAGAGGTRLVSQPSCIKGKMRDYQLAGLNWLIRLYENGINGILADEMGLGKTLQTISLLGYLHEFRGIAGPHMVVAPKSTLGNWMKEIQRFCPILRAVKFLGNPEERNHIRDNLLQPGKFDVCVTSFEMAIKEKSALRRFSWRYIIIDEAHRIKNENSLLSKTMRIYNTNYRLLITGTPLQNNLHELWALLNFLLPEIFSSAETFDEWFQISGENDQQEVVQQLHKVLRPFLLRRLKSDVEKGLPPKKETILKVGMSQMQKQYYRALLQKDLEVINAGGERKRLLNIAMQLRKCCNHPYLFQGAEPGPPYTTGEHLIENAGKMVLLDKLLPKLKERDSRVLIFSQMTRLLDILEDYLMYRGYQYCRIDGNTGGEDRDASIEAFNSPGSEKFVFLLSTRAGGLGINLATADVVVLYDSDWNPQADLQAQDRAHRIGQKKEVQVFRFCTEYTIEEKVIERAYKKLALDALVIQQGRLAEQKTVNKDDLLQMVRFGAEMVFSSKDSTITDEDIDRIIAKGEETTAELDAKMKKFTEDAIKFKMDDNAELYDFDDEKDENKVDFKKLVSDNWIEPPRRERKRNYSESDYFKQALRQGAPAKPREPRIPRMPHLHDFQFFNNQRLNELYEKEVRYLMQANQKKDTIDGEDEDQLEPLTAEEQEEKEQLLEEGFASWTRRDFNTFIRACEKYGRNDIKSISSEMEGKTEEEVQRYARVFKERYKELSDYDRIIKNIERGEARISRKDEIMKAIGKKLDRYKNPWLELKIQYGQNKGKFYNEECDRFMLCMVHKLGYGNWDELKAAFRMSPLFRFDWFVKSRTTQELARRCDTLIRLVEKENQEYDEQERQARKEKRLAKNMTPTKRAALKNSEGENTPPSSFKRRRQSLMDDYVGSGKRKRG

SEQ ID NO: 9043 - protein, 110 aa, Zea mays
  unsure (1)..(110): unsure at all Xaa locations
  Clone ID: TF_ZmC980466_1.pep
HASEEVPRSVPGLTVEVHKLDPLVQRALAAALRSKDLRGLYDRIPPHLESKLMPFQREGIRFVLQHGGRALIADEMGLGKTLQAIAVASCLRDAWPVPXISPSSLRLHWA

SEQ ID NO: 9044 - protein, 777 aa, Zea mays
  unsure (1)..(777): unsure at all Xaa locations
  Clone ID: TF_ZmC30001_1.pep
MGTLSMSDASPIPAKNWDASPVKLEAQGGDTILGMKEEERLLELVKDEQADGILDSLPIDLEAKNGDASLITEAMKKEEEQLEDTRIKVQEEEEARKREEAARLAFDPETQYNKLDELLTKTQLFSEFLLENMDRIADESVETQAEQPQVEEKKKGRGRKRKAKPQYNDKKAKTAVAAMLTRSREERLAEDSTLSEEERWEKEQANLVPLLTGGKLKSYQIKGVKWLISLWQNGLNGILADQMGLGKTIQTIGFLAHLKGKGMHGPYLIIAPLSTLSNWVNEISRFTPSLVSIIYHGGKAARAEIRRKFMPTNVGPDFPIVVTSYEMAMFDAKFLAAYKWKYVVVDEGHRLKNAKCLLLKQLKRIPMDNKLLLTGTPLQNNLAELWSLLNFILPDIFSSHQEFESWFDFSGGNEETDEKKRLHVVSKLHAILRPFLLRRMKEDVEQMLPRKKEIIIYANMTEQQKQIQHHLIEKTFDNYLHEESDIILKRPGIRARLHNLMIQLRKNCNHPDLLESPVDSTGLYPPVEKLLEQCGKFQLFDRLLNFLMAQKHKVLVFSQWTKVLDIIEYYLDSKGHAVCRIDGNVKLEERRRQIAEFNDVNSSMRIFLLSTRAGGLGINLTAADTCILYDSDWNPQMDLQAMDRCHRIGQTRPVHVYRLATSHSVEGRMIKRAFGKLKLEHVVIGKGQFEQDRAKPSALDEGELLALLKDEQTEEDRIVQTDISDEDLQRLMDRSDLMGPPPGDAQXASPLVPLKGPGWEVVVPAKSGGGMLSSLTS

SEQ ID NO: 9045 - protein, 337 aa, Zea mays
  unsure (1)..(337): unsure at all Xaa locations
  Clone ID: TF_ZmC12070_2.pep
VTLRRDSFDKSEMEFYEALYTQSVTXFDAYVDAGTLMNNYAHIFDLLTRLRQAVDHPYLVAYSKTAGHPEGMKNEGNESMESQCGICHNLAEDVVVTSCDHAFCKTCLIDYSAALGNVSCPSCSIPLTVDLTAQNSVGKVTRSVKGRKCSGILSRLPSLVDFKTSTKIDALREEIRNMIEHDGSAKGIVFSQFTSFLDLIQFSLERSGIKCVQLNGAMNITEKGRAIDTFTHDADCRVFLMSLKAGGVAKNLTVASHVFLMDPWWNPAVENQAQDRIHRIGQFKPIKSTRFVIKDTVEERILQLQQKKELVFEGTVGDSSYAMSKLTEADLKFLFQI

SEQ ID NO: 9046 - protein, 607 aa, Zea mays
  Clone ID: TF_ZmC5477_1.pep
LITTYDIVRNNYKLIRGNSYNNSNDDDDEEGTLWNYVILDEGHLIKNNKTQRAQSLYEIPCAHRIVISGTPIQNNLKEMWTLFNFCCPDVLGDKQQFKIRYETAILRGNDKNATAREKHVGSNVAKELRERIKPYFLRRLKSEVVFDTGASEEKTLAKKNELIVWLKLTPCQRKLYEAFLNSELVHLALQPKASPLAAITILKKICDHPLLLTKKGAEGVLEGMGEMLNDQDIGMVEKMAMNLADMAHDDNALEVGQDVSCKLSFIMSLLRNLVGEGHHVLIFSQTRKMLNLIQEAIILEGYAFLRIDGTTKVSDRERIVKDFQEGCGAPVFLLTTQVGGLGLTLTKATRVIVVDPAWNPSTDNQSVDRAYRIGQTKNVIVYRLMTSATIEEKIYKLQVLKGALFRTATEQKEQTRYFSKSEIQELFSLPQQGFDVSLTHKQLQEEHGQQVVLDESLRKHIQFLEQQGIAGVSHHSLLFSKTATLPTLSENDALDSKPRGMPMMPQQYYKGSSSDYVANGASFALKPKDESFTVRNYIPSNRSAESPEEIKARINRLSQTLSNAVLLSKLPDGGEKIRRQINELDEKLTSAEKGLKEGGTEVISLDD

SEQ ID NO: 9047 - protein, 558 aa, Zea mays
  Clone ID: TF_ZmC2934_3.pep
GHRLKNHECALARTLVSGYQIRRRLLLTGTPIQNSLQELWSLLNFILPNIFNSSQNFEEWFNAPFACDVSLNDEEQLLIIHRLHQVLRPFLLRRKKDEVEKYLPVKTQVILKCDMSAWQKAYYEQVTSREKVALGFGLRSKALQNLSMQLRKCCNHPYLFVEHYNMYQREEIVRASGKFELLDRLLPKLQRAGHRVLLFSQMTKLLDVLEIYLQMYNFKYMRLDGSTKTEERGRLLADFNKKDSEYFMFLLSTRAGGLGLNLQTADTVIIFDSDWNPQMDQQAEDRAHRIGQKNEVRVFVLVSVGSIEEEILDRAKQKMGIDAKVIQAGLFNTTSTAQDRRALLQEILRRGTSSLGTDIPSEREINRLAARTDEEFWLFEKMDEERRLRENYKSRLMDGNEVPDWVFANNDLPKRTVADEFQNIMVGAKRRRKEVVYSDSFGDQWMKSDEGFEDIPKATQRSKKTAYSSDIQVEFSERRKRPRSVENSADGVSNPTWTPDKGRAGVSSYSKDETEDDGEDEVITSGLQKGNSFTWNTLGRRRSSHFSSSSDSRGRPTF

SEQ ID NO: 9048 - protein, 552 aa, Zea mays
  Clone ID: TF_ZmC26704_1.pep
GLGKTLQASAIVASDIAEARARNDEKILTSLIICPSTLVAHWEYEIEKYIDSSILKPLQYVGSSQDRVTLRSQFDKVNVIITSYDIIRKDIDFLGNITWNYCVLDEGHIIKNSRSKITFAVKQLKAQHRLILSGTPIQNNVLELWSLFDFLMPGFLGTEKQFQAAYGKPLLAAKDSKCSAKDAEAGILAMEALHKQVMPFLLRRTKDEVLSDLPEKIIQDRYCDLSLLQLKLYDKFSSSNAKDEISTIVKANELEESAPQPKATRHVFQALQYLLKLCSHPLLVTGENPPNHLVDLLNEIGLGSGSELHELHHSPKLVALQEILQECGIGSEISSPDASTAVGQHRVLIFAQHKAFLDIIEKDLFQSHMRSVTYLRLDGSVDPEKRFEIVKAFNSDPTIDVLLLTTHVGGLGLNLTSADTLVFVEHDWNPMKDLQAMDRAHRLGQRKVVNVHRLIMRGTLEEKVMSLQRFKVSVANAVINAENSSLKTMNTDQLLDLFTSTPASRKASDEQSKRKSGGKGLKSILNGLDELWDQSQYADEYDLNQFLAKLNG

SEQ ID NO: 9049 - protein, 542 aa, Zea mays
  Clone ID: TF_ZmC2934_2.pep
YMIRRSLLLTGTPIQNSLQELWSLLNFILPNIFNSSQNFEEWFNAPFACDVSLNDEEQLLIIHRLHQVLRPFLLRRKKDEVEKYLPVKTQVILKCDMSAWQKAYYEQVTSREKVALGYGIRKKALQNLSMQLRKCCNHPYLFVEHYNMYQREEIVRASGKFELLDRLLPKLQRAGHRVLLFSQMTKLLDILEVYLQMYNFKYMRLDGSTKTEERGRLLADFNKKNSEYFMFLLSTRAGGLGLNLQTADTVIIFDSDWNPQMDQQAEDRAHRIGQKNEVRVFVLVSVGSIEEEILDRAKQKMGIDAKVIQAGLFNTTSTAQDRRALLQEILRRGTSSLGTDIPSEREINRLAARNDEEFRLFEKMDEERRLRENYKSRLMDGNEVPNWVFANDNETLRKKTVADEFRNIIVGSKRRRKEVVYSDSFGDQWMKSDEGFEEIAKMTPRVKRTAYSPDIQVEYNERRKRPKSVENSADGASNPTRTPDKGRAGVSSYSKDETEDDGEDEVITSGLQKGNSFTWKTLGRKRSSHLSSSSDSKGRPPF

SEQ ID NO: 9050 - protein, 825 aa, Zea mays
  Clone ID: TF_ZmC12070_1.pep
DTSDTDFVADSGDAVENDDSDEEFAPDKDTPPAPAVPEAALPPPVPIRIKNQARNRREKRRRGKKARRDAPPLPWEEWQVANDSWLDERNAADGGVEATDATVAAVPTADPAPEVVLRLLRFQKEWLAWALAQEASVTRGGILADEMGMGKTIQAISLVLTARRLRPPDHHSAASSSNSSVGRTKPQVGCTLVVCPVVAVIQWTEEIERHTASGSVRVLIYHGAKRVTQSFDFNSYDFVITTYSTIEADYRKHIMPPKTRCQYCNKLFYPNKMKVHLMYHCGPNAKRTEAQAKQQSKRKWDSSKEKVKEKRRVHKKGDEVNKDFQELADELGRQLRGQSPLHSVRWERVILDEAHFIKDRRCNTARAVFALESECKWALSGTPLQNRVGELYSLIRFLQIFPYSYYFCKDCSCEILDTSMKKQCDCGHSSVRHFCWWNKYISTPIQYGSTSFEGKRAMTLLKEKVLKGIVLRRTKKGRAADLALPPKIVTLRRDSFDKNEMEFYEALYTQSVTQFDAYVDAGTLMNNYAHIFDLLTRLRQAVDHPYLVAYSKTAGHPEGMKNEGNESMESQCGICHNLAEDVVVTSCDHAFCKTCLIDYSAALGNVSCPSCSIPLTVDLTAQNSVGKVTRSVKGRKCSGILSRLPSLVDFKTSTKIDALREEIRNMIEHDGSAKGIVFSQFTSFLDLIQFSLERSGIKCVQLNGAMNITEKGRAIDTFTHDADCRVFLMSLKAGGVALNLTVASHVFLMDPWWNPAVENQAQDRIHRIGQFKPIKSTRFVIKDTVEERILQLQQKKQLVFEGTVGDSPDAMSKLTEADLKFLFQI

SEQ ID NO: 9051 - protein, 331 aa, Zea mays
  Clone ID: TF_ZmC35142_1.pep
EQMLPRKKEKSIYANMTEVQKRIQDHLVEKTFDVYLNDESDIVLRRPGIKTKLNSLFIQLRKNCAHPDLLEAAFGTTSLYPPVNKLLEQCGKFQLLDRLLTSLLARKHKVLIFSQWTKVLDILEYYLDSKGLGVCRIDGSVNLEERRRQIAEFNDLNSSLNVFILSTRAGGLGINLTSADTCILYDSDWNPQMDQQAMDRCHRIGQTRPVHVYRLATSYSVEERIIKKAFGKLKLEHVVIGKGQFEQERAKPNALEEGELLALLRDEQDEEDRMIQTDISDEDLLKLMDRSDLSGPPGAADAAPLIPLKGPGWEVVVPTKSGGGMLSSLTS

SEQ ID NO: 9052 - protein, 554 aa, Zea mays
  Clone ID: TF_ZmC3853_1.pep
NYSFSKHKKPKAPLIGGSNLIICPMTLISQWKAEIEAHTKPGTANIYVHYGQNRPKDASIIGQSDIVLTTYGVVSSEFSIDGSTENGALYSVHWFRVVLDEAHMIKSSKSLISLAAAALTADRRWCLTGTPIQNNLEDLYSLFRFLKVEPWRNWALWNKLVQKPYEEGDERGLKLLQSILKPIMLRRTKNCTDKEGRPILNLPPANIEVKYCVLSEAEKDFYEALFRRSKVKFDQFVEQGRVLHNYASILELLLRLRQCCDHPFLVMSRGDTKEYADLNKLAKRFLRGGNGAVNGDSCIPSRAYIEQVVQELQKDEGECPICLEAFEDAVLTPCAHRLCRECLLSSWRSATAGLCPVCRMSMSKQDLITAPTDNRFQIDVEKNWVESSKISALLQELEALRSSGAKSIVFSQWTAFLDLLQIPLSRNNFSFARLDGTLNLQQREKVIKEFSEDKGILVLLMSLKAGGVGINLTAASNAFVMDPWWNPAVEEQAVMRIHRIGQTKTVSIRRFIVKGTVEERMEAVQARKQRMISGALTDQEVRTARIEELKMLFS

SEQ ID NO: 9053 - protein, 157 aa, Zea mays
  Clone ID: TF_cC-zmpo148030a10a1.pep
MFLLQNNLHELWAFLNFLLPEVFSSAETFDEWFQISGENDQQEVVQQLHKVLRPFLLRRLKSDVEKGLPPKKETILKVGMSQMQKQYYKALLQKDLEVVNGGGERKRLLNIAMQLRKCCNHPYLFQGAEPGPPYTTGDHKVTNAGKIYITSRSFRKV

SEQ ID NO: 9054 - protein, 108 aa, Zea mays
  Clone ID: TF_LIB3159-002-Q1-K1-E3.pep
LGKTLQAIAIACCFKDEGSILIVCPAVLRYSWAEELERWHPSFMPKDIHIVFGRQDSLEHLNATPRAVIISYQMLSRLRESMVNRTWALMIVDESHNIRCTKKLEEKI

SEQ ID NO: 9055 - protein, 324 aa, Zea mays
  Clone ID: TF_ZmC41243_1.pep
NSARGVDEAHRLKNCEASLYTTLLEFSTKNKLLITGTPLQNSVEELWALLHFLDPVKFNSKDSFVERYKNLSSFNETELANLHKELRPHILRRVIKDVEKSLPPKIERILRVEMSPLQKQYYKWILERNFQNLNKGVRGNQVSLLNIVVELKKCCNHPFLFESADHGYGGDSIGDRNKVERIVMSSGKLVLLDKLLVRLRETNHRVLIFSQMVKMLDILAEYLSLRGFQFQRLDGSTRADLRHQAMEHFNAPGSDDFCFLLSTRAGGLGINLATADTVIIFDSDWNPQNDLQAMSRAHRIGQQETVNIYRFVTCKSVEEDIWNA

SEQ ID NO: 9056 - protein, 521 aa, Zea mays
  Clone ID: TF_ZmC506_1.pep
PTRPSWVTQLEEHLKAGSLKVYMYHGERTRDKKELLKYDLVLTTYSILGTEFEQEDSPVKDIEWFRVILDEAHVIKNSAARQTKAVIALNAERRWVVTGTPIQNSSFDLYPLMAFLRFQPFSIKSYWQSLIQRPLEKGSKAGLSRLQNLLGAISLRRIKEMDDGNKSMVELPSKTVLACYIDLSAEEREYYDQMEQEGRNKMQEFGDRDSILSNYSTVLYFILRLRQLCDDVALCPLDMKAWFPASSIEDVSKHPELLKKLALLVDDGDDFDCPICLSPPTKTVITSCTHIYCQTCILKILKSSSSRCPICRRTLSKEDLFLAPEVKHPDEDGSGNLESDRPLSSKVQALLKLLTASQNEDPSSKSVVFSQFRKMLILLEAPLRRAGFKTLRLDGSMSAKKRLQVIQEFSHGGSDSPTVLLASLKAAGAGVNLTAASTVYLFDPWWNPGVEEQAMDRVHRIGQKKEVKVIRLIVKGSIEERILALQERKKRLISGAFGKKGGKNEKEMRVEELRMMLGLGK

SEQ ID NO: 9057 - protein, 123 aa, Zea mays
  unsure (1)..(123): unsure at all Xaa locations
  Clone ID: TF_LIB3079-023-Q1-K1-H5.pep
THREATFYKRRDCLFKKGGELSGLCDVNLLLVLSSTCGKLYHYLSATVPYVEDLVERYEGTTHTKGCTDIRQERRAQLAKAELTCELMEKELRVMTGDDGXQYTVPTVELLEHKLDAAVHKVR

SEQ ID NO: 9058 - protein, 120 aa, Zea mays
  Clone ID: TF_LIB3206-120-P1-K1-F1.pep
AGRAQRRAFASPGRLHGEGPHRDKAGREPDAAGVHLLQAQGRALQEGGEQYTVPSLELLEHSLEAAVHRVRSEKDRKIGGEIDCLQNIIRGRHEERYGLCDKVSTRFCELQTLRTPRDCT

SEQ ID NO: 9059 - protein, 94 aa, Zea mays
  Clone ID: TF_uC-zmflb73275a12b1.pep
SQVFSSCLVRVQSWYSSQRLQQTLCAARSSQSRQCSCSFFSRSLGRLGSVVLRLLLFSIRCSSVVPPVVSLSFSIQRRLQIPSSRTLTIRVAPS

SEQ ID NO: 9060 - protein, 55 aa, Zea mays
  Clone ID: TF_LIB3245-361-P1-N1-B8.pep
RLTLAALRICLGVDNSVWGARRTKIKIIENSTNPQVTFSKLHTGLVNKARKISFL

SEQ ID NO: 9061 - protein, 58 aa, Zea mays
  Clone ID: TF_LIB3279-011-P1-K1-D3.pep
EKGHLAVGEVLDPLDIDLPGSHLCAHYKQPATSQGRLPSSNLLEQEPGDARLVVVKVW

SEQ ID NO: 9062 - protein, 80 aa, Zea mays
  unsure (1)..(80): unsure at all Xaa locations
  Clone ID: TF_LIB4764-056-R1-K1-E5.pep
MGRARMEIKWIXNPTKWQATFYKSRXGLFMKDSDFSVLWDVDLVLFLFSTSGKIYHYLSTTVPSDLDLINRNHVTTPTKG

SEQ ID NO: 9063 - protein, 108 aa, Zea mays
  unsure (1)..(108): unsure at all Xaa locations
  Clone ID: TF_LIB189-006-Q1-E1-G12.pep
AATMQVTFTIRRCGIFMKVXELSVLCYTDVALILVSSTGNRSXLSNCNMDEIIDNYFTHCXFSCGTTEQTSLDFNLXHSIYVNLNDQLAVPSLRLMQIKGVELDGFNV

SEQ ID NO: 9064 - protein, 124 aa, Zea mays
  unsure (1)..(124): unsure at all Xaa locations
  Clone ID: TF_LIB4862-001-Q1-K1-E1.pep
ASERGTAAAAQAEGAGAGKAPNKGRGRXEXKRXENKXNRQXTGAKRRNGPHKKAXEXXGXXDAEGAPXXXXNRGKXNEXXSTQSXPKTXEKDQKXXXAGPETAXQNREXEQXKSSRKEDXKXKA

SEQ ID NO: 9065 - protein, 135 aa, Zea mays
  unsure (1)..(135): unsure at all Xaa locations
  Clone ID: TF_LIB4756-102-R1-K1-E10.pep
MSRKTLKTTRRETATAAWSPFSNVLRLLLLKDQEISVLCVDDVWLIVFSSCTNLSQXSRSLTNDVIDEDHTHSRNLGKTQHXLPLELHLEHSQYACVNVPVAEACLLLCXMTREXLEGLNVQELHRLETNLASGL

SEQ ID NO: 9066 - protein, 170 aa, Zea mays
  Clone ID: TF_LIB4764-131-Q1-K1-B12.pep
PRGRPGWYFPLCLQAPETDKEGTSLRSPAWRGERLKSRGSRKHDPPGHLLQTPKRAPLEGLRALRPMIRQGGDRHLLPMCFTSTSTPATECQGTSGEELEGSRRMFLPLNHRSVEYSGHDLLADESRTSVHPHSDVVQRYSGLVCSTLCRNIVAQRMCPDVRAACDRGGL

SEQ ID NO: 9067 - protein, 107 aa, Zea mays
  Clone ID: TF_ZmC733474_1.pep
LEKMMRATSASQSTDSSYAFLSSPFRRLANVTCRLILFSIRFSSTLPRPILLVLLPFSSIPSFSFPATSAPPPGLFTASSLLELDQDLSPPFSLSLSSPSTRLRAKE

SEQ ID NO: 9068 - protein, 145 aa, Zea mays
  Clone ID: TF_ZmC32383_1.pep
MAARIGADGKAMARRGRVELRRIEDRVSRQVRFSKRRSGLFKKAFELSLLCDAEVALIVFSPAGKLYPRGAAADRGPGEPAGALLQAPLGALQEGLRALPALRRRGRPHRLLPRRQALRVRLHQAKGVVRHLSIQTQEFVAITGL

SEQ ID NO: 9069 - protein, 71 aa, Zea mays
  unsure (1)..(71): unsure at all Xaa locations
  Clone ID: TF_jC-zmX700335674a1.pep
MVQGMEQLQLHVNQVHRLATLXKHQAGHVKKALELSVLCDAIVXIIVFYGHGMIYDLATTVTIEELIEMYK

SEQ ID NO: 9070 - protein, 70 aa, Zea mays
  Clone ID: TF_LIB4766-025-R1-K1-H7.pep
MGRGKIEIKRIENSTNRQVTFSKRRGGLLKKANELAVLCDARVGVVIFSSTGKMFEYCSPACRLVTLARR

SEQ ID NO: 9071 - protein, 248 aa, Zea mays
  Clone ID: TF_ZmC21289_1.pep
MAPPRRPSMGRQKIEIRRIESDEARQVCFSKRRAGLFKKASELSILCGADVAAVVFSPAGKAFSFGHPSVESVVERFLASSSPSPAGAGAGHSASGGEDRAVSELNRQHGELRAQLDAVKARQERADEAIRKEREAGSPAMAWIDAELSGGAMGHDDLVAFWAALAGVQAAVAASADRLLRDALLVGRRGRQQQQPAQLAGGGGVAFDVGAFGGVGVQVQPPPGFAGVVDLQGFGGQAAAILGAGGPS

SEQ ID NO: 9072 - protein, 212 aa, Zea mays
  Clone ID: TF_ZmC786_156.pep
RSYRTSASSPTRSIAPSSPIFRNWNFLQSLRWFCSLAFNSFLLFLQTDLSCGPSSKAKGGQPAATSSGGDRQGRGKIEIKHIENTTNRQVTFCKRRNSLLKKAYELSVLCDAEVALVVFSSRGRLYDLAGYTEDAFGLLVLLLVREKEPVVPPLSSSLRTSRSVASAAPAQSLADFCKDSSSSAAHGSTCPVPTITLDLKKSLKILQVLCYS

SEQ ID NO: 9073 - protein, 90 aa, Zea mays
  unsure (1)..(90): unsure at all Xaa locations
  Clone ID: TF_LIB3245-589-P1-K1-B2.pep
MARERREIKRIESAASLQVPFSTRRRFFFTYAAELSLLCNTSFTLIGLSYTGXLSYSARSIMYNITLKPDLHSKNPPMDKHPSLDLNLDH

SEQ ID NO: 9074 - protein, 46 aa, Zea mays
  Clone ID: TF_LIB3116-001-Q1-K1-G1.pep
FSILFISIFPLPILHFYSNPSRYINNYLYINYKYTKNLSIYTLLNT

SEQ ID NO: 9075 - protein, 59 aa, Zea mays
  Clone ID: TF_uC-zmflmo17001d12b1.pep
SGTISPFCTPCTKRRNVLLKKACELFVLCDAQALLIVYSNRGKLYEFCHGPILTRTLVR

SEQ ID NO: 9076 - protein, 288 aa, Zea mays
  unsure (1)..(288): unsure at all Xaa locations
  Clone ID: TF_ZmC1408_5.pep
ELVEAAGVGEEDERDLGVAEDGELVRLLEQAVPTLGEGHLPADLVLDPLQHHLPAPHGALPDLSAFLPLRIDDPSAILLLSLSPPAGAISDLFKRRICPVRTAIIDEGGPCPSPSSADTHTHTGARARCRVARARCSRSGFFWRCHSIGSTPSEREGPWACGGAGLYDCCWLRERKREREREEKREREEGRSETSTDERATPAGKNLFVRGVQIGSRSGLLKKAVPALGEGDLAADLVLDPLQHHLPAPHGRRDLRAFRSPDRRRSVALSRHQQTIWICLQLLTMEVX

SEQ ID NO: 9077 - protein, 227 aa, Zea mays
  Clone ID: TF_ZmC1460_1.pep
MARCKVRVRRVQSPVHRQVTSAARRCGLLPKARELSVLCDASVGIIVFSAHGKLYNLATTGTMEELIERYKAASAGEATTDGCGRHNRMDPKHETTVLQQEINLLQKGLRYHYGSWTNVHMNDDVMNAHELYLLIGLYNSRSAKMQITAQEYQQPKRKEGMLKAANEILQEKIVEQSSLLDVGMVVADQQNGRFSTVPLVEEVISSNPLTILSGYSSCRGSEMGYSF

SEQ ID NO: 9078 - protein, 187 aa, Zea mays
  Clone ID: TF_ZmC497_1.pep
MDAEAARRKQVAPPQEKRKRGRLELRRIQDRTSRQVRFSKRRSGLFKKAHELSVLCDAEVAMVVFSPAGRLYHYASLGTSIEKTFCRYWDLANTDIDLNIEARDSRDNYNTQFPENGQPAEGSLSDLLIMMDQWSMEENLNGLSMAGIAGLEEALTVALAVIRNKLAMKVTGCGGPKPEAHTLFQRR

SEQ ID NO: 9079 - protein, 118 aa, Zea mays
  Clone ID: TF_ZmC497_2.pep
MDAEAARRKQVAPPQEKRKRGRLELRRIQDRTSRQVRFSKRRSGLFKKAHELSVLCDAEVAMVVFSPAGRLYHYASLGTSIEKTFCRYWDLANTDIDLNIEARDSRDNYNTQVKHINS

SEQ ID NO: 9080 - protein, 142 aa, Zea mays
  Clone ID: TF_ZmC497_3.pep
TSIASLFSLFSLLTGFVPILLWLRPACRPLPHSSGVSDYAIGRARREALPLLVGGAVSRPGKKDAEAARRKQVAPPQEKRKRGRLELRRIQDRTSRQVRFSKRRSGLFKKAHELSVLCDAEVAMVVFSPAGRLYHYASLGTR

SEQ ID NO: 9081 - protein, 189 aa, Zea mays
  Clone ID: TF_ZmC3515_2.pep
MGKPSRGRQRIEIRRIEEGGRLQVTFSKRKSGLQKKAAELSMLCGSPVAVVIFSPGRKVFALGTPSVDHVLRRHAPPIPGEGEEDGLLPVLQDGNVVMSSSAIADRAEVENIVRRTEETKARSVAEKARMDAVGKAVWQAAAKAGRRFWCEADSGELGDAELAGFAKALHRFRVNLQRHLDSLSASANK

SEQ ID NO: 9082 - protein, 111 aa, Zea mays
  Clone ID: TF_LIB3076-018-Q1-K1-A4.pep
KRTSRGRQKVEIRRIDNKESRQVTQCKRKGGLLKKASELHLLCGAQVAIIVFKRRDPERKEVPVPPRGQRDDGGLAFAMGTLSVDHVLHRCGLLHADEGLTAIQDVGAIVA

SEQ ID NO: 9083 - protein, 56 aa, Zea mays
  Clone ID: TF_ZmC3479_1.pep
ELSILCDAEVGLIIFSSTGRLYDFSNTNMKAVIDRYGKAKDEQLGKNDATSELMVR

SEQ ID NO: 9084 - protein, 67 aa, Zea mays
  Clone ID: TF_ZmC1211241_1.pep
MGRGKIVIRRIDNSTSRQVTFSKRRSGLLKKAKELSILCDAEVGLIIFSSTGRLYDFSNTKYDSSTS

SEQ ID NO: 9085 - protein, 171 aa, Zea mays
  Clone ID: TF_ZmC1089_5.pep
MRKKKKKKKKKKKKKKTHLLSPACARLSSFLPRPLAFAWLHRAGRAGEEKLASSYQLSAGGGSLPAAGVSCKGWELAMGRGRVELKRIENKINRQVTFAKRRNGLLKKAYELSVLCDAEVALIIFSNRGKLYEFCSGQSITKTLERYEKNSYGGPDTAVQNKENCAAVIAV

SEQ ID NO: 9086 - protein, 207 aa, Zea mays
  Clone ID: TF_ZmC3819_1.pep
MGRGRSEIKRIENPTQRQSTFYKRRDGLFKKARELAVLCDVDLLLLLFSGSGKLYHYLSPTVPTVKDLVERYEAATHSKVWADVRQERRAELEKAERMCELMEKELRFMTVDDGEQYTVPSLEQLEHSLEAAVHRVRSEKDRKIGGEIDCLQNIIRGRHEERYGLCDKNFLQIWPQLAHSQAWNNGGEGGGSTPPSGGGLELKLGFN

SEQ ID NO: 9087 - protein, 58 aa, Zea mays
  unsure (1)..(58): unsure at all Xaa locations
  Clone ID: TF_LIB4073-012-Q6-K1-E4.pep
MGRGKIEXKRIENSXTNREVTFSKRRAGLVKKARVIXVLCDGGVXXVILFSGGWLHDY

SEQ ID NO: 9088 - protein, 191 aa, Zea mays
  Clone ID: TF_ZmC3515_1.pep
MGRPSRGRQRIEIRRIEEGGRLQVTFSKRKSGLQKKAAELSLLCGSPVAVIVFSPGRKVFALGSPSVDHVLRRHAPPIPSEGEEDGLLPALQDGDVMSSSAIADRAEVENIVRRTEETKARSVAEKARMDAVGKAVRQAAAKAGRRFWWEADSGVLGDAELPGFAKALRRLRVNLQRHLDSLSASANKQLQ

SEQ ID NO: 9089 - protein, 127 aa, Zea mays
  Clone ID: TF_LIB5116-070-A1-PF1-G2.pep
MGRGRTEMKKIQNDVSRRATFGKRRRGLLKKAHELAVLCGVDLGLLVFDDDGAGKLFDYCAPNTSWSELIERYESITKHQFQFQGQGIHHDDHQQQPSADIIAGLRREGDHLEASVTRQTGENLSST

SEQ ID NO: 9090 - protein, 137 aa, Zea mays
  unsure (1)..(137): unsure at all Xaa locations
  Clone ID: TF_LIB4740-041-R1-K1-E12.pep
MDAEAARRKQVAPPQEKRKRGRLELRRIQDRTSRQVRFSKRRSGLFKKAHELSVLCSXEVAXVVFSPAGRLYHYASLGTSIEKTILSLLGPCQHRLISISRRETRGTTIDTVSYEQGAPTLLAHKIRSHNYNTQVKH

SEQ ID NO: 9091 - protein, 173 aa, Zea mays
  Clone ID: TF_ZmC672_2.pep
GLFFFTLAGGSPHPFTPSMTKRQASPSPPPPVHLLVLLRSRTQLAYPPRHYKNPPPPHRASTVPHTRARAGKHQKGKAEAARRAPAAAKSPLVVVVASSPPPACLLYFAIFASVSWIGDASVSGSREGIGHDDGAGEDGAEADRERDEPAGDLLEAPQRAAQEGLRALRALRC

SEQ ID NO: 9092 - protein, 154 aa, Zea mays
  Clone ID: TF_ZmC672_4.pep
LVHHRLLASFTLPYLLAFPGLGTLPFREAVKGSATTMVRGKTELKRIENATSRQVTFSKRRNGLLKKAFELSVLCDAEVGLVVFSPRGKLYEFASAASLQKTIDRYRTYTRDNAIVHNSFLVFHIVIFFYFFIHIELSCHFLFLVSYNQGRGIN

SEQ ID NO: 9093 - protein, 246 aa, Zea mays
  Clone ID: TF_ZmC1460_6.pep
MDLGIDDRPSMARGKVQLRRIENPVHRQVTFCKRRAGLLKKARELSVLCDAHVGIIVFSAHGKLYDLATSGTMEELIERYRTASSIEAADGCGDNNRMDAKQETMVLQQEINLLHEGLRYIYMNRTNEHMNVEALNALCKDADNGSRHVKTPVHINSTKTRGFQHPFTSLKVSACTQEGMLKAANEILQEKIVEQSSLLDVGMVVADQQNGRFSTVPLVEEVISSNPLTVLSGYSSCRGSEMGYSF

SEQ ID NO: 9094 - protein, 129 aa, Zea mays
  Clone ID: TF_LIB3077-002-Q1-K1-D11.pep
MRFCYVGLLTKVCFPLKVKRQNIHISFFQLILIENNIIIQVTFSNTRSFLLNKSNDISDLCDAHVALIVFSNKGKLYEFSSDPIMDRILERYQRQIYAPTGSESHANLSLESSKLMSTIEVFQKNFKNF

SEQ ID NO: 9095 - protein, 124 aa, Zea mays
  Clone ID: TF_LIB4744-023-R1-K1-A12.pep
MGRGKIEIKRIENSTNRQVTFSKRRGGLLKKANELAVLCYARVGVVIFSSTGKMFEYSTPACSLRELIEQYQHATNSHFEEINHDQQILLEMTRMIFLRLKKKKKKKKKKKKKKKKGKKKKKKR

SEQ ID NO: 9096 - protein, 111 aa, Zea mays
  Clone ID: TF_LIB4762-104-Q1-K1-C2.pep
MAPRGRVELRRIEDKASRQVRFSKRRAGLFKKAFELALLCDAEVALLVFSPGGKLYEYSSSRCWQKKTMVVPVQVQAARCCFTRQSVQPTNETGRASVANGAVPVPHTIVV

SEQ ID NO: 9097 - protein, 166 aa, Zea mays
  Clone ID: TF_ZmC7457_1.pep
MAPRGRVELRRIEDKASRQVRFSKRRAGLFKKAFELALLCDAEVALLVFSPGGKLYEYSSSSIEDTYDRYHQFAGAGRKVNGHNNDNRDVAASDLQSRLKEIATWSKQNNAEESDANELEKLEELLTNALRNTKAKKMLAKENNGGAGASTSSQMLLYSAERATDK

SEQ ID NO: 9098 - protein, 91 aa, Zea mays
  Clone ID: TF_LIB4827-070-R1-N1-A7.pep
MGRGKIVIRRIDNSTSRQVTFSKRRNGIFKKAKELAILCDAEVGLVIFSSTGRLYEYSSTSMKSVIDRYGKAKEEQQVVANPNSELKVCSR

SEQ ID NO: 9099 - protein, 70 aa, Zea mays
  unsure (1)..(70): unsure at all Xaa locations
  Clone ID: TF_LIB3136-040-P1-K1-B6-R2A.pep
TRYIRGIESAAAYWVTFSKRLRVLCKKAXDLAVLCDADVSLVEFSDTGKLXAIREPPVLNDIVDRYRPHF

SEQ ID NO: 9100 - protein, 86 aa, Zea mays
  Clone ID: TF_ZmC1145_12.pep
MGRGKVQLKRIENKINRQVTFSKRRSGLLKKAHEISVLCDAEVALIIFSTKGKLYEYSTDSWYALGPLRCLRFDTARCVLPHFQAV

SEQ ID NO: 9101 - protein, 122 aa, Zea mays
  unsure (1)..(122): unsure at all Xaa locations
  Clone ID: TF_ZmC1145_16.pep
MGRGKVQLKRIENKINRQVTFSKRRSGLLKKAHEISVLCDAEVALIIFSTKGKLYEYSTDSXTSIYVGNFHIPELIERARYNIMQSESMDKILERYERYSYAEKVLISAEYETQEKRFGSEV

SEQ ID NO: 9102 - protein, 208 aa, Zea mays
  unsure (1)..(208): unsure at all Xaa locations
  Clone ID: TF_ZmC3065_1.pep
MGRVKLQIKRIENNTNRQVTFSKRRNGLIKKAYELSVLCDIDIALIMFSPSNRLSHFSGRRRIEDVITRYINLPEHDRGGVVRNREYLMKMLGKLKCEGNIAEQLTPNKEPINSNVEELQQEIKTYQHQMEVLKEQLRSDNIDXMNDFETCEKFLMDTLTCVEERKKYLLCNHVAPFDPSASNMQQHVDVRRCLVSLIIMVGTHNYFR

SEQ ID NO: 9103 - protein, 74 aa, Zea mays
  unsure (1)..(74): unsure at all Xaa locations
  Clone ID: TF_LIB3068-061-Q1-K1-E2.pep
MWRDPLELKQIENKINRQSTLVKRLNGLLKNAYEHFELCNTXVSLNILFNRRKLYKFCIRQNITKTLDRTKKTL

SEQ ID NO: 9104 - protein, 160 aa, Zea mays
  Clone ID: TF_LIB4666-029-R1-K1-C10.pep
RGKSGLQKKASELFLLCGSPVAIVIFSPGKKVFALGTPSVDHVLRRYAPIPGEEEEDGLLPVLQDTDDVSAITDRVEVEGIVRRTEETKARSVMEKARMDAIGKTVRQTAAKAGRKFWWEADSGKLGEAELPEFAKVLRRLRVNLQRHLDSLSASTRQLQ

SEQ ID NO: 9105 - protein, 56 aa, Zea mays
  Clone ID: TF_LIB3245-215-P1-N1-E10.pep
MACGKEQLRRVENPVHWQVTFCMRRAGLLKKALELSVLCDASVGIIVFSAHGMLFY

SEQ ID NO: 9106 - protein, 92 aa, Zea mays
  Clone ID: TF_LIB4185-025-R1-L1-C4.pep
MAARIGADGKAMARRGRVELRRIEDRVSRQVRFSKRRSGLFKKAFELSLLCDAEVALIVFSPAGKLYEYASTRLGGFRSHSDLRPSLHHHLV

SEQ ID NO: 9107 - protein, 155 aa, Zea mays
  Clone ID: TF_ZmC32383_4.pep
MAARIGADGKAMARRGRVELRRIEDRVSRQVRFSKRRSGLFKKAFELSLLCDAEVALIVFSPAGKLYEYASTSIEDTYNRYQQFSGEGRNINDDRNRNDNKDEASSDLQLMLSKIATWSPQSNADESDVDELEKLENLLRNALKDTRSTKIQMLA

SEQ ID NO: 9108 - protein, 167 aa, Zea mays
  Clone ID: TF_793905.pep
ASSPTRSIAPSSPIFRNWNFLQSLRWFCSLAFNSFLLFLQTDLSCGPSSKAKGGQPAATSSGGDRQGRGKIEIKHIENTTNRQVTFCKRRNSLLKKAYELSVLCDAEVALVVFSSRGRLYEYANVYLVPRSYTLRASAVCVVQIRSKFAPIFLEAKPRGWRVNWGAS

SEQ ID NO: 9109 - protein, 173 aa, Zea mays
  Clone ID: TF_ZmC786_177.pep
RSYRTSASSPTRSIAPSSPIFRNWNFLQSLRWFCSLAFNSFLLFLQTDLSCGPSSKAKGGQPAATSSGGDRQGRGKIEIKHIENTTNRQVTFCKRRNSLLKKAYELSVLCDAEVALVVFSSRGRLYEYANVYLVPRSYTLRASAVCVVQIRSKFAPIFLEAKPRGWRVNWGAS

SEQ ID NO: 9110 - protein, 63 aa, Zea mays
  Clone ID: TF_ZmC119_1122.pep
YCSVLFLCIFATEMLRSFVCSASKMFGVVTDIMSTINLDGKLDLKAIALQACNAEYDPKEKME

SEQ ID NO: 9111 - protein, 116 aa, Zea mays
  unsure (1)..(116): unsure at all Xaa locations
  Clone ID: TF_LIB4758-033-R1-K1-D3.pep
GTSRPAGIPSVRRHHIAAHELHVRSKRELYTQPPNSKIAAGATLNPVRSQESEDHPGAWNLESQYEAKLLPGLIYRMKQPKIVLLIFVSGKIVLTRAKVRDETXAFEIIYPVLVKS

SEQ ID NO: 9112 - protein, 200 aa, Zea mays
  Clone ID: TF_ZmC21769_1.pep
MAEPGLEGSQPVDLSKHPSGIVPTLQNIVSTVNLDCKLDLKAIALQARNAEYNPKRFAAVIMRIREPKTTALIFASGKMVCTGAKSEQQSKLAARKYARIIQKLGFPAKFKDFKIQNIVGSCDVKFPIRLEGLAYSHGAFSSYEPELFPGLIYRMKQPKIVLLIFVSGKIVLTGAKVREETYTAFENIYPVLSEFRKIQQ

SEQ ID NO: 9113 - protein, 200 aa, Zea mays
  Clone ID: TF_ZmC21769_2.pep
MAEPGLEDSQPVDLSKHPSGIVPTLQNIVSTVNLDCKLDLKAIALQARNAEYNPKRFAAVIMRIREPKTTALIFASGKMVCTGAKSEQQSKLAARKYARIIQKLGFPAKFKDFKIQNIVGSCDVKFPIRLEGLAYSHGAFSSYEPELFPGLIYRMKQPKIVLLIFVSGKIVLTGAKVREETYTAFENIYPVLAEFRKVQQ

SEQ ID NO: 9114 - protein, 148 aa, Zea mays
  unsure (1)..(148): unsure at all Xaa locations
  Clone ID: TF_LIB4727-003-R1-K1-F7.pep
VFSLLLYFYLDPFICKQRFAAVIMRIREPKTTALIFASGKMVCTGAKSEQQSKLAARKYARIIQKLGFPAKFKGFKIQNIVGSCDVKFPIRLEGLAYSHGAFSSYEPELFPGLIYRMKQPKIGLLIFGSGKIVLTGAXVREETYTGFE

SEQ ID NO: 9115 - protein, 114 aa, Zea mays
  Clone ID: TF_ZmC418581_1.pep
LFHCLHAVCSHHQKLGFPAKFKDFKIQNINIVRSCDVKSPIRLEGLAYSHGAFSSYETELFSGLIYRMKRQKIMLLIFVSGKIVLTRAKVRDETYTAFENIYPVLTKFRKVRQC

SEQ ID NO: 9116 - protein, 73 aa, Zea mays
  Clone ID: TF_LIB4719-004-R1-K1-B12.pep
MAAARGVQVTRELGHRTDGETMEGVMRKVEPNITAASPEPADRPRTDARGAPAATASRSVRVALRRRWTTPHT

SEQ ID NO: 9117 - protein, 205 aa, Zea mays
  Clone ID: TF_LIB4969-021-Q1-XP1-A8.pep
MTTRPDGSAATPADKQLVAASNGNGNPLAVRKAPSKDRHSKVDGRGRRIRMPIICAARVFQLTRELGHKSDGQTIEWLLRQAEPSIIAATGTGTTPASFSTSSPSSLRSSSSSTAGVHPHAAPAQGFWALPARADFGQLWSFAAAPEMMVAAAAAAAPGMAGEASAARVGNYLPVAQGNLNLLASFSGGPAPTAAAGRAEEETAR

SEQ ID NO: 9118 - protein, 116 aa, Zea mays
  unsure (1)..(116): unsure at all Xaa locations
  Clone ID: TF_LIB4171-030-R1-L1-H3.pep
MEAAAVGDGAPAGRSHQGAKRARGGAVKGSETEVAAWGQPPPLPPPPGPGAGSRISRVGASGGKDRHSKVYTTKGIRDGRVRLSAPTAIQFYDLXDRLGFDQPSKAIEWVINAGAF

SEQ ID NO: 9119 - protein, 104 aa, Zea mays
  Clone ID: TF_LIB4827-005-R1-N1-C8.pep
GRVRIPAMVAARVFQLTRELGHRTDGETIEWLLRQAEPSIIAATGTGVTTEEAPPSLVPVAPIASSVSLTPVPYYTALLMQPPPTANESPVASASVSGTVADNN

SEQ ID NO: 9120 - protein, 80 aa, Zea mays
  unsure (1)..(80): unsure at all Xaa locations
  Clone ID: TF_LIB4699-001-R1-K1-A9.pep
MWWGRSGDWMQQALAPKRSYNKDRHTKDDGRGRRIRMPALCAERILQLTRELGHKSDGETVQWLLQQAEPAIVAXTGTGT

SEQ ID NO: 9121 - protein, 298 aa, Zea mays
  Clone ID: TF_ZmC819_1.pep
MISGNLNNEELGGGGCTKAEGPGAAGGAGAVVAKSPVLSSSRHWPPSTESRIVRVSRVFGGKDRHSKVRTVKGLRDRRVRLSVPTAIQLYDLQDRLGLSQPSKVVDWLLDAAQDEIDKLPPLQFPPQGQDLVAHLPPSMVAPFANVAADRAAAAAAAANASAAMAEGGKRHCHGGIKGLMGMGLNNSIGLANATMPLAHGLYYTPGESWTNGGNAAVHDHQVSHGGTSPQTVAHHSPFSSLLSLAAPGPQLVFYSPEGGGFAMKEATDHQFAVDSLDHSQGQLSLSSARSFLHPGNQG

SEQ ID NO: 9122 - protein, 217 aa, Zea mays
  unsure (1)..(217): unsure at all Xaa locations
  Clone ID: TF_LIB5117-027-A1-PF1-F8.pep
MEEADKDRNSCKRLRAVGGGGDSADAWRTFRVARAAAGGKDRHSKVVTSRGLRDRRIRLSVQTAIQFYDIQDRLGVDQPSKAIEWLIQAAATAIDGLPSLDCSFALPVASPAAEDAAEVSTSETSKGSVLSLANGPADNDNATHQANAYNGGSANGTFAELLHCSNAADKPMQHQHQQPTLAYYARSXSHIAPMSFEMIPRSPSPRTTKRHTHTTCL

SEQ ID NO: 9123 - protein, 402 aa, Zea mays
  Clone ID: TF_ZmC1215_2.pep
MDVTGDAGGGRRPNFPLQLLEKKEEQPCSTSPAVAVGAGANGSGEMQMKKVAAPKRTSSKDRHTKVDGRGRRIRMPAICAARVFQLTRELGHKTDGETIEWLLQQAKPAVVAATGTGTIPANFTSLNISLRSSGSSFSIPAHLRAAGPRFGGARGDPWERVVGVGLGFGAAAEDPPSATSSASSPLLLSFHSGSVGLDVSPSPSSAAAGSDLSKKRRWEQEMQQQHQQQYHQQQQMAGYTTQSQMPGAVWMVPSASSNAQAAAAAGGGGSNANESIWTFPQPASGGGGGAATVYRGVPSGLHFMNFPAAPMALVPGGGQQLGLGGPVPVGGAGNDSSGSASGGGGGEGHMGILAALNAYRAHSAVSDAAPEQNGAEGGSRQHQQHGGGGERQESVSPPSDGS

SEQ ID NO: 9124 - protein, 257 aa, Zea mays
  Clone ID: TF_ZmC456_1.pep
QDGGGGGKEQQQLQVVAQPGERRQQALAPKRSSNKDRHTKVDGRGRRIRMPALCAARIFQLTRELGHKSDGETVQWLLQQAEPAIVAATGTGTIPASALASVAPSLPSPTSGLARPHHHMWAPSAGFSSPSFLNSAAAGTGDAAGIMQRMGIPAGFELPGASAAGATLGAGGHIGFAPMFAGHAAAMPGLELGLSQDGHIGVLAAQSISQFYHQVGAAAGGGGQMHHAHGHHHHHHQQQEDGEDDREDGESDDESGQ

SEQ ID NO: 9125 - protein, 324 aa, Zea mays
  Clone ID: TF_ZmC456_3.pep
MDPKFPTPLALNKTEPTTATTTTTSTAQHHQLDPKDYQQQTAQHQEQQQHHHHPHLQIQIHQPPPPPQDGGGGVKEQQQLLQVVAQPGDRRQQALAPKRSSNKDRHTKVDGRGRRIRMPALCAARIFQLTRELGHKSDGETVQWLLQQAEPAIVAATGTGTIPASALASVAPSLPSPTSGLARPHHHHPHHMWAPSAGFSSPSFLNSAGAGDGTGIGGIMQRMGVPAGLELPGGGAAGGHIGFAPMFAGHAAAMPGLELGLSQDGHIGVLAAQSISQFYHQVGAAAGGSGQMQHPHGHQHHHHQQQEDGEDDREDGESDDESGQ

SEQ ID NO: 9126 - protein, 198 aa, Zea mays
  Clone ID: TF_LIB5026-027-Q1-XP1-H8.pep
MATTRDVSAASAAAMFHVYQPMPMPSTAAAPAKAGKKEGGKDRHSKVNGRGRRVRMPIVCAARVFQLTRELGLKSDGQTIEWLLRQAEPSIVAATGSGTTPAVFVSSSAPSTSSSSHSHSHYQHQQQQQATVVVLGKRPREEGGEAAASVPAFWAAAPRTTAAADASWGFSPLEQQAAAGYVPMAQAQQQQQQHHHLN

SEQ ID NO: 9127 - protein, 137 aa, Zea mays
  Clone ID: TF_5268663.pep
AARVFQLTRELGHKSDGETIEWLLQQAEPAILAATGTGTIPANYSSLNISIRSGAAAPAARAAPFPALALHPHHHHQAAPAHDMSMMAGYHHHLLPPQPEPQEDPSAGDAYMRKRYREDLFKEDDERQDPSAPKARE

SEQ ID NO: 9128 - protein, 380 aa, Zea mays
  Clone ID: TF_ZmC1215_1.pep
MDATGDAGGGRRPNFPLQLLEKKEEQPCSTSPAAAVGAGAAGSGEMQMKKVAPPKRTSSKDRHTKVDGRGRRIRMPAICAARVFQLTRELGHRTDGETIEWLLQQAEPAVIAATGTGTIPANFTSLNISLRSSGSSFSIPAHLRAAGSPGPRFSGARGDPWERVVGLGFGGAEGPPSATSSPLLLSFHSGSVGLDVSSPSSSSAAANSDLSKKRRWEQEMQQQQQQQYQQQMAGYTQSQMPGTVWMVPSSNAQAAAAAGGGGSSSNESIWTFPPQPGSGDGGAAPVYRGVPSGLHFMNFPAPMALIPGGQQLGLGHENGGSSSGGEGHMGVLAALNAYRAHAVTVAAPAAQNGAEGGSSQQQQRGGGERQDSMSPSDDDS

SEQ ID NO: 9129 - protein, 194 aa, Zea mays
  Clone ID: TF_LIB5046-008-R1-K1-G3.pep
EITTLLLVPGPREGSVERASGGLGVPSVKHMFPFCDSSSPMDLPLYQQLQLSPSSPKTDQSSSFYCYPCSPPFAAADASFPLSYQIGSAAAADATPPQAVINSPATELGACASGAEGSGASLDRAAAAARKDRHSKICTAGGMRDRRMRLSLDVARKFFALQDMLGFDKASKTVQWLLNTSKSAIQEIMADDAS

SEQ ID NO: 9130 - protein, 164 aa, Zea mays
  Clone ID: TF_ZmC445848_1.pep
MEVEAVGCVGAGGKRARAKGAGAEPEPKRRAVAMAVPAPAAAPWAQQHPASRIYRISRGSGGKDRHSKVYTDKGIRDRRVRLSVATVIQFYDLQDRLGYDQPSKAIEWLIRGAGDAIDKLPSLDTAGSLPAHPAFAKDHAPPAGDNDDHQQQQQLTRSGCNSTS

SEQ ID NO: 9131 - protein, 174 aa, Zea mays
  Clone ID: TF_ZmC8497_1.pep
MEAQAQDNRAEDGDGARQHVAGGVAATGMAMGAIPMHGFMVPKPEPVEFFGGMAVVRSKPPPRNRDRHTKVEGRGRRIRMPAACAARIFQLTRELGHKSDGETIRWLLQQSEPAIIAATGTGTVPAIATTVDGVLRIPTQSSSSSSPSSLTTVVDGDEASAKRRRKLQPTRAAL

SEQ ID NO: 9132 - protein, 141 aa, Zea mays
  Clone ID: TF_ZmC212532_2.pep
MIRGGNHQQAADVEEELARNSRHAAAVATSRQWSAQTESRIVRVSRVFGGKDRHSKVKTVKGLRDRRVRLSVPTAIQLYDLQDRLGLNQPSKVVDWLLNAARHEIDKLPPLQFPPQDLMVGHLTPHNMPLMVHDEKFGHLA

SEQ ID NO: 9133 - protein, 235 aa, Zea mays
  Clone ID: TF_ZmC819_2.pep
MISGNLTNEDLGAGRTRTKAEGPTTAAVAGAVVAKSPVLPSSRQWPPSTESRIVRVSRVFGGKDRHSKVRTVKGLRDRRVRLSVPTAIQLYELQDRLGLSQPSKVVDWLLDAAQHEIDKLPPLQFPPQAAQDLVAHLPPPSMVAPFAADRAEADGDKRHCHAGVKGLMGLNNSIRLVNATMPLAHGLYYTPGESWTVMPMMPPPSSRLTTRLISAVSLLRSARYVLLCWLCGREC

SEQ ID NO: 9134 - protein, 632 aa, Zea mays
  Clone ID: TF_ZmC1447_2.pep
MAAAGVSPAFLLRLLSRCSDLSGFCVGRLKFQPRCRVPRQGRSDRSHFALSLTDLIGKQRRSRCSDCCATHRGKTDNSRVQPRGQQEAAPRPTLGLGLGRRSPPRPTPGSSASPDLRPRPRKEVSASPDPKARTQLRPREESRPRPTPASASGEVSASPDLGLGPTAPQGIHHYPTLANSGYEGTRSASHLARPGVAAPARVLRCPVVRSHSTPAQLRAAPVLRHRQADKPSRQACRRLGEEESSAAALHARSPPLAGQIDRSPSGSRLRSLLYFRFARFPFQKEPIGLLLDRCARLDFFWEFNRRMGRDGGRVRMSRVLATGDERGMGEVAGVERAACKRPRGALDGGGSASAAAWPACRVARAAAGGKDRHSKVVTARGLRDRRVRLSVPTAIQFYDIQDRLGVDQPSKAIEWLIRAAAAAIDGLPSLDCSFVFPHAAASPPGGAADDAELSTSETSKSSVLSLANAPVDNTAATAAHSQQANHAYNNNAAAGGGAFAELILHCSANNSSKPMQQHPTLAYYATQPPNAHSASAMSFETMLPHFSFLQEQSHHAIAFDRGTLQSNAAVAAPLWPTSQHACLLQRFAASPADATGLPSFFLGSGAAGASPVVPANAEPRLQLWDFKQERKT

SEQ ID NO: 9135 - protein, 220 aa, Zea mays
  Clone ID: TF_ZM4320.C3.o16.fg.pep
MATTREVSSSAAAMFHVYQTIPMPTPSTAAAGGGGAMVSVSAPAKPGKKEGGGKDRHSKVNGRGRRVRMPIVCAARVFQLTRELGLKSDGQTIEWLLRQAEPSIVAATGSGTTPAVFVSSSAPSTFSSSSHYHHQQQATVVLGKRPREEGDAAGSVFWAALPAAPRATEAWGFSPLEAQAAAAAAAAAYVPMAQAQAQHHHLNLLAALSGAARRAEEETR

SEQ ID NO: 9136 - protein, 256 aa, Zea mays
  Clone ID: TF_ZmC12025_1.pep
MAPHRRGQGLARPYPYPAIPIGFLPTSRVHHQQTRGVGATRQCVAMASRDGATFQVYRAMPAPTPMSLASAAPAAAAADAAAPKKAGAGAGKDRHSKVNGRGRRVRMPIVCAARVFQLTRELGLKSDGQTIEWLLRQAEPSILAATGSGTTPAVFSCSSAPSTSAASAGAGAGAGVSLPLLGKRPREEHEPAVAVAVAPAPFWATLQARPVAAAWGLSPAQEAAAQAYASVAAQGHHLNLLSVLSGAARQSEEESR

SEQ ID NO: 9137 - protein, 178 aa, Zea mays
  Clone ID: TF_ZmC386130_1.pep
IVRSAAGRKDRHSKVCTARGLRDRRVRLAAHTAIRFYDVQDRLGYDRPSKAVDWLIRNAKAAIDELSADREEGQPAAEAADATTTEPAEQVTSTSYGFAIGGVAGSFMPHSVGADDVSGSGSGSGSGNVKSLFPSSSTTSTTPTQDEYRGSPPDLLSRTTSSNQPQELCLTLQSTNNH

SEQ ID NO: 9138 - protein, 173 aa, Zea mays
  Clone ID: TF_LIB3354-089-Q6-N6-C3.pep
MVVEAMGGAGGKRGRAKGAGAGAEPEPKLRAMAVAVPSPAASPWAQQHPASRICRVSRASCGKDRHSKVYTDKGIRDRLVTISTVATAIQFYDLHDRLGYDQPIKAIEWLIRAAAEAIDKLSSLDASPVGDDDDHHHQQQHLTRSGCSSTSETSKGYVLSLSRSESRVKARER

SEQ ID NO: 9139 - protein, 382 aa, Zea mays
  Clone ID: TF_2051978.pep
LGVPSVKHMFPFCDSSSPMDLPLYQQLQLSPSSPKTDQSSSFYCYPCSPPFAAADASFPLSYQIGSAAAADATPPQAVINSPDLPVQALMDHAPAPATELGACASGAEGSGASLDRAAAAARKDRHSKICTAGGMRDRRMRLSLDVARKFFALQDMLGFDKASKTVQWLLNTSKSAIQEIMADDASSECVEDGSSSLSVDGKHNPAEQLGGGGDQKPKGNCRGEGKKPAKASKAAATPKPPRKSANNAHQVPDKETRAKARERARERTKEKHRMRWVKLASAIDVEAAAASVPSDRPSSNNLSHHSSLSMNMPCAAAELEERERCSSALSNRSAGRMQEITGASDVVLGFGNGGYGDGGGNYYCQEQWELGGVVFQQNSRFY

SEQ ID NO: 9140 - protein, 114 aa, Zea mays
  Clone ID: TF_ZmC585932_1.pep
MSAMKFCRECNNILYPKEDRDQKVLLFACRNCDHQEVADNNCVYRNVVHHSAGEFTQVLQDVAGDPTLPRTKEVRCAVCGHGEAVFFQATARGEDGMTLFFVCCNPSCGHRWRE

SEQ ID NO: 9141 - protein, 152 aa, Zea mays
  Clone ID: TF_LIB5116-028-A1-PF1-D6.pep
LQEIRDLLDQVNACDPYRVAVTVESALFERIGRSTGTHKVKYRSILFNLKADNNPDFRRRVLLGEVRPGSLVDMPADEMASDARKLENQQIKEKALFDCERASAPKASTDQFKCGRCGQRKTTYYQLQTRSADEPMTTFVTCVNCNNHWKFC

SEQ ID NO: 9142 - protein, 98 aa, Zea mays
  Clone ID: TF_ZmC176903_1.pep
RDLGKRVMTGDISPDRFVNMSDEELKSEDQRKMEIELEKENMKKAQVPMAEKSISDSLECGKCKKKRVSYTQAQTRSADEPMTTFCECMNCGNRWKFS

SEQ ID NO: 9143 - protein, 114 aa, Zea mays
  Clone ID: TF_ZmC28241_1.pep
MSTMKFCRECNNILYPKEDREQKVLLYACRNCDHQEVADNNCVYRNVVHHSAGEFTQVLQDVAGDPTLPRTKSVRCSSCGHGEAVFFQATARGEEGMTLFFVCCNPSCGNRWRE

SEQ ID NO: 9144 - protein, 114 aa, Zea mays
  Clone ID: TF_ZmC2003_1.pep
MSTMKFCRECNNILYPKEDRDRRTLFFACRNCEHQEVSDNNCVYRNEVHHTAGERTQVLQDVASDPTLPRTKTVRCNLCGHGEAVFFQAAARGEEGMTLFFVCCSPDCGHRWRE

SEQ ID NO: 9145 - protein, 110 aa, Zea mays
  Clone ID: TF_LIB4828-016-R1-N1-F12.pep
MEFCPVCGILLQIDPGTGSHRLRLFCPVCPYVCPILNKIVKKARLVKKEVEPISSTADEMKSAPKTAVTCQRCNHGEAYFKQMQIRSADEPMTTIYRCCKEECQHEWRED

SEQ ID NO: 9146 - protein, 115 aa, Zea mays
  Clone ID: TF_ZmC10090_1.pep
MAFWQTRDFLFCGICGTLLTFDSVRSASCPLCGFKRDAKEIEGKEIQYTMTAEDIRRGLKTQTEDVVGQRPVTNKACPKCDHPKAEFYNIQMRSADEGETTFYMCKGCGCNFKDE

SEQ ID NO: 9147 - protein, 110 aa, Zea mays; identical to SEQ ID NO: 9145
  Clone ID: TF_ZmC206_1.pep

SEQ ID NO: 9148 - protein, 110 aa, Zea mays
  Clone ID: TF_ZmC206_2.pep
MEFCPVCGMLLQIDPGTASHRLRLFCSVCPYVCPIQNKIVKKARLVKKEVEPIFSTADEMKSAPKTAVTCQRCNHGEAYFKQMQIRSADEPMTTIYRCCKEECQHEWRED

SEQ ID NO: 9149 - protein, 312 aa, Zea mays
  Clone ID: TF_ZmC11532_1.pep
MSDSYCPDCKKHTEVAFDHSAGDTVCTECGLVLEAHSVDETSEWRTFANESNDNDPVRVGGPSNPLLTDGGLSTVIAKPNGAQGDFLSSSLGRWQNRGSNPDRSLILAFRTIANMADRLGLVATIKDRANEIFKKIEDLKSIRGRNQDAILAACLYIACRQEDRPRTVKEICSVANGATKKEIGRAKEFIVKQLEVEMGQSMEMGTIHAGDFLRRFCSTLGMTNQAVNAAKEAVQRSEELDIRRSPISIAAAVIYMITQLSEDKKPLKDISLATGVAEGTIRNSYKDLYPYASRLIPNTYAKEEDLKNLCTP

SEQ ID NO: 9150 - protein, 229 aa, Zea mays
  unsure (1)..(229): unsure at all Xaa locations
  Clone ID: TF_ZmC11532_3.pep
MSDSFCPDCKKHTEVAFDHSAGDMVCTECGLVLEAHSVDETSEWRTFANESNDNDPVRVGGPTNPLLTDGGLSTVIAKPNGAQGDFLSSSLGRWQNRGSNPDRSLILAFRTIANMADRLGLVATIKDRANEIYKKVEDLKSIRGRNQDAILAACLYIACRQEDRPRTVKEICSVANGATKKEIGRAKEFIVKQLXEVEMGQSMEMGTIHAXXFLRSFWSTLGMNNQAGR

SEQ ID NO: 9151 - protein, 172 aa, Zea mays
  Clone ID: TF_ZmC11532_5.pep
EILDFLDTRIHNHATLSSSIFLDLCSIVAEICSVANGATKKEIGRAKEFIVKQLEVEMGQSMEMGTIHASDFLRRFCSTLGMNNQAVSAAKDAVQRSEELDIRRSPISIAAAVIYMITQLSEDKKPLKDISLATGVAEGTIRNSYKDLYPYASRLIPNTYAKEEDLKNLCTP

SEQ ID NO: 9152 - protein, 204 aa, Zea mays
  Clone ID: TF_ZmC11532_4.pep
LPLLNGGSNYLFLSLLFKDRANEIYKKVEDLKSIRGRNQDAILAACLYIACRQEDRPRTVKEICSVANGATKKEIGRAKEFIVKQLEVEMGQSMEMGTIHAGNFLRRFCSTLGMNNQAVRAAQDAVKHSEELDIRRSPISIAAAVIYMITQLSEDKKPLKDISLATGVAEGTIRNSYKDLYPYASRLIPNTYAKEEDLKNLCTP

SEQ ID NO: 9153 - protein, 194 aa, Zea mays
  Clone ID: TF_ZmC246942_1.pep
MVYCTHCADYCPSIKDPDKGYICCGTCGKVLDQEVYTDEPTFVKDNTGQSRLAGSILASIESGYSISHQRTLDKGRDEIRQIVNNLHVSGGETVVSKAYRFYELAVDRNFTRGRRTSHVAAACLYIACRQSKKAYLLIDFSDYLQISVYVLGAVFLQLCQVLLLADHPVVQKLVDPSLFIHRFTKCLLEKRDNA

SEQ ID NO: 9154 - protein, 469 aa, Zea mays
  Clone ID: TF_ZmC9889_2.pep
DLATAIDPAPSPSPGDEDDEDPFLPAGFVSAFSAFSLERHPVLARSASTFSGHLAELERALAVDSATAASNPDPAGPMVSVDSLRAYLQIVDVASILRLDRDIADHAFELFKDCSSATCLRNRSVEALATAALVQAIREAQQPRTLQEISTASNLPQKEIGKYIKILGESLKLSQPLNSNSIAVHMPRFCSLLQLNKSAQELAAHIGEVVANKCFCTRRNPISISAAAIYLACQLEDKRKTQAEICKVTGLTEVTLRKVYKELLENWDDLLPPDYTPATPPEKAFPMTNIYSGRSASGKDMYQDKIFESIKQKCPEPAEPDHMVVVKEEGDKKTAALGRPPTKLDHPELGKVFRPPNAPFSTSPKSDRDKTETSLRGFNLNEVSCAMDSDRTDITVKPTFGDRLSNDPNANPSPNRQPLPWQLKQGAPATAPSYSRLREQQSGLDLVAALKGVGKRSPGDSDVRDKEGK

SEQ ID NO: 9155 - protein, 314 aa, Zea mays
  Clone ID: TF_ZmC11532_2.pep
MSDSFCPDCKKHTEVAFDHSAGDMVCTECGLVLEAHSVDETSEWRTFANESNDNDPVRVGGPTNPLLTDGGLSTVIAKPNGAQGDFLSSSLGRWQNRGSNPDRSLILAFRTIANMADRLGLVATIKFCDRANEIYKKVEDLKSIRGRNQDAILAACLYIACRQEDRPRTVKEICSVANGATKKEIGRAKEFIVKQLEVEMGQSMEMGTIHAGNFLRRFCSTLGMNNQAVRAAQDAVKHSEELDIRRSPISIAAAVIYMITQLSEDKKPLKDISLATGVAEGTIRNSYKDLYPYASRLIPNTYAKEEDLKNLCTP

SEQ ID NO: 9156 - protein, 531 aa, Zea mays
  Clone ID: TF_ZmC9889_1.pep
MSSQCPYCRASGPARCATTQPPLSRAVSECSACARIVLERHLHTHPFFPLLPSLHPLPLVTPDLATAIDPAPSPSPGDEDDEDPFLPAGFVSAFSAFSLERHPVLARSASTFSGHLAELERALAVDSATAASNPDPAGPMVSVDSLRAYLQIVDVASILRLDRDIADHAFELFKDCSSATCLRNRSVEALATAALVQAIREAQQPRTLQEISTASNLPQKEIGKYIKILGESLKLSQPLNSNSIAVHMPRFCSLLQLNKSAQELAAHIGEVVVNKCFCTRRNPISISAAAIYLACQLEDKRKTQAEICKVTGLTEVTLRKVYKELLENWDDLLPPDYTPATPPEKAFPMTNIYSGRSASGKDMYQDKIFESIKQKCPEPAEPDHMVVVKEEEDKKTAALGRPPTKLDHPELGKVFRPPNAPFSTSPKSDRDKTETSLRGFNLNEVSCAMDSDRTDITVKPTFGDRLSNDPNANPSPNRQPLPWQLKQGAPATAPSYSRLREQQSGLDLVAALKGVGKRSPGDSDVRDKEGK

SEQ ID NO: 9157 - protein, 150 aa, Zea mays
  Clone ID: TF_LIB3689-252-Q1-K6-A10.pep
VSHPVVPAVTSTSTHAATQQGGYTNPSLPLPSFRGPPRRAGVRAPAMQQQHQGGGGGGGGGSQFGAPPPDMGPFSPTPAATGPMPLSSRPPSAQPQQQPRTSYEELAPMVPGAAAASGFDDETMGSGRRRRRVVGRVQQPVAAGGDAGAH

SEQ ID NO: 9158 - protein, 144 aa, Zea mays
  Clone ID: TF_ZmC150952_1.pep
KKRPEDSKTCPYYHQLDALYRSKALASSSSGPGAAPALPPPPPPPQRPDQQAAAAAPPVTVVLAPVPLSQTGPHGNGNGNGNGCAGRGSSDNGGGGSGGMQKQQASNGGVAAARFSAVDGAGGNGVATNKREEGIVRKEEAVAA

SEQ ID NO: 9159 - protein, 115 aa, Zea mays
  Clone ID: TF_ZmC434646_1.pep
RPRRAAKNGRRTPKRAPTLTSWTASTPAWARQSRRARNFWTRWSSTPTCATAPRGLGWTRNRPPAAGAIIITLIIKVDRPAALRIFPERRTALARGGPAMVRTPRWKTMAPRMSS

SEQ ID NO: 9160 - protein, 101 aa, Zea mays
  Clone ID: TF_16923001.pep
MPPPPPQVPSVSAASSASLERERLPQWSHAETAAFLAVRADLDHSFLTTKRNKALWEAVSARLHAQGFARTPDQTTHARPTPTRSSSVVHKLKKASYLHHA

SEQ ID NO: 9161 - protein, 244 aa, Zea mays
  unsure (1)..(244): unsure at all Xaa locations
  Clone ID: TF_ZmC228430_1.pep
WSSLQAGLSPTRQQCRNKMRRGQVLQAHQGRPSRAPGREVLQLLIAPRGAARLGAAFATPALGHDHGASWPSSADGNGMDGGPYGAGPCRRRRPAGPQLLVDVRVRLRVRLGRRRRPLWCGGGGPQRGRVRQGDDGHLREDDEAVHGEARRHAARVPGDAGAVRGRAHGARGGVAAPGGRPHEPRARAARQGARRRGLPRRRADRVPPACRRGAGRARAAPSARRRRRAPAAYAGLRPSVAXAP

SEQ ID NO: 9162 - protein, 398 aa, Zea mays
  Clone ID: TF_ZmC22174_1.pep
MEGNLPPQTMVPGGGPFDLGQPFHFAVQPQALQVYQDVFAAPAASQMPELGNVVKASLSDEEEGGDGHLDRGKAAAASQWHRVKWTSGMVKLLVSAVSYIDEDVDADHGTSSGRRKHAVLKRMGKWKLVSSAMTERGFAVSPQQCEDKFNDLNKRYKRLTEILGRGRACQIVEKPELLEQLSLSGKLREEAKKHLNSKHLHYEEMCSYHNRNRYCLLDDPVLQRSLRMALRAPAEQGKQCLFGYDDEDDQMLLSDDDDDYDDDELNDDLEAGAEDHGPHRVHATEKLKHDHEGHCGSHLSEVAAIDMNRMNFEGSGGPSSEKNLSYMRVQIERQRLKIKSQMLRIEQRHFKWLKFSKEKDRELQKMKLENERMALENERLELELKLKEIEIGIKPKRI

SEQ ID NO: 9163 - protein, 131 aa, Zea mays
  Clone ID: TF_LIB3068-006-Q1-K1-A4.pep
EIVVRAPPPSESQDTAGFGGGAPSPSRWPKAEVHALIQLRTELETRYQDSGPKCPLWEDISSGMRRLGYNRSAKRCKEKWENINKYFKKVKESNKKRPEDSKTCPYYHQLDALYRSKALASSSSGPGAAPA

SEQ ID NO: 9164 - protein, 246 aa, Zea mays
  unsure (1)..(246): unsure at all Xaa locations
  Clone ID: TF_ZmC226195_1.pep
LWEQVSRKLAEKGYNRSAKKCKEKFENVHKYYKRTKESRAGRNDGKTYRFFTQLEALHGTGAAPASVAASQVPPAISGGVSGAAGPLAVRLPAEPPPAVSGGVGMPMTTVGYPSFSTSNTEDYTDEDDSDDEGTEELVGGGGNERGKRKRVSEGGASVAGGGSGKMMRFFEGLMKQVMERQEAMQQRFLEAIEKREQDRMIREEAWRRQEMTRLARXQEILAQEPAMAASRDACVLSFIQKITGQT

SEQ ID NO: 9165 - protein, 379 aa, Zea mays
  Clone ID: TF_ZmC1297_1.pep
MLLSGPPPVPTPPLLLPESSGEDGGHDSSSRAAAAVGSAPKRRAETWVREETLCLIALRREMDAHFNTSKSNKHLWEAISARMRDQGFDRSPTMCTDKWRNLLKEFKKARSHSRNSGGGSGSGGNGNAKMAYYKEIDDLLKRRGKATGSGTAGCVGSSAGKSPKSNCKIDSYLQFTTDNGFEDANIPFGPVEANGRTILSIDDRLEDDRHQLPLTAADAVATNGVNPWNWRDTSTDGGDNRGNFGGRVILVKWGDYTKRIGIDGTPEAIKEAIKSAFGLRTRRAFWLEDEDEVVRTLDRDMPVGTYTLNLDDGMTIKLCDASRMQTPEDKTFYTEEDFRDFLSRRGWTFLREYGGYRNVDSLDDLRPGVMYQGLRSLGD

SEQ ID NO: 9166 - protein, 583 aa, Zea mays
  unsure (1)..(583): unsure at all Xaa locations
  Clone ID: TF_ZmC100578_1.pep
LAGSRTAPQLHALAAPVSPTPQQQLPASCAAPPLHAFPAPVSAPPPLSSIPLLTGPMQPAPISSAAPAPAPVDLTRAHAATQQEGFSFSSMSDSESDDEPGDDDMTAETGGNQDRLGKRKRGDGGGSGSNKMXLSSRGSCSRSSTGRRKCSGRSWRPWRSGRRSARXREEAWRRQEVARLNREQEQLAQERAAAASRDAAIIAFLQRISGQSVQPPATAVVVPMPAPVSVHTTPPKQPSRQQQQPPPPSPQATPQSKPISAAPLQQQPPQQQPKDTSQQDAGTPRSLPPASSQSLELVPFAATEHHVDSGLGGGDGGAASSSRWPKTEVHALIQLRMDLDMRYQETGPKGPLWEDISSGMRRLGYNRSSKRCKEKWENINKYYKKVKESNKKRPEDSKTCPYFHQLEAIYNRKHLSSLTTAATSSTAAAAAAPRPAYPDQLNPSRQEIEGKNINDDKRNNGGSGGGTQVPTSNGETATTTTTTPVAFDADTGMKKPEDIVRELNEHPRREFTTEDETDSDDMGDEYTDDGEEGEDDGKMQYRIQFQRPNPGGTNTAPAPAAATTAAPAVPTSAPTSTFLAMVQ

SEQ ID NO: 9167 - protein, 280 aa, Zea mays
  Clone ID: TF_ZmC1297_2.pep
LSQVTGSQHTATPKPQAPPGPGSLLRPISSKSNKHLWEAISARMRDQGFDRSPTMCTDKWRNLLKEFKKARSHSRNSGGGSGSGGNGNAKMAYYKEIDDLLKRRGKATGSGTAGCVGSSAGKSPKSNCKIDSYLQFTTDNGFEDANIPFGPVEANGRTILSIDDRLEDDRHQLPLTAADAVATNGVNPWNWRDTSTDGGDNRGNFGGRVILVKWGDYTKRIGIDGTPEAIKEAIKSAFGLRTRRAFWLEDEDEVVRTLDRDMPVGTYTLNLDDGTCELSS

SEQ ID NO: 9168 - protein, 61 aa, Zea mays
  unsure (1)..(61): unsure at all Xaa locations
  Clone ID: TF_LIB4738-050-Q1-K1-A4.pep
MEAGGPEAGGRDKRVPQWGVQETRELIVARREMERKAVXARRNAKTMWEAVAARLRERGYR

SEQ ID NO: 9169 - protein, 89 aa, Zea mays
  Clone ID: TF_uC-zmflteosinte110f02b1.pep
LIRVRTGLEGRFQEPGLKGPLWEEVSARMAVAVYGRSAERCKEKWENINKYLRKAKESGKKRPAHARTCPYFNELDRLYSRLGQAKQAS

SEQ ID NO: 9170 - protein, 210 aa, Zea mays
  Clone ID: TF_LIB4767-039-A1-K1-G7.pep
HWVPRGRPGRLSEGEGEQQEAARGLQDLPILPPARGHLQQKAPPQSHNRGGSSGASSNRWPREETQALIRIRSEMDATFRDATLKGPLWEDVSRKLADLGYKRSAKKCKEKFENVHKYYKRTKEGRAGRQDGKSYRFFEELEALHAAAPQPPPQHLPAASTAPQLHALAAPVSPPPQQQLPASSAAPPLHAFPAPVSAPPPLLVPPTQIS

SEQ ID NO: 9171 - protein, 166 aa, Zea mays
  Clone ID: TF_LIB3689-215-Q6-K6-F4.pep
MPPPFSPAGGAGQRISLAEAPSPISSRPPASTPAKQYDELGASGAGAVGFDAEGLAAAAAGEEGASGGSAGNRWPRQETLELLKIRSDMDAAFRDATLKGPLWEQVSSPTTTLPRTEAPGTGTAAAHQSTAPEACKRRRATAALEPAGSSAKAAARPRRRRSQRTL

SEQ ID NO: 9172 - protein, 176 aa, Zea mays
  Clone ID: TF_ZmC3461_1.pep
PPQQKPPMPQQQSMDIVMVPAETTPHADIPVHEGSSGGAASSRWPKAEVHALIQLRSNLDTRYQEVGPKGPLWEEISAGIRRMGYNRNAKRCKEKWENINKYFKKVKESNNSRIVFPGHGPVIDPSARTQALSPGDSHPPPLLHGFFSFSRSHVTFVSTHLSPPCMLVHISSSLHL

SEQ ID NO: 9173 - protein, 141 aa, Zea mays
  Clone ID: TF_ZmC87468_1.pep
FGKLADLGYKRSAKKCKEKFENVHKYYKRTKEGRTGRQDGKSYRFFDELEALHAAAPQPQPPLQKQQQQLPPASTTAPPLHAFAAPVSAPPPISSMPPSTGPMQPAPISSAAPAVQVQTLVELAGAHQPLNLLQGFSFSSM

SEQ ID NO: 9174 - protein, 197 aa, Zea mays
  unsure (1)..(197): unsure at all Xaa locations
  Clone ID: TF_LIB4172-051-R1-L1-B3.pep
HTWRRARVRVCGSSSCTVSMQQQQHGGGGGASGGGPAQQFCAQQVEMPLPFSPVGGAGQRISLAEAPSPISSAGRXRPAPAQQYDELGPSGAGAVGFDAEGLAAAAAGEDGASGGSAGNRWPRQETLELLKIRSDMDTAFRDATLKAPLWEQVSRKLAEKGYXRSAKKCKEKFENVHKYYKRTKESRAGRNDGKTYR

SEQ ID NO: 9175 - protein, 637 aa, Zea mays
  unsure (1)..(637): unsure at all Xaa locations
  Clone ID: TF_ZmC1882_3.pep
HTGDWKIDESPVDGKKFDRQALEELSKEGVTLMMSDSTNVLSPGRSISESVVAGSLLRHISEAKGRVITTQFASNIHRIGSIKAAADLTGRKMVFVGMSLRTYLEAAFKDGKAPLDPSXLAIKVEDMDAYAPKDLLVVTTGSQGEPRAALNLASYGGSHALKLSKEDVLLYSAKVIPGNETRVMKMMNRLTDLGPKIIMGKDSGLHTSGHAYREELEEVLRIVKPQHFLPVHGELLFLKEHELLGRSTGIRHTTVIKNGEMLGVSHLRNRRVLSNGFVSLGKEDLQLMYSDGDKAFGTSTDLCVDERLRIASDGIIFVSMEIFRPQKEHGLAQSGLKGKFKITTRCLWLDNGRLLDALYKAAHAALSSCPVNCPHSHMERMVAEILRKMVRKYSGKRPDVIAVATENTTAGFSEHLDTKASGNFGPSSATSHLSRSPATSLEGSYKTHPDNPEVDAEEILPETVRTTPDDATTSSNGEALFSSDLHQPKTLEHFWESFKSPTAVKIARIVNGGNKQNFGKIGIMGQDSLIQSAPAPVKSSKKNKWKPEEIKSLIQMRGEMNERFQSVKGRMVLWEEISDNMLKQGISRTPAQCKSLWTSLVQKYEESKKDAESMKTWPYFSAMDRILSQQGEMATKG

SEQ ID NO: 9176 - protein, 576 aa, Zea mays
  unsure (1)..(576): unsure at all Xaa locations
  Clone ID: TF_21214403.pep
TRPKGRVITTQFASNIHRIGSIKAAADLTGXXXVFVGMSLRTYLEAAFKDGKAPLDPSTLIKVEDMDAYAPKDLLVVTTGSQGEPRAALNLASYXXSHAXXXXXXXXXXXXXXXIPGNETRVMKMMNRLTDLGXXXIMGKDSGLHTSGHAYREELEEVLRIVKPQHFLPVHGELLFLKEHESLGRSTGIRHTTVXXXGEMLGVSHLRNRRVLSNGFVSLGKEDLQLMYSDGDKAFGXXXXXXXXXXXXXXXXXXXXXXXXXXXXXXXXXLAQSGLKGKFKITTRCLWLDNGRLLDALYKAAHAALSSCPVNCPLSHMERMVAEILRKMVRKYSGKRPDVIAVAMENTTASISEHLDAKSSGNFGPSSATSHLSRSPAMTLEGSXXXXXXXXXXDAEETLPEAARTAPDDATTSSNGEAFFSSDLHQPKTLEHFWESFKSPTAVKIARIVNXXKKQNLGKIGIMGKDSSIQSAPAPAKSXXXNKWKPEEIKSLIQMRGEMNERFQSVKGRMVLWEEISDNMLKQGISRTPAQCKSLWTSLVQKYEESKKDAESMKTWPYFSAIDRILSQQGEMATKG

SEQ ID NO: 9177 - protein, 116 aa, Zea mays
  Clone ID: TF_ZmC151302_1.pep
ENINKYFRKAKESGKKRPAHAKTCPYFDELDRLYSRSADGGGGEARQLGSSELLDAVIKYPDVRYGPPVFGGGNANNEGGEDDDSDGEEEEEEEEDGIGKGRAGDDQDDEVDNDDE

SEQ ID NO: 9178 - protein, 113 aa, Zea mays
  Clone ID: TF_ZmC170123_1.pep
GGSTPSRWPKEEVEALIQMRNEKGEKYHDAGAKGPLWEDIAAAMRGIGYSRSAKRCKEKWENINKYYKKVKESNKRRPEDSKTCPYFHQLDAMYRNKHRSGTGGRTAPRTNMA

SEQ ID NO: 9179 - protein, 274 aa, Zea mays
  Clone ID: TF_ZmC36384_1.pep
WVHLCLVVGAGAGGRDERVPQWGVQETRELIMARGEMERETVAARRSAKTMWEAVAARLRERGYRRTAEQCKCKWKNLVNRYKGKETSDPENGRQCPFFDELHGVFTERARNMQQQLLESESGVSVKTKLKRPGGDRSSGESDDKDDDGEESDDEKPMHNRKRKADDKKQQHQRMSEKSRTGISSIHELLQDFLVQQQHIDVRWREMIERRAQERVVFEQQWRLTMQRLEQERLLLEHSWMEREERRRMREEARAEKRDALLTTLLNKLLQEDL

SEQ ID NO: 9180 - protein, 45 aa, Zea mays
  Clone ID: TF_700082065H1.pep
AHCFKCTHPSCLVKKKVERSRDGHVTEIIYKGTRNHPMPTQSRRP

SEQ ID NO: 9181 - protein, 284 aa, Zea mays
  unsure (1)..(284): unsure at all Xaa locations
  Clone ID: TF_700572485_FLI.pep
AFAPVSAHSDASLLESQEALDVSSTLSNEEDERATHGTVSIECDGDEAETVSKRRKLELDALEATLTATTSTTSTIDMGPAASRAVREPRVVVQTTSEVDILDDGYRWRKYGQKVVKGNPNPXRKHVERASHDLKSVITTYEGKHNHEVPAARNSGQGSSSAPSASQAGGSHRRQEPAQASFAHFGTASFSSFGLPPSGQLGPTTGNFGFGMVPPGMTIPVPSLGSLAPVKMVGNSSAMQGYPGLMVPGEPKVEPVSQPLIQMANASPPAYQQILSRPPFGHQM

SEQ ID NO: 9182 - protein, 95 aa, Zea mays
  Clone ID: TF_ZmC1372_1.pep
VLDDDDLCVANVSSHNCSDACRVSGGEERNQRREEDDDEETAAAEAEAGNGSQLMVVPEDGYEWKKYGQKFIKNIQKIRYFLPSIHFHVVSATLT

SEQ ID NO: 9183 - protein, 211 aa, Zea mays
  Clone ID: TF_ZmC746_7.pep
TRPARTTGLEQRRQRVSSAGGENPVDDGRSWRKYGQKEILGAKHPRGYYRCSHRYSQGCQATKQVQRTDEDPTLYDVIYHGEHTCAPHRPAAAEHNPDARGHLQTLSAGLTVKTEGLPDPPRGRGAATPLYLSASSTPPSTSENWGVSPATSGSTHVASFRPFEAAEWRGQAEHQEVVSALVAAIAPPPAVDSLDDLLIDIDLDDIASFFA

SEQ ID NO: 9184 - protein, 85 aa, Zea mays
  Clone ID: TF_18383748.pep
QAHHPHPAERCHCSSKKKRARQGMLSRRTVRVPAAAAGSQPPHPHAPASSDIPADDYSWRKYGQKPIKGSPYPRGYYRCSSARAA

SEQ ID NO: 9185 - protein, 175 aa, Zea mays
  Clone ID: TF_ZmC746_4.pep
MASTEMEMGVVGGGVNSSGGGSCGGLVVTELSHIKELVRQLEVHLGGSPDLCKHLASQIFSLTERSIGLITSSNLDGARRRKRPAGDAGLASPLSATPTSDVTDGPFQTTKKKRKVMEQRRQRVSSAGGENPVEDGHSWRKYGQKEILGAKHPRCYYPCASRSSQGCPATKQVQR

SEQ ID NO: 9186 - protein, 229 aa, Zea mays
  unsure (1)..(229): unsure at all Xaa locations
  Clone ID: TF_LIB4746-103-R1-K1-B6.pep
LGTSRPARTCSRHPRARGGVESCAADSLTSPVTCPPSCRSYFRCTHRHTQSCQASKHVQRTDGDPLLFDVVYHGSHTCAQAQGAAARPVNQPAQQQTDTEQTTSPGFQAGPAVLPFSLRPASNKPPGADDAGDGATSSRFIATGCTVTASPFVSPATSECRIVSGGGGGYAVERWAGGXXRXPWAGVRNVSDVELAATTNSLMAMGEMDFMFPLDAANFLELENPASYC

SEQ ID NO: 9187 - protein, 64 aa, Zea mays
  Clone ID: TF_ZmC12542_1.pep
ITLGQGPEKSEDEGARVGGGRRRAAVRRAIESTAAVLADGSGCGACVVVDAVVGGDDVAGVVAV

SEQ ID NO: 9188 - protein, 108 aa, Zea mays
  unsure (1)..(108): unsure at all Xaa locations
  Clone ID: TF_jC-zmshLIB3569P036h02b1.pep
ATRACFRGENFYEPLNNTRKSLGREHLEQTASTADGENPDDDRRRWRKYXQKEILGANHLRGYYRCSHRYSQGCHATNQVPRTDKDQTLYYIIYHCEHTRAPHRPAGG

SEQ ID NO: 9189 - protein, 101 aa, Zea mays
  Clone ID: TF_ZmC7978_155.pep
WKKFGEKNIFGYIFPRSYCTCIWRKSTGCSATKILQPNNNDPNTLFVMYISKHNHGFSNEPHLEPSSPEPHLEPSSPPGTGRKREEYDVSIVENTFFFDTL

SEQ ID NO: 9190 - protein, 99 aa, Zea mays
  Clone ID: TF_ZmC735051_1.pep
ARRTGGWPPRWTPYSPTAPPRERCPRRRRPGALRWPPRSRRGPRSGRMCARAEPYDADTNHLRDCYQWRKYGQKVTRDNPHPRSYFRWAYAPSCPVKKK

SEQ ID NO: 9191 - protein, 80 aa, Zea mays
  unsure (1)..(80): unsure at all Xaa locations
  Clone ID: TF_LIB3245-169-P1-N1-B3.pep
ITLEATTPGLTPGCGAVKEQKIIAHAGKMSDGYRWRTYGQXIPNGXPNPMSYYLCTHGGCPVLKQFNKAPDDDNNIFVTY

SEQ ID NO: 9192 - protein, 147 aa, Zea mays
  unsure (1)..(147): unsure at all Xaa locations
  Clone ID: TF_LIB4705-005-R1-M1-A11.pep
MSWLQMQTEDXVPTPAQRIIVQTNSEVDLLDDGYRWRKYGQKVVKGNXPHPRSYYKCTYQGCDVKKHIERSSXQDPNAIITTYEGKHSHDVPAARNSSHAAANANGSCSTSVPHRVQSSASSSRRMADLRNTSSASSMHLKEEDEIT

SEQ ID NO: 9193 - protein, 162 aa, Zea mays
  Clone ID: TF_ZmC1093_1.pep
LACINRCLKLHKPSTSSSKVQLLYIVYSEIHFREHQMNILESSTRSGCQVVLNEIEHQRALMKGLYDLIVPTLDPCSRQEKLVQQIFQDISSSSGKVLSFLEPGDNSKKQANLIKYRRKRGKNSGVESHMLGEEAKEIGNKRRCVAKEVYIYMFTCVSFTWA

SEQ ID NO: 9194 - protein, 189 aa, Zea mays
  Clone ID: TF_ZmC35722_1.pep
IQTKLGHYSQLDPSTCPGSTPPYLPSPTLLQHTAGRPVVVRPSVLSSIHAAGDGAEHNVFQIERVVVPQVRHAREAAAAEPVLLLLLQLEARRHVALVRAGRGGPHRLGRGSGAPRRGEAAKHLLQLQLLLPLAAAAAALQLPRGLRRQHGALVSGLPVAGVGRREAAGPRVEVVVAAVAGSRQVCAPM

SEQ ID NO: 9195 - protein, 207 aa, Zea mays
  Clone ID: TF_ZmC45695_1.pep
MEEERCFNNWDLDAVVRLGCRRRLSPPRQPDPFASLLPPTLPSPSPSPPQKEKPVVPALAKGPEPEPYAGWRFPNLGAGGGQDGDELMRAMLAVQPSLPQPLPTTTPTPTPTLPPAAGEHRQSTVTAVDVPLPQVRPAPAARAQPSGRQVPGSVPRSKRRKNQVKKVVCHVPADGSSSDMWAWRKYGQKPIKGSPYPRGYYRCSSSQ

SEQ ID NO: 9196 - protein, 200 aa, Zea mays
  unsure (1)..(200): unsure at all Xaa locations
  Clone ID: TF_ZmC883338_1.pep
MEGSSSQLLETCLPASLYAVTPPPCAHPHPLLAPLPNQQHMLLQMPFVKEQAANNHGLMLSSDHHHHSGLLYPLLLPGIPFCPSVAAACEKTTTTGSGALDAGEAGTSSAAAKATGEIASTAATACNSPSSCNWWKGPAAAAAGEKGGRMKVRRKMREPRXCFQTRSDVDVLDDGYKWRKYGQKGVKNSLHPRSYYRCTH

SEQ ID NO: 9197 - protein, 69 aa, Zea mays
  Clone ID: TF_15499682.pep
TGVRSRAGGAAQKRRTKKLILGSRLDMPVVAGGHRGRGRQGAGRGRGRGRRVAVLALVRHHQHGRVLVP

SEQ ID NO: 9198 - protein, 210 aa, Zea mays
  unsure (1)..(210): unsure at all Xaa locations
  Clone ID: TF_LIB4738-091-Q1-K1-G2.pep
RHRSPGGLPESCPAISEPAPTASQQHKQNRSVGRSIDGQRYRRQWRQPAGGDGAGPPQGAGDAAGGAPRRLLAGPLQAPRLADLLHHRPLHQPAHHRHLIKXPTAAPLTRRPSSRLLPRKGRGWTRRXHEVRVGSAGGGGGDHPADDGYSWRKYGQKEILGAKHPRCPLDTCCAIRTFFPPPSSFPHSTAQSHLHVFLSQFRKWNRNHFA

SEQ ID NO: 9199 - protein, 94 aa, Zea mays
  unsure (1)..(94): unsure at all Xaa locations
  Clone ID: TF_LIB3069-004-Q1-K1-F1.pep
LVIEPAGIGKRDREFIAVEQTVMAQDVQDQSDQERTHXTKVRAGRTIPRRIYMFTDPGSPGRKHVARASHEPKAEITTSEGKHIHEIPVSRNAS

SEQ ID NO: 9200 - protein, 182 aa, Zea mays
  unsure (1)..(182): unsure at all Xaa locations
  Clone ID: TF_LIB4172-007-Q1-L1-B12.pep
NSARGGIYRCSSSXGCAARKQVERSRADPNTFILTFTGEHNHAAPTHRNSLAGTTRHKFPSSAAPQPPPPSVVVGGDAQDRQPSPSPTSTSTAGLSPTTPLRTPSMEEEEEEEEEEEGAAGGHGDWRGRAPVPQHRRRRRGTDVLALRRRRRALPKPSLGDSRQQRRRASHRGSRRWELTSS

SEQ ID NO: 9201 - protein, 80 aa, Zea mays
  unsure (1)..(80): unsure at all Xaa locations
  Clone ID: TF_LIB3595-027-Q1-N6-D7.pep
RSESIFLYIPPGEYLSRKSGQKPIKGSPYPRGYYKCSPVXGCPARKHVEXAPPTDPAMLVVTYEGEHRHNAGRARARAQP

SEQ ID NO: 9202 - protein, 84 aa, Zea mays
  Clone ID: TF_LIB4758-139-A1-K1-E9.pep
GYLEAGQCKIRKTLPKWSSQVRVSAVQDVSPLDDGLSWRKYGQKDILGAKYPRSARRRHTIERTIFFRIQTGLRARTSGAVSLC

SEQ ID NO: 9203 - protein, 180 aa, Zea mays
  Clone ID: TF_LIB4746-019-R1-K1-E5.pep
VPSSGRGKHVERASNDLKSVITTYEGKHNHEVPAARNSGNGHPSSGSTPAPPQGSGGLHRRLEPPQVSIPRLSAAAAAAAAAAAYGSLSLRFPPQLSAAPGGFSFGMLRPTGMAPSLGGFLPAQMPGRGLPMQGCAGLVLPRGEAKVVSPEQQSGLPGGTGMPRQPTSSKSSSLWPGGLR

SEQ ID NO: 9204 - protein, 246 aa, Zea mays
  Clone ID: TF_ZmC746_6.pep
DWTGARYAAVRCGDGAEPHQGAGEAAGGAPRRSPDLCKHLASQIFSLTERSIGLITSSNLDGARRRKRPAGDAGLASPLSATPTSDVTDRPFQSTKKKRKVMEQRRQRVSSAGGENPVEDGHSWRKYGQKEILGAKHPRLAGTRISLRQPEQQRRGWEDAPTPFLFSSTPACLVPERSPFSAPSTSENWGVSPATSDSNHVVSFPPFEVAAAAAAQFEFEEVMSAIDRADGEFLEDLDIYVSSFLA

SEQ ID NO: 9205 - protein, 99 aa, Zea mays
  Clone ID: TF_17969955.pep
MHACMQEISINNACTVQVQRCAEDKAVLITTYEGTHSHQLPPQAAAMAKTTSAAAAMLLSGPAVSRDAGALFAGHHVRRRSSPSTPLRVGRHALRDSTE

SEQ ID NO: 9206 - protein, 74 aa, Zea mays
  Clone ID: TF_ZmC165426_2.pep
GSKEVLYMLISRKRDIIYGPRKRRLSDPLLAVLPPLVPVAVRRGRPPLPAPSKALRTRTRQAIISGRDNLFRTS

SEQ ID NO: 9207 - protein, 32 aa, Zea mays
  Clone ID: TF_ZmC1208722_1.pep
GNPCPRAYYRCTMATGCPVRKQVYIYIYMYLM

SEQ ID NO: 9208 - protein, 116 aa, Zea mays
  Clone ID: TF_LIB3245-375-P1-N1-D4.pep
EKVHDDIKFKCTLIPFTGAKLDLPLIRPPNETRGLLLVSIDLTTAATLTATAGSKRSSRRAGAGSASANAAVAVAVAVVAVVALVGDDEHGRVVGGALHELPRARHPWRCCTGSNR

SEQ ID NO: 9209 - protein, 70 aa, Zea mays
  Clone ID: TF_LIB3245-060-P1-KI-G10.pep
MIIRCILKLVTSSKGAMLHSSNYLILLDPVAAGEGGGGARPPCRSAGCLRRFLAELLQAASSDAAPLSKF

SEQ ID NO: 9210 - protein, 213 aa, Zea mays
  Clone ID: TF_ZmC300_51.pep
LSCLDYKWLKVAKIYLLKFISRDWNRALVCRSKISCLPPMNLQKMEEPDRPKSACIYHLLRHGAGREGVVALGGAGRQLLLHGAGAPRVSVRPPQVGRVTDIRRRASPRRRGAGRGRAAASIGGDRRHGRRRPGRGVEADGDGLPGRCPQLELGGGEREEGAVARVVAVVGDRVQWRVAVVLLLHLLRGRAAHVVLVRASVVIPAAGQEPVSE

SEQ ID NO: 9211 - protein, 238 aa, Zea mays
  Clone ID: TF_ZmC13091_1.pep
MRPKNSSSWATLTAVPYDDGYEWRKYGEKKINGTLFTRSYFRCTYKDDAGCLATKHVQQMDSDDNSSPPMFHVTYHNDHTCSSAKAAAKANTGGSSSNNNSHLAALLADCCDGSGCNKGLTTTTTNGHAAADAAAMNMNMKQEPSLLPPPPPLAEPPSACFPYDQMPQQCHQLLFPVSMEQQFPGNGEEIPSAAGSCISGETSWDGYYYSGDMAAAEDDRFHDLERFLLGDSFMDYQY

SEQ ID NO: 9212 - protein, 76 aa, Zea mays
  unsure (1)..(76): unsure at all Xaa locations
  Clone ID: TF_ZmC65166_2.pep
TKIADIPPDEYSWXKYGQKPIKGSPHPRGYYKCSSVRGCPARKHVERCVDDSAMLIVTYEGEHNHTRMPTTQSAQV

SEQ ID NO: 9213 - protein, 216 aa, Zea mays
  Clone ID: TF_LIB4758-016-R1-K1-D2.pep
MTCVCMSLQVSAMQEEMEKMKEENRMLRRVVDRTMRDYDELKKKVEACYQQQQADEPKEPEVFLSLGATAAGTGGGFAEPKRKERQTVRRPSAGSDDTDDDTKEDRLGLSLSLAASSYEEEKLGAGPAGHDLEEASVAGADRKAKGYALLESSKLEAPAPPAAAGDLAAAGITSQSVNPANRKTRVSVRVRCQGPTMNDGGQWRKYGQKVAKGNPC

SEQ ID NO: 9214 - protein, 236 aa, Zea mays
  Clone ID: TF_LIB4759-112-A1-K1-D5.pep
MACVADRQAAVREVAQVYELIKLQQPLLLLHSSTSQLAQSLLGKALRALNVALSVMNQQQPPPPPPPPPPAVAPVSVVVVKAEPHLSPPSPASADSEATAPPARRGAKRTRRSAAPMGEKKKNSSSWATLTAVPYDDGYEWRKYGEKKINGTLFTRSYFRCTYKDDAGCLATKHVQQMDSDDNNSPPMFHVTYHNDHTCSSAKAAAKANTGSRSSSNNNSHLAAAAAGAAAMNMNM

SEQ ID NO: 9215 - protein, 320 aa, Zea mays
  Clone ID: TF_ZmC1183_1.pep
MAEAVESGGRALLVSELGRVQDLVSQLELQLRAPADADSVDLCRCLVQQIVALTDRSIGMLHSSPDLAPSPLTATGSPISSDAASDHHPFRPAGASPKKRKATARWTSQQVRVSADDGHSWRKYGQKDILGARHPRAYYRCTHRNSQNCLATKQVQRADDHPALFDVVYHGEHTCRPAAAGGGSKRAQQHNPHAQAALQGLAARLTVATTTTDNAAGLPPMTPESCPVRGASSPWSLASPVGSDFNGCLHQGISPCPVPGYRDWTSDVDLQEVVSSAFAAVSSVAPLPVPDDEFMPLECVEYVFDQNFDIDTAMPSLYYP

SEQ ID NO: 9216 - protein, 367 aa, Zea mays
  Clone ID: TF_ZmC4944_1.pep
MEEVEVANMAAVESCHRVLALLSQQQDPALLKSVASETAEACAKFRKVAALLGSASGGGGCGHARGRFSRRVRPLGLVNQKSPLGIATGSGNPLEMMPSTAAAAGSPSPPQSTSYAQMRARLSSAPESSRGLDLACSSSRCSPHPFGAPKLVQPLSVQFQIGSVAHRYPFHQQQSRQKLQAEMFRRSNSGISLKFDSPSPSGGAAGTMSSARSFMSSLSIDRSMASLDGKRPFHLVGTPVASDPADAHRAPKRRCTGRGEDGRGKCATTGRCHCSKRRKLRIKRSIRVPAISNKIADIPPDEYSWRKYGQKPITARAHPRGYYKCSSVRGCPARKHVERCVDDPAMLIVTYEGEHSHTQLPAQPAQT

SEQ ID NO: 9217 - protein, 314 aa, Zea mays
  unsure (1)..(314): unsure at all Xaa locations
  Clone ID: TF_ZmC740_2.pep
MAVDLMGCYAPRRANDQLAIQEAAAAGLRSLELLVSSLSTQAAAPHRAAAHQLQKPPSQPPIGEIADQAVSRFRKVISILDRTGHARFRRGPVVEPATGAXPAVAAPAPAPALHVVAPVAVAQPQSLTLDFTKPNLAVSGGATSVTSTSFFSSVTAGEGSVSKGRSLVSSGKPPLSGHKRKPCAGAHSEATTNGSRCHCSKRRKNRVKRTIRVPAISAKIADIPPDEYSWRKYGQKPIKGSPYPRGYYKCSTVRGCPARKHVERATDDPAMLVVTYEGEHRHTPGAPAPAPSPLSDSLFCSKPTHCCRQLLSMA

SEQ ID NO: 9218 - protein, 99 aa, Zea mays
  unsure (1)..(99): unsure at all Xaa locations
  Clone ID: TF_LIB4315-021-R1-N1-F6.pep
SGRKRVGSARLGECGGRPRGASGEGQPQSXSRGWRKYGQKXIKGWXEXXGYXPAHPGGCPARKQVERSQADTAGVIVSDKGEDDQKGPKHKTRGGSCWY

SEQ ID NO: 9219 - protein, 228 aa, Zea mays
  unsure (1)..(228): unsure at all Xaa locations
  Clone ID: TF_ZmC581509_2.pep
MENYHMLFGRPSTQPSSAATSNSYNFMLPPAGSTSGAGGLRDHDRGGGQHSGHAGGVPSSSSFFAEPSNTSSKDSGAAASSPPPAAGIGRGEEPAAGTPPAAAEVDGRLQAGKRKGEKKERRPRFAFQTRSQVDILDDGYRWRKYGQKAVKNNKFPRSYYRCTHQGCNVKKQVQRLSRDEXVVVTTYEGTHTHPIEKSNDNFEHILTQMQIYSGMGSTFSSSSHNMFH

SEQ ID NO: 9220 - protein, 205 aa, Zea mays
  Clone ID: TF_ZmC1382_3.pep
MATSLGLNPEDLFTSYSSSYYSSPPFMSDYAASFTPAGGDSTAFSSELDNLHHFDYSPAPIVTAAGAGAGGGDRNEKMMWCQGGGDERRLRSNGRIGFRTRSEVEILDDGFKWRKYGKKAVKNSPNPRNYYRCSSEGCGVKKRVERDRDDPRYVITTYDGVHNHASPAAAAIIVPYGNGGGNSGFYSPPHSGSPSATSYSGSLVF

SEQ ID NO: 9221 - protein, 215 aa, Zea mays
  Clone ID: TF_ZmC300_25.pep
MSPAPSSHHSQTNSRKEKRMRKVDTFAPHNDGHQWRKYGEKKINNTNFPRYYYRCTYKDNMSCPATKQVQQKDHSDPPLYAVTYYSDHSCNSAFLPLSPSEFQLRTPSGKAVSICFDSSSGPAAQEPAAVASVATNASGGSPSSSAAAVRRGTPPDISYPPDLRRSDTYPWSAGAVEQKLASCATECHDAFSAGAVPEEVVDAGRFGSIRFFHFL

SEQ ID NO: 9222 - protein, 329 aa, Zea mays
  Clone ID: TF_ZmC11799_1.pep
MAGAAGDRSEEDVGTDWPFGGVDAFTEYSSFFAEPGWPGGLAGELIPVLDLPEAAAPLPAQLSTEEPSEEPAPARSGDAGASSSSSGDGAAPGNGDGDDDRKAAPAAEAAGRKPAAKKGQKRARQPRFAFMTKTELDHLDDGYRWRKYGQKAVKNSPFPRSYYRCTNSKCTVKKRVERSSDDPSVVITTYEGQHCHSIGPFQRGGGGGAAAARYHSAAAVALAEQMYSSSTTSSFIPAARQQLFSLPPLHPQSSPPSSETTPPVVSSVTTTSFQRANDGDELWRTGYGSGVPVAQSPSTPPSVPPPAISVQKAGLLDDMVPHGVRHGTP

SEQ ID NO: 9223 - protein, 314 aa, Zea mays
  Clone ID: TF_ZmC5807_25.pep
MADSPNPSSGDLPAGAGCSPEKPVLADRRVSALAGAGARYKAMSPARLPISREPCLTIPTGFSPGALLESPVLLNNFKVEPSPTTGTLSMAANMNKSTHPDILPSPRDNSADSGQEDGGSREFEFKPHLNSQSSATAVNNQNHHDIPMQNHGSNHASPSSNLMTENKPLCSRESSHTANVSSAPNQPVSIVCPSDNMPAEVGTSEMHLINSSENAAQETQTENVAEKSAEDGYNWRKYGQKHVKGSENPRSYYKCTHPNCEVKKLLERSLDGQITEVVYKGHHNHPKPQPNRRLAAGAVPSSQAEERSMVWHLL

SEQ ID NO: 9224 - protein, 566 aa, Zea mays
  Clone ID: TF_ZmC1508_1.pep
MADGDPEPAPAPAPALANEKLHVRAAAYVDETRPPPPLEPSGGPDEEKRPPEEVEAEVEMHPPREPTGEPPVDRPGVEVVADMKANEVEKERGDRAKEKREKDKGKGKEEKEKVDEEAKGKVTAVMKVDGTEKEVKPTRRPAGASAETPILAVPVVAVPCFIAPPGFAGQFAMTHQAALASVTAQAQMHLQSPTPSACSEVPSSPFYMTPRSLVPLQHSPSVTEGNICTPIADKSFSSDSKSHHVVNMVADGFNWRKYGQKQVKSSDNSRSYYRCTNSGCLAKKKVEHFPDGRVVEIIYRGAHNHEPPQKTRFAKERVTPISVPSGGETLRLVNTEIVESSTPTCELERSAISETSEQHLFCSSDCEGDAGNKSEDEHPSAEALPKRRTLEATAPNLTPVRRTVREQKIIVQAGKMSDGYRWRKYGQKIVKGNPNPRSYYRCTHGGCPVRKHVEKAPDDVNNIVVTYEGKHNHDEPFRSSSIPVSVISPSATATEQPNTSSTSDERPPTITQKDANSESDKETTLKFGGEKALESAQTLLSIKTNSDDMKNSVLKETSAAVPVQNN

SEQ ID NO: 9225 - protein, 325 aa, Zea mays
  Clone ID: TF_ZmC154114_1.pep
NLLGGAPTEAPARRSSPRKCAATELVAKGRESAAVLKAMLGQLPAAATPHDGLRDLAEQVLRCCDRALAALLRGAATEEAACSSSARKRRKQPAERQGGLAPPPPSPAATGSKRMRMSRGERGTRAEKKETMEDGFIWRKYGQKDIHGSNYPRLYFRCTYKDDRGCEARRQVQRSDTDPCAAYLITYFGEHTCCCRDDAVEAPAPFVIDFGLSAAACDDGLQLPQYGSPWPSCDDDGPGPVELQTPPPRTSADLCSSPPEEELRAGACDVAEFVAEQSTTVTAELMGRMTSPEWDGCLDWELGEGDSSLDVDGFDRYYFDYSDLL

SEQ ID NO: 9226 - protein, 327 aa, Zea mays
  unsure (1)..(327): unsure at all Xaa locations
  Clone ID: TF_ZmC96043_1.pep
RSYFKCTHPNCLVKKKVERSHEGHVTEIIYKGTHNHPKPTQSRRPGAGAHPLGGGAQADAADNLQGSQANAAEANQPWRAGVQDGVDATSPPSVPGELCDSAASMQVDCAARFGSPEGADVTSAVSDEVDGDDRVTLTHGGANAAEGDELESKRRKLESYAIDMSTASRAVREPRVVIQTTSEVDMLDDGYRWRKYGQKVVKGNPNPRSFYKCTQPXCMVRPLFSARFLRSYALLSFFPSLGLLFFFFSLASSPFFFFSSFPLFPPPLFPFFPPFFRPFSLPFPLFFPFPPSPFRLFSRFPPFSFLSSPFSPVFLPLFLPVPFRFFL

SEQ ID NO: 9227 - protein, 201 aa, Zea mays
  Clone ID: TF_ZmC208922_1.pep
MQPHEKVAVLKPVASRPFSSFWPFPKFLHDFNATCSPTITFPQESELIRPKATRLASLPANLPAQIAAAIDAGSDTMSEEVEEYAKHHTYRDHATAWQAARRNGERSRLSLDGYSWRKYGQKKVKGSEFPRSYYKCTHPSCPVKRKVETTPDGQVAEIVYSGEHNHLKPGKPCPPRKPLLSTSTDAVMCDTHGIDDMTPPE

SEQ ID NO: 9228 - protein, 103 aa, Zea mays
  unsure (1)..(103): unsure at all Xaa locations
  Clone ID: TF_LIB4980-002-R1-M1-H1.pep
MDGGDLCRXPREKRVVRVPAISDKNADIPADNYSWRKYGQKPIKGSPHPRGYYRCSSKKDCPARKHVERCRSDAAMLIVTYENDHNHAQPLDPSVLTAANAEA

SEQ ID NO: 9229 - protein, 89 aa, Zea mays
  Clone ID: TF_ZmC425883_1.pep
RFCFQTRSDVDVLDDGYKWRKYGQKVVKNSLHPRSYFRCTHSNCRVKKRVERLSTDCRMVMTTYEGRHTHSPCSDDASSGDHTDCFSSF

SEQ ID NO: 9230 - protein, 256 aa, Zea mays
  unsure (1)..(256): unsure at all Xaa locations
  Clone ID: TF_ZmC58440_3.pep
MSSGEDGYCSSDSPRAESPDQPQAAADAESPRAGAGPNKRDLHASSPAAKRSRRSVEKRVVSVPLAECGEGPPPSDSWAWRKYGQKPIKGSPYPRGYYRCSSSKGCPARKQVERSRADPAVLLVTYTFDHNHEAPRPKSSCCHQQGRPPAPKPDEPVAEQEDELGPEHEPEDEQEPEQKVVPGLAGPETAPATATLAPVAEEDESFXLGWVDQYPTWHRSALYAPLLPPEEWERELXGEDPLFAGLGELPECAVXF

SEQ ID NO: 9231 - protein, 119 aa, Zea mays
  Clone ID: TF_LIB3245-348-P1-K1-A1.pep
RTRGRTRGQGLKTSAPTFDKPADDGYNWRKYGQKAVKGGEYPRSYYKCTHTSCPVKKKVERSAEGHITQIIYRGQHNHQRPPKRRSKDGGGPLNEADVLHENEDISTRSEPGSQDTLKT

SEQ ID NO: 9232 - protein, 197 aa, Zea mays
  Clone ID: TF_LIB4738-064-Q1-K1-A4.pep
LLGSYWSHLDCASDIYYNRNRSKKKAEKRQPRVAFLTKSEVDHLEDGYRWRKYGQKAVKNSPYPRSYYRCTAPKCGVKKRVERSYQDPSTVVTTYEGQHTHHSPASFRAGGAHLFMPNAHALPPQHLMLPSSFRPADLMGMVHPVSMGANLSMFLPTMPPHMPSPASRAHPLQQQQHQFTDYALLQDLFPSTMPNNP

SEQ ID NO: 9233 - protein, 359 aa, Zea mays
  Clone ID: TF_ZmC11951_1.pep
MSSGVRSGGGGDHHGVHHQHGHGHLAGADDGAEYAFYSNDMESFFFNQPASADVNNGGSRTGADELTMPPYSSVTDYLQGFMDMDPSGLARHLDAPCLLAEDAPLKHELSVDVSYDSQGTSGAPGDGAAAMHTPNSSVSLSSSDREGEGQLRRCRKGRPKAEDDAEGDEKDQEDGENSTKANRSKKKAEKRQPRVAFLTKSEVDHLEDGYRWRKYGQKAVKNSPYPRSYYRCTAPKCGVKKRVERSYQDPSTVVTTYEGQHTHHSPASFRAGGAHLFMPNAHALPPQHLMLPSSFRPADLMGMVHPVSMGANLSMFLPTMPPHMPSPASRAHPLQQQQHQFTDYALLQDLFPSTMPNNP

SEQ ID NO: 9234 - protein, 222 aa, Zea mays
  Clone ID: TF_ZmC581509_1.pep
MENYHMLFGTTATHAQPSSAAGTPSSYNFIATSTSSASGLRRDHDRGQHSGHVHAAGGSSSPSSFFVAERLSHNDDSSKDGGGGPGPAAAGSGEKEAEADDRPAAARRKGEKKERRPRFAFQTRSQVDILDDGYRWRKYGQKAVKNNNFPRSYYRCTHQGCNVKKQVQRLSRDEGVVVTTYEGTHTHPIEKSNDNFEHILTQMQIYSGMGSTFSRSSHDMFH

SEQ ID NO: 9235 - protein, 227 aa, Zea mays
  Clone ID: TF_ZmC458678_1.pep
MENQQQLQGDDESPSHTFPSFPYFTVPSPQPSLLPPPSESDDQRNTLATALQQQPSSACNNNDLQLLPLQLGAATVDWSALLQQHASLMGPLLPGLLLQQPPAPLDDQSAENAGSSSSKEKGGAAAGRKKKPSRPRFAFQTARVNDILPDGYQSTKYNIHLVRNSEHPRSYYRCTHHTCNGTNQVQRLSKDTSIVVTTYEVVHTHPCEKLIKAHSPILKQLQFLSQF

SEQ ID NO: 9236 - protein, 446 aa, Zea mays
  Clone ID: TF_ZmC35521_1.pep
RDSPGPLTLAAALFPDAPSPAFHGSFTQLLVGAVGSPAVPSSPSPFAVPPRLSPATLLGSPGFFSPTASFEMSHQQALAQVTAQAVHSQYNMINHADYTIPFSSTTTPALVIAQHANFSGNLTSAQEKPALPSHTGNSNIESNEVSQGLKTSAPTFDKPADDGYNWRKYGQKAVKGGEYPRSYYKCTHTSCAVKKKVERSAEGHITQIIYRGQHNHQRPPKRRSKDGGGPLNEADDLHENEDISTRSEPGSQEHSGKHEGSNDGISGPSVSRRGGGDEQLSGSSDSDEEQDDEQRAGDEDPGYANANKRHVPTPAQRIIVQTNSEVDLLDDGYRWRKYGQKVVKGNPHPRSYYRCTYQGCDVKKHIERSSQDPKAVITTYEGKHSHDVPAARNSSHAAANANCSSSTSVPHRVQSSASSSRRVADLQSTFSASSMLRINKAEITDG

SEQ ID NO: 9237 - protein, 85 aa, Zea mays
  Clone ID: TF_LIB5116-018-A1-PF1-F9.pep
MRKVDTFAPHNDGHQWRKYGEKKINNCNFPRFVFFFLSCHRYYYRCTYKDNMNCPATKQIQQKDHSDPPLYQVTYYNEHSCNSAF

SEQ ID NO: 9238 - protein, 318 aa, Zea mays
  unsure (1)..(318): unsure at all Xaa locations
  Clone ID: TF_ZmC1136_3.pep
MPAQTTSFPSFKQQQVEATTKAAVPSSNRASGGGNGNTKLEDGYNWRKYGQKQVKGSENPRSYYKCTYHSCSMKKKVERALADGRITQIVYKGAHNHPKPLSTRRNSSGGGAAEELQAGNSSLSAVAAAGCTGPEHSGATAENSSVTFGDDEAENGSQRSDGDEPDAKRCRXDGENEGSSAGGGGKPVREPRLVVQTMSDIDILDDGFRWRKYGQKVVKGNPNPRSYYKCTTAGCPVRKHVERASHDTRAVITTYEGKHNHDVPVGRGAASRAAAAAAAGSGALMATGGGQLGYQQQQQQQPYTLEMLSSGSYGGGAA

SEQ ID NO: 9239 - protein, 175 aa, Zea mays
  Clone ID: TF_ZmC740_4.pep
GRRHVRHLHVLFSRVTAGEGSVSKGRSLVSSGKPPLSGHKRKPCAGAHSEATTNGSRCHCSKRRKNRVKRTIRVPAISAKIADIPPDEYSWRKYGQKPIKGSPYPRGYYKCSTVRGCPARKHVERATDDPAMLVVTYEGEHRHTPGAPAPAPSPLPAAPKDPTCSDACIALQYCH

SEQ ID NO: 9240 - protein, 221 aa, Zea mays
  Clone ID: TF_LIB5100-006-A1-PF1-G10.pep
LVDVRTGGADEIDADADAGSLACCRSAAGKGKGKGEKRQRQPRIAFMTKSEVDHLEDGYRWRKYGQKAVKNSPYPRSYYRCTTQRCPVKKRVERSHQDPAVVITTYEGKHTHPIPSTLRGSSTHLLAAQLHHHHHHNIVGGVIDMLGLCLPPRNHAAVPPAATGLAPSPCCMSGPVGTVAGATTTTPTTTTVTTTTTSSPPPPPSQKMQHFMAQDDFGLLQ

SEQ ID NO: 9241 - protein, 274 aa, Zea mays
  Clone ID: TF_21211742.pep
SGIPGSTHASGNHLRLDADIVLNSLVLFFRKLELDALGAIAIATTSTTSTIDMGPASSRAVREPRVVVQTTSEVDILDDGYRWRKYGQKVVKGNPNPRSYYKCTHPGCSVRKHVERASHDLKSVITTYEGKHNHEVPAARSSGQGSSGSGSGPSAPQAGGSHRRQEPAQASFAHFGTSPFSSFGLAPSGQLGPTTGNFRFGMVPPGATIPMPSLGSLAPTKMIGNPSAMQGYPGLMMPGEPKVEPFSRPHFPTSIAPPPAYQQILSRPPFGHQM

SEQ ID NO: 9242 - protein, 121 aa, Zea mays
  Clone ID: TF_ZmC35521_2.pep
PEFPGRPTRPRKYGQKVVKGNPYPRSYYRCTYQGCDVKKHIERSSQDPKAVITTYEGKHSHDVPAVRNGSHAAANANGSSSTSLPVPHRVHSSASSSRRAAELQSASSASSMLLKEENEIT

SEQ ID NO: 9243 - protein, 187 aa, Zea mays
  unsure (1)..(187): unsure at all Xaa locations
  Clone ID: TF_LIB4756-017-Q1-K1-G2.pep
MASFGSDDHVPAAMAVNDLVEARDGVARLRILLLQLDEQRAAWAQLEIDAVLAKLSSAISALDASEVGRSRAAGPDGARPQRQQSGRSGGNKRKQGSSRRSQRPSDKKITATLEDGHEWRKYGQKEIQDSSYPRSYYRCTHKADQGCNAKRQVQRCETDAXTYVVTYYGEHTCRDLSSIPLIHQARA

SEQ ID NO: 9244 - protein, 132 aa, Zea mays
  Clone ID: TF_ZmC65166_1.pep
MIYSSALLINNEPMIIFFFFFEHGKCALAGRCHCSKRSKKLRVKRSIKVPAVSNKIADIPPDEYSWRKYGQKPIKGSPHPRGYYKCSSVRGCPARKHVERCVDDSAMLIVTYEGEHNHTGMPAQSAAAAAQV

SEQ ID NO: 9245 - protein, 207 aa, Zea mays
  Clone ID: TF_ZmC30082_20.pep
LGTSRPAGNRSPPNPSARHSPWQPPPGSLHSFSLFSPPLALLWPTPLACAGRQALASAHPLLARSSPTQPLLSPRPLFLPIPDLPQSEQTGCRLLMASGWLLPQSERRINYLSTSWIIELLCRGSRRRKNAKHVVSSVVTQAPNFDGYQWRKYGQKWISKAKHSRLQLSTFILYQGHSLLVLSMVLAFVLLVDHLAPRPPLRQAHHS

SEQ ID NO: 9246 - protein, 172 aa, Zea mays
  unsure (1)..(172): unsure at all Xaa locations
  Clone ID: TF_ZmC58440_2.pep
MSSGEDGYCSSDSPRAESPDQPQAAAAADADADAESPRAGAGPNKRDLHASSPAAKRSRRSVEKRVVSVPLAECGEGPPPSDSWAWRKYGQKPIKGSPYPRGYYRCSSSKXCPARKQVERSRADPAVLLVTYTFDHNHAAAAAATSNRRPPWVRWVWYGRGSSAAAVAGKGV

SEQ ID NO: 9247 - protein, 395 aa, Zea mays
  unsure (1)..(395): unsure at all Xaa locations
  Clone ID: TF_ZmC332_1.pep
MEAMEEANRTAVESCHRVLALLSNPHGQLVPSRELVATTGEAVARFGSLAAKLSSSNGNGLQGHARVRKTKKPLPIFYSNLFLESSSAVAAAATLVPSPSPIPGLQLFPRYHQFEGSSSQDPXPIPTQLPKRLLLEKPTAGMEGSTSQSPPIVQMVQPVSVAPPGGTPSPALPPGRLHFNQQQQSYQRFQLMQQMKIQSEMMKRSNLGDQGGSLSGGGGGGRKGLNLKFDSSNCTASSSRSFLSSLSMEGSLASLDGSRASRPFQLVSGSQTASTPELGLVQRRRCAGKEDGTGQCATGSRCHCSKKRKLRIRRSIKVPAISNKVADIPADEFSWRKYGQKPIKGSPHPRGYYKCSSVRGCPARKHVERCVDDPSMLIVTYEGDHNHNRVLAQPA

SEQ ID NO: 9248 - protein, 145 aa, Zea mays
  Clone ID: TF_LIB3332-030-P1-K1-A2.pep
RRVRPRVRPRVREDETESKRRKLELDAEGAIAIATTSTTSTIDMGPASSRAVREPTVVVQTTSEADILDDGYRWRKYGQKVVKGNPNPRSYYKCTHPGCSVRKHVERASHDLKSVITTYEGKHNHEVPAARNSGQGSSGSGSGPS

SEQ ID NO: 9249 - protein, 365 aa, Zea mays
  unsure (1)..(365): unsure at all Xaa locations
  Clone ID: TF_ZmC1136_5.pep
MTTSSSGSIEAPANSRPGSFAFASTSTSTSTSFTDMLGGSTDAAGGASRYKAMTPPSLPLSPSSFFSNNPGGLNPADFLDSPALFSSSIFTSPTTNAFASQQFSWLATSGAEQSGKDERRPSSYPDFSFQTAPTTEEAVRTTTTFQPPIPAASLGEEAYRSQQQQPWAYQQQQPGMDAGSSQQAAPYGEPFQAASSDAATMAPHVPASGGYSHQAQQSQRQSSDDGYNWRKYGQKQMKGSENPRSYYKCTDAWAXGCPTKKKVEQSPDGQVTEIVYKGTHNHPKPQSTRRGASSAPASYVVQSASDAVMPEHSWGALSGTPVVTPENSSGSFGGDGDEVNGMSSRLGGSFGADDLDDDEPDFKRW

SEQ ID NO: 9250 - protein, 140 aa, Zea mays
  Clone ID: TF_ZmC1372_2.pep
FFASLWGGGYFFRGETNKREEEDDDEAAAAAVEAGNGRQLVMPEDGYEWKKYGQKFIKNIQKMRSYFRCRHRLCGAKKKVEWHPRDPGGDLRIVYDGAHQHGPPPLAAPPGGHGQMQGGGASDSNRYELCTQYFGGARSR

SEQ ID NO: 9251 - protein, 331 aa, Zea mays
  unsure (1)..(331): unsure at all Xaa locations
  Clone ID: TF_ZmC554_5.pep
MDPWVSSQPSLSLDLHVGLPPMGHPHSHHQAAPMVALAKPKILVEENFMQLKKDPEVAVLESELQRVSEENRRLGEMLREVASKYETLQGQFTDMVTAGAHAGGNNHYNNQPSSASEGGSVSPSRKRKSEESNGTPPPSHQQQQQHYAGGLAYAAAPDQAECTSGEPCKRIRXEERKPVISKRYVHADPSDLSLVVKDGYQWRKYGQKVTKDNPCPRAYFRCSLAPSCPVKKKVQRSADDSAVLVATYEGEHNHARPPQHDGAAKRSSAPPAGEAARPPAPLPLQKQEAGPSSEVARKNLAEHMAVTLTRDPGFKAALVSALSGRIFDKGL

SEQ ID NO: 9252 - protein, 205 aa, Zea mays
  Clone ID: TF_LIB5116-036-A1-PF1-G12.pep
MSPVPSPNQSHLLGHGSRKEKRMRKVDTFAPHNDGHQWRKYGEKKINNCNFPRYYYRCTYKDNMNCPATKQIQQKDHSDPPLYQVTYYNEHSCNSAFLALTPTEFQLQTASGKAVSICFDSSGAQEPGANASSPSSSAAPRATPSESKNKPLALRSEALSSWAPGVVEQKTACADLQSCSTECQDAYISEDICREIRFYQILPFF

SEQ ID NO: 9253 - protein, 188 aa, Zea mays
  Clone ID: TF_LIB5116-050-A1-PF1-D11.pep
MSPVPSPHQSQLLGHESRKEKRMRKVDTFAPHNDGHQWRKYGEKKINNCNFPRYYYRCTYKDNMNCPATKQIQQKDHSDPPLYQVTYYNEHSCNSAFLALTPTEFQLQTASGKAVSICFDSSGAQEPGANASSPSSSAAPRGTPSESKNKPLALRSEALSSAPGVVEQKTACADLQSCSTECQDAYIS

SEQ ID NO: 9254 - protein, 213 aa, Zea mays
  Clone ID: TF_ZmC580972_1.pep
MHMALSSRSSFAADVLLPATMSYRQPCSGASSYLGSQPAAPFPSAAFGAVAQLDVFDCLSSDEGVGVPAAVPGAFAPPPPLMPAERVVPDAAAGYSSHTRSAAAVAGEGSRTTHRIAFRVRSDEDEVLDDGYKWRKYGKKSVKNSPNPRNYYRCSTEGCNVKKRVERDRDDPRYVVTMYEGVHNHVSPGTVYYATHDAASGRFFVAGMHQPGH

SEQ ID NO: 9255 - protein, 323 aa, Zea mays
  Clone ID: TF_ZmC568819_1.pep
MALVLGREEELLAQLRALLTFLPPPASPPAPAAPVKVESIMGTSGGGRRLGSKRDRDDDSEAEAEQHGDEPAAAQPHYCPHPPPPCKRTRRRKNKKKRQQSKCLVTTVPDFDGYQWRKYGQKQIEGAMYPRSYYRCIQSAKQGCQAKRTVQRNDDDGAAAPPEYTVVYVAEHTCTANDDALEAPPVILETTTSVVVVPAPAAHTDPVVVVVPATTSAAAAAASACSTTVTTGTESPAISGDDDVACWSSSGSSSSGYSYADDSCCCCCCDGLLAAVVHGGCGSSWAPGPADSVSVPSFQLQEMEDLTGPIRSPVHVPRAWLDR

SEQ ID NO: 9256 - protein, 140 aa, Zea mays
  Clone ID: TF_LIB4764-044-R1-K1-D1.pep
KQYSPYPRSYYRCTAPKCGVKKRVERSYQDPSTVVTTYEGQHTHHSPASFRAGGAHLFMPNAHALPPQHLMLPSSFRPADLMGMVHPVSMGANLSMFLPTMPPHMPSPASRAHPLQQQQHQFTDYALLQDLFPSTMPNNP

SEQ ID NO: 9257 - protein, 331 aa, Zea mays
  Clone ID: TF_ZmC1431_1.pep
MTTLDLMGGYGRVDEQVAIQEAATAGLRGMERLILQLSQAGTGERSLSPPAVQAQRQQQKQLEQIQQQVDCRELTDMTVSKFKKVISILNRTGHARFRRGPVAARSQSQSQGPASPEPAQSAPAPAARPLTLDFTKSVSGYSRDSGFSVSGASSSFLSSVTTGDGSVSNGRAGGSSFLMLPPAPGAASCAKPPPAGAAQKRKCHDHAHSENVAGGKYGANGGRCHCSKRRKHRVKRTIRVPAISPKVADIPADEYSWRKYGQKPIKGSPYPRGYYKCSTVRGCPARKHVERDPADPSMLIVTYEGEHRHSPASGQDPPPPSLAPLPELPSH

SEQ ID NO: 9258 - protein, 381 aa, Zea mays
  unsure (1)..(381): unsure at all Xaa locations
  Clone ID: TF_ZmC16975_1.pep
LSNGLAIKQKQERERERNKIESEETTTMFPSPGRAVMALGHGGQHMTASSTAGGMAASSSSTPTITFAXQPAVPSPSSDGDELPRPRPPPPPWRARLRLRLPSPGPPPPNHHHLLGLSLARGSVDRRPGPHPPPPLPWPCSRSAARFPFPSHEGVASSSSSMVDGGGLRRRAGAASRSSPTSRPRRQTAEGEGSGGERGVGGGAGGGRRADEEGGRRRRRQGAAEGARAAVLLQDDERRRRARRRLQVAQVRPEGRQEHAAPKELLPVHAGQLPGEEAGGAARRGPPHGHHHLRGPPRPLPVPRRRRRRRSRQRRDELHLVACRSGSDRRLSFSACNVVYSAASGLSFASHQQQLNILNLAIISIHASKNSLIDRVCMWHV

SEQ ID NO: 9259 - protein, 374 aa, Zea mays
  Clone ID: TF_ZmC413227_1.pep
MENKSDDLQHEHGMPDQTSRPFTSLLLSATSVAQAAQQDTGSDIKSLSLLHGSSLLPPDDGYIWKARAQNIVPGCEYPTMYYKCAQDNCNTNKLVVCSADGHQVLETVLSGCHNHPRQQDCDLPIPKVSKTDTSMPVSREGDDEQLSSSSDSDEDDVDQARVEGDGSVTRHVPHPAERITAQTGTANSHRHAGRRRPKSKVWEEFSAVLRDDKIQWAECKHCKMSLGGTSTGRTTHLRRHLKICPALPATDRMQKQRSSPHPGSTIESIWKFDQDRSLELLIKVLVSNLFSSPLTSSTTFRQLWAGICPTNDVLSDAAIEEKFLSIFENEKLKLKEEIALAPGGVFLTAASSSLETKNFIFLTVHFIDKEWKLE

SEQ ID NO: 9260 - protein, 132 aa, Zea mays
  Clone ID: TF_ZmC153952_1.pep
MDAEWSGDESKAGAAGGVSSADCPGSPPPVSPAPPSTSPAATGAGRRRSANKRVVTVPLADVSGPRPKGVGEGNTPTDAWAWRKYGQKPIKGSPFPRAYYRCSSSKGCPARKQVERSRAEPDKVIVTYSFEH

SEQ ID NO: 9261 - protein, 107 aa, Zea mays
  Clone ID: TF_LIB3592-037-Q1-K6-H4.pep
LLPQSERRINYLSTSSIIELLCRGSRRRKNAKHVVSSVVTQAPNFDGYQWRKYGQKWISKTKHSRLQLSTFILYQGHSLLVLSMVLAFVLLVDHLAPRPPLRQAHHS

SEQ ID NO: 9262 - protein, 271 aa, Zea mays
  Clone ID: TF_ZmC554_7.pep
MDPWISSQPSLSLDLRVGLPPLSLHQAPVAVALARPKVLVEENFLLPPKKEPEVAALETELRRMSEENRRLAEALAAVASKYEALRSQHKEMVSAAPAGGNASSASEGGSVSPSRKRKSESADTAPAPAQRPHPAADLSECTSGGEPPCKRVVRDRAEEVEEEEECRPRVTKLYVRADPADLSLAVRDGYQWRKYGQKVTKDNPCPRAYFRCSFAPACPVKKKVQRSAHDASVLVATYEGDHTHAPPPSGSGKNAAKPPSPARRQEAAVAV

SEQ ID NO: 9263 - protein, 367 aa, Zea mays
  Clone ID: TF_ZmC5807_21.pep
MADSPNPSSGDLPAGPGGSPEKPVLADRRVAALAGAGARYKAMSPARLPISREPCLTIPAGFSPGALLESPVLLNNFKVEPSPTTGTLSMAAIINKSTHMDIMPSPRDNSAGSGQEDGGSRDFEFKPHLNSHLAAPSVNNQNHHDTMQKYSSNHTTPSSNLKTENKPLCSRESSHTAHASIAPNQTVSIVCPSDNMPAEVGTSEMHQINSSENATQETQIENVAEKSAEDGYNWRKYGQKHVKGSENPRSYYKCTHPNCEVKKLLERSLDGQVTEVVYKGRHNHSKPQPNRRLAGGAVPSSQGEERYDGVATIEDKPSNIYSNLCNQVHSAGMIDTVPGPASDDDVDAGGGRSYPGDDANDDDLDSK

SEQ ID NO: 9264 - protein, 496 aa, Zea mays
  unsure (1)..(496): unsure at all Xaa locations
  Clone ID: TF_ZmC32154_1.pep
MSARPPPQPRPRLALPPRSTAESLFTGAGDTSPGPLTLASALFPSDADGGGGPGGASSSAAGAATFTQLLTGSLAPPPPQQQRHDAERGRGGGVARAGPALSVAPPASASAGASVFTVPPGLSPSGLFDSPGLLFSPAMGGFGMSHQQALAQVTAQATHSPLRMFDHLEQPSFSTAATTSGALQHMNSAASMAGISDMTMATANNENPSFQSAEASQRYQVNAPVDKPADDGYNWRKYGQKVVKGSDCPRSYYKCTHPNCPVKKKVEHAEDGQISEIIYKGKHNHQRPPNKRAKDGNSSAFDHNEQSNDTASGLSAAKRDQDNIYGMSEQASGLSDGDDMDDGESKRHEDXTSDNESKRRNIHISSQRTLSESKIIVQTTSEVDLLDDGYRWRKYGQKVVKGNPHPRSYYKCTFAGCNVRKHIERCSSDPKAVITTYEGKHNHEPPVGRGGNQNAGMSSQQKGQNNVSSNQASFSRPDLSNANQMPIGILQFKSEQ

SEQ ID NO: 9265 - protein, 512 aa, Zea mays
  Clone ID: TF_ZmC1136_1.pep
MVGAAGADHQERSPRGLFHRGATRGGGVGVPKFKSAQPPSLPISPPPMSPSSYFSIPPGLSPAELLDSPVLLHSSSNFFASPTTGAIPAQRFDWKQAADLIASQSQQDDSRAAVGSAFNDFSFHAPTMPAQTTSFPSFKEQQQQQVEAATKSAVPSSNKASGGSGGSTKLEDGYNWRKYGQKQVKGSENPRSYYKCTYHSCSMKKKVERSLADGRVTQIVYKGAHNHPKPLSTRRNSSGGVAAAEEQAANNSSLSGCGGPEHSGGATAENSSVTFGDDEAENGSQRSGGDEPDAKRWKAEDGENEGSSGAGGGKPVREPRLVVQTLSDIDILDDGFRWRKYGQKVVKGNPNPRSYYKCTTAGCPVRKHVERACHDARAVITTYEGKHNHDVPVGRGAASRAAAAAAAGSGALMATGGGQLGYQQHQQQQPYTLEMLSSGSYGGGGYVPRRRQPSCCCGGGGFAFSSGFDNPMGSYMSQHQQQQRQNDAMHASRAKEEPREDMFFPTSLLYTD

SEQ ID NO: 9266 - protein, 116 aa, Zea mays
  Clone ID: TF_LIB3116-028-P1-K1-A11.pep
ETGADQPFRQPFRLSRVLMSGSQGPRSGRRVTKASRGPRPYFRCSFAPACPAKKKVQRRATNPTILVATSKGNHNNGQPPQQAQAPNNGSSLGPRKKPPSPPRPFAAVPGRFHNKQ

SEQ ID NO: 9267 - protein, 215 aa, Zea mays
  Clone ID: TF_LIB5116-047-A1-PF1-F3.pep
MALDSVPSYPSDLGSSGRATRTQQRIRKEERTWTADTYAPYDDGHQWRKYGEKKLSNSNFPRFYYRCTYKTDLKCPATKQVQQKDMSDPPLFTVTYFNHHSCNTTSRPIGSAPDTTEQSSSRRAVSICFGSHATGEQPTFLTLPGTLQSPASTTNQQSDRGAYGHQFQWTDTSPSAGDAPVKMETDSLAGTDASSGAASGHALSRTLLPIGQSRC

SEQ ID NO: 9268 - protein, 166 aa, Zea mays
  Clone ID: TF_ZmC1382_2.pep
MAASLGLNPEAVFTSYTSSPPFMSDYVAASFLPPAVVDSTDFSAELDDLHHHLDYSSPAPTLAGARSDRSEKQMIRWCEGGGGEKRLGRIGFRTRSEVEILDDGFKWRKYGKKAVKSSPNPRNYYRCSSEGCGVKKRVERDRDDPRYVITTYDGVHNHASPAAAAI

SEQ ID NO: 9269 - protein, 104 aa, Zea mays
  Clone ID: TF_ZmC240676_2.pep
PRTTRIAFRTRSEIEILDDGYKWRKYGKKSVKNSPNPRNYYRCSTEGCNVKKRVERDKDDPSYVVTTYEGMHNHVSPSTVYYASQDAASGRFFVAGTQPPGSLN

SEQ ID NO: 9270 - protein, 283 aa, Zea mays
  unsure (1)..(283): unsure at all Xaa locations
  Clone ID: TF_ZmC58440_1.pep
MSSAEDGYCSSDSPRAESPDEPQAGADAESPRAGAGLNKRERDLPASPSSPLPPAKRSRRSVEKRVVSVPLAECGDRPRGASGEGPPPSDSWAWRKYGQKPIKGSPYPRGYYRCSSSKGCPARKQVERSHADPTALLVTYTFEHNHEAPQPKTSGGSCCHQQGKPSANEXSSRSELGPEHEPEDEQEPEQKVVPGLAGPETAPATATLAPVAEEDESFDLGWFDQYPTWHRSALYAPLLPPEEWERELQGEDALFAGLGELPECAVVFGRRRELSLAATAPCS

SEQ ID NO: 9271 - protein, 86 aa, Zea mays
  Clone ID: TF_ZmC332_4.pep
MPVAIQERPQLATSFGAQFTLLYLCQNMQITDTHKAHRPCRGYYKCSSVRGCPARKHVEGCVDDPSMLIVTYEGDHNHSRVLAQPA

SEQ ID NO: 9272 - protein, 414 aa, Zea mays
  unsure (1)..(414): unsure at all Xaa locations
  Clone ID: TF_ZmC91351_1.pep
MSSGDFHYHDELAALFAQRPAPAGEMTMALQQQAPAASWFADYLHAGAPGMGMDMDYDLLCRALDLPVPGDEDGVVKRELLLVADTGGGGGGFAAPLTPNTTSSMSSSSSEAAGAAAGGGGGGSFGAAEEESQSLGRCKKEDDGDGEESKDKEAMKGEEDDADTGKKGSAAGKGKGKGEKRQRQPRIAFMTKSEVDHLEDGYRWRKYGQKAVKNSPYPRSYYRCTTQRCPVKKRVERSHQDPAVVITTYEGKHTHPIPSTLRGSSTHLLAAQLHHHHHHNIVGAFPPPPPPPQTMCLPFVGRTGDGGGVIDMLGLCLPPRNHAAVPPAATGLAPSPCSMSGPVGTVAGATQTTAPXTTTVTTTTTSSPPPPPSLQTMQHFMAQDDFGLLQDMLPSSSSSLSFVVHSNGSNVQLP

SEQ ID NO: 9273 - protein, 228 aa, Zea mays
  Clone ID: TF_ZmC8945_1.pep
MALDSVPPYPSDLGSSRAAAAARTQQRIRKEERTWTSDTYAPYDDGHQWRKYGEKKLSNSHFPRFYYRCTYKNDMKCPATKQVQQKDSSDPPLFSVTYFNQHTCSSSSALGSARDVASQSSSKKAVSICFSPHAPSEQTSFLTTTTVAPPVMHSYGANRQPDRSAYNQQPQWWTGGVPSPTSNGPAKMEVAESTQKPSGSYGSTTGNAPSRTLLPIGQSRCIEYFHFL

SEQ ID NO: 9274 - protein, 302 aa, Zea mays
  Clone ID: TF_ZmC746_2.pep
MASVIDGNGGSRLVVTELGHLKELAMQLEGHLGGSSPDLCKHLASQISSITDRSISLLITATSSSPHGGASDAPPFIKATTKKRKRMDKKRHEVRVGSAGGGGGDHPADDGYSWRKYGQKEILGAKHPRGYYRCTHKSSQGCAATKQVQRTDEDPAFFDVVYLGDHTCVQSQRAAATAGRQAAADAQAPVYDANLMVKTEGPALEPEQQRRGWDDAPTPFLFSSTPACLVQERSPFSAPSTSENWGVSPATSDSNHVVSFPPFEVAAAAAAQFEFEEVMSAMDRADGEFLEDLDIYVSSFLA

SEQ ID NO: 9275 - protein, 136 aa, Zea mays
  Clone ID: TF_LIB4742-048-R1-K1-C11.pep
WVPRGRPRPASRIGFRTRSEVDVLDDGFKWRKYGKKAVKSSPNPRNYYRCSAEGCGVKKRVERDSDDPRYVVTTYDGVHNHAAPGDAYLCPPPPSRGAAHYSPPVAAPSWSAALDAWEAQLHRHAAAAAHSSESSY

SEQ ID NO: 9276 - protein, 218 aa, Zea mays
  Clone ID: TF_ZmC260_40.pep
MADDYFQFGFTGQEMVADDCSAPVFANSSSDAVTAAVGNGMSLLSYGVDGDGDGRRPMSGPPYGTGGNGGGRPPSSSRIGFRTRSEVDVLDDGFKWRKYGKKAVKSSPNPRNYYRCSAEGCGVKKRVERDSDDPRYVVTTYDGVHNHAAPGPGAASYLCQPPPPRGATATATPFSPPRSASAPAPLAAAPSWSAACDAWWEAQLHAAAAVAHSSESSY

SEQ ID NO: 9277 - protein, 189 aa, Zea mays
  Clone ID: TF_ZmC165426_1.pep
MQTQSRLAMSGGGGTGGSSSSSASEDEHEAVIRELTRGHELTAQLRAEALRALRGQGQAEATAAFILQEVSRAFTVCLSIMSSPARAPPPTMEMPAPALAPRRGRDDSIPREQRRTSSPHSDGYQWRKYGQKRITKSPFPRCYYKCSFHRERSCRATKQVQQCSDGDGHPPQYVVMYFNEHTCDTAGWE

SEQ ID NO: 9278 - protein, 81 aa, Zea mays
  Clone ID: TF_LIB3279-196-Q1-N6-F4.pep
QKPIKGSPYPRGYYKYSTGRGCPPRKHVEGDPPDPSMLIVPYEGEHRQSPPSGQDPPPPSLAPLRELPTHKFGFRPALSCQ

SEQ ID NO: 9279 - protein, 128 aa, Zea mays
  Clone ID: TF_ZmC1136_7.pep
LVVQTMSDIDILDDGFRWRKYGQKVVKGNPNPRSYYKCTTAGCPVRKHVERASHDKRAVITTYEGKHNHDVPVGRGAASRAAAAAAAAGSGALMATGGGQLGYHHQQQQQPYTLEMLSSGSYGGGGGY

SEQ ID NO: 9280 - protein, 326 aa, Zea mays
  Clone ID: TF_ZmC746_1.pep
MATTETMEMGVVVDGVSSNGSGGCGGLVVTELSHIKELVRQLEVHLGGSPDLCKHLASQIFSLTERSIGLITSSSSSSGLDGARRKRSAGDAGLASPLSATPTSGVTDGPFKNTKKRKAMEQRRQRVSSAGGENPVDDGRSWRKYGQKEILGAKHPRGYYRCSHRYSQGCQATKQVQRTDEDPTLYDVIYHGEHTCAPHRPAAAAAQHNPDARGHLQTLSAGLTVKTEGLPDPWAPRGRGAATPLYLSASSTPPSTSENWGVSPATSGSTHVASFRPFEAAEWRGQAEHQEVVSALVAAIAPPPAVDSLDDLLIDIDLDDIASFFA

SEQ ID NO: 9281 - protein, 336 aa, Zea mays
  Clone ID: TF_ZmC746_3.pep
GYLEAGHIATYTGHSHLVATTETGVVVDGVSSNGSGGCGGLVVTELSHIKELVRQLEVHLGGSPDLCKHLASQIFSLTERSIGLITSSSSSSGLDGARRKRSAGDAGLASPLSATPTSGVTDGPFKNTKKRKAMEQRRQRVSSAGGENPVDDGRSWRKYGQKEILGAKHPRGYYRCSHRYSQGCQATKQVQRTDEDPTLYDVIYHGEHTCAPHRPAAAEHNPDARGHLQTLSAGLTVKTEGLPDPPRGRGAATPLYLSASSTPPSTSENWGVSPATSGSTHVASFRPFEAAEWRGQAEHQEVVSALVAAIAPPPAVDSLDDLLIDIDLDDIASFFA

SEQ ID NO: 9282 - protein, 156 aa, Zea mays
  Clone ID: TF_LIB4759-048-R1-K1-C7.pep
MASFGSDDHVPAAMAVNDLIEARDGVARLRILLLQLDEQRAAWAQLEIDAVLAKLSSAISALDASEVGRSRAAGPDGARPQRQQSGRSGGNKRKQGSSRSRSQRPSDKKITATLEDGHEWRKYGQKEIQDSPYPRSYYRCTHKADQGCNAKEAVQR

SEQ ID NO: 9283 - protein, 567 aa, Zea mays
  Clone ID: TF_ZmC1377_1.pep
MSGASNYGSLIDEWLPPPTPSPRTLMSSFLNEEFSSAPFSGPHDQSEKSREVLNSSDEVPSHAVKGLFQNGFSNLFSAKSNSNGGLAERRAARAGFSVPKIDTSRVGSSTVIRSPVSIPPGLSPTTLLESPVFLYNKMAQPSPTTGTLPFLMATNDKSTISPAAKITEDSTFDNDVFSFQPHLGSEQTGFSTAEKKKRKSPKKQSLSNIHQQESSLQSSFTAVKDNTSATIVKAKPSSSSMFSDSHYSADQQQADETNIKVQGKGVEARSAAFAPVSAHSDASLLESQEALDVSSTLSNEEDERATHGTVSIECDGDEAETVSKRRKLELDALEATLTATTSTTSTIDMGPAASRAVREPRVVVQTTSEVDILDDGYRWRKYGQKVVKGNPNPRSYYKCTNPGCSVRKHVERASHDLKSVITTYEGKHNHEVPAARNSGQGSSSAPSASQAGGSHRRQEPAQASFAHFGTASFSSFGLPPSGQLGPTTGNFGFGMVPPGMTIPVPSLGSLAPVKMVGNSSAMQGYPGLMVPGEPKVEPVSQPLIQMANASPPAYQQILSRPPFGHQM

SEQ ID NO: 9284 - protein, 506 aa, Zea mays
  unsure (1)..(506): unsure at all Xaa locations
  Clone ID: TF_ZmC1136_2.pep
MASSTGSLEHGGFTFTPPPFITSFTELLSGAGDMLGAGADQERSSPRGLFHRGARGVPKFKSAQPPSLPISPPPMSPSSYFAIPPGLSPAELLDSPVLLHSSSNILASPTTGAIPAQRFDWKKAADLIASQSQQDGDSRAAAAGFDDFSFHTATSNAVRAHTTTTSLPSFEEQQQQVEKAAVPSSNRASGGGNGNTKLEDGYNWRKYGQKQVKGSENPRSYYKCTYHSCSMKKKVERALADGRITQIVYKGAHNHPKPLSTRRNSSGGGAAAEELQAGNSSLSAVAAAGCTGPEHSGATAENSSVTFGDDEAENGSQRSDGDEPDAKRWYVRDPARASERDSLFATRGPRFTSXACITTVSSCSCNSCIYVCLIRKQEDGENEGSSAGAGGKPVREPRLVVQTLSDIDILDDGFRWRKYGQKVVKGNPNPRSYYKCTTAGCPVRKHVERASHDTRAVITTYEGKHNHDVPVGRGAASRAAAAAAAGSGALMATGGGQLGYQQQQQQ

SEQ ID NO: 9285 - protein, 271 aa, Zea mays
  Clone ID: TF_ZmC2906_1.pep
CSGSPGYVYDHSGGGRPYPGDDSNDDDDLDSKRRKMESAGIDAALMGKPNREPRVVVQTVSEVDILDDGYRWRKYGQKVVKGNPNPRSYYKCTNTGCPVRKHVERASHDPKSVITTYEGKHNHEVPVSRNASHEMSTAPMKPAVHPINSNMPGLGGMMRACDARAFNNQYSQAAESDTISLDLGVGISPNHSDATNQMQPSVPEPMQYQMRHMAPVYGSMGLPGMPVPAIPGSMYGSREEKGNEGFTFKAAPLDRSANLCYSSAGNLVMGP

SEQ ID NO: 9286 - protein, 263 aa, Zea mays
  Clone ID: TF_ZmC2906_2.pep
SLCPKGFLLPIANAVLHNCVARKMESAGIDAALMGKPNREPRVVVQTVSEVDILDDGYRWRKYGQKVVKGNPNPRSYYKCTNTGCPVRKHVERASHDPKSVITTYEGKHNHEVPVSRNASHEMSTAPMKPAVHPINSNMPGLGGMMRACDARAFTNQYSQAAESDTISLDLGVGISPTHSDATNQMQPSVPESMQYQMQHMAPVYGSMGLPGMPVTAVPGNAASSIYGSREENGNEGFTFKAAPLDRSTNLCYSSAGNLVMGP

SEQ ID NO: 9287 - protein, 308 aa, Zea mays
  Clone ID: TF_ZmC740_3.pep
MAVDLMGCYTPRRADDQLAIQEAATAGLRSLELLVSSLSGAAPSKAPQQHPQQPFGEIADQAVSKFRKVISILDRTGHARFRRGPVQSAPPPPPPPAPVAPPPPPPLTVVAPVSVAAPLPQPQSLTLDFTKPNLAMSGATSVTSTSFFSSVTAGEGSVSKGRSLMSSGKPPLSGHKRKPCAGAHSEATTNGSRCHCSKRRKNRVKRSIRVPAISSKVADIPPDEYSWRKYGQKPIKGSPYPRGYYKCSTVRGCPARKHVERATDDPAMLVVTYEGEHRHTPGAVQGPSPLATASPVPVAVSAGNGLVV

SEQ ID NO: 9288 - protein, 139 aa, Zea mays
  unsure (1)..(139): unsure at all Xaa locations
  Clone ID: TF_ZmC58440_4.pep
MANWALVYFCASSRRSVEKRVVSVPLAECGDRPRGASGEGPPPSDSWAWRKYGQKPIKGSPYPRYVLSDDKPAXALLYVMCRGYYRCSSSKGCPARKQVERSHADPTALLVTYTFEHNHEAPQPKSSGRTCCHQQGKPS

SEQ ID NO: 9289 - protein, 222 aa, Zea mays
  Clone ID: TF_ZmC554_6.pep
FGSSATPQLPPLLPSLAVPLPAPGPDQMECTSAAVTAAGAAFHHEPARRIREERKPKVSRRYVHADPSDLSLAVKDGYQWRKYGQKVTKDNPCPRAYFRCSFAPSCPVKKKVQRSADDRTILVATYEGDHNHAQPPRHNGGGNKAATRSTPAATEAARPAPPLPLQHQQQQKQEAATGPSSEVARKNLAEHMAVTLTRDPGFKAALVSALSGRILDLSPPRD

SEQ ID NO: 9290 - protein, 322 aa, Zea mays
  unsure (1)..(322): unsure at all Xaa locations
  Clone ID: TF_ZmC2906_3.pep
GAHQTENVAEKSAEDGYNWRKYGQKHVKGSENPRSYYKCTHPNCEVKKLLERSLDGQITEVVYKGHHNHPKPQPNRRLAAGAVPSSQAEERYDGVAPIEDKPSNIYSNLCNQAHSAGMVDNVPGPASDDDVDAGGGRPYPGDDSNDDDDLDSKRRKMESAGIDAALMGKPNREPRVVVQTVSEVDILDDGYRWRKYGQKVVKGNPNPRSYYKCTHTGCPVRKHVERASHDPKSVITTYEGKHNHEVPVSRNASHEMSTAPMKPAVHPINSNMPGLGGMMRACDARXFTNQYSQAAESDTISLDLXGVGISPXHSDATNQMQP

SEQ ID NO: 9291 - protein, 253 aa, Zea mays
  Clone ID: TF_LIB5117-056-Q2-PF1-B5.pep
APKFKSAQPPSLPISSPFSCFSIPAGLSPAELLDSPVLLNYSHILASPTTGAIPARRYDWQASADLNTFQQDEPCRGDSGLFGFSFHAVKSNATVNAQANCLPLFKEQQQQQQQQVVEVSNKSSSGGGNNKQVEDGYNWRKYGQKQVKGSENPRSYYKCTYNNCSMKKKVERSLADGRITQIVYKGAHDHPKPLSTRRNSSGCAAVVAEDHANGSEHSGPTPENSSVTFGDDEGDHGLQLSDGAEPVTSAGRS

SEQ ID NO: 9292 - protein, 56 aa, Zea mays
  Clone ID: TF_700151333H1.pep
VDKVAVPSSNRSSGGGNGNTKLEYGYNWRKYAQKYVKGIENPRTYYKCTYHSCSMK

SEQ ID NO: 9293 - protein, 228 aa, Zea mays
  Clone ID: TF_ZmC346080_1.pep
MPLSPPPPSSSPRQAAIQELRRGTQLAELLRQQVELIPEPNRRHAAAVNVGEISMAMESSLSILQSQMEHPFSEPEVMAAALTAHSDGGTSGERNGGPVARTRKVRVRHRPGRGRPAAGDELPIKEILTEAPENDRFHWRKYGEKNILYSEYPRLYYKCGYSDDHKCPAKKYVQQQSNSYPPIFLVTLINEHTCDALFRDDEPIISSSSSGSSQVLDFTKASLSSPLH

SEQ ID NO: 9294 - protein, 154 aa, Zea mays
  Clone ID: TF_LIB4762-013-Q1-K1-E6.pep
RPGHPFSEPTAHYDGGTSGERNGPVARTRKVRVRHRPGRGRPAAGDELPIKEILTEAPENDRFHWRKYGEKNILYSEYPRLYYKCGYSDDHRCPAKKYVQQQSNSYPPIFLVTLINEHTCDALFRDDDPIISSSSSGSSQVLDFTKASLSSPLH

SEQ ID NO: 9295 - protein, 89 aa, Zea mays
  Clone ID: TF_ZmC734841_1.pep
GRRTSASSRCCPASSASTSPCRRTSSTSSRCASCQWRKYGQKISKGNPCPRAYYRCTVAPHCPVRKQVQRCAEDTSVLIPSTIARTTTR

SEQ ID NO: 9296 - protein, 75 aa, Zea mays
  unsure (1)..(75): unsure at all Xaa locations
  Clone ID: TF_jC-zmXLIB3526P032bh01a1.pep
SNIYIVGDRFRWRKYSQKLLXGDPDXRIYHKCVSAWCSVRKHVYARFLCARAVISTHKGKHQPLRARGPRTKHNR

SEQ ID NO: 9297 - protein, 233 aa, Zea mays
  unsure (1)..(233): unsure at all Xaa locations
  Clone ID: TF_LIB4759-038-Q1-K1-B11.pep
MSSGGGDHHGVYHQQHGHGHGHLARADGAEYAFHGNDDMESFFFNHPASAGLDGGGSRTTGADELLAPYSSITDYLQGLLDPSGLARHLDAPLKHELSVDASHDSQGTSGAPGGEAAAMHTPXSSVSLSSSDRDGEGQQPRRCKKGRTNKAEDAEGDEKDQQDGXENSTKANKSKKKAEKRQRQPRVAFLTKSEXVDHLEDGYRWRXYGQKXAVKNSPYPRSYYRCTTPKCGV

SEQ ID NO: 9298 - protein, 51 aa, Zea mays
  Clone ID: TF_LIB3236-084-P1-N1-B12.pep
VQRLAKDTSIVVTTYEGVHNHPCEKLMEALSPILKQLQLLSQLQSCTNQLL

SEQ ID NO: 9299 - protein, 197 aa, Zea mays
  Clone ID: TF_LIB4740-138-A1-K1-A11.pep
MQPHEKVAVLKPVASRPFSSFWPFPKFLHDFNATCSPTITFPQETELIRPKATRLASLPGDLPTHIAATTDAGSDTMSEEVEGYAKHHTYRDHATACQAARRNGERSRLSLDGYSWRKYGQKKVKGSEFPRSYYKCTHPSCPVKRKVETQVAEIVYSGEHNHLKPGKPCPPRKPLLSTSTDAVMCDTHGIDDMTPPE

SEQ ID NO: 9300 - protein, 128 aa, Zea mays
  Clone ID: TF_LIB4977-067-Q1-K1-D11.pep
MSPAPSSHHSQINSRKEKRMRKVDTFAPHNDGHQWRKYGEKKINNTNFPRYYYRCTYKDNMNCPATKQVQQKDHSDPPLYAVTYYNDHSCNSAFLPLSPSEFQLQTSSCSTECHDALLGRRRRARRRW

SEQ ID NO: 9301 - protein, 131 aa, Zea mays
  Clone ID: TF_ZmC300_23.pep
MSPAPSSHHSQINSRKEKRMRKVDTFAPHNDGHQWRKYGEKKINNTNFPRYYYRCTYKDNMNCPATKQVQQKDHSDPPLYAVTYYNDHSCNSAFLPLSPSEFQLQTSSGKDVSICFDSSSGTGAARPPPPM

SEQ ID NO: 9302 - protein, 160 aa, Zea mays
  Clone ID: TF_ZmC332_2.pep
ASSSRSFLSSLSMEGSLASLDGSRASRPFQLVSGSQTSSTPELGLVQRRRCAGKEDGSGQCATGSRCHCSKKRKLRIRRSIKVPAVSNKVADIPADEFSWRKYGQKPIKGSPHPRGYYKCSSVRGCPARKHVERCVDDPSMLIVTYEGDHNHSRVLAQPA

SEQ ID NO: 9303 - protein, 402 aa, Zea mays
  unsure (1)..(402): unsure at all Xaa locations
  Clone ID: TF_ZmC91351_2.pep
PRVRSSLISEQAARTGGAPMSSRDLYFHDELASLFAQRPAPAGEAMMTHQHQQQQQAPASWFADYLHAGAPGMGMDYDLLCRALDLPLPGDDVVKREEELLLVDTGGDGGGFAAPTPTPSGGGTAPVTPNTTSSMSSSSSEAAGGAAGGGGGGGGGREEDSPQGRCKKEEGDGEESKALDKGEEDADKGKKGSAAAGKGKGKGEKRQRQPRFAFLTKSEVDHLEDGYRWRKYGQKAVKNSPYPRSYYRCTTQKCPVKKRVERSSQDPAVVITTYEGKHTHPIPVTLRGSTHILAAQLHHHHNHHLGAFPTPLPQTGAAPFGRAAGXRGVIDMLGLLPPRNHGMSGGPMSAVAGAATTTAATITTTSTTPSSPPSLQMQHFMAQDFGLLQDIMLPSFPRRRRR

SEQ ID NO: 9304 - protein, 595 aa, Zea mays
  Clone ID: TF_ZmC9869_1.pep
NEVPSPYLTIPPGLSPATLLESPVFVSNSMGQASPTTGTLFMFGSTNDNDPIRFGGGPPSVGDGPNAFPFKPLDLKSSHYTAEAMKEQNTKSSVKTETKILTVQEASLLSQLNQLNHNSQIIIDSGGPHDPKLSRPASGAGAGNEHISPPDHGQTAEETDAREDYPAMAITTPAEDGYSWRKYGQKQVKHSEYPRSYFKCTHPNCLVKKKVERSHEGHITEIIYKGAHNHPKPTQSRRPGVQPVHPFGDSAQADAADNLGSQANAVDANQPRRAGVQDGMDATSSPSVPIERCDSPASMQVDSAARFGSPEGADVTSVSDEVGGDDRVTRGSMSQGGADAEGDELECKRRKLESYAIDMSTASRAVREPRVVIQTTSEVDILDDGYRWRKYGQKVVKGNPNPRSYYKCTYPGCVVRKHVERASHDLKSVITTYEGRHNHEVPAARNSGHPGTAAATGAGGPRRLEHPSLRDGLMGHLGGCGVPFGLPPPRDPLAPMGNYPTYASSIPLGGAGPTSLPSLPVPAGTLSAVDGLKLPMLAPSSLQQHPLLRHRQAMQAAGLVAPKDDVKVEGNVAGGAAPSVYQQMMCSGLRLRQQM

SEQ ID NO: 9305 - protein, 234 aa, Zea mays
  unsure (1)..(234): unsure at all Xaa locations
  Clone ID: TF_ZmC56014_1.pep
MMLLMDSGSRGDCSPVCLDLSVGLSPPSPGSGPETTADAERLDRPATGCWGPRTSSLADGQDEAKTLEARLTQVSEENRRLTEIIAYMYASQVAARRSPDGRKRSRDSLEPSNSGDANAAVESAALSDEGTCRRIKLTRVCTKIDPSDTTLTVKDGYQWRKYGQKVTRDNPSPRAYFRCAYAPSCPVKKXGAEERGGQXMLVATYEGEHNHPSPTRAGELPSFTSINSSGPITL

SEQ ID NO: 9306 - protein, 322 aa, Zea mays
  unsure (1)..(322): unsure at all Xaa locations
  Clone ID: TF_ZmC554_3.pep
MDPWISSQPSLSLDLRVGLPPLSLHQAPVAVALARPKVLVEENFLLPPKKEPEVAAALESELRRMSEENRRLAEALAAVVSKYEALRSQHTEMVAASSASEGGSVSPSRKRKSESADTAPVQRLHQQHAAADLSECTSGGEPPCKRVVRDRAEEVEEEEECRPRVSKLYVRADPADLSLAVRDGYQWRKYGQKVTKDNPCPRAYFRCSFAPACPVKKKVQRSAHDASVLVATYEGDHTHGPPPSGSGSGSGASSKNAAKPPSPPRRQEAAVAVTAAAAASEMVRXPNLAEQMAVTLARDPSFKAALVSALSGRILELSPTKD

SEQ ID NO: 9307 - protein, 132 aa, Zea mays
  Clone ID: TF_LIB3606-048-Q1-N6-A9.pep
AFGCLQFWISFCPYLRHACPSSRSLTLFVTTDDGWALLRHAAALLPAPPAAFLLPVQVTSLCPTPSPRRRAGSLTDTPWPSEGSCASSTAGSPSPTTSPPLPQRTRFLSRAFCPRDHRCSFLVPAAPCFFPL

SEQ ID NO: 9308 - protein, 295 aa, Zea mays
  unsure (1)..(295): unsure at all Xaa locations
  Clone ID: TF_ZmC740_1.pep
MAVDLMGCYAPRRANDQLAIQEAAAAGLRNLELLVTSLSTQAAAPHRAADQPFGEIAGQAVSKFRKVISILDRTGHARFRRGPVEPPPPTPXLSSPVLPLAPVSVAQPPQSLTLDFTKPNLAVSAATSVTSTSFFSSVTAGEGSVSKGRSLMSSGKPPLSGHKRKPCAGAHSEATTNGSRCHCSKRRKNRVKRTIRVPAISSKVADIPPDEYSWRKYGQKPIKGSPYPRGYYKCSTVRGCPARKHVERATDDPAMLVVTYEGEHRHTPGAVQGPSPLATASPVPVAVSAGNGLVV

SEQ ID NO: 9309 - protein, 205 aa, Zea mays
  Clone ID: TF_ZmC1382_1.pep
MATSLGLNPEDLFTSYSSSYYSSPPFMSDYAASFTPAAGDSTAFSSELDDLHHFDYSPAPIVTAAGAGAGGGDRNEKMMWCEGGGDERRLRSNGRIGFRTRSEVEILDDGFKWRKYGKKAVKNSPNPRNYYRCSSEGCGVKKRVERDRDDPRYVITTYDGVHNHASPGAAAIIVPYGSGGGNSGFYSPPHSGSPSATSYSGSLAF

SEQ ID NO: 9310 - protein, 267 aa, Zea mays
  unsure (1)..(267): unsure at all Xaa locations
  Clone ID: TF_ZmC713262_1.pep
MCDYFLQRMDQGDHHHHHQAGDLTDVVRAGGGAMHQAAVAELSSADTGWQLPAEPAAGASLFPPPQPSSSDCDGFADAFAGLPDPFASDFRTSSSSSGVGLGPADFFDFEAPAAAAAAGGGARRGGGVLAGAQMPALSPREIRPYPVTMGGDTVKIGAPTMMPGLAVGPPCCAFDAVAGMQMPSAHAHGEGMKRKKNQARKVVCIPAPAPXSGGGRTTGEGVRSDLWAWRKYGQKPIKGARYPRGGYRCSSSKGWPARKQVERKRTD

SEQ ID NO: 9311 - protein, 74 aa, Zea mays
  Clone ID: TF_LIB3732-003-Q1-N6-E5.pep
KRKTRVKRSIKVPGISSKVPDIPPEEFLWRKYGQKPIKGSPYPRGFYKSSPVRGCPARKHVEGAPADPAILVVT

SEQ ID NO: 9312 - protein, 98 aa, Zea mays
  Clone ID: TF_ZmC240676_1.pep
GKKSVKNSPTPGDGYQCSTYGKKSVKNSPNPRNYYRCSTEGCNVKKRVERDKDDPSYVVTTYEGMHNHVSPSTVYYASQDAASGRFFVAGTQPPGSLN

SEQ ID NO: 9313 - protein, 106 aa, Zea mays
  Clone ID: TF_LIB4185-024-R1-K1-A8.pep
RSIKVPAISLKVADIPPDEFSWRKYGPKPIKGSPFPRGYYKCSPVRGCPARKPVERAPDDPAILVVTYEGEPPPPPGPVQGPSPLATAFPGARSRFPRQRGRCLVF

SEQ ID NO: 9314 - protein, 342 aa, Zea mays
  unsure (1)..(342): unsure at all Xaa locations
  Clone ID: TF_ZmC1136_4.pep
GGSTKLEDGYNWRKYGQKQVKGSENPRSYYKCTYHSCSMKKKVERSLADGRVTQIVYKGAHNHPKPLSTRRNSSGGVAAAEEQAANNSSLSGCGGPEHSGGATAENSSVTFGDDEAENGSQRSGGDEPDAKRWYAEDGENEGCSGAGGGKPVREPRLVVQTLSDIDILDDGFRWRKYGQKVVKGNPNPRSYYKCTTAGCPVRKHVERACHDARAVITTYEGKHNHDVPAGRGAASXALYRPAPPTADTAGHHYLAAARPGVAYQTGQQYGFGDQLGSFGLSGAPAQSGGGGFAFSSGFDNPMGSYMSQHQQQQRQNDAMHASRAKEEPREDMFFPTSLLYTD

SEQ ID NO: 9315 - protein, 103 aa, Zea mays
  Clone ID: TF_LIB3245-516-P1-K1-C4.pep
MAPPPAKPALHEPPQLPRSAASANKTSEKRQRVPSAYNRFIKDEIQRIKASNPDITHREAFSAAAKNWAHFPHIHFGLMPDQGLKKHPMQTQEGAECMLFKDG

SEQ ID NO: 9316 - protein, 109 aa, Zea mays
  Clone ID: TF_ZmC32886_2.pep
MHRSDVSLLLFFFLLALSLGEYDCRDEIQRIKAGNPNISHREAFSAAAKNWAHFPHIHFGLMPDHQGLKTTSLLPQDHQRKDGLLKEGLYAAAAAAAAHAAANMGIAPY

SEQ ID NO: 9317 - protein, 169 aa, Zea mays
  Clone ID: TF_LIB4740-008-R1-K1-D11.pep
MSAQFASEHACYVNCNYCNTILGVNVPSSCSYNVVTVKCGHCTMVLSMDLSPFHQQARTVPDNQVVQNRGFQYNNFGSYEQASSRNLRTPPMYPVSNNLPQVPPIRPSEKRQRVPSAYNRFIKEEIQRIKTSNPEISHREAFSAAAKNWAHLPRLHFGLSVADGGGGSN

SEQ ID NO: 9318 - protein, 169 aa, Zea mays
  Clone ID: TF_ZmC31888_1.pep
MSAQFASEHACYVNCNYCNTILVVNVPSSCSYNVVTVKCGHCTMVLSMDLSPFHQQARTVPDNQVVQNRGFQYNNFGSYEQASSRNLRTPPMYPVSNNLPQVPPIRPSEKRQRVPSAYNRFIKEEIQRIKTSNPEISHREAFSAAAKNWAHLPRLHFGLSVADGGGGSN

SEQ ID NO: 9319 - protein, 169 aa, Zea mays; identical to SEQ ID NO: 9318
  Clone ID: TF_ZmC31888_2.pep

SEQ ID NO: 9320 - protein, 169 aa, Zea mays
  Clone ID: TF_ZmC31888_3.pep
MSAQFASEHACYVNCNYCNTILVVNVPSSCSYNVVTVKCGHCTMVLSMDLSPFHQQARTVPDNQVVQNRGFQYNNFGSYEQASSRNLRTPAMYPVSNNQPQVPPIRPSEKRQRVPSAYNRFIKEEIQRIKTSNPEISHREAFSAAAKNWAHLPRLHFGLSVADGGGGSN

SEQ ID NO: 9321 - protein, 169 aa, Zea mays; identical to SEQ ID NO: 9320
  Clone ID: TF_ZmC31888_4.pep

SEQ ID NO: 9322 - protein, 169 aa, Zea mays
  Clone ID: TF_ZmC31888_5.pep
MSAQFASEHACYVNCNYCNTILVVNVPSSCSYNVVTVKCGHCTMVLSMDLSPFHQQARTVPDNQVVQNRGFQYNNFGSYEQASSRNLRTPPMYPVSNNQPQVPPIRPSEKRQRVPSAYNRFIKEEIQRIKTSNPEISHREAFSAAAKNWAHLPRLHFGLSVADGGGGSN

SEQ ID NO: 9323 - protein, 220 aa, Zea mays
  unsure (1)..(220): unsure at all Xaa locations
  Clone ID: TF_ZmC7254_10.pep
MMSSSSSSSAACCFPLDHLAPSPTEQLCYVHCNCCDTILAVGVPCSSLFKTVTVRCGHCANLLSVNLRGLLLPPAAPAPPNHLNFAHSLLSPTSPHGLLDELALQQAPSFLMEQASANLSSTMTGRSSNSSCASNLPPPAPMPAAQPVQQEAELPKTAPSVNRPPEKRQRVPSAYNRFIKXEIQRIKGGNPDITHPXRRSAQPAKNWAHFPHIHFGLMPD

SEQ ID NO: 9324 - protein, 81 aa, Zea mays
  Clone ID: TF_UC-ZMFLB73131H04_FLI.pep
TTAPEKRQRVPSAYNRFIKEEIRRIKACNPDISHREAFSTAAKNWAHFPNIHFGLGPCESSNNLDEATGAMCHPQKVQDLY

SEQ ID NO: 9325 - protein, 206 aa, Zea mays
  Clone ID: TF_ZmC21266_2.pep
MDTVSQSEHLCYVRCTYCNTVLAVGVPCKRLMDTVTVKCGHCNNLSYLSPRPPMVQPLSPTDHPLGPFQCQGPCSECRRNQPLPLASPTSTDLTPRMPFVVKPPEKKHRLPSAYNRFMREEIQRIKAAKPDIPHREAFSMAAKNWAKCDPRCSTTASTATSNSAPEPARVVVPTPHVTEPRFDLEDRAKEHVIESFDIFKQIERNI

SEQ ID NO: 9326 - protein, 207 aa, Zea mays
  Clone ID: TF_ZmC21266_3.pep
MDTVSQSEHLCYVRCTYCNTVLAVGVPCKRLMDTVTVKCGHCNNLSYLSPRPPMVQPLSPTDHPLGSFQCQGPCSECRRNQPLPLASPTSTDLTPRMPFVVKPPEKKHRLPSAYNRFMREEIQRIKAAKPDIPHREAFSMAAKNWAKCDPRCSTTASTATSNSAPEPASRVVVPTPHVTEPRFDLEDRAKEHVIESFDIFKQIERTI

SEQ ID NO: 9327 - protein, 216 aa, Zea mays
  unsure (1)..(216): unsure at all Xaa locations
  Clone ID: TF_ZmC13380_5.pep
MSSSQIAPADHVCYVHCSFCNTVLAVSVPGNSMLNIVTVRCGHCANLLSVNLRALTHSLPEQDHQLQENIKVHGINGTLHDDHQCGHLDQLGSSSSSRFRRLPVMCSPQNGQHLLQEKTLNNNARPPEKRQRVPSAYNRFIKEEIRRIKANNXPDINHREAFSTAAKNWAHYPNIHFGLDDSGREGKKKLVDHEAAASVVAVAAAPTAAKKIQGFY

SEQ ID NO: 9328 - protein, 165 aa, Zea mays
  Clone ID: TF_ZmC32886_1.pep
LHPPHSPLLRPRPSAGSPGPQLLQQRLPAAAIPSGRNGLHPHPPQPQPQPPAAGKGAKEPSPRANSAINRPPEKRQRVPSAYNRFIKDEIQRIKAGNPDISHREAFSAAAKNWAHFPHIHFGLMPDHQGPKKTSLLPQDHQRSDGGGLLKEGLYAAAANMGVAPY

SEQ ID NO: 9329 - protein, 87 aa, Zea mays
  Clone ID: TF_ZmC13380_4.pep
NEIAAPEKRQRVPSAYNRFIKEEIRRIKANNPDISHREAFSTAAKNWAHYPNIHFGLNSGREGGKNKLVDEAVAAVAVAPKKIQGFY

SEQ ID NO: 9330 - protein, 206 aa, Zea mays
  unsure (1)..(206): unsure at all Xaa locations
  Clone ID: TF_ZmC13380_2.pep
MSSAQIVPADHVCYVHCNFCNTVLAVSVPGNSMLSMVTVRCGHCTNLLSVNLRALMHSVPEQDQLQXNIRVHGTLREHHQCGGGHHLELGSSSSSRFRLPMMMSYAPQNEHLLQEQTLNNARPAPEKRQRVPSAYNRFIKEEIRRIKANNPDISHREAFSTAAKNWAHYPNIHFGLNSGREGGKNKLVDEAVAAVAVAPKKIQGFY

SEQ ID NO: 9331 - protein, 192 aa, Zea mays
  Clone ID: TF_ZmC13272_2.pep
MSSAPLQIAPVPEHVCYVHCNFCNTILAVSVPSHSMLNIVTVRCGHCTSLLSVNLRGLIQSLPVQNHHYSQQQENFTVQNMGFTENYPEYAPSYRMPTTLSAKGDLDHMLHVRAPEKRQRVPSAYNRFIKEEIRRIKACNPDISHREAFSTAAKNWAHFPNIHFGLGPCESSNNLDEATGAMCHPQKVQDLY

SEQ ID NO: 9332 - protein, 261 aa, Zea mays
  Clone ID: TF_ZmC7254_8.pep
MMSSSSSSSSSAACCFPLDHLAPSPTEQLCYVHCNCCDTILAVGVPCSSLFKTVTVRCGHCANLLSVNLRGLLLPPAAPAPPNHLNFAHSLLSPTSPHGLLDELALQQAPSFLMEQASANLSSTMTGRSSNSSCASNLPPPAPMPAAQPVQQEAELPKTAPSVNRPPEKRQRVPSAYNRFIKDEIQRIKAGNPDITHREAFSAAAKNWAHFPHIHFGLMPDQGLKKTFKTHQDGAEDMLLKDDLYAAAAAAAAANMGITPF

SEQ ID NO: 9333 - protein, 205 aa, Zea mays
  Clone ID: TF_ZmC21266_1.pep
MDMVSQSEHLCYVRCTYCNTVLAVGVPCKRLMDTVTVKCGHCNNLSYLSPRPPMVQPLSPTDHPLGPFQCQGPCNDCRRNQPLPLASPSSTELSPRMPFVVKPPEKKHRLPSAYNRFMREEIQRIKAAKPDIPHREAFSMAAKNWAKCDPRCSTAASTETSNSAPAEPRVVPTPQLTEPRFDLEDRAKGQVIESFDIFKHIERSI

SEQ ID NO: 9334 - protein, 200 aa, Zea mays
  Clone ID: TF_ZmC21266_4.pep
MDMVSQSEHLCYVRCTYCNTVLALQVGVPCKRLMDTVTVKCGHCNNLSYLSPRPPMVQPLSPTDHPLGPFQCQGPCNDCRRNQPLPLASPSSTELSPRMPFVVKPPEKKHRLPSAYNRFMREEIQRIKAAKPDIPHREAFSMAAKNWAKCDPRCSTAASTETSNSAPAEPRVVPTPQLTEPRFDLEVLQSLLPSLFSVDK

SEQ ID NO: 9335 - protein, 67 aa, Zea mays
  unsure (1)..(67): unsure at all Xaa locations
  Clone ID: TF_LIB3596-045-Q6-K7-A8.pep
GFDPRRPIGFSAASNRFMHGRLRQXIKRDNPDIKHREAFSTGAKHWARYPNIHFGLHDSGREWQARN

SEQ ID NO: 9336 - protein, 164 aa, Zea mays
  Clone ID: TF_LIB4828-125-R1-N1-C9.pep
MSSAPLQIAPVPEHVCYVHCNFCNTILAVSVPSHSMLNIVTVRCGHCTSLLSVNLRGLIQSLPVQNHHYSQQQENFTVQNMGFTENYPEYAPSYRMPTTLSAKGDLDHMLHVRAPEKRQRVPSAYNRFIKEEIRRIKACNPDISHREAFSTAAKNWAHFPNIHF

SEQ ID NO: 9337 - protein, 216 aa, Zea mays
  Clone ID: TF_ZmC13380_1.pep
MSSAQIAPADHVCYVHCSFCNTVLAVSVPGNSMLNIVTVRCGHCANLLSVNLRALMHSLPEQDHQLQENIKVHGINGTLHDDHQYCGHLDQLGSSSSSRFRRLPVMCSPQNEQHLLQEQTLNNNARPPEKRQRVPSAYNRFIKEEIRRIKANNPDINHREAFSTAAKNWAHYPNIHFGLDDSGREGKKKLVDHEAAASVVAVAAAPTAAKKIQGFY

SEQ ID NO: 9338 - protein, 204 aa, Zea mays
  unsure (1)..(204): unsure at all Xaa locations
  Clone ID: TF_ZmC151488_1.pep
MMSSAPEETLFNLDQQQPPPAEQEQICYVHCSYCDTILAVGVPCSSLFQTVTVRCGHCSNLLYVNLRALLLPAAAANNQLPPFGQPLLSPTSPHGLLDAEAMSFQAPSLPGAEPPSACVSGVTSINNTCGGNTTTSSAMSSMAPPPAKHALQEAQQLPRTAASVNRTSEKRQRVPSAYNRFIKDEIQRIKASNXDITHREAFSA

SEQ ID NO: 9339 - protein, 206 aa, Zea mays
  unsure (1)..(206): unsure at all Xaa locations
  Clone ID: TF_LIB4744-101-A1-K1-B10.pep
SRRPGIHTKEWFASFLSPSISRLLLDQRRVRCCRSTNRHLSCQYASEHACYVNCHYCXTILVVNVPXSCSYNXLTAKRALRTKGLLLDLSPFHHPPLTVPHNEVAHNXASNNLSLVLTTHKPANLSTRPPSVIHVSEHICHNCHPYDPHRKHPLLHHDTTHSSTANXRRLKTSHPEISHREAFRAATKNWPHLPXLHFRLIVCDHR

SEQ ID NO: 9340 - protein, 163 aa, Zea mays
  Clone ID: TF_LIB4975-011-R1-K1-D11.pep
MMSSSSSSSSSAACCFPLDHLAPSPTEQLCYVHCNCCDTILADELALQQAPSFLMEQASANLSSTMTGRSSNSSCASNLPPPPPMPAAQPVQQEPELPKTAPSVNRPPEKRQRVPSAYSRFIKDEIQRIKGGNPDITHREAFSAAAKNWGHFPHIHFGLMPDQ

SEQ ID NO: 9341 - protein, 146 aa, Zea mays
  Clone ID: TF_LIB4073-012-Q6-K1-G12.pep
RTRGRTRGHKHTQISSSISPLSFTSLYLQAVCTTQGEKSRRNVGPADRAGAGACVLRALQLLQYNSRAPEKRQRVPSAYNRFIKEEIRRIKASNPDISHREAFSTAAKNWAHFPNIHFGLGPYESSNKLDEAIGATGHPQKVQDLY

SEQ ID NO: 9342 - protein, 180 aa, Zea mays
  Clone ID: TF_LIB4703-004-R1-K1-F7.pep
VPGNSMLSMVTVRCGHCTNLLSVNLRALMHSVPEQDQLQQENIRVHGTLREHHQCGGGHHLELGSSSSSRFRLPMMMSYAPQNEHLLQEQTLNNARPAPEKRQRVPSAYNRFIKEEIRRIKAPNPDISHREAFGTAAKNWAHYPNIHFGLNSGREGGKNKLVDEAVAAVAVAPNKIQGFY

SEQ ID NO: 9343 - protein, 91 aa, Zea mays
  Clone ID: TF_LIB4744-099-A1-K1-A7.pep
MAQTLISTDHPLLPYQRLGPCNDCRRNQPLPLCSHMSSDLTRRMAFRCHPQHKRHRLPSGHNLCMTDYIQRISADWPHIPHWEAFTMDVHN

SEQ ID NO: 9344 - protein, 258 aa, Zea mays
  Clone ID: TF_ZmC1397_2.pep
MKVQCDVCTAEAASVFCCADEAALCDACDRRVHRANKLAGKHRRFSLLHPCSSSSSSAAHKPPLCDICQERRGFLFCKEDRAILCRECDAPVHSASDMTRRHSRFLLTGVRLSSAPVDSAGPSEEEEQENSRGPCNDESCSSGSGAGGATTATASDGSSISEYLTKTLPGWHVEDFLIDDASAGDVGACSDGLYQGQNGQISGVLQEAYLPWTEREQVQTDVADERASWERWVPQMHAEFGGGGKRPRASPSPPCSYW

SEQ ID NO: 9345 - protein, 210 aa, Zea mays
  Clone ID: TF_ZmC1397_1.pep
MKVQCDVCAAEAASVFCCADEAALCDACDDRVHRANKLAGKHRRFSLLHPCSSSAHKPPLCDICQERRGFLFCKEDRAILCRECDAPVHSANDMTRRHSRFLLTGVRLSSAPVDSADPSEGEEEEEQENSSRPGNGESCSGGAGATTATASDGSSISEYLTKTLPGWHVEDFLVDDAYASDVGACSSDGLYQVSSVLPCEWNCKLSLRRS

SEQ ID NO: 9346 - protein, 308 aa, Zea mays
  Clone ID: TF_ZmC3762_1.pep
MQMLCDVCAAAPAAVICCADEAALCSACDRRVHRANKLAHKHRRIPLAQPSGDESDADAKPLCDVCKERRGLVFCVEDRAILCPDCDDPIHSANDLTAKHTRFLLVGAKLSAALVDAQAPHSPDDDDNDCGRGNGAAAEPDAVPAVCAQGSCAAKASSLESGGGGGGGSGSGSSISEYLTNICPGWRVDDLLFDDSAFSAASKADSCDDGHEQVPSLDADLFDVVAGAGWPGKRGSAWSGVGALGFDKVPASVVVVPTAAKQQQGCVRERTWDSDSDSDVFAVPELPQPPQAKKARPAPAPAPTFWCF

SEQ ID NO: 9347 - protein, 180 aa, Zea mays
  Clone ID: TF_LIB4741-061-R1-K1-E4.pep
MKIQCNACGAAEARVLCCADEAPLCVACDEEVHAANKLAGKHQRVPLLTDAAVAAAAAAPAVPKCDICQEASGYFFCLEDRALLCRDCDVAIHTVNSFVSVHQRFLLTGVQVGLDPADPVPPIAEKHVNAAGGSVNQPVRHQPKRSPTVQFSVEGSASVPTKNVTNGDCSRQNFVPTARG

SEQ ID NO: 9348 - protein, 376 aa, Zea mays
  Clone ID: TF_ZmC460_8.pep
MKIQCDACEGAAATVVCCADEAALCARCDVEIHAANKLASKHQRLPLEALSASLPRCDVCVRVPMLIFLGGCWPACLHWKPRPTLGRSRPKGPCHWLSPPGRRAAAGRLEAPFPTGGMRIQCDACEAAAATVVCCADEAALCARCDVEIHAANKLASKHQRLPLGDAAALPASLPRCDVCQERPAFIFCVEDRALLCRDCDEPIHVPGTLSGNHQRYLATGIRVGFSSVCGASAEGLPPAPPKGSSKPAAVVSAPAAGTTTKTRTVKDALPQEVPSSPFLPPSGWAVEDLLELSDYESSDKKDSSLGLKELEWFEDIDLFHAHSPAKTAMAEFFASPQPVSNAGFYKANGARLFKKSRMEVPDDDDEDYFIVPDLG

SEQ ID NO: 9349 - protein, 375 aa, Zea mays
  unsure (1)..(375): unsure at all Xaa locations
  Clone ID: TF_ZmC3_1.pep
MKIQCNACGAAEARVLCCADEAALCVACDEEVHAANKLAGKHQRVPLLTDAAAAAAAAAPAVPKCDICQEASGYFFCLEDRALLCRDCDVAIHTVNSFVSVHQRFLLTGVQVGLDPADPVPPIAEKHVNAVGGSVNQPVRHQPRRSPTVQFSVEGSASVPTKNVTNGDCSRQNFVPTARAEVVDWTMNNSTIRSVESPPKYISEESPTLLQSSQTTTVFSNQINGNSDGAYHLSFSGGNVTDSLPDWPVDEFFSNSEYGPNFGFSENGSSKGDTAKLGGAGGSPQCRLAEGSVAEELLGQVPGLITDEYMGRVPENSWTVPEVPSPPTASGLNWHGNLCFPAYDSTMXVPEITSLQNSESHFTVPSSFKRRRREY

SEQ ID NO: 9350 - protein, 56 aa, Zea mays
  Clone ID: TF_ZmC3809_2.pep
MKVQCDVCAAEAASVFCCADEAALCEACDRRVHRANKLAGKHRRLSLLGPVAPSSL

SEQ ID NO: 9351 - protein, 202 aa, Zea mays
  unsure (1)..(202): unsure at all Xaa locations
  Clone ID: TF_LIB3597-024-Q1-K6-F4.pep
LQRTPGSNVEESSILETVTAVAAGKPLSCPNHDGNVMDFYCQSCETAMCRECTEGEHAEHPTVPLKDVVEQHKASLQVQLDAVNKRLPEIDSALQFISEIIHQLTNQKASIVDDIHSTFDELQKTLNVRKSVLLMELEVNYGLKHKVLQSQLDTLLEGQESIKSCSNFTAQALNHGTETEVXLVKKQMSEKLNELADQDFPL

SEQ ID NO: 9352 - protein, 101 aa, Zea mays
  Clone ID: TF_ZmC9242_2.pep
CHQYVQCEICGEKHLKKNIKRHLQSHDKVPSDGRMKCTFDGCEHFFSNKSNLTKHVKACHDQLKPFKCGIVGCGKAFTYKHVRDNHETSGAHVYMEVSCAT

SEQ ID NO: 9353 - protein, 206 aa, Zea mays
  unsure (1)..(206): unsure at all Xaa locations
  Clone ID: TF_ZmC205_12.pep
MFHHQQELLQAEAAAADRESSMSNLTSSASGGPNAAAAAAAPPAPAASGNNKRKRSLPGNPDPEAEVVALSPATLMATNRFVCEICGKGFQRDQNLQLHRRGHNLXPWKLKQRGTGKEAQXRKGVRVPPRPSCVHHDPARALGDLTGIKKHFFRKHGREXKWKCDKCSKKYAVXSDWKAHSKIWGTREYKCDCGTSFSRRDSFITH

SEQ ID NO: 9354 - protein, 122 aa, Zea mays
  Clone ID: TF_ZmC28550_1.pep
LRAGVPAASSPTRPLARNTPHQSVSDRYVCEICGQGFQRDQNLQMHRRRHKVPWKLLKREAGEAARKRVFLCPEPSCLHHDPSHALGDLVGIKKHFRRKHSGHRQWACVFSRIVWGSIAWLI

SEQ ID NO: 9355 - protein, 122 aa, Zea mays
  Clone ID: TF_LIB3279-048-P1-K1-E3.pep
MPPPHPTDAEAGPEQVAPTEAVPLAAAAPAPVKKKRNLPGTPDPDAEVIALSPGTLLATNRFVCEVCGKGFQRDQNLQLHRRGHNLPWRLRQRGPGAAPPRRRVYVCPEPGCVHHSPTRALG

SEQ ID NO: 9356 - protein, 427 aa, Zea mays
  Clone ID: TF_ZmC12456_1.pep
ASQSERWLPSPQAWLFQPSATAAMPHVLSFLHLHLPLNTAPLHSFRVHRTRHSHPHLSLRTRRASATAAAAEAENPSASADVEMVRGRDGVWTARSPTVVVLWDLDNKPPRGPPFPAATALIGAASLLGRVVSISAFANRHAFSHLPGWVTAERRARRALDRSERAGVVVPSVPYSCSVCGRRFPTRPDLTRHFRQLHERERNKKLSRLRSLKGKKRQKFRERFITGNTKYEDAARELLTPKVGYGLASELRRAGVHVRTVPDKPQAADHALKRQVKHSVACGVDWLVLVSDDSDFTDTVRNARAADLRTVVVGDGCRALGKVADIWLPWDRVENGEVDEEMLRSCTFSEYREDQGTERDGQFIGDWDAGDFDDVVDDIVGTRTSLLGATTMSAFADEDIADGIFGVELTGDNMFWSSDDEEEDDYL

SEQ ID NO: 9357 - protein, 135 aa, Zea mays
  Clone ID: TF_ZmC3270_1.pep
MKHPRDAGAMPLSLALSLGAGVAPGHGSSKRPRRAAGGGDGELVCKTCSRAFVSFQALGGHRTSHLRAGRHGLALGMPAPAPAKEAPPPATTHLCHVCGLGFQMGQALGGHMRRHREEAAATTAQAPPVLLQLFV

SEQ ID NO: 9358 - protein, 153 aa, Zea mays
  Clone ID: TF_LIB4745-008-Q1-K1-G3.pep
MASNSSAAFFGVRDGDQQDQIKPLISPQQQLAAALPGLAGGVSAASGQGAPPAQPPPKKKRTMPDPDAEVIALSPKTLMATNRFVCEVCNKGFQREQNLQLHRRGHNLPWKLKQKNPLQAQRRRVYLCPEPTCVHHDPARALGDLTGIKKHFC

SEQ ID NO: 9359 - protein, 125 aa, Zea mays
  unsure (1)..(125): unsure at all Xaa locations
  Clone ID: TF_LIB4757-036-R1-K1-A8.pep
MAAASSAHLFGLGDGQMQMQPQQQQAPPPPLVNNPAAPPPKKKRNQPGNPSNXPDAEVIALSPKTLMATNRFVCEVCNKGFQREQNLQLHRRGHNLPWKLKQKNPKETRRRVYLCPEPTCVHHDP

SEQ ID NO: 9360 - protein, 120 aa, Zea mays
  Clone ID: TF_ZmC205_25.pep
MASNSSAAFFGVRDGDQQDQIKPLISPQQQLAAALPGLAGGVPAASGQGAPPAQPPPKKKRTMPDPDAEVIALSPKTLMATNRFVCEVCNKGFQREQNLQLHRRGHNLPWKLKQKNPLQA

SEQ ID NO: 9361 - protein, 164 aa, Zea mays
  Clone ID: TF_LIB4729-120-A1-K1-D11.pep
MMASNSPAAAFFGVRDGDQQDHQIKPLISPQQQQQLAAALPSVASGQGAPTAAAQPPPKKKRTMPDPDAEVIALSPKTLMATNRFVCEVCSKGFQREQNLQLHRRGHNLPWKLKQKDPLQAQRRRVYLCPEPTCAHHDPARALGDLTGIKKHFSRQHGEKKWKR

SEQ ID NO: 9362 - protein, 187 aa, Zea mays
  unsure (1)..(187): unsure at all Xaa locations
  Clone ID: TF_ZmC205_22.pep
MMASNSPAAAFFGVRDGDQQDHQIKPLISPQQQQQLAAALPSVASGQGAPTAAAAQPPPKKKRTMPDPDAEVIALSPKTLMATNRFVCEVCSKGFQREQNLQLHRRGHNLPWKLKQKDPLQAQXRRVYLCPXEPTCAHHDPARALXELXTGIKKHFSRXHGRKKWKCDKCSKRYAVQXDWKGALQIC

SEQ ID NO: 9363 - protein, 112 aa, Zea mays
  Clone ID: TF_LIB3354-032-P1-K1-D5.pep
LCRDRWRRRRGRGGGGADPDAEVIALSPKTLLATNRFVCEICNKGFQRDQNLQLHRRGHNLPWKLRQRSGKEVRKRVYVCPEPSCVHHDPSRALGDLTGIKKHFCRKHGEKK

SEQ ID NO: 9364 - protein, 122 aa, Zea mays
  unsure (1)..(122): unsure at all Xaa locations
  Clone ID: TF_LIB3205-044-P1-N1-E8.pep
SWSSPRCWLPHTHLCTMCGKGFKRDSNVRMHMRGHDDEYKSSCDAGRAAEGCGPXQEPFKRRYSCPFAGCNRNNLLESLQPLKTILCVKFQYRRSLCXKIHTCVRCRANMLSIVPDLRTHKK

SEQ ID NO: 9365 - protein, 77 aa, Zea mays
  Clone ID: TF_701160730H1.pep
HDDYCDPTSTPLTLQLSTALYNNSSSIRSTINAKAKVHECSICGAEFSSGQALGGHMRKHRNFLSAPIIGQLILQWW

SEQ ID NO: 9366 - protein, 262 aa, Zea mays
  Clone ID: TF_LIB4602-001-R1-K1-A2.pep
GLPYSSANDGDDSALCFQDQIGSIMDKTNVHSISSLTFSSYSSDPNDVNERNLNKANVYQCQKCNLTFGDRTSYAQHHLAYHEMSVKRRRTGKFGEPVVGKDGKFECPICHKTFEEEPQYFGHVGSHARYEGLAPEAFLDKATSRRAANDSLAEIPFSLQELTESHGQNNKVSYGEKGFQHHNHSNKHGDNNLTAIDLFGTNYSDNFIRPNKTCGSPEEGPSCNDAPSVSRYTNCTGHADVIVSRRASISNNQSGSNINGLY

SEQ ID NO: 9367 - protein, 244 aa, Zea mays
  Clone ID: TF_ZmC205_19.pep
MPHPTDPEAGSEQKAPAVPYLAAAAPAPVKKKRNLPGTPDPDAEVIALSPGTLLATNRFVCEVCGKGFQRDQNLQLHRLGHNLPWRLRQRGPGAPPPRRRVYVCPEPACVHHSPARALGDLTGIKKHFCRKHGEKRWVGPPSAPRYAPAPEPLRQQPPPAPHHAEPRNEPDTNATEAVQFAPPPPPPPPPPQLQLPVLSQASVSAAANVSASSSSSSVAGTSQSLLAGMSRALVDGVSAAVRGP

SEQ ID NO: 9368 - protein, 148 aa, Zea mays
  Clone ID: TF_ZmC547521_1.pep
MDVVELDAARHGCKVCGKSFLSGRSLGGHMRSHISLGEAALEVHAADELTPVSSNGGRGCDGLVAYGLRENPRKTRRLSDFADEKDVGHGVECGKSWRSLFGHIRNHASGDRYHDVDDDEDEEEDEFSVEEGEAEEAEMVRPTEAPVA

SEQ ID NO: 9369 - protein, 311 aa, Zea mays
  Clone ID: TF_ZmC65823_1.pep
MDNHIHSQPAANLYYQFGMGTEQQYPPPFASPPSTNIPHMDWNPATMLDNLTFIEEKIQQVKDVIRTMVDNAGQVQTGELLAQKQKQQVVNADLTCLIVQLISTAGSLLPSLKNSSFLSHPHPAGHVDMANHVGPSSSLVPNAMTVSEDYEELFKGWTDGGIEVDDDGVLVEEQEITKDGDSLSYELLQLEEDEILAPHTHFCTICGKGFKRDANLRMHMRGHGDEYKSPAALAKPPRDPGAEQEPAKRRYSCPFAGCKRNKLHKSFQPLKTILCVKNHYRRSHCEKSHTCGRCHAKKFSIVADLRTHEKH

SEQ ID NO: 9370 - protein, 155 aa, Zea mays
  unsure (1)..(155): unsure at all Xaa locations
  Clone ID: TF_LIB3607-011-Q6-K6-H3.pep
MSGAAGREFTGGGGGGSSSSFSSVSNASPTEVEEEFLRYHTNPLLGGPTTEMRDDGGPSDQPPLTVKKKRSLPGTPDPSAEVIALSPRTLMATNRFVCEICHKGFQRDQNLQLHRRGHNLPWKLRQRGGPXGGADCGGPSRKQVYVCXEASCVHH

SEQ ID NO: 9371 - protein, 125 aa, Zea mays
  Clone ID: TF_ZmC975_1.pep
IAICLAALAGTRKFGLGREKDQHQHTKWCPTTTTTHAPSAQQELRFRCAVCGKAFATYQALGGHKSSHRKPTTPERYAAALGQAATTTAARGDHSDEITASSLSGSAASGGYHRCSIRRHGSEEL

SEQ ID NO: 9372 - protein, 257 aa, Zea mays
  Clone ID: TF_ZmC747_1.pep
IVSIENSGEKGAMEKADMCVASTSITNTDDTSLCIGIHSHDSIVECQDYAMQHTLYCEKHLPRFLKRARNGKSRLVSKDIFVNLLKGCTSRKDKICLHQACEFLYWFLRNNLSHQHTSLASEHMPQILAEVSKNPDVGEFLLKLISTEREKLANIWGFDTNRSKQIYSENKEGSLVLHKEGTNLSSGPKCKICAHQFSDDEALGLHWTTVHKKEARWLFRGYSCAACMESFTNKKVLERHVQDVHGAQYLQYSILVM

SEQ ID NO: 9373 - protein, 45 aa, Zea mays
  unsure (1)..(45): unsure at all Xaa locations
  Clone ID: TF_700432333H1.pep
EARSYDCEQCVQVFKPSPKLTKHQDNXTGEESYKCEECGKAFNLS

SEQ ID NO: 9374 - protein, 141 aa, Zea mays
  Clone ID: TF_LIB3607-020-Q1-N6-H2.pep
AAVETEAEAVLLQQEHDGQERAKRKRSRRRRDRDGLQPKEATTQEEYLALCLVMLATGRRDADAAAPPQDHACSVCGKAFPSYQALGGHKASHRAKPSPSPSPAAAAALAPEPGAGHGDRHDEKKPAPSFSLSAGSRPAVA

SEQ ID NO: 9375 - protein, 182 aa, Zea mays
  Clone ID: TF_ZmC287271_1.pep
SPRAAFVHPLRRSRSGRDGRQRRPRRPRRRGRHTASHGCATGGRQGAAQQEGQDAGAAAVPIAIAIAVAASSSGSGSAKQHHPRVHECSICGAEFGSGQALGGHMRRHRPLVPAAAASRDDLHAPRKEKSLLELDLNLPAPCNEADAPELTSPRFAFAVAEQPPAPLPFPPATPSALVDCHY

SEQ ID NO: 9376 - protein, 181 aa, Zea mays
  unsure (1)..(181): unsure at all Xaa locations
  Clone ID: TF_ZmC954085_1.pep
CAALTSLSTSPLLLGAPVAAFSPEPGLEPWKEALVRPPGSYSSSSNSGDWGWDLASDQSSPSTPSPPLPPEAAHFLFGEPTLRKRKSPAQVMFQCLWKSCGKVLSTASAMQRHIRLVHLGRQAEPDQSDGEEDFYYTELDVGVDTLTDGLSSLTPVSPTASIRLAFXRLELPELLEPLAPA

SEQ ID NO: 9377 - protein, 173 aa, Zea mays
  Clone ID: TF_20507554.pep
QRQEPLLGRNSHARPRAPDTGNRSKRGLGCSAPAICKLKDDSVPAPPKETTGTASAGEPCKRRASVSGSSDRCVKKPQCGAGSNKQLQRGGSSSSSGGSSIRAGMQLRRLSGCYECHMVVAGSASMRATTICPCPDCGEVFVRQESLQLHQSIRHAVSELGTDDTSRNIIEII

SEQ ID NO: 9378 - protein, 109 aa, Zea mays
  Clone ID: TF_LIB3088-019-Q1-K1-F8.pep
QKAAIRILLESVGGSGNLRDDVLVVGGDEEGGRGGCRRDQPIRCLRGLSMSFDEGMGAHVTGEGAGTGEAPGAELACVIRHVHRACAFRRSELGELSAGAQMVRRPTRP

SEQ ID NO: 9379 - protein, 91 aa, Zea mays
  Clone ID: TF_LIB3959-020-Q1-K6-D10.pep
ANPLRAVAIGFGCASFPRIPQDLASSGGKCSLFKWVREDGYRNSKDNPRVLDVEAPKPEPTTEILFLCSYENCGKTFVDVSALRKHASVHN

SEQ ID NO: 9380 - protein, 64 aa, Zea mays
  Clone ID: TF_ZmC172980_1.pep
MIRRHRRLRNAVMCESSMFLMSPSPSPSPPQPSRPPPEYKHFCRVCNKGFTCGSALGGHMRAHG

SEQ ID NO: 9381 - protein, 134 aa, Zea mays
  Clone ID: TF_LIB3151-023-Q1-K1-G2.pep
LPAALSIAPSRSLSSPFLLLPRARQAPKGASFLAMGKNTCKLCSRRFASSRALAGHMRSHYMAATKETAATATAAAAAAAATAQHHISSASSASTSIAIADEEVGSMMTASTNGLRENTKRTLGVADVRFSDRE

SEQ ID NO: 9382 - protein, 68 aa, Zea mays
  Clone ID: TF_LIB3245-338-Q1-K1-B10.pep
AVCLQNPGASAMNHSAIGEQHQPPKPAKVSATPPAPSAERPYVCPYDGCDKAYIHEYKLNLHLKKEHP

SEQ ID NO: 9383 - protein, 75 aa, Zea mays
  Clone ID: TF_LIB3245-075-P1-K1-A9.pep
SSSPAPGAGSSSSSPHSSLRGLSGCYECRAINVEPMSRRYPRPRELCACPQCGEVFTKADTLEHHQAINHAGLQF

SEQ ID NO: 9384 - protein, 159 aa, Zea mays
  Clone ID: TF_LIB4762-051-R1-K1-D5.pep
MNSSSATAMDQIGKYWGMWGARRSSSSSSSTIPISAWAAAYGGSSEPSWEEQAFARDAAEHLGGCVWPPRSYSCTFCQREFRSAQALGGHMNVHRRDRALLRLGGSSSPEDVHATTNDQPHPQQGDGDANTTTTTTYLPRIIKESKNKRFMPMPDHSVS

SEQ ID NO: 9385 - protein, 243 aa, Zea mays
  Clone ID: TF_ZmC32995_1.pep
MNSSSATAMDQIGKYWGMWGARRSSSSSTIPISAWAAAYGGSSEPSWEEQAFARDAAEHLGGCVWPPRSYSCTFCQREFRSAQALGGHMNVHRRDRALLRLGGSSSPEDVHATTNDQPHPQQGALLYRAAASNPSTTTPSTTAAAGTTAAGPAAAITIAGAGDGDANTTTTTTYLSRIIKESKNKRFMPMPDHSVAGMREDQAAAIDDHRHNEDGDSWRSASAAEKRRRLDHPLATAAALLIF

SEQ ID NO: 9386 - protein, 201 aa, Zea mays
  Clone ID: TF_ZmC32995_2.pep
MNSSSATAMDQIGKYWGMWGARRSSSSSSSTIPISAWAAAYGGSSEPSWEEQAFARDAAEHLGGCVWPPRSYSCTFCQREFRSAQALGGHMNVHRRDRALLRLGGSSSPEDVHATTNDQPHPQQGALLYRAAASNPSTTTPSTTAAGPAAAITIAGAGDGDANTTTTTTYLSRIIKESKNKRFMPMPDHSVAEMREIRRRP

SEQ ID NO: 9387 - protein, 112 aa, Zea mays
  Clone ID: TF_cC-zmle189065b10d1.pep
ALAQQSLSYYRLLQLAAGEREELDLELSLQPCSDLAAEAAPSGFFVCTYCDRKFYSSQALGGHQNAHKYERTLAKRRRENVDFMRAHGARQDDPYDAYGHHEMMRFTLVEAR

SEQ ID NO: 9388 - protein, 240 aa, Zea mays
  Clone ID: TF_ZmC29465_1.pep
GQLGGCVWPPRSYTCTFCRREFRSAQALGGHMNVHRRDRARLRQCAPPDHDQEPIAAPLPAPELADHQQQLLQLHGSPMTKAAVLFSGRPAAACCTHQQTYCNNNREGEGEDSPARYISTTTTIIKDSKSKVLISIPAATTATGSKKAATTIAIIGEEEEEEEEEEEIMVTGRRTKRRRLVHQPFYDLRRLPPASSSPNKGGVEDDDAKVPKLSSPSSLSHHLAGRQEEVDLELRLGTSC

SEQ ID NO: 9389 - protein, 258 aa, Zea mays
  Clone ID: TF_ZmC13146_2.pep
MHSYRAMHPYTHHSYQHHTAAVAPTKHGHGHGHGHGHGDEEDDQSMLLLSLWPPGHHHGNAAASSACSSPPICASATTTSMAAAASSPASYPWLTHQSLYNNAGCGGGSSSSSHSSFLFQEHQQEPGVSISLSIAPPCSNNAASSCGGGGFAAPPAAPSTVTTTVTPGGGQVPRQYWIPSAAEILVGSTQFSCAVCNKTFNRFNNMQMHMWGHGSQYRKGSESLRGAITVGTAPPASLMRLPCYCCAEGCRNNIEHPR

SEQ ID NO: 9390 - protein, 181 aa, Zea mays
  Clone ID: TF_ZmC53387_2.pep
MTHPRPDHEPSGEVSLALALSTDSSGSAGAPAAKRARRRGAAAATSGEGEFVCRTCSRAFTSFQALGGHRTSHLRGRHGLELGVGARALRQQHKHHQQAGGGGGGGGGGGGGGDREPQAQHECHVCGLGFEMGQALGGHMRRHREETTTGAADAWVWRADDALQRARGGAADPPVLLELFA

SEQ ID NO: 9391 - protein, 175 aa, Zea mays
  Clone ID: TF_ZM4161.C2.o1.fg.pep
MTHPRPDHEPAGEVSLALALSTDSSGGSAGAPAAKRARRRGAAAATSGEGEFVCRTCSRAFTSFQALGGHRTSHLRGRHGLELGVGARALSRQQHKHHQQAGDGGGGDREPLAQHECHVCGLGFEMGQALGGHMRRHREETTTGAADAWVWRADDALQRARGGAADPPVLLELFA

SEQ ID NO: 9392 - protein, 173 aa, Zea mays
  Clone ID: TF_ZmC53387_1.pep
MKHPRPTEQDVSLALSLSTDSSTTTSDSAGTPPAKRARARARRRGAVVATSGEGEFVCRTCSRAFPSFQALGGHRTSHLRAGRHGLDLGVVGARALKQHKQQAANANANGCEGGKQRHECNVCGLGFEMGQALGGHMRRHREEEMGAADAWVTLWRTEASRAADPPVLLELFA

SEQ ID NO: 9393 - protein, 468 aa, Zea mays
  Clone ID: TF_ZmC205_6.pep
MFHHQQELLQAEAAAADRESSMSNLTSSTSGGPNAAPAAAAAAPPAPAASGNNKRKRSLPGNPDPEAEVVALSPATLMATNRFVCEICGKGFQRDQNLQLHRRGHNLPWKLKQRGTGKEAQRRKVYVCPEASCVHHDPARALGDLTGIKKHFFRKHGEKKWKCDKCSKKYAVHSDWKAHSKICGTREYKCDCGTIFSRRDSFITHRAFCDALTEESAKAIGLNAMAAVPAQHHHHPMLFSPPPTHVMQQDVALLQEHHHQEVMQQEHCNYAMKTEMPPWPGMTYDHPLLQPLCNAAAPQSSATSTPPPPTTMQLPAAYAHLSATALLQKAAQMGATVAGAGYTQMAGAATSATFGLGLPDLQNTQQQQHQDGEIMAGLARTASHGRGGEEGGGGGGDGMTRDFLGLRAFSHRDILGLAGLDSSCMGAIISASASMNCYDEPQQRAQAQAEQQQQSSNEQWHSMGSHQS

SEQ ID NO: 9394 - protein, 115 aa, Zea mays
  Clone ID: TF_ZmC7589_1.pep
ASRWGRCCDLCLVVFKTEAELAVHKKNMCTVSSCSRHFRSHRYLRRHQSAHNDDMPYKCPWDGCNMAFKWSWDRAEHFKVHAGAKPYKCTTPGCSKIFKFVSDFTRHRRRCKPQR

SEQ ID NO: 9395 - protein, 286 aa, Zea mays
  Clone ID: TF_ZmC342_1.pep
MGKKISTKKQKNDKTNRQFQENHKKADIVDLLHEDDGDEGTYIDCNEIRKQKTDDVRVKSRGKMQSGKKKVSRCQASDGSHNGGKEMKLSSDIEVCNRRGDGTTAANFEEIPKEKADAVKVKPKMQGDKKKTSKHQAGDGDKGAKFSCDIEGCDMSFSTQHDLSLHKRDICPVKGCKKKFFCHKYLLQHRKVHLDERPLMCSFPGCAKTFKWPWARTEHMRVHTGVRPYACTEPGCTQTFRFVSDFSRHKRKTGTRVTRKRNAAFDCSCTSTGFFSDGERSEGDGC

SEQ ID NO: 9396 - protein, 278 aa, Zea mays
  Clone ID: TF_ZmC97_2.pep
SLPCAVTSMELLHAVIHGAATTTTTTTTTTTSSSATVTSGDEGAHLPQGWAKKKRSRRQRSEEENLALCLLMLSRGDRHRVQAPPPPVPSAEFRCSVCGKSFGSYQALGGHKTSHRVKLPTPPAAHVQLPAPPAVALLVEAPAPPPVTATPPPLPLVAVAVAVREPATSSTSDGAAASRVHRCSICHKEFPTGQALGGHKRKHYDGGVGSAAASTEVPGAPAETSPEVGSSPARAFDLNLPAVPEFVFRCGKPGKMWEEDEEVQSPLAFKKPRPLMTA

SEQ ID NO: 9397 - protein, 176 aa, Zea mays
  Clone ID: TF_LIB4743-089-Q1-K1-F8.pep
MAAASSAHLFGLGDGQMQMQPQQQQQAPPPPLVNNPAAAEPPPKKKRNQPDPDAEVIALSPKTLMATNRFVCEVCNKGFQREQNLQLHRRGHNLPWKLKQKNPKETRRRVYLCPEPTCVHHDPSRALGDLTGIKKHYCRKHGEKKWRCDKCNKRYAVQSDWKAHSKTCGTREYRCD

SEQ ID NO: 9398 - protein, 433 aa, Zea mays
  Clone ID: TF_ZmC205_5.pep
MQMMMLSDLSSDDHEATGSSSYGGDMASYALSPLFLAPAASATAPLPPPPQPPAEELTNKQAAGGGKRKRSQPGNPDPGAEVIALSPRTLVATNRFVCEICNKGFQRDQNLQLHRRGHNLPWKLRQRSSLVAPSSAAAGSGGRQQQQGEAAPPRKRVYVCPEPTCVHHDPARALGDLTGIKKHFSRKHGEKRWCCERCGKRYAVQSDWKAHVKGCGTREYRCDCGILFSRKDSLLTHRAFCDALAEESARLLAAAANNGSTITTTTSSSNNNDLLNASNNITPLFLPFASSPPPVVVAAAQNPNNTLFFLHQELSPFLQPRVTMQQQPSPYLDLHMHVDASIVTTTGGLADGTPVSFGLALDGSVATVGHRRLTRDFLGVDGGGRQVEELQLPLCATAAAAGASRTASCATDLTRQCLGGRLPPVNETWSHNF

SEQ ID NO: 9399 - protein, 173 aa, Zea mays
  unsure (1)..(173): unsure at all Xaa locations
  Clone ID: TF_LIB4172-014-Q1-L1-E2.pep
MMSDELTVLEPSASESREFHEDRLAQLLGNPDKQSLESPSSQDGGFTQMTVTHWKIQTGDTAQTCSKSGRNPILNSNLLILQRELIDAEARSCGGGGKGFPFNSDVVPHQISHTGEKPYKCDHCGKGFSQTSLLTEHQRVHTGDRLCVCHVCGXDFVHYASLREHQHVHTXEK

SEQ ID NO: 9400 - protein, 142 aa, Zea mays
  Clone ID: TF_ZmC13442_1.pep
TVTGGTSVGKKDVSYVLFVIKLLKERTTYRSTCYPLVIKYQVSVVFLDGPMAGALPLGQKVIPFFFCYVFVLNQIFDIFLLFLVKPPFLCVCGRKYHHLGNLTRHKKFECGQEKRFVCSTCGKAFKRKDQLTAHSIQHYPHQ

SEQ ID NO: 9401 - protein, 240 aa, Zea mays
  Clone ID: TF_ZmC205_16.pep
MAAASSAHLFGLGDGQMQMQIQQQQQAPPPPLVNNPAAPPPKKKRNQPGNPNPDAEVIALSPKTLMATNRFVCEVCNKGFQREQNLQLHRRGHNLPWKPKQKNPKETRRRVYLCPEPTCVHHDPSRALGDLTGIKKHYCRKHGEKKWKCDKCNKRYAVQSDWKAHSKTCGTREYRCDCGTLFSRRDSFITHRAFCDALAQESARVPPMGAGMYGTGGMALGLSGMATSQLQSFQDQTHSS

SEQ ID NO: 9402 - protein, 542 aa, Zea mays
  Clone ID: TF_ZmC205_4.pep
MAAASSAHLFGLGDGQMQMQPQQQQAPPPPLVNNPAAPPPKKKRNQPADPDAEVIALSPKTLMATNRFVCEVCNKGFQREQNLQLHRRGHNLPWKLKQKNPKETRRRVYLCPEPTCVHHDPSRALGDLTGIKKHYCRKHGEKKWKCDKCNKRYAVQSDWKAHSKTCGTREYRCDCGTLFSRRDSFITHRAFCDALAQESARVPPMGAGMYGTGGMALGLSGMATSQLQSFQDQTHSSATTAISSNPAAQFEHLMQSSTGSPVFRGAQPTSSSSSPFYLGGAEDGHQSLSGHTSLLHGNKQAYHGLMLLPEQQHQAGSNGLLNLGFFSGGSSGQDARLVFPDQFNGAVGGNVRGDGSEHGHSGANTESAAIFSGNLMGNHQMASSAGFSSSLYNSSETVAPAQMSATALLQKAAQMGATTSSGNVNSLLRGLGSSAGGTLNGRPAGAAAGFMAGEGSSSRSTSQAENESQFRDLMNTLAASGSGAAGTAFSGGFPGMDDSKLSTRDFLGVGGGVVRSMGGAAGLPLRHGAAGIGMGSLDTEMK

SEQ ID NO: 9403 - protein, 178 aa, Zea mays
  Clone ID: TF_LIB3597-024-Q1-K6-C9.pep
MERAVEPWGPDLQGAEEREQLRSARTGIGSENVEISQPDEFEHTPQEDDLGFKEEEDLAPGHEVGNASLKPEGIQTWDDLWVQREVPGKPQARDGGPRLLGEPRWGQASDRAAVCGECGKSFRQMSDLVKHQRTHTGEKPYKCAVCGKGFGDSSARIKHQRTHSGEKPYRARPPAQGP

SEQ ID NO: 9404 - protein, 95 aa, Zea mays
  unsure (1)..(95): unsure at all Xaa locations
  Clone ID: TF_700447294H1.pep
TIHNGDEPYACKDCGRXFIRGSVLMQHQRIQAGDKAYKCEECGNAFIRGSQLTQHQRIHTNEKPYECKECGKMFSHGSQLTQHQRIHTGEKPYQC

SEQ ID NO: 9405 - protein, 539 aa, Zea mays
  Clone ID: TF_ZmC205_3.pep
MEVEATPTTAVSSSGVAAQLPPPGPPAKKKRALPGMPDPDAEVIALSPKTLLATNRFVCEICNKGFQRDQNLQLHRRGHNLPWKLRQRSGKEVRKRVYVCPEPSCVHHDPSRALGDLTGIKKHFCRKHGEKKWKCDKCSKKYAVQSDWKAHVKTCGSREYRCDCGTLFSRRDSFITHRAFCDALAEESAKARAEAPSAEDGSSAAAVVPPPAPPPAPAPLRQQPPPPAPHHAEPRNETDTNATEAVQFAPPPPPPPPPPPPPPPQLQVPVLSQASVSAAANVGASSSSSSVAGTSQSLLGGMFAPSSMASAPQYADLGGRPERAHPAKPPPLCLATDASSSIFSAAPAVTAERQQFAPPPPSPSPSAHMSATALLQKAAQMGATSSSSSFLRGLGLDVSSSSPGASSSGQQHQHQEAMRVSLPDASLQQWPPRLELEPAPMLSAGLGLGLPYDSTGAQVSLPELMMGQSSLFSGKPATLDFLGLGMSPSGASAGRGLPAFVQPIGGMAGTGAGAAETFGAGRGAQATPWERNPSSSPIL

SEQ ID NO: 9406 - protein, 256 aa, Zea mays
  Clone ID: TF_ZM4398.C6.o1.fg.pep
MALLVKSHHQMLVSSSTSSSSPSASQQRQPPPPPPSSSCLTEQQPSPAKRKRRPPGTPDPDAEVVALSPRTLLESDRYVCEICGQGFQREQNLQMHRRRHKVPWRLVKRAPPPPAAAAGGGGGAADANNSSGTGGGAGGGAPRKRVFVCPEPSCLHHDPAHALGDLVGIKKHFRRKHGGRRQWVCARCAKGYAVQSDYKAHLKTCGTRGHSCDCGRVFSRVESFIEHQDACNSSRMRGEAVVVAVPVPVPPPSALP

SEQ ID NO: 9407 - protein, 518 aa, Zea mays
  Clone ID: TF_ZmC1295_1.pep
MEGGMSSLEAAMKASSSMASSMARNADPNQQTLRPNLVEQFYFPRPGQSLPGIPPFFGPPSSLYLPNDNEAKFGNNFESNPSQNTDWNPQAIVSNLTFLEQKIKQVKDIVQSMSNRENQVAGGSCEVAAKQQLITADLTSIIIQLISTAGSLLPSMKNPLLSSNPAVRQLGNTLGSPTGFGMNANQRPSVDSKTDIPDTGKTSDYDELMNSLNPTQAERDEMIKCPNPCGGEGSEPTPMEDHDVKESDDGGEGENLPPGSYVVLQLEKEEILAPHTHFCLICGKGFKRDANLRMHMRGHGDEYKTPAALAKPTKDSGADHAPVTRYSCPFVGCKRNKEHKKFQPLKTILCVKNHYKRSHCDKSYTCSRCNTKKFSVIADLKTHEKHCGRDKWLCSCGTTFSRKDKLFGHVALFQGHTPALPMEDVKVSEASEQPQDSEPMNEMARSNVYSFPCSSSDGISNLDMKMADDVRGYFSPLNFDPCFGALDDFTRPGFDISENPFSFLPSGSCSYGQQNGDS

SEQ ID NO: 9408 - protein, 236 aa, Zea mays
  Clone ID: TF_ZmC205_8.pep
MASNSSAAFFGVRDGDQQDQIKPLISPQQQLAAALPGLAGGVPAASGQGAPPAQPPPKKKRTMPDPDAEVIALSPKTLMATNRFVCEVCNKGFQREQNLQLHRRGHNLPWKLKQKNPLQAQRRRVYLCPEPTCVHHDPARALGDLTGIKKHFCRKHGEKKWKCDKCSKRYAVQSDWKAHSKICGTREYRCDCGTLFSRRDSFITHRAFCDALAQESARLPPTSLSSLTSHYGATST

SEQ ID NO: 9409 - protein, 313 aa, Zea mays
  Clone ID: TF_ZmC1140_2.pep
SIGSQRTPKCDKALNGLVSGLGDHPEKLHQACLVHAFLKRPFSCTVDGCPFSYSRKDHLNRHLLTHEGKLFVCPVEGCGRKFNIKGNMQRHVQEIHKDVSPCESKKEFICPKVNCGKAFKYASKLKKHEESHVQLEYTEVMCCEPGCMKFFSNMECLKAHNQSCHQYVQCDICGTKQLKKNFQRHHRMHEGSCVTERVKCHIEDCKCSFSKKSNLDKHVKAVHEQRRPFVCQFSGCGKRFSYKHVRDNHEKSSAHVHTEGDFVEADEQRPRSVGGCKRKPVSVESLMRKRVAAPDDGPAHADATEYLRWLLSV

SEQ ID NO: 9410 - protein, 251 aa, Zea mays
  unsure (1)..(251): unsure at all Xaa locations
  Clone ID: TF_ZmC104_51.pep
MVVRSSSRIANRKSKMEEEDNGSANPPKPKAEGDKDNPAGRSRAKSPRQKTKADTKKKTKETRAEKRRAPSPASQKDEEEQAYDAEGCSITKQRLSLRKKGAKTEEKQQTEESRYRGRAPPSSPERKEEYASDIEGCSMSFGTKQALSLHKNDICPEKGCCRKFFSHKYLLQHRKVHADDRPXKCPWKGCSMAFKWPWARIEHMRVHTGDRPYVCLEPGCGQTFRFVSDFSRHKRRTCVQRRKQRSKAKQQ

SEQ ID NO: 9411 - protein, 522 aa, Zea mays
  Clone ID: TF_ZmC205_2.pep
MRPRGTSLQQSSASALGDGDAALPKKKRNRPGNPKPDAEVIALSPRTLLATNRFVCEVCSKGFQRDQNLQLHLRGHNMPWKLKQKDPKDARRRVYLCPEPTCVHHSPSRALGDLTGIKKHYCRKHGEKKFRCDRCSKRYAVESDWKAHGKTCGAREYRCHCNALFSRKDNFITHRATCDAAVRGTAQKPPLVAGLYVGSGSDDRLGLSDAAAQMHGFADQGQSSSAAEASQFDHVMPSYSGSSMFRSQASDFSLSFFLGGGTPLIEQDLSDNGGDLSEGSQGPLLHGKAPLHGVMTHLPEQQYQPNSGNANVNLLDIGFFSGNSGGTNARVNLPNLGVFSGNSGGWPGSSHQDARLVIQDQLNGGSSSNTEHGNGMASIGSHFGGGFVPSLHNSSPSAGLSATALLMKAAQMGSTTSSTTHNPNGPSALLRAAGFAGTASVRETSSRAAEEEKSHEAYFHDLIMNSLPLTGGGTGGLSGLAGVDDGNVSTRDFLGVGRDDATAPQGLHGMGAPNPTQMKWYM

SEQ ID NO: 9412 - protein, 269 aa, Zea mays
  unsure (1)..(269): unsure at all Xaa locations
  Clone ID: TF_ZmC3754_1.pep
MGAESATPEPNSEVLFLCSYEGCGKTFFDAGALRKHAHVHGERQYICHYENCGKKFLDSSKLKRHFLIHTGEKNFVCPHEGCGKAFSLDFNLKAHMKTHSADNYHVCQYPECGRRFTQESKLRAHIRAQHEKAVGLQNPGASSMNHSAIGGPHQPPKPAKVSAAPPAPSAERPYVCPYDGCDKAYIHEYKLNLHLKKEHPNHYQDGGPNGAAAPSKRSISKSSHRSKLDITSRMPPANIPKHRGYATPLPAVVSLPEEQQLXKESGVRG

SEQ ID NO: 9413 - protein, 136 aa, Zea mays
  Clone ID: TF_jC-zmX700083408a1.pep
HCRHKKDLMDISAASKVTKMKRNIFECKIDYCHMTFKPKAEHAAHKKNMCTVNSCSKHFRSHSYLRRHESAHNDDMPYKCPWDGCNMAFKWSWDRAEHFKVHAGAKPYKCMTPGCSKMFKFVSDFTRHRRRCKPQR

SEQ ID NO: 9414 - protein, 382 aa, Zea mays
  Clone ID: TF_ZmC13313_1.pep
MEYPATAAGSGSHKYYYPQQHSHSQPQALRRPPRPAARWVKQWIPQDLASSGGKCSLFKWVREDGYRNSKDNPRVLDVEAPKPEPTTEILFLCSYENCGKTFVDVSALRKHASVHNEKQYICNEPNCGKKFVDSSKLKRHYLTHTGQKDFVCPHPGCGKAFSLDFNLRSHLKTHALENYHICPFPACGKRFTSDFKLGAHVKSHEKTGTPIAVQHAPAPPAEKPRVAPKPPTPATTSYADRPYVCPYEGCDKAYIHSYKLNLHLKTQHPEHGQEENGKVGASGGQHAANEHTYQYNYAEVGEIAPNPKRSKTNHGHKVHSSKAYNAKVSRAMPSDIGVRNQWPGKATYQDDSEETEEDGGNNIEDGWRYGNNDDDEETPDED

SEQ ID NO: 9415 - protein, 95 aa, Zea mays
  Clone ID: TF_700017019H1.pep
TDSNVCRVCKESFSTNMLLIEHAKLHEEDPYICKYCDYKTVIFENLSQHIADTHFSDHLYWCEQCDVQFSSSSELYLHFQEHSCDEQYLCQFCEH

SEQ ID NO: 9416 - protein, 212 aa, Zea mays
  Clone ID: TF_ZmC22728_1.pep
MKRFAVQESEMARMLVLMSRSHGQDQALPLSACLAGGQQGEDRQAPERVFVCKTCNRVFPSFQALGGHRASHKKPRLDGDGGGDPSLAKPKLHGCSVCGLEFAIGQALGGHMRRHRAMTGGVPAVPPATTRIVVDEKPDGDVVGIIRHDHVHDHGGVKQPRGGLWLDLNYPPCDDGRDAVEAECGRNAAAATGITFHQFLDTATMAVDCLGY

SEQ ID NO: 9417 - protein, 184 aa, Zea mays
  Clone ID: TF_ZmC119244_1.pep
MVMTLTRHDSGESKEMEGLRAHSEAALLTLSSTTTGGTGTGTGTGTAAAAEGAFECKTCSKRFPSFQALGGHRTSHTRLQARTLVGDPAERYDDRPAARVHECAVCGLEFSMGQALGGHMRRHRGEGPPPPAAHDDDGDGPAQPDRDMPDLNLPPLDDDDGSQAGSRQSGGGRGSGPQLLNLLV

SEQ ID NO: 9418 - protein, 203 aa, Zea mays
  Clone ID: TF_LIB4756-101-R1-K1-A3.pep
RGRPGLSTNAPAQYRQSANNMSSMVDQTPEFPAHMTSMESSASEAEPPNGSQNSVLSDRYMSKPASTGAESGTYSCTYHGCSQRFETPQKLQKHKREGHRSANLSTAMTSAAILERNSQAGPHKCERINPTTGKPCNTVFSRPYDLTRHEDTIHNARKQKVRCALCVEEKTFSRNDALTRHMRVVHPEVDFPGKHRRRGGNHD

SEQ ID NO: 9419 - protein, 93 aa, Zea mays
  Clone ID: TF_700346018H1.pep
QRVHTGERPYVCKECGKSFTKCSTLQTHQKIHTGAKPYKCRECNKSFTQDSHLRTHQRVHTGERPYICKECGKSFTRCSYLRAHQKNHTGRER

SEQ ID NO: 9420 - protein, 330 aa, Zea mays
  Clone ID: TF_ZmC97_1.pep
LPQGGLGRSGPDRPPRTVSPQRARARRPSNHRENKSQPNSPVSQRSLSLHYSTMSSMELLHAVVPEKQSEEEVAPAATTTSSSATATGGDEGAHVLQGWAKRKRSRRQRSEEENLALCLLMLSRGGHHRVQAPPTPVPSAAPAAAEFRCSVCGKSFSSYQALGGHKTSHRVKLPTPPPPPPPAVTVPAAVPVPEAPAPTTVVVPPLPPVEVGREPATSSTAASSDGAASSRVHRCSICHKEFPTGQALGGHKRKHYDGGVGSAAASTDVPAAPAETSAEVGSSAARAFDLNLPAVPEFVFRCGKPGKMWEEDEEVQSPLAFKKPRLLMTA

SEQ ID NO: 9421 - protein, 202 aa, Zea mays
  unsure (1)..(202): unsure at all Xaa locations
  Clone ID: TF_ZmC3585_1.pep
LFNKPRSRAVTDRXAITHDDYVSLCLMALAAAGGGGGHAAAASARTTTMTTQECELRFRCSVCGKAFASHQALGGHKASHRKPPPTLVQAASSSSSVTTNTSSAGGSGAGQGRHRCSVCHRGFATGQALGGHKRCHYWDGLSVSLTASAASGSASSLRGFDLNLVPAAGAARWREEEEVQSPLPVKKRRLSSGPSTELSLTI

SEQ ID NO: 9422 - protein, 450 aa, Zea mays
  Clone ID: TF_ZmC1140_1.pep
MGEGTESGGGATTAPPLRYIRCYKCGFCDVVRSKKCLLRAHVLEHHKDEVDALGGYWEGGDAGPRKEISRACEQCGMSFKKQAHLKQHMQSHSLERPFSCTVDGCPFSYSRKDHLNRHLLTHEGKLFVCPVEGCGRKFNIKGNMQRHVQEIHKDVSPCESKKEFICPKVNCGKAFKYASKLKKHEESHVQLEYTEVMCCEPGCMKFFSNMECLKAHNQSCHQYVQCDICGTKQLKKNFQRHHRMHEGSCVTERVKCHIEDCKCSFSKKSNLDKHVKAVHEQRRPFVCQFSGCGKRFSYKHVRDNHEKSSAHVHTEGDFVEADEQRPRSVGGCKRKPVSVESLMRKRVAAPDDGPAHADATEYLRWLLSKYRSLDLNYKGNMLYWQDLEFLIVQNHSTLHSDLQMHVTKKDNLQMHHEPVAPDARQQLAPVQLAPESLQADQLRRPADRLD

SEQ ID NO: 9423 - protein, 47 aa, Zea mays
  Clone ID: TF_700582866H1.pep
SHERSHTGEKPFVCTECGKAFSYYSSFHRHRRTHQTVTLNTELEKTS

SEQ ID NO: 9424 - protein, 285 aa, Zea mays
  unsure (1)..(285): unsure at all Xaa locations
  Clone ID: TF_ZmC3754_2.pep
DRLAALKAKDKKHGAESATPEPNSEVLFLCSYEGCGKTFFDAGALRKHAHVHGERQYICHYENCGKKFLDSSKLKRHFLIHTGEKNFVCPHEGCGKAFSLDFNLKAHTXTLSADNYHVCQYPECGRRFTQESKLRAHIRAQHEKAVCLQNPGASAMNHSAIGEQHQPPKPAKVSATPPAPSAERPYVCPYDGCDKAYIHEYKLNLHLKKEHPNHYQDGGPQGAAPSKRSISKSSHRSRPDITARMPPAKVSKRKGGYAAPSPAVNLPEEHLPEEQQXAKESDVRG

SEQ ID NO: 9425 - protein, 196 aa, Zea mays
  Clone ID: TF_ZmC205_15.pep
MMASNSPAAAFFGVRDGDQQDHQIKPLISPQQQQQLAAALPSVASGQGAPTAAAQPPPKKKRTMPDPDAEVIALSPKTLMATNRFVCEVCSKGFQREQNLQLHRRGHNLPWKLKQKDPLQAQRRRVYLCPEPTCAHHDPARALGDLTGIKKHFSRKHGEKKWKCDKCSKRYAVQSDWKAHSQICGTREYRCDCGTL

SEQ ID NO: 9426 - protein, 175 aa, Zea mays
  Clone ID: TF_ZmC205_10.pep
MAAASSAHGLFGLGDGQMQMQIQQQQQAPPPPLVNNPAAPPPKKKRNQPDPDAEVIALSPKTLMATNRFVCEVCNKGFQREQNLQLHRRGHNLPWKLKQKNPKETRRRVYLCPEPTCVHHDPSRALGDLTGIKKHYCRKHGEKKWKCDKCNKRYAVQSDWKAHSKTCGTREYRCD

SEQ ID NO: 9427 - protein, 181 aa, Zea mays
  Clone ID: TF_ZmC205_14.pep
MAAASSAHGLFGLGDGQMQMQIQQQQQAPPPPLVNNPAAPPPKKKRNQPADPDAEVIALSPKTLMATNRFVCEVCNKGFQREQNLQLHRRGHNLPWKLKQKNPKETRRRVYLCPEPTCVHHDPSRALGDLTGIKKHYCRKHGEKKWKCDKCNKRYAVQSDWKAHSKTCGTREYRCDCGTLF

SEQ ID NO: 9428 - protein, 236 aa, Zea mays
  Clone ID: TF_ZM4183.C11.o1.fg.pep
MALLVKSHHQMLVSSSTSSSSPSASQQRQPPPPPPSSSCLTEQQPSPAKRKRRPPGTPDPDAEVVALSPRTLLESDRYVCEICGQGFQREQNLQMHRRRHKVPWRLVKRAPPPPAAAAGGGGGAADANNSSGTGGGAGGGAPRKRVFVCPEPSCLHHDPAHALGDLVGIKKHFRRKHGGRRQWVCARCAKGYAVQSDYKAHLKTCGTRGHSCDCGRVFSRHSKVQWDMIVTGGGLR

SEQ ID NO: 9429 - protein, 349 aa, Zea mays
  Clone ID: TF_ZmC7489_1.pep
MHSADRQCLDSADVPASTQPLSVSPVLMSDEQHVDDAHSAVKAIEHLGNNLANIKQKSLHMDVLMLEDAQVASMAAVPGHEGESVDAGSNSFDILLGALAEESKAADAPGKDEVGKASLTLITLASNEPSVTEGRVVDVVETDTILGAGKDDKQVDQAHDFHLSDLVSRCIGSSNRSDIICYVRRKHKRKRDYSCFVRSPCERLRPRSKPAVVEESEWSRTAEASFAKRGKRTQAVGSFQCDIDLCGMAFETRAELNAHKRNICTDESCGKRFSSHKYLKRHQCVHSEMRPFKCPWEGCKMTFKWLWAQTEHVRVHTGERPYKCSAPDCGQTFRYVSDYSRHRKKFNHY

SEQ ID NO: 9430 - protein, 141 aa, Zea mays
  Clone ID: TF_ZmC3270_2.pep
MKHPRDAGAVPLSLALSLGGGGGVATKHGISKKPRRAAGGEFVCKTCSRAFGSFQALGGHRTSHLRARHGLALGVPAAAPAKEDTATKPAAAEPAPASHLCHVCGLGFDMGQALGGHMRRHREEAAAAAAQAPPVLLQLFV

SEQ ID NO: 9431 - protein, 135 aa, Zea mays
  Clone ID: TF_LIB3068-001-Q1-K1-C7.pep
KTFYRNSQLVFHQRTHSRETYFQCPTCQKAFLRSSSFMKHQRIHTGEKPCKCDYCGKGFSDFSGLRYHKKIHTGEKPYKCPVCEKSFIQRSNFNRHQRVHTGEKPYKCTRCGKSFSWSSSLDKHQRSHLGKKPRP

SEQ ID NO: 9432 - protein, 238 aa, Zea mays
  unsure (1)..(238): unsure at all Xaa locations
  Clone ID: TF_LIB4172-013-Q1-L1-F9.pep
ACGFGPEFPGRPTRPNLIYVSECDKCFTQPSHLSIHRRIHSGEKPYKCSECDKCFTDKGSLRVHQRIHTGEKPYKCSECDKCFTDKSSLRVHHRIHAGEKPYKCSECDKCFTGKGYLRVHHRIHAGEKPYKCSECDKCFTHKGSLRVHHRIHAEEKPYKCSECDKCFTDKNGLRTHQRIHTGEKPYKCXECDKCSTRXSHLSIHQRIXTGEKLYKCSECDXCFTQHCHLSIHTIHSGE

SEQ ID NO: 9433 - protein, 260 aa, Zea mays
  Clone ID: TF_700220213_FLI.pep
PSPAPVREIPVVAASAQEQPLEAAKDDGGYEVVELDAAELLAEHVHFCEICGKGFRRDANLRMHMRAHGDRFKTLDALSRPGHGQPKPPVGSNVRFSCPFAGCNRNRTHRRFRPLKSAVCARNHFRRSHCPKLYACERCGGKKRFAVLADLRSHLRHCGEEAQWRCSCGTTFSRKDKLFGHLALFEGHTPAVTKPNKDVVTGPTESTIDAMEEGGFEEGIPDREEDEEGGYDPEFFKEWMDELRGGAGGSNWPGPAADGH

SEQ ID NO: 9434 - protein, 388 aa, Zea mays
  Clone ID: TF_ZmC587_1.pep
MDSTRSNQVAGRCSSTIASRAATVPPSLTMPRGELADAIVGGGGGGGADGDPRAALLRLSALGDRMAAVRGRISASISGEARPLSYADIQSVSSEISAAAQLVVLNAAELLASSVPFPAPPPPPPSAAPSPAPVREIPVVAASAQEQPLEAAKDDGGYEVVELDAAELLAEHVHFCEICGKGFRRDANLRMHMRAHGDRFKTLDALSRPGHGQPKPPVGSNVRFSCPFAGCNRNRTHRRFRPLKSAVCARNHFRRSHCPKLYACERCGGKKRFAVLADLRSHLRHCGEEAQWRCSCGTTFSRKDKLFGHLALFEGHTPAVNKPNKDVVTGPTESTIDAMEEGGFEEGIPDREEDEEGGYDPEFFKEWMDELRGGAGGSNWPGPAADGH

SEQ ID NO: 9435 - protein, 88 aa, Zea mays
  Clone ID: TF_700352188H1.pep
GKHFSAYSSLIYHQRFHTGEKPYKCNDCGKAFSDGSILIRHRRTHTGEKPFECKECGKGFTQSSNLIQHQRIHTGEKPYKCNECEKAF

SEQ ID NO: 9436 - protein, 324 aa, Zea mays
  unsure (1)..(324): unsure at all Xaa locations
  Clone ID: TF_ZmC205_27.pep
MFHHQQELLQAEAAAADRESSMSNNLTSSAPGGPNAAPAAAAATGNNNKRKRSLPGNPDPEAEVVALSPATLMATNRFLCEICGKGFQRDQNLQLHRRGHNLPWKLKQRGAGKEAQRKKVYVCPEASCVHHDPARALGDLTGIKKHFFRKHGEKKWKCDKCSKRYAVHSDWKAHSKICGTREXRCRGPCALSRRDSFITHRAFCDALAEESAKARAEAPSAEDGSSAAAVVPPPAPPIAPAPAPLRQQPPPPAPQHAEPRNEPDTNATEAVQFAPPTPPPPSTSQLQLPVLSQASVSAAANVSASSSSSSVAGTSQSLLGGMFA

SEQ ID NO: 9437 - protein, 374 aa, Zea mays
  Clone ID: TF_ZmC9242_1.pep
MCSEVHVEGDASVGQKGCKDIRRYKCEFCTVVRSKKCLIQAHMVAHHKDELDKSEIYNSDGEKIVHEQEHRCQECGCCFQKPAHLKQHMQSHSHERLFICPLEDCPFSYKRKDHLNRHMLKHEGKLFSCTLDGCDMRFSMKADMQRHVKEIHDSKNPHQFVCKEDGCNKVFRYSSKLKKHEESHVKLDYVEVVCCEPGCMKMFRNVEYLRAHNQSCHQYVQCEICGEKHLKKNIKRHLQSHDKVPSDGRMKCTFDGCEHFFSNKSNLTKHVKACHDQLKPFKCGIVGCGKAFTYKHVRDNHETSGAHVYMEGDFEELDEQLRARPRGGRKRKALTVETLTRKRVTISGEASSLDDGVEYLRWLLSGGDDSIDCQ

SEQ ID NO: 9438 - protein, 453 aa, Zea mays
  Clone ID: TF_ZmC13146_1.pep
MEDPYTSFLKNPHYYYCTSSFPAPPPTPHLPPPFPPYAALYPAVAAAATAAPHHQYPSFFQHQPAQPAHHYSTAPPSPPLREALPLLSLSPTPAARPRAAQQHDVADTDSDDDDNDCCYHLQQEVAAGSRTTSARTPLFADLNCVPSCCDDGDGDPMDVEASWSTSTDDAAVALRIGLPAAEADLLSGLSGRAAEEDEEEEDDCKPGGGHEEVPLGFSSSAPIGRLTKGQYWIPTPSQILIGPTQFSCPVCYKTFNRYNNMQMHMWGHGSQYRKGPESLRGTQPTAMLRLPCYCCAAGCRNNIDHPRARPLKDFRTLQTHYRRRHGIKPFMCRKCGKPFAVRGDWRTHEKNCGRLWYCACGSDFKHKRSLKDHIRAFGRGHAACGVDDCFDDDDDRDDPSSSEVDHAATNTTSNSTTTTAAAANAHHHHHTSWKPPPPPLSSSSRGSGDDRLL

SEQ ID NO: 9439 - protein, 153 aa, Zea mays
  Clone ID: TF_ZmC1325199_1.pep
MKRLTQDEDQEQEQEPGVVVSVAQGVTLLLARSGGGGGGGEPRASPRVFECKTCSRRFPSFQALGGHRASHKRPRAAPAKARPHGCGVCGVEFALGQALGGHMRRHHRAVAEECEARDGAAASAHGMDVDDAEAKPEEEATGLLRFDLNIAPS

SEQ ID NO: 9440 - protein, 221 aa, Zea mays
  unsure (1)..(221): unsure at all Xaa locations
  Clone ID: TF_LIB4172-011-Q1-L1-C8.pep
MNASVEGDTFSGSMQIPGGTTVLVELAPDIHICGLCKQHFSNLDAFVAHKQSGCQLTTTPVTAPSTVQFVAEETEPATQTTTTTISSETQTITVSAPEFVFEHGYQTYLPTESTDNQTATVISLPTKSRTKKPTAPPAQKRLGCCYPGCQFKTAYGMKDMERHLKIHTGDKPHKCEVCXKCFSRKDKLKTHMRCHTGVKPYKCXTXRLRAADSSSLYKHLR

SEQ ID NO: 9441 - protein, 181 aa, Zea mays
  Clone ID: TF_ZmC669707_1.pep
MAYGKRSRQKAEEMVWLPDGADVARFLLLFSGHQHYHGDGMAASAPERVFECKTCNRQFPSFQALGGHRASHKKPRLSDGVDAAAAEPPKPKVHGCSICGLEFAIGQALGGHMRRHRAADQTDGGSLGTGLTPKYDSGKTAASPAELVLDLNAVPELEEEQDHAKLELSIEPVAVVDFHAR

SEQ ID NO: 9442 - protein, 106 aa, Zea mays
  Clone ID: TF_ZmC1140_3.pep
DEVDALGGYWEGGDAGPRKELSRACEQCGMSFKKPAHLKQHMQSHSLEAIYHPEKLHQACLVHAFLKRPFSCTVDGCPFSYSRKDHLNRHLLTHEGETILCALVEG

SEQ ID NO: 9443 - protein, 214 aa, Zea mays
  Clone ID: TF_ZmC66749_1.pep
MSSVPDWADAIVPNSKRRRHRSPPAASSSSSHSSSTTQKEELEDEEEDMAKCLILLAQGPAAIEAARVMPAPRSRPKSTGSRRFLAAAEARGGVCVSYECKTCNRCFPSFQALGGHRTSHNKHPRRPAEEVLAAMAITTTLSLAATRPAHECSSCGSVFTSGQALGGHMRRHRPLTTTSSSPATGTEDQQDSSSKLLQESRINLELDLNLLPST

SEQ ID NO: 9444 - protein, 520 aa, Zea mays
  Clone ID: TF_ZmC795_1.pep
VPSGRPLLAEEMEFEYDWKDIFFEEATIVDRETIQEVVQDEEAIPARGDWAVKLGINLYYSANLAKSPLYSKQVPYNRVIYEAFGCGSPNDSPVKLKTYSRRQCRAKKIVLAGRWCGKVWMSNQVHPYLADRIKNHEPKEIDETFPSDQKSHAEPVENSSREAASTRKSSSRTIEGKTSKREKEQLEKANAKKPKFTEEDNSKSLEGTAEASTQKIKGRSVLEKTSKKEKAYTKKLKHTEKVSEALKGPSEASFPAPAGMVVRSSSRIANRKIMLKSKMEEEDNGSADRPKSKVEDDKDNPAGRSRAKPLRQKTKVDAKKKTKETRVEKRKAPSPASQKDEEEQSDDVEGRSTTKQRLSLRKKGAKTEGKQRMEKPRFGGSAPPPSSPKRKEEYVCDIEGCSMSFGTEQALSLHKNDICPEKGCCRKFFSHKYLQQHRKVHADDRPLKCPWEGCGMAFKWPWARTEHVRVHTGDRPYVCLEPGCGQTFRFVSDFSRHKRRTGHGASKKAKAKKQGKAAVT

SEQ ID NO: 9445 - protein, 843 aa, Zea mays
  unsure (1)..(843): unsure at all Xaa locations
  Clone ID: TF_ZmC6856_1.pep
MDSTALQYENQKLVQQLEVQKSEMHALERKFKELSDDQCSYDKTLISLNKLWNQLIDDLVLLGVRAGGDLDNLQALDHEELSEESLESCPSEEIFLLRLLKTNNIRDNSDTSLLKFVEEALAFRSSATVTLMKSLQETISSQQARSESLSLALNGQKSNEDVIVALRNHNDCLKEVAENASQAISIINEKHKRYLDEIEAFKSNHSRELQEIKRISGELEESIAELEESQRKLVVLQLQRHGSVMDASGANAVNGGISTHKSSDKSMSWQDLKDAVDAAKTLAGNRLLELHQTQEDNLILSKELGDLEGQLKDEKYVLVSKPYMILNDKLQHLNAEIERYRGLVEVLQNDKDQLMQREKEISAKAESLDSVKQTETPIYQISRQLVKHMKTCXRKISIFFNSLLIEMTFNIKLVSDSVMMDQACSPLLSEGMMENQLSRSKDAASEALALREQAESLRSLVAKKIEEHKKISDKYNSQVIEIKSLKALVEELEQEKQELEFIADMYVKESSESRTIADIEESETRARNQAEYLRSNLEEHSLELRVKAANEAEAACQQRLSFAEVELEELRTKVDASERDVVELKEAIRIKEAEGDAYISDIETVGQAYEDMQTQNQHLLQQLTDRDDFNIKLVSDSVKMKQACSSLLSDKLMLEKQLQQVNTSLESSKLKIARGEEQMKTCVAQAIKTSAENRHLTISLERIALELSNTDKELKWLRSSVGSSEKEYEQTQQKISELRALLEHERSERRRLEEQYEEVKNEVMELTSETEETTVRKLEDEIKECKGILKCGVCFDRPKEVVITKCFHLFCSLCIQRNLEIRHRKCPGCGTPFGQNDVREVKI

SEQ ID NO: 9446 - protein, 571 aa, Zea mays
  unsure (1)..(571): unsure at all Xaa locations
  Clone ID: TF_ZmC6856_2.pep
TQAVDAAKTLAVXRLLELHQTQEDNLILSKELGDLEGQLKDEKYVLVSKPYMILNDKLQHLNAEIERYRGLVEVLQNDKDQLMQREKEISAKAESLDSVKQTIITYEKKIEELETQIQILFSEKNDLETKVEETLQDSGKKDFKNEIHVMAAALSNELGMMENQLSRSKDAASEALALREQAESLRSLVAKKIEEHKKILDKYNSQVIEIKSLKALVEELEQEKQELEFIADMYVKESSESRTIADIEESETRARNQAEYLRSNLEEHSLELRVKAANEAEAACQQRLSFAEVELEELRTKVDASERDVVELKEAIRIKEAEGDAYISDIETVGQAYEDMQTQNQHLLQQLTDRDDFNIKLVSDSVKMKQACSSLLSDKLMLEKQLQQVNTSLESSKLKIARGEEQMKTCVAQAIKTSAENRHLTISLERIALEVSNTDKELKWLRSSVGSSEKEYEQTQQKISELRALLEHERSERRRLEEQYEEVKNEVMELTSETEETTVRKLEDEIKECKGILKCGVCFDRPKEVVITKCFHLFCSLCIQRNLEIRHRKCPGCGTPFGQNDVREVKI

SEQ ID NO: 9447 - protein, 458 aa, Zea mays
  Clone ID: TF_ZmC25442_1.pep
MLSAAGVRMDAEKETLFEATLSLQDQLKESQVALLVEQEKAEAAVKEADVAKAAWACRICLNAEDALRIVMISVTNHFPSFEALALVQIERTLEDISQKLQLVQRLHTRFLLLPNLQDVTRTIQHPSIHEWSSNGMHRSICFVNKATGYILIAEPPSFLTIYDVIAIIVSHRLGAPMILPIASVFACPDGSEKEVLQILHLGSDFGVSKREGRYDASLGAELLSQDARQVQFLPLRPFYSGEIVAWKTGKEGEKLRYGRVPEDVRPSAGQALYRFPVETAPGEIRMMLSSHVYSFKSVSMADLLSAPSQVNGDVALGGQEKLLATNTGTEVTKDADAGLEYGKVSSTELVQAVHDMLSAAGVRMDAEKETLFEATLSLQDQLKESQVALLVEQEKAEAAVKEADVAKAAWACRICLNAEVNMTIIPCGHVLCNRCSSSVSRCPFCRTQVARMMKIFRP

SEQ ID NO: 9448 - protein, 215 aa, Zea mays
  Clone ID: TF_ZmC49155_1.pep
LEAGRGRDYRRQVSVTIYYFATEGKDCSFSSVYPELQTPTKIPFEKGLAQRFIQPSGSGVDLGFFSLDELSSSSGEVFPLVVYAEAYPSPEEGGPSVNATRAQITLAVLEKHNNDLQVKVMKQILWIDGVRYELQEIFGLVNSTEADVADADADDTGKECVICLSEPRDTAVMPCRHLCLCSECAKTLRFQSNKCPICRQPVEKLMEIKVRSPGP

SEQ ID NO: 9449 - protein, 443 aa, Zea mays
  Clone ID: TF_ZmC64108_4.pep
SRPAGLVEAHGPPRPRAPPLRRRDHQAPGDGGGGGAAACSICLDAVLARSAGRSVAKLQCGHEFHLDCIGSAFNAKGAMQCPNCRKIEKGRWLYASGHRASVDIDMGGWVTSDNYDITSELPFGFQWCPFSGFTRLASMFEEREAELTYHTTGDRSSAASSSLVCPYLALRGFLHPVHVPSTSNPGAESTSFRRHATGLEGHATLDLNNAQLFHAIESINHDSEHRHLSNLPVSGIPEYSMTPFGIGLPRYDSGSQQRFRSYAHHHPLIHRPAPRSGSNLVAPPLGSIPAVVAAAETARGSHMYQHSSVHGSPFPPTTTRRVRPRALTITSFIAATSSGEIGGPHGFSAPGATMNRSVSDAEGISRPIDRPYNAWGREGFAPFPWIPAEGESHWWGTFNPVQNHAHGGFSRRPAGERMPPQSQSHPENSYQAVPPSQRMPPFL

SEQ ID NO: 9450 - protein, 731 aa, Zea mays
  Clone ID: TF_ZmC106180_1.pep
MESRWRKAKMSLGLNLCVYVPRTLEGDDAASSPDTASSTAALVSPVASSSSAATSTNTTPTAASADQSSASGKVLMPTTPTPTSAGLRLSKSGSKSFKKTCAICLTTMKPGQGHALFTAECSHTFHFHCISANVKHGSSSCPVCRIKWKELPFRGPLPAELPQGNARINPVNGYQNGGHMNILRPLPRARSSGRLHHLATLLPDTDPSTFNDDEPLDLSSEEANDNHQGCLRTVEIKTYPEFTEVPENTSERNFTVLIHLKAPVAQHLQPSSNLGDGNGLSTARAPVDLITVLDVSGSMAGTKLALLKRAMGFVIQNLGSSDRLSVIAFSSSARRLFPLRRMTESGRQQSLLAVNSLTSNGGTNIAEALRKGSKVIEERQAKNPVCSIILLSDGQDTYTVSPTAGVHKGAPEYCALLPSTNGNQQVPVHVFGFGADHDSVSLHSISQTSGGTFSFIETEATIQDAFAQCIGGLLSVVAQGLHVKVESLHPDVHFGSIRSGSYSSRVSDDKRNGSIDVGDLYAEEERDFLVSVNVPPGYGETALLNAGGVYKDPLMKETVNMADVQVKISRPAFVSVQSVSIEVDRQKNRLHAAEVMAEARFSAERGDLTTAVSLLEDCRRMIMGSASGQSGDRLCQALDAELKEMQDRMANRQRYEASGRAYVLSGLSSHSWQRATARGDSTDSESLIQAYQTSSMVDMLLRSQTMSRSSTPRPTPQMRHAKSFPARPQPR

SEQ ID NO: 9451 - protein, 201 aa, Zea mays
  Clone ID: TF_ZmC77550_2.pep
FQKICAICLNAMRSGRGRALFTAECSHKFHFNCISSNVQHGNKICPICRAVWKQLPFQGPLAASAAHGSARVNPAIWPQMSMLSVNPLDELPVFGNPEPVVFNDDEQILLQPETAVGGEEGDEVPPLLEITTYNEFPATQESVAQEEFAILIHLKAPHVPSWVSTRAPLDLVTVLDVSGSMSGHKLALLKRAMRFVIENLT

SEQ ID NO: 9452 - protein, 299 aa, Zea mays
  Clone ID: TF_ZmC25728_1.pep
MAADDAARSSRRMDLNLYLGLPRAPRAPRPDLGSDLALGTPMLSSSSPSSSAASADAPPLETDPLHPPYSPSRADLMRPPTPAHEPYNPFAPEAHPPYVPPPPLPVAGALPVLADELEFGFSDAHLGLVERLDRPSSSTASSSFRPDLAERYRHLIGQPVNNTFDLPRRSSNPFPSEGMDLLRHIAFAGLEDSERFATAVSELRRIARPSPYGASTSSNPPNPEPIDGTHIAMALAADQASNSSTMAVIQEDAAFAESAGEPSNAGSSRSLRRRRGSGALGSLDVDGGDLHQNKRRRLN

SEQ ID NO: 9453 - protein, 382 aa, Zea mays
  unsure (1)..(382): unsure at all Xaa locations
  Clone ID: TF_ZmC492_1.pep
RTRGAFSLLLSEPFCQLSLVKNYSMGESCSSAQQSGTSQSAELMPDSDKTVHLREELSDLIEFPTSELLKTXLTARDRVDVFIAWSLLLSHLQTLPASSSIKGDVLQYIQEKVSPCILDCIFQHIPVKAAAPSGKKKDTELAPEAEAAAKASKNAIATCSLLPYLESLWPIGTLQMASLAGSLYGMMIRLLPSFVRTWFTTLRDRSLSYSIESFTKQWCSPPLLLDEFSQVKESVYGDENFSVSVNRSAFEIVATYKKEETGIDLVIRLPSCYPLRHVDVECTRSLGISEVKCRKWLLSLTSFVRSQNGAIAEAIRTWKSNFDKEFEGVEECPICYSILHTSNHNLPRLACKTCKHKFHGACLYKWFSTSNKSTCPLCQTPF

SEQ ID NO: 9454 - protein, 266 aa, Zea mays
  Clone ID: TF_ZmC2252_1.pep
MKALPRIDLSNATTDITEWRPPDAPVSASRRRLDVGRGKQNNAGSATASASRAPCHGADTESGNRKGGREMDSSTSAAAAGEAAVPPEDDVCSVCHDRFRIPCQANCSHWFCGECIIRVWNYGPPVQACKCPICRRLINLLVPAALSGQEDGPQAQRILGEIQHYNCIFGGAPRSLTQRLQDLPFFIRRLFRELMDPQRTLPLVFRARMLMMVALSAIYVLSPVDILPESMLGLFGFVDDLLILLIVFLHLAAVYRSLLLYRHGGQ

SEQ ID NO: 9455 - protein, 209 aa, Zea mays
  Clone ID: TF_ZmC13982_1.pep
MQTSETTGTASPPAVEPEAEDKVEEGARANEEAAAKVGGDDEDDWESEHEGRRGRRQRCRRGGAAGDSAVAMVKRELLTRCLTCPLCDHLLRQATTISECLHTFCRKCIYKKLNDEDLDHCPVCKIDLGCTPVEKLSRGRNKLLRADREPWATCAQLGGAVAEGWPGAPAAHGDRLLRGRLCDGDKLWAAQVRVLLKPYHHRRPGEVDS

SEQ ID NO: 9456 - protein, 486 aa, Zea mays
  Clone ID: TF_ZmC13982_2.pep
MQTSETTGTASPPAVEPEAEDKVEEGARANEEAAAKVGGDDEDDWESEHEGRRGRRQRCRRGGAAGDSAVAMVKRELLTRCLTCPLCDHLLRQATTISECLHTFCRKCIYKKLNDEDLDHCPVCKIDLGCTPVEKLRADHNIQDVRSKFFPFKRKKVNAEEAESPIMLPVKVKERSISSLVVNTPRVTPAALTGRRTRAVTRKAAALRGLGPIIVDPLKKDNDNPNKQTDNSSLLDSLNKIPQTRRQLLSNGDTTSHLSVKDKAGDNKDLDKSEFWKPLNCLVEAASKTKPLTSAPRPALKGDKPRKSPSSDSEHSSRTKTREPLQKSKAEVDKSDPGPIVMLRKRGRPGRKRKNPLPETNADSTATAIQARKALSPIWFSLIASFDQKGVPPLPQIPAHYLRIKDGSIPASSIQKYIVQKLSLLSESEVEISCCGQTVNPGQPVRNLVERWLRVGPARPLHTVIGSSGGDYVMVISYGRPKSASC

SEQ ID NO: 9457 - protein, 70 aa, Zea mays
  Clone ID: TF_jC-zmXLIB3526025da05a1.pep
YVDNDDLRLLPCGHFFHKDCVDKWLKINALCPLCKAEIDVVPRTAPPAIGFGRRDSHRRVGNDIESQRLP

SEQ ID NO: 9458 - protein, 195 aa, Zea mays
  Clone ID: TF_LIB4704-006-R1-K1-F2.pep
MAPAWERARRALTARFCMRFAARRVVVEDAPRGMVDIEAPFPVAVAEAEQQQEQPEDEREMLLAAVSSEPVSEQLASSRSGSRSSAICAICLSAMRSGRGQALFTAECSHKFHFNCISSNVQHGNKICPICRAVWKQLPFQGPLAASAAHGSARVNPAIWPQMSMLSVNPLDELPVFGNPEPAVFNDDEQILLQP

SEQ ID NO: 9459 - protein, 639 aa, Zea mays
  Clone ID: TF_ZmC77550_1.pep
FQKICAICLSAMRSGRGQALFTAECSHKFHFNCISSNVQHGNKICPICRAVWKQLPFQGPLAASAAHGSARVNPAIWPQMSMLSVNPLDELPVFGNPEPAVFNDDEQILLQPETAVGGEEGDEVPPLLEITTYNEFPATQESVAQEEFAILIHLKAPHVPSWVSTRAPLDLVTVLDVSGSMSGHKLALLKRAMRFVIENLDPSDRLSVVAFSSSAWRLFPLQRMTASGQQQSLQAVNSLAADGGTNIAEGLRKAARVVEDRQARNPVCSIMLLSDGVDSHNLPPRDGSAPDYGPLVPRSILPGSEHHVPIHAFGFGMDHDSRAMHAVAQMSGGTFSFIDVVGSIQDAFAQCIGGLLSVVAQETTLSVECADQGVLLTSIKSGGYASGADGDGRGGFVDVGRLYADEERDFLVTVRVPQSRGTIALVRPSCTYRDAATTEMVRVGGDPVTLLRAASPVSAGMSLQVEREWHRVHATEDIAAAQTAAEEYDYARAASILEARRLLLESCASLSSDQQTQALVAELREMQERVLNAELYEGSGRAYLLSGLSSHSWQRATARGDSTELTGLVHSYQTPFMVDMLNRSQALQPEVAEALSRSPTIASSRSSAPTPAPASSGSPWTRRGLRSFRPAKSFTGLSL

SEQ ID NO: 9460 - protein, 365 aa, Zea mays
  Clone ID: TF_ZmC49468_1.pep
MSRRVPCKFFLHGACFKGDYCEFSHDCNDQPDNVCTFYQKGTCTFGSRCRNEHVEVHCNCPQPATTVARASSNSSQLVASSRDPHCSECQTDLCDQTQQICKSTAALSAHQPAWVVDYHDHDTPDDTTSWPLHQAVQNQTSQYPVHLPICSSTADGTCPYGKGCSQMHGDLCAFCERQCMNPYQSDERGVHVKLCKKNNRVLEAMRRSEDIECGVCLDRVLSKPTAAERRFGLLSDCDHSFCISCIRNWRSTSPTSGMDVNSTLRACPICRKLSYYVVPSITWYSSKEEKQEIVEGYKAKLRSIDCKHFDFGKGTCPFGSSCFYKHAYDDGRLEDALLNHHDADDASAAIAKLMRLSYLLTRLHV

SEQ ID NO: 9461 - protein, 107 aa, Zea mays
  Clone ID: TF_uC-zmroteosinte084d10b1.pep
LINNRVLEAMRRSEDIECGVCLDRVLSKPTAAERRFGLLSDCDHSFCISCIRNWRSTSPTSGMDVNSTLRACPICRKLSYYVVPSITWYSSKEEKQEIVEGYKAKLR

SEQ ID NO: 9462 - protein, 68 aa, Zea mays
  Clone ID: TF_LIB3356-061-P1-K6-D8.pep
HGFHVACVDTWLRSNSSCPSCRRPIVLDDPAPPKRCLKCEAVVLEAVLASSSSSSAAGGGRGGGGFLP

SEQ ID NO: 9463 - protein, 171 aa, Zea mays
  Clone ID: TF_ZmC285028_1.pep
MPSRSGSRGRRPRPAPEVAAPTAVQVSSSGSSEEGSDEEEERSPGGSASKYKAAESEAEAEDPCLPSCPICMVVWTADGAHRVSCIPCGHVYGRHCLEMWLLQYGKKKAPCPQCGKRYTQNNIINLYVPEIVVPNNDLENQVLSLRERNEYLEKQQAKLLEEIKEHKVPHR

SEQ ID NO: 9464 - protein, 369 aa, Zea mays
  Clone ID: TF_ZmC130770_1.pep
MSTKKVLCKFFMHGACLKGEYCEFSHDWSDQANNVCTFYQKGACSYGSRCRYDHVKVSRNPTVPPPRPTSSTSRRASTSLQLSSYNHPPHMVHQTDSSNQRHQISVDVLAHSASKPAWRNDFQHDIVSDDGIDWSSNQNLINQTSLKPVDLPICSFAAAGNCPYGEGCPQMHGDLCATCGKLCLHPYRPDEREEHIKLCEKNHKRLVALKRSQEIECSVCLDRVLSKPTAAERKFGLLSECDHPFCIECIRNWRSNSPASGMDVNSALRACPICRKLSYYVIPSVLWYFSKEEKEEITESYKSKLKSIDCKYFDFGTGSCPFGTSCFYKHAYRDGRLEEVILRHLDADDGSTVIAKSIRLSDFLGRMDL

SEQ ID NO: 9465 - protein, 235 aa, Zea mays
  unsure (1)..(235): unsure at all Xaa locations
  Clone ID: TF_ZmC13088_3.pep
FFGPVGVTLHTPHEKKTHLVCRQVQQDCANCGACLGKYFCAKCNFFDDDKCSLFCFLRFCCRVPWHFXVSKNQFHCDGCGICRTGGAENFYHCGRCGCCYTTTLKDSHRYVDGAMHHNCPVCMEYLFDSMKAISVLHCGHTIHLECLYEMRAXQQFYAPVCLRSACNMSDIWQKLDQQVAASPMPSDXIRRRWXWILCNDCGXTSNVQFHILAHKCPGCSSYNTRQTRGRSSRML

SEQ ID NO: 9466 - protein, 328 aa, Zea mays
  unsure (1)..(328): unsure at all Xaa locations
  Clone ID: TF_ZmC3546_2.pep
ASLSGTSRRRWTRTPRWRASWVPQVCWDIKGVQVACADGRSICLDAFCDSNPSTMTKCKHDYHLQCILVWCQRSSQCPMCWQHISMKVPMSQELLEVVEQXRNIRANPSRNTRCFQPSXLGNFEIPIGSDDAXLEERIIQHLAAAAGSXRSHRHHNRRDGHQSRSEASSHPQFLVLSADERTISGQEGDYEQASAVASGRPLRTLVEQERTRGLADASSPSLRCSTPADSTGRSNNRISGIESTPVDQDGTGPSAVQSMVQGFHNQSASGWRERWFSRSNSLLDLGSEVRREVNAGIAAVSRMMEWHDARDGTGAGPSPTSASRSGSQ

SEQ ID NO: 9467 - protein, 95 aa, Zea mays
  Clone ID: TF_ZmC11832_4.pep
SVLRCGHTMHLQCFHEMLKHDKFSCPICATPIFDMDKFFKALDAEMEASYLYTGKGWVVCNDCRDTTQVFSGMAGHKCCHCQSHNTCRVAPPVLP

SEQ ID NO: 9468 - protein, 387 aa, Zea mays
  Clone ID: TF_ZmC17724_1.pep
MESAVLACEAPTAAAAAAPGAGGDRGAEGVVMLRRSGLAACLTCPLCGRLLRDAATITECLHTFCRKCISEEFVNKEVCCCPVCSIDLGCAPLEKLRIDHSLQYVRSKVFPSKKRKVEDPEVTSPITSPIKTKVRSLSSLTKHAPQMSMQKCLRKRRTKASCLQNLPLHSTLRGSSNITKKSGGWRPLGCHFRAAKKKRSLRPKSDDIKTAGKRTDDPVDVTLASQAKTRKQVTRRGNLEKRTGTKKVLILKGKQKNRKTKNTPNKRRLPALWFYLLAAFDQKGHPPLPQIPSKFLRIKDVNLPASFIQKYLAQKLNLSSETEVEIFCGGRPVSPGITLHDLADHWIGKRSKGRVRSSVGTPAAEFVLKVFYARSGAPLPKTESNQD

SEQ ID NO: 9469 - protein, 742 aa, Zea mays
  unsure (1)..(742): unsure at all Xaa locations
  Clone ID: TF_ZmC6175_1.pep
STALVTLLSGWACKGRLEDTSNPGKFVCLASGAVSCASDGNGFKTCQSLCPCYVSSNGAFSKPVKRASQGESSTNTDRNHSSHDAATEASPCNNRACYIPRLRVESSYLGVHSSTPTKSFRPLSFNYVAPSLYSSLFSWDTDTLVSGPDNISKPIDTIFKFHKAIRKDLEFLDLESGKLIDGDESCLSQFIGRFRLLWGLYRAHSNAEDEIVFPALESKEALHNVSHSYTLDHKQEEKLFQDISTVLSELSQLHDGLSYPLDVEAGTNDISSSEIDWARKRNELLTKLQGLCKSIRVTLSNHVHREELELWPLFDKHFSVDEQDKIIGHIIGTTGAEVLQSMLPWVTSALSLEEQNMMLDTWKQATKNTMFDEWLNELMRFXEXSLRTSDKASTLSEESHFQENLEQNDQMFRPGWKDIFRMNQSELEAEIRKXVSRDSTLDPRRKAYLIQNLMTSRWIAAQQKSPQPSVEGHNGCTRRPGCVPSYRDPGKQIFGCEHYKRNCKLVAACCNKLFTCRFCHDKVSDHTMDKKSVMEMMCMQCLNVQPVGPNCQSPSCNGLSMAKYYCSICKFFDDERSVYHCPFCNLCRLGSGLGTDFFHCMKCNCCLGIKMIEHKCREKMLEMNCPICCDFLFTSSAPVKGLPCGHFMHSACFQAYTCTHYTCPICCKSLGDMTVYFGMLDGLLAAEQLPEEYQDRCQDILCNDCERKGRSRFHWLYHKCGFCGSYNTRVIKTDTAECSRPL

SEQ ID NO: 9470 - protein, 503 aa, Zea mays
  Clone ID: TF_ZmC24792_1.pep
MLHGAQQASASSTAGPRPKSTAILQSDQPPRAAAAREGGRGGTGPESLVRGSVVAPCVSCGICGGLLRDATAFTECLHAFCRKCIYDKVAKDNIKCCPKCGIFMGNPLEKLRPDHSLEHIRPLIFPAKRRKVVTMKKRKERVSSESTLPSVVGTTAEESTALIPAASESKAQKDLTPVGRDALSRIRGRDFDSACGLTEDTGALIVWQAPPILEETAAHNQLDSKQDPDSFRPPATSDIEYQRQGPTAQMTNISFMVGNSSHARPTDQDDENMRGDILTLINESNARIMEMYDAHISKLKAGNIKLIEQLENERAAALERTRILEERLQQELENERTVAAERTRLLEKKLQRELEHEREAAIERTRVLDERLQRESEIARTAASRNEALKEEIFKLQEELEHGRAYNQALMSDILEKSEELATLTYYSNLLESEKTYLENQVDHLNEELKCTRKEHAAYVRKVLDAARAIPNDLEPINSATPMLCRDRGARRGSVSQPQAGHG

SEQ ID NO: 9471 - protein, 275 aa, Zea mays
  Clone ID: TF_LIB4738-122-A1-K1-H3.pep
IGTSSRPGRRPWSNDLDDPQFMCCVCLDLLYKPVVISCGHMSCFWCVHKAMHIFRESHCAVCRQPYIHFPSICQLLHHLLLKLETNDYKRREKEVLEEEKRMQTYSPQIIEFLNYKTNVGSYKENRNEDSKARPPQEVPLNDSVPDEHLKKIKLEDVSCPLCMEMLYQPAVLNCGHGTSGRKGSTRALHAEDPSNIHIGVGCDSCGVYPIRGKRYKCQDCTELIGFDLCEACYNSSSKLPGRFNQRHTPNHRMEVDNSALVHRILRHHGIPRGRP

SEQ ID NO: 9472 - protein, 249 aa, Zea mays
  unsure (1)..(249): unsure at all Xaa locations
  Clone ID: TF_LIB5117-058-A1-PF1-C8.pep
MDKLAVSESKPAWRNEVQLDSVSEDGIGWSSIQTAQNQTSMKLAGMPICSFAAGGNCPYGEECPHMHGDLCAFCGKMCLHPYRPDERQEHIKLCEKNHKRLEALKRSQEIECSVCLDRVLSKPTAAERKFGLLSECDHPFCISCIRNWRGNSPTSGMDVNSALRACPICRKLSYYVIPSVLWYFSKEEKLEITENYKAKPKSIDCKYFDFGTGTCPFGTSCFYKHAYXXGRLEEVVLRHLDCDDGSTLI

SEQ ID NO: 9473 - protein, 229 aa, Zea mays
  Clone ID: TF_ZmC21544_3.pep
MELAEAPAPVPDEDGLDERGVALHLPRLLAGVVSGALTGLFALAGALTGAVTGAVAGRASDSGGVLRGAGLGAVAGAVLSIEVLEASRAYWCSSDRLGSHGGASSMADFIEQLLRARFVQEQFTASGYASYRWQLSISYFGQDDLYDIFGDISSEGLSQESLKKLPHHVVSDQTRDLLGEILCCPICLQDIVAGDTARRLPSCSHTFHHPCVDRWLVDRGSCPVCRQDV

SEQ ID NO: 9474 - protein, 83 aa, Zea mays
  Clone ID: TF_ZmC60532_2.pep
TCSHAMCIKCYREWRSRSQSCPFCRDSLKRVNSADLWIYTDSNDIVDMATVRRENLRRLFMYIDKLPTVIPESVFDVYDSHVK

SEQ ID NO: 9475 - protein, 416 aa, Zea mays
  Clone ID: TF_ZmC9088_1.pep
MNQLLLIVLQKQRQQQMMDGFGGYYDECMYWRQNDEIHDAHKEASAPCSSAPVSHLGAHQQECWQHSSYGSQHHDNQNLLEMEVRVRGEMSQIQHEIYELQKLVESCIASQVKMQHSIKEEVCSALREAGLMPNQPDTTAAKGGNCCIPETMGDIENHNNPIQFNDRPWIESPNSWRSLCVVTQSDCHALSHNADICNLLERKKVSKSLESDFSNKMNQLLLTALQKQRQQRMMDDFGGYYDERMYWRQNDEIRDADKEASAPCSLAPVAHLGAHQQESWQHSSFGSQHQHHDNQNLLEMEVRVRGEMSQIHQEIYQLRKLVESCIASQVKMQHSIKEEVCSALREAGLMRSQPDTAAAKRGNCCICHRMQVDSLLYRCGHVCTCFDCADQLKSSGMSCPICQSPIDDVVLARLNF

SEQ ID NO: 9476 - protein, 78 aa, Zea mays
  Clone ID: TF_jC-zmX148004Q1E1F9b1.pep
GYNNLDPSPGAAEQKRGENKTARHGTPTGKKEAKEAMPTQEIPSSNDGDDAASCPVCLEDYAAAEHPRQKPCTHTIHS

SEQ ID NO: 9477 - protein, 46 aa, Zea mays
  Clone ID: TF_LIB3957-008-Q1-N6-G3.pep
TLQEDYVEGEDLGRLDCGHDFHTACIKQWLVIKNLCPICKKTALDT

SEQ ID NO: 9478 - protein, 414 aa, Zea mays
  Clone ID: TF_ZmC64108_1.pep
MDLERSPPPSPAEAAGAAACSICLDPVLACVAGRSVAKLQCGHEFHLDCIGSAFNAKGAMQCPNCRKIEKGRWLYASGRHPPADIDMGGWVTSDNYDITSELPFGFQWCPFSGFTQLASMFGVREAEPTYHTTGDHSSAASSSLVCPYLALRGFLHPVHVPSTSNSGAESTSFHRHSTGLEGHVTPDLNNAPVFHATESRNHDSEHRHLSNLPVSGTPEYSMTPFGIGVPRYDSGSQQGFRSYAHHHPLIHRLTPRSGSNLVAPLGSVPAVVAETRGHGHGAPGHMYQHSSVQGSPFPPTTRRVRPRALTITSFIAATSSAEIAGPLGHGFPAPGAVNRSVSDAEGIDRAYTWGREGYDLFPWTPAEWGTFNPMQNHAHGSFTRRPAGERMPQSRPENGYQPPVPTSQRMPPFL

SEQ ID NO: 9479 - protein, 273 aa, Zea mays
  Clone ID: TF_ZmC64108_3.pep
MDLERPPPASAAEAAGAAACSICLDPVLACVAGRSVAKLQCGHEFHLDCIGSAFNAKGAMQCPNCRKIEKGRWLYASGRHPPADIDMGGWVTSDNYDITSELPFGFQWCPFSGFTQLASMFGVREAEPTYHTTGDHSSAASSSLVCPYLALRGFLHPVNVPSTSNSGAESTSFHRHSTGLEGHVTPDLNNAPVFHATESRNHDSEHRHLSNLPVSGTPEYSMTPFGIGVPRYDSGSQQGFRSYAHHHPLIHSSSRAAALAPRGVHQTNRPQHL

SEQ ID NO: 9480 - protein, 155 aa, Zea mays
  unsure (1)..(155): unsure at all Xaa locations
  Clone ID: TF_LIB4979-013-A1-K1-F5.pep
MAAAFEPTPNISEQPEHRPATNKGTLVFSYTCVGLTGTALVADLLFYCYHQLLRRRAPVTAAAAAGAAAETNNPPGSEGHHVGGVDISKLPGFAYAATSSRRRRNGGDGAHCSVCLGAVTRREMLRRLPLCKHLYHVECIDMSLESHATXPLCRS

SEQ ID NO: 9481 - protein, 114 aa, Zea mays
  unsure (1)..(114): unsure at all Xaa locations
  Clone ID: TF_LIB4765-009-Q1-K1-D9.pep
MSGGNAWSPLPSHGFGSESSGMANRAGEPVARTNSDGGGGGSKDSGSFECNICLDLAQXPVVTLCGHLFCWPCLYEWLHVHAHSQECPVCKPXVEEGKLVPLYGRXWQLRRTPC

SEQ ID NO: 9482 - protein, 139 aa, Zea mays
  unsure (1)..(139): unsure at all Xaa locations
  Clone ID: TF_ZmC163039_1.pep
MAVTATTVAAAITMLAAVAAVFLTVLLCFYIVLCAKQYRGEAPRAGGGGGARAWLLRAVFGGGGADGGGGATEWCHEGGLDDKAMARLPRREVGAGEALDCAVCIAEVAAGEAARVLPRCGHPFHVGCVXAWLRSHSTC

SEQ ID NO: 9483 - protein, 352 aa, Zea mays
  Clone ID: TF_ZmC33545_1.pep
MASRDAGASPRSAPHRPGAVAPKDGADLLSPRFRSAAALAGWDEESVLLAAMVVEDTPVRESRRKRRASTSSAGGSAGSSTRKMRPRRQSPAKIPPVVLALDDDDDDDAADGKSIVNAATKEEEKVVVVGDKEASGSGDKAASGSGDKAVATGNLPCMDRLREELSCAICLEICFEPTTTSCGHSFCMKCLIHAASKCGKRCPKCRQFISNSRSCTINTVLWNTIQLLFPGEVEARKNSTSPCDKDASRSPLRANRLSQGGNGMRTRTRSRSSSTEARTRSSYRSFMEPGIRLDQSEDAALAYRLQQEEFMNAFEEPEQERQQPRNAVSTARDTLRAIASRAVRLRARGWHV

SEQ ID NO: 9484 - protein, 164 aa, Zea mays
  Clone ID: TF_ZmC285028_2.pep
VAAPTAVQVSSSGSSEEGSDEEEEDGNKGSGDGARSPGGSASKYKAAESEAEAEDPCLPSCPICMVAWTADGSHRVSCIPCGHVYGRHCLEMWLLQYGKKKAPCPQCGKRYTQNNIINLYVPEIVVPNNDLEKQVLSLRERNEYLEKQQAKLLEEIKEHKVPHK

SEQ ID NO: 9485 - protein, 130 aa, Zea mays
  unsure (1)..(130): unsure at all Xaa locations
  Clone ID: TF_ZmC2252_2.pep
PATARTQRVETGREEERWIPPPRRRRQGRRPCRRRTTSAPSATTASGSRARRTAPIGSVRLQDLPFFIRRLFRELMDPQRTLPLVFRARMLMMXMLGLFGFVDDLLILLIVFLHLAAVYRSLLLYRHGGQ

SEQ ID NO: 9486 - protein, 122 aa, Zea mays
  Clone ID: TF_LIB4172-012-Q1-L1-A3.pep
TPADPVRNSRVDPRVRSARIQPQDTPPEAEEEVIRAAPARGREQLNEDEPAAGQDPWKLLKEQEERKKCVICQDQSKTVLLLPCRHLCLCQACTEILMRHPVYHRNCPLCRRSILQTLNVYL

SEQ ID NO: 9487 - protein, 69 aa, Zea mays
  Clone ID: TF_ZmC3359_2.pep
KGQGHECPVCKVGVAVGQRVKRLPCSHRYHDGCIPTRPQVRNSCPLCRFELPTDDPEYESWKAGRTDAA

SEQ ID NO: 9488 - protein, 631 aa, Zea mays
  Clone ID: TF_ZmC2094_1.pep
MENLRRFLNPLVLNLQKMELELTCPVCLKLLTSPTTLPCYHTSCSKCALTPTSKGYSCAICKSGYCSQDLRPASHLESIVSIHRSLSSTVSTMIEQQDSQINIHVAKAASHGTPESGNRSGVEEKSDQMKSYNPVASKLVYNQPTGPAFGNIDSVQAKDPAFENNAGAAAVAPMAFVRKGHSGSQSSDGPGDLDCDSNDLEGELMTSLSPLQTALKREANAMDDHTRELKKQKSNDQVQRQTNMASAWKCEFCHSSQVTECTGPLSHYLNGEPVEADQAWKSSVQHVHEKCIEWAPQAFFTGDTANNLGPELARASKIKCSVCGLKGAALGCLVKSCRKSFHVPCAYNVKGCKWDQENFVMLCPTHSSKKLPCERLKPKKKAKLQQPSSDIDGPISPSPMQRAELWTASPFLTSEWVICGSALIGHEKEILDQFECHTGITVTNTWSSDVTHVIANTDERGACARTLKVLMAILAGKWVLNVNWLKACMEAREPVPEEPYEIRCDVHGSVDGPRSGRLRAMQQAPGLFAGLTFYFSGHFMPGYRANLEDLIAAAGGSVLEKAELSSTSLILYSMEAPPPHNNLDALETINKRLAEAQELATTAGCKAIPHTWLLDCIASCAVELNVSCSTA

SEQ ID NO: 9489 - protein, 228 aa, Zea mays
  unsure (1)..(228): unsure at all Xaa locations
  Clone ID: TF_LIB5117-040-A1-PF1-A1.pep
MANAGDPASLPPSASPFSSTRALESVPFSSGNPRIEETRGVVLLHPDPPTAAAAASSSSSHLPAERKPQVFVPAVPNHMTYADFCRFCGSFVPHMLEMRIVRIDGAEDQYSVLIKFGTLSSTDSFYKHFNGKQFSSLEGDVSRIRFVEDVHYTQLIEHAHSSITSSAEQPTCPVCLERLDQDPGGILTTICNHSFHCSCISKWTDSSWPVCRYXQQQPEKSMGSVWGT

SEQ ID NO: 9490 - protein, 125 aa, Zea mays
  Clone ID: TF_LIB3060-112-Q6-K6-F6.pep
LSSHFLNSPLLSRLPSSPPQTPTPTPRSTLPIYSFLSGPAPQGTAPPETVGAGAMRVRGGSLCNVRYDEEERTPLLLHCGHGFCRACLSRMLAAAPGATLPCPRCRHPTGGGGSVSALRLYFPIL

SEQ ID NO: 9491 - protein, 190 aa, Zea mays
  unsure (1)..(190): unsure at all Xaa locations
  Clone ID: TF_21210563.pep
TRDGRGGSSNSNDDGLLEEYDVLGAGLSLLLQHLAENDPNRYGTPPAKREAVEALPTVQIAEAVSCSVCLDDLELGSPAXQMPCGHRFHSSCILPWLELHSSCPVCRFELPSEETKDLNEPSDVHRRTESAREEVRADDPENDSESGNSAWPLVPWFFSGLFSVPEPHTDRGTLTTDQQSPSTNPNAGGN

SEQ ID NO: 9492 - protein, 177 aa, Zea mays
  Clone ID: TF_LIB3900-009-Q1-N6-C9.pep
QKQELLRQQSYSIAITCWNRGARNEVRLPDAHGRFSSLHVYLRTQTQVAYISFTRVACRRGTSHGRRAICPRKAGGRRESSRAASSLSHRPQCPAARRRTLAIRSAVGVDNNNKKKKKKKGASQGQTLHLVANKFRYEISDCTPTMHSLSRCPTIACAWTCIHGLIYYLARKPFLKK

SEQ ID NO: 9493 - protein, 121 aa, Zea mays
  Clone ID: TF_LIB3592-049-Q1-K6-H11.pep
VGLVSLSFPYVQPRCGVCSRGVKSGGSSAVFTAECSHAFHFPCIAAHARSSSANGVLSCPVCASPWRQAPFLASLRLHCSFHDDKHRGGGDGRKTSPLAKLYDDDEPLLAPKATANGGGFN

SEQ ID NO: 9494 - protein, 285 aa, Zea mays
  Clone ID: TF_ZmC73469_1.pep
PRVRPRVRVASTRRLHCAATTHDYNVFSFHPDNSPCHGFEEVLACYRKIVPHLKLSGPTSFAPIVEAAVDIVDRSGGQYHVLVVVADGQVTRSVDTGDGDLSPQEKRTVDSIVMASSYPLSIVLVGVGDGPWDDMRRFDDKLPARDFDNFQFVNFTAIMARAATAQQKESAFALAALMEVPIQYKATMELGILGRSTGNAKRVAPAPPPLPHAQRQASSLRRGASNVGGAAAAPRDDQVCPICLTNAKDLAFGCGHMCCRECGESLTRCPICRQPIRSKLRLYSG

SEQ ID NO: 9495 - protein, 92 aa, Zea mays
  Clone ID: TF_LIB4969-018-Q1-XP1-A1.pep
MASVTDETAKIEGLTSAAAFVEGGIQDACDDACSICLEAFCESDPSALTGCKHEFHLQCILEWYVSSSNISILHVTIFTIFYIIPTFRMNST

SEQ ID NO: 9496 - protein, 173 aa, Zea mays
  unsure (1)..(173): unsure at all Xaa locations
  Clone ID: TF_ZmC1202668_1.pep
MPYSTDKGGYSTHDTLVLLAIGFCATAVSVLIIVLCECLCCRRRRRGPGGTVVYVAARPFFLPSTTDDGDGGLSPSAVSTLPSFVFRRGLPVGGGSGRGEGSGSGSGRGWAQCAVCLSLVQEXEVVRRLPACTHLFHVCCIDMWLHSHSTCPLCRATVPPTKEVPSNDPQPPV

SEQ ID NO: 9497 - protein, 358 aa, Zea mays
  Clone ID: TF_ZmC25188_1.pep
MAMAAAQLEAEEELRLELEAVAAVYGDDVRVLRDLPPHLFVHVRPRTADDTSQQFVELFLGIKASSQYPKEPPHIYAVESKGLDENRQIYLITSIQNKANELSNCPMLVTLCEEAGEILSNMNHPAGDCPLCLYPLMGEDKVGSELPFMKLMSCYHCFHSDCIMRWWEWLQHGDTNPKEPNTGDKHYNVNQPRGFCPVCRKVFDEKDIEHVRDLLGDNTSRLASLTVDLGEDEKELLHSEAEQNRRKRIESLVNLQQELNGLIEPKKDLAIQPGMYVSVPPSTPDTAEEENADPSQGTATSTSETEQRGQASNASSNKPKNPGHRRRNRANASRRQPHGQGQPARQQWQRKEAGTSHQ

SEQ ID NO: 9498 - protein, 242 aa, Zea mays
  Clone ID: TF_ZmC1254_3.pep
MARRLAYTTALTTLFSYGLLFAFGQLRDLFRHLLGCFRPNKDDDVKQGYAPICVGLEDFFVRRLYLRVQDCFGRPIASAPDSWFDVVERTSDDNNKTLQRTSKTTRCLNLTSYNYLGFAAADEYCVPRVVDSLKKYSASTCSARVDGGTTKLHTELEELVARFVGKPAAVVFGMGYVTNSATIPCLIGKGGLIISDSLNHNSIVNGARGSDATVRVFQHNCPAHLEEVLREQIAGGQPLQHM

SEQ ID NO: 9499 - protein, 369 aa, Zea mays
  unsure (1)..(369): unsure at all Xaa locations
  Clone ID: TF_ZmC2195_2.pep
MGANCCIAAKERTQPCITPIEVSAYRNVRRSPSWNIRWDNRTHIEDIMDIPTLFSNHSSGSIHPHTKSGSVAPTEGFSNGNSLGTSPSNVFHGAKWHKSDKKMEARKVTKSDSRANRSTASNSSPETKLSRKSLHWSPRGRPXEGLHSSSMLSVCSNDLSAAGSYAESSDGWSMRTFSEMVATSQRERWSLDSELLGSISSKVTRTSASNSTTLPPEQEVCKLCLKLLKERSTWNAQELAVVAVLLCGHVYHADCLDSITTEADKYDPPCPVCTHGEKCTVKLFGKLESKVKNKIPKNVAADINPDGNSNKHQKKGRREPRLGTSSSMKVPFSRPFLRRHFSIGSRPPRSVSETDSTRKKGFWARHWRE

SEQ ID NO: 9500 - protein, 63 aa, Zea mays
  Clone ID: TF_LIB3637-254-Q6-N6-D1.pep
FEASKDDSREASPECSICLDGFYDGDELIRLRCGYRFHSTCLEPWARKCADCPYCRTNIRSRS

SEQ ID NO: 9501 - protein, 247 aa, Zea mays
  Clone ID: TF_ZmC6487_3.pep
TPQPASDSHLPLCRGTRLLVLAVPTRVSPEDFVRFCGPHLECAADIRFIRDDGVEDRYSVLVEFEDQSSAEWFYADLNGWRFSTSESEVCHVLFIAAVQYTPSSEVATTPPAGSTELPMCPVCIERLDQDISGILATTCDHSFRCSCVSVWTNSSCPVCQFCQKQSENSTCSVCQTTGNLWICVICGFVGCGRYQEGHAKQHWKDTQHCYSLDLETQRVWDFVGDRFVHRLNQSKSDAKHAKFKSKS

SEQ ID NO: 9502 - protein, 437 aa, Zea mays
  Clone ID: TF_ZmC2195_4.pep
MGANCCVAAKERTQPCITPIEVSTYRNVRRSPSWNIRWDNRTHIEDIMDIPTLFSNHSSGSIHPDTKSGSIAPTEGFSNGNSLGTSPSNVFHGAKWHKSDKKMEARKVTKSDSRADRSTASNSSPETKLSRKSLDISSVASDLKTSVSVPSTPPLVSRADPSSSKGHSQPTDSDLMKKAWRSPGYQLYRQVSDSKIPSLRSLNEIRSPEGRPPSSMLSACSNDLSAAGSYGESSDGWSMRTFSEMVSTSQRERWSLDSELLGSISSKMTRSSASSSTTRPPDQDVCKLCLKLLKERSTWNAQELAVVAVLLCGHAYHADCLDSITTEADKYDPPCPVCTHGEKFSVKLFGKLESKIKNKIPKNVSVDINLDGNSSNKHQKKGRREPRLGTSSSMKVPFSRPFLRRHFSIGSRPPRSVSETDSTRKKGFWARHWERVE

SEQ ID NO: 9503 - protein, 431 aa, Zea mays
  Clone ID: TF_ZmC2195_5.pep
YKEWFHCQPCITPIEVSAYRNVRRSPSWNIRWDNRTHIEDIMDIPTLFSNHSSGSIHPHTKSGSVAPTEGFSNGNSLGTSPSNVFHGAKWHKSDKKMEARKVTKSDSRANRSTASNSSPETKLSRKSLDISSVASDLKTSVSVPSTPPLVSRADPSSSKGHSQPTDSDSMKKAWRSPGYQLYRQVSDSKIPSLRSLNEIRSPEGRPPSSMLSACSNDLSAAGSYGESSDGWSMRTFSEMVSTSQRERWSLDSELAGSISSKMTRSSAWSSTTCPPDQDGCKLCLKLLKERSTWNAQELAVVAVLLCGHAYHADCLDSITTEADKYDPPCPVCTHGEKCTVKLFGKLESKIKNKIPKNVAVDINLDGNSSNKHQKKGRREPRLGTSSSMKVPFSRPFLRRHFSIGSRPPRSVSETDSTRKKGFWARHWERVE

SEQ ID NO: 9504 - protein, 68 aa, Zea mays
  Clone ID: TF_LIB3059-040-Q1-K1-D9.pep
NSRVDARVRPRVRDQLVLDICVICLEQEDNAVFVPCGHMCCCMACSSHLTNCPLCRRRIDQAVRTFRH

SEQ ID NO: 9505 - protein, 169 aa, Zea mays
  Clone ID: TF_ZmC71625_2.pep
MRCSGVGFCATAVYQRRGGPHLWPQGSLASCGKGILSLFEEWEAINDLRADMARLQQGMSHMQRMLEACMDMQLELQRSVRQEVSAALNRFIGEQGGESKEIIDDGSKWINVRKGTCCICCETPIDSLLYRCGHMCTCSKCANELVRGGGKCPLCRAPIIEVIRAYFIM

SEQ ID NO: 9506 - protein, 228 aa, Zea mays
  Clone ID: TF_ZmC93126_1.pep
MELLSVSSLLSNGFGESLERLERLIRSYREQRGHGPLNWNLDPPMHPSNGPNANQEQDGKPESQQSQAPVNLVIPPPPLPPRPPLWHSELRHNNWSSRHREWDAINDLRADMGRLQQGMSSMQRMLEACMDMQLELQRSVRQEVSAALNRFAGPEGFSMDLSDDGSKCNQVRKGTCCICCDTQIDSLLYRCGHMCTCSKCANELVRSGGKCPLCRAPIVEVVRAYSVL

SEQ ID NO: 9507 - protein, 170 aa, Zea mays
  unsure (1)..(170): unsure at all Xaa locations
  Clone ID: TF_LIB4301-007-Q1-K1-E2.pep
VRTSGSPPRPRHADRARLAGGGEGGGGGGGGGGRRGGGEEDGGQPRRERERERRRRRRRKREAAAAASEVXMXKRELLARCMTXPLCRRILRDATTVSECLHTFCRKCIYKKINDEELEHCPVCKIDLGCAPLEKLKADHNIQDVRAKIFSLKRKKGNAEKGESPIAPPA

SEQ ID NO: 9508 - protein, 381 aa, Zea mays
  Clone ID: TF_ZmC30542_1.pep
IIMSSICPFAGATTGGGVCPVKSDKSNTGVCPAKSDKSISGVCPVTGKDHGSKLKESGDHGEEKGTDPRVVPAKCPFGYDSNTFKLGPLSCIVCQALLHESSKCKPCAHKFCKACISRFKDCPLCGADIEGIEPDAELQALVDRFIDGHARIKRSHAAGDVEAADGKNKVIYEDVSMERGAFLVQQAMRAFRARNIESAKSRLTMCADDIREELKSSEDNLDLCSQLGAVLGMLGDCCRTLGDVPAAITYYEESAEFLSKPPAKDLELVHTLSVSLNKIGDLRYYDGDLQSARNYYARSLDVRRNAVKEHSAVASQVIDLATSLAKVADVDRNLGNESTAVEGFEEAIRCLEKLKLDSEQTSLEQRRLSVLDFLHNQLADK

SEQ ID NO: 9509 - protein, 197 aa, Zea mays
  unsure (1)..(197): unsure at all Xaa locations
  Clone ID: TF_ZmC30542_2.pep
IIMSSICPFAGATTGGGVCPVKSDKSNTGVCPAKSDKSISGVCPVTGKDHGSKLKESGDHGEEKGTDPRVVPAKCPFGYDSNTFKLGPLSCIVCQALLHESSKCKPCAHKFCKACISRFKDCPLCGADIEGIEPDAELQALVDRFIDGHARIKRSHAAGDVEAADGKNKVIYEDVSWERGVFLVQQAXRAFRARNIE

SEQ ID NO: 9510 - protein, 132 aa, Zea mays
  unsure (1)..(132): unsure at all Xaa locations
  Clone ID: TF_ZmC30542_3.pep
IIMSSICPFAGATTGGGVCPVKSDKSNTGVKLKESGDHGEEKGTDPRVVPAKCPFGYDSNTFKLGPLSCIVCQALLHESSKCKPCAHKFCKACISRFKDCPLCGADIEGIEPDAELKLLXTXLIDGHARISD

SEQ ID NO: 9511 - protein, 238 aa, Zea mays
  Clone ID: TF_ZmC28824_1.pep
MDNLKTHSEYADQPQGPQANAVSFALPTGQVLDLDSHMIGQQHTNLSSFWFSLEQHRLQLDQALQLHNQQLQVSLQQQISMQNSTLLNLVESMTRDVLMQKNDEIASLRVELQRNQEDLETTLHDRDEWMKVAMAAYEINQTLIRMLRTVQLEANSHVSSNDLDAPSYSEASSMARTALETAQPNLICKVCNSGNAGVLMLPCQHLCACKPCVAWLATCPICGAVKTDAIEARFVYKK

SEQ ID NO: 9512 - protein, 489 aa, Zea mays
  Clone ID: TF_ZmC3545_1.pep
LPKLVKTGALCCVAARPHGTKSDPASRDRSMDPTEPRWRINSSFSPPTSRRWDCRYSSDGLPHRVHDAPHDHPPYVSSLSSHSKGSRSAFGSDQYLNHHHSASDGALSYFGSPADSLQAPRWTPSLQRFDLGEFSTPAGGSRPETSDYPQSSERPLTATSSFSSASPFSESSQLASSSKQAAPYLPRNHMGRRSFMSKPVYPLVFRNPVSESEACRMLEVSNAGRATPSDDSQASPLWRRSLASPELKFHNALNELGKMEVSPERNTSSRREGFRWSNASSYDFGYDGDAIDISDHISIESQRSPTSSARFLKCGLCERFLHQKSPWTSNRIVRNADMPVAAVLPCRHVFHADCLEESTAKTEVHEPPCPLCARATDDEGHVSFSEPLHVALRSARRNLLLGTGAGGNSGISDPPRTDRGLKRNNSAVMPRRSGGALFRNRFKKQFPFKARIGKELFGGRVLNKVGLSLSSGQHDDHRQQAPKHDRPMK

SEQ ID NO: 9513 - protein, 213 aa, Zea mays
  Clone ID: TF_ZmC223_6.pep
SIDKLLVIAYLYKNIFLICGCQVGLAPQTFVCCICNCSLSKEGAISAVRLFSCGHATHLQCESEQTRSSNQESKEGCPVCLSMSDTQARSKSPMFENGLMKYSGAEHEVSHGMYQIHEVDHAERSRGLQQMSRYEILNNLQKAQKSFHIETVPPLKLAPPAIYHEKIQKRTTSVGETSKHSVRSQKPQKIWQMKEKKSKEAGSHHPQKSSFLR

SEQ ID NO: 9514 - protein, 167 aa, Zea mays
  unsure (1)..(167): unsure at all Xaa locations
  Clone ID: TF_ZmC35583_2.pep
KKKFDEAKKKXELSLENVLAGMWVLVAKLKRGALGISDFNVDDRTVNLADITNGTKENKGEKNFALVEKQVSEDSVKSLSTEEHRSPEFEPLLVRLKAKIQEMKEKDTDPLSDKDGNSHVCKVCFESATAAVLLPCRHFCLCKPCSLACSECPLCRTRIADRIITFT

SEQ ID NO: 9515 - protein, 90 aa, Zea mays
  Clone ID: TF_ZmC35583_3.pep
SLSPEEHRSPEFEPLLVCLKAKIQEMKEKAPDPLSDKDGNSHVCKVCFESATAAVLLPCRHFCLCKPCSLACSECPLCRTRIADRIITFT

SEQ ID NO: 9516 - protein, 231 aa, Zea mays
  Clone ID: TF_ZmC552193_1.pep
MRPRRRALFPLHSAGAGACGDPWADCQTPPPVPSTPDSGPGPSPSLPPYGDLPCPPVLSPSPSPSPAPAHNGRRNQGGTQGYGPPPGAGDHDRRHLVKYALIAAGVFAFVCLILLGVSVAVRRRQVRRRRQALLAPPIPFPEGAANVGGGGGHDHGWDGAAGVVHHVWNIRTVGLDEASISSIAATRYRAGAGLLGAADCSVCLGEFQDGELVRLLPKCAHAFHVPCIDTW

SEQ ID NO: 9517 - protein, 151 aa, Zea mays
  Clone ID: TF_LIB4738-102-Q1-K1-D9.pep
MSGQSSSSYGDTDPGTDRAYSTTSSSIRWGPHGRGMTACLVVVNVVLVALVYLYFWRVFSRRSAASPSAANPTDHDDDASSTSTPPSPLSSQDQHGRIVASLPTFVVRSGSGAGAECAVCIAELRDGDEGRALPRCGHRFHAACVDAWLRL

SEQ ID NO: 9518 - protein, 215 aa, Zea mays
  unsure (1)..(215): unsure at all Xaa locations
  Clone ID: TF_ZmC35583_1.pep
SLFVEDMKIELQVRRHREAALEAALAEKEXCEEEDIDPXTDKDGNSHVCKVCFESANEKELPLEKDLSGMWVLVATWKRGALGISDLNVDDRTVNLADITNSTKENKGGKNFALVEKQASEDSVKSLSSEEHTSPEFEPLLVRLKAKIQEMKEKDIDPLTDKDGNSHVCKVCFESAAAAVLLPCRHFCLCKPCSLACSECPLCRTRIADRIITFT

SEQ ID NO: 9519 - protein, 157 aa, Zea mays
  Clone ID: TF_ZmC9878_2.pep
MYNHELLSDTMVRQAAMAVKCMLLLYYKNCRGRNYRRQGQMLTLVEYLLLLYRALLPTSVWYRFFLNKEYGSLFSSLTTGLYLTFKLTSVVEKVQSFLAAVKALSRKDVHYGSYATAEQTDSSVLAAGDMCAICQEKMHVPVLLRCKHIFCEDCVSE

SEQ ID NO: 9520 - protein, 258 aa, Zea mays
  unsure (1)..(258): unsure at all Xaa locations
  Clone ID: TF_ZmC11832_1.pep
MEHDAEARRGFARMGFGCKHYRRRCRIRAPCCGDVFHCRHCHNESTKDGHELDRHDVQSVICLVCDTEQPIAQVCCNCGVCMGEYFCAACNFLDDDVDKEQFHCHDCGICRVGGKENFFHCQKCGSCYSTTLRDRHCCIENSMKNNCPICYEXQYLFDSLRETSVLRCGHTMHLQCFHEMLKHDKFSCPICATPIFDMDKFFKALDAEMEASYLYTGKGWVVCNDCRDTTQVFSGVAGHKCCHCQSHNTCRVAPPVLP

SEQ ID NO: 9521 - protein, 350 aa, Zea mays
  unsure (1)..(350): unsure at all Xaa locations
  Clone ID: TF_ZmC4401_1.pep
MMIPWGGVGCCLSAAALYLLGRSSGSDAEVLRSVARAGSMKDLAAILDTASKVLPLVVAISGRVGSDTPLICQQSGMRGVIVEETAEQHFLKHNDAGSWIQDSAVMLSVSKEVPWYLDDGTGRVYVVGARSAAGLILTVASEVFEESGRTLVRGTLDYLQGLKMLGVSELXRVLPTGTSLTVLVTRGFYYPLAIKDDVGTIRIQRPHKGPFYASSKSIDQLIVNLGKWAKLYRIASMGFATFGVFLLAKRALQHFLERRRRHELQKRVLNAAAQRQAREAEGSKGTSDAEPNSKKDQLVLDICVICLEQEYNAVFVPCGHMCCCMACSSHLTNCPLCRRRIDQAVRTFRH

SEQ ID NO: 9522 - protein, 343 aa, Zea mays
  Clone ID: TF_ZmC4401_2.pep
MMIPWGGVGCCLSAAALYLLGRSSGRDAEVLRSVARAGSMKDLAAILDTASKVLPLVVAVSGRVGSDTPLICQQSGMRGVIVEETAEQHFLKHNDAGSWIQDSAVMLSVSKEVPWYLDDGTGRVYMVGARSAAGLILTVASEVFEESGRTLVRGTLDYLQGLKMLGVKRTERVLPTGISLTVVGEAIKDDVGTIRIQRPHKGPFYVSPKSIDQLIMNLGKWAKLYRLASMGFATFGAFLLAKRAIQHFLERKRRHELQKRVLNAAAQRQAREAEGSIGSSDTEPNSKKDQLVLDICVICLEQEYNAVFVPCGHMCCCMACSSHLTNCPLCRRRIDQAVRTFRH

SEQ ID NO: 9523 - protein, 125 aa, Zea mays
  Clone ID: TF_ZmC4401_4.pep
HVCGRLYRIASMGFATFGVFLLAKRALQHFLEKRRRHELQKRVLNAAAQRQAREAEGSKGTSDAEPNSKKDQLVLDICVICLEQEYNAVFVPCGHMCCCMACSSHLTNCPLCRRRIDQAVRTFRH

SEQ ID NO: 9524 - protein, 260 aa, Zea mays
  unsure (1)..(260): unsure at all Xaa locations
  Clone ID: TF_ZmC64108_5.pep
MLTVPHAHERLRGDEENHQAERGWGGAQMDLERSPPASSAEAPGDGGGGGAAACSICLDAVLARGAGRSVAKLQCGHEFHLDCIGSAFNAKGAMQCXCRKIEKGRWLYASGHRASVDIDMGGWVTSDNYDITSELPFGFQWCPFSGFTRLASMFEEREAELTYHTTGDRSSAASSSLVCPYLALRGFLHPVHVPSTSNPGAESTSFRRHATGLEGHATLDLNNAQLFHANESINHDSEHRHLSNLVSGIPEYSMTFGIGL

SEQ ID NO: 9525 - protein, 99 aa, Zea mays
  Clone ID: TF_21210971.pep
LLYEPRSLIYRLPMNLSPDNQCTSKPRQGRGRGADRQRGGNLPLPTICNKSEKNVYVHRSSIWRALVWPRGTHTTSPIFTGRIYRELAGLDHLYFQNVI

SEQ ID NO: 9526 - protein, 66 aa, Zea mays
  Clone ID: TF_LIB3592-075-Q1-N6-G10.pep
QGKKPPRKRCVFCQMEYRKGIFQMTFPCKHVYHASWVTKWLGINKVCPVCFAEVPGEDLEAMSHQL

SEQ ID NO: 9527 - protein, 201 aa, Zea mays
  Clone ID: TF_ZmC518526_1.pep
MWSFASNAIAGSIKKKVQPSKGSLSNPDCSDDDGSSCASREEGLECPICCESFNIVENVPYVLWCGHTMCKNCILGLQWAVVKFPTLPIQLPLFVSCPWCNLLSFRLVYKGNLKFPRKNYFLLWMVESMNGDRAKFHSSGHEERQSVCPSSGGTSSSQHHRRTPTARAETSSSARDRNAAANTPNTASVSLQKLMVCFVQL

SEQ ID NO: 9528 - protein, 228 aa, Zea mays
  Clone ID: TF_ZmC2009_3.pep
GPEEVPYLPEEAHSKTATPGVPPIALVAQCRVILLQVLPYRARGAGGYWGPGAELHPHPPTRTHFAGGEHHQDSSIFYCNTMNSHGAGSHSRLLDLNYPPAEGAGEGASRFSSIPVSHREGSSSMPVQHIQASSSTPPATGEPRIGMRSCPIDVEAIDDDAVIYSSRPLPRARQQLTTTESITIIIDDDSETNLETAGDALDEHVNLLLSLGIERSHEPTSATNTFPG

SEQ ID NO: 9529 - protein, 182 aa, Zea mays
  unsure (1)..(182): unsure at all Xaa locations
  Clone ID: TF_ZmC9505_3.pep
MIPRTSSVSAAAAPSPPAWQSASSSDGMFPGPGSSGQQQLAISNGVLLAAVIFLFMVVVFVFLLYLYAKRYLGANPLLAPSSPSSRFLFVAASPLPQRGLPASVLQSLPVTVYGSPGGKDKDALECAVCLSEVGDGEKVRTLPKCSHGFHVECIDMWFHXHDTCPLCRAPVGDLDALPREEP

SEQ ID NO: 9530 - protein, 110 aa, Zea mays
  Clone ID: TF_cC-zmpo14820003g11d1.pep
SVVVPRLRSDGIHHDDAASCPVCLEDYAPGQRAREMPCMHRLQRNSIGPRLKRHICCPVCRLHLTATGYRRSCSVRDGVYLNVDPDRDGHDHGRCDGRASCPGNAYLACT

SEQ ID NO: 9531 - protein, 472 aa, Zea mays
  Clone ID: TF_ZmC84167_1.pep
GKQSSSASAVLERKCRSFSDSTTSNLKGSSRVAKGFAASISGSEVSVDLSFTGTLSPSPSFDAKVVSNSNSAPAASTDLSLALPSSDSLTPSLSHDSNTEVVDSSSKINFSYDEEQKVWIPQDKKDEIVLILVQRQKELQAHTRDWTDWAQQKVMQVAHRLAKEKDELQSLRKEKEEADRLQEERHHLEESTRKKLLEMESAISRANAQLEKAEASARRREVENAQLTLQMEAAKRHAAESATNISELLKKDENSRKRSQRWESDRALLQEDLAAQKSRLSRVQEHLQHAKELKDQVQARWKQEEAGKIEVIALVTSKKKEREQIETSMRSEENLLHLKAANDTERYKSEIRALEQRIAQMKVSLDSSKVAAPKWGADNKTYALHLSEGRKNSSAQILSNIAVPQDPSFDDIQRDRECVMCLSEEMSVVFLPCAHQVVCAKCSDLHEKQGMKECPSCRTPIQRRVRARPAGC

SEQ ID NO: 9532 - protein, 472 aa, Zea mays
  Clone ID: TF_ZmC12187_1.pep
MQRRRGHTWAGVGKTAQAAAAHAALFCFTLLLALRVDGRTAYSWWIIFSPLWLFHGIVARGRFSMPAPSLPHGRHWAPCHSIVAAPLLIAFELLLCIYLESIRVRNHPSVDLKIVFLPLLAFEAIILIDNFRMCRALMPGDEESMSDEAIWETLPHFWVSISMVFLIAATTFTLLKLSGDVGALGWWDLFINYGIAECFAFLVCTRWFNPMIHKSPTHGEASSSSAIRYRDWESGLVLPSLEDHEQEKLCGLPDIGGHVMKIPLVAFQVLLCMRLEGTPPSARYIPIFALFSPLFILQGAGVLFSLARLVEKVVLLLRNGPVSPNYLTASSKVRDCFAFLHHGSRLLGWWSIDEGSKEEQARLFYTESTGYNTFCGYPPEVVRKMPKKDLAEEVWRLQAALGEQSEITKCTKQEYERLQNEKVLCRICYEGEICMVLLPCRHRTLCKSCAEKCKKCPICRVPIEERMPVYDV

SEQ ID NO: 9533 - protein, 252 aa, Zea mays
  Clone ID: TF_ZmC22071_1.pep
MESNTTPFAAVGTAAEEASTRRVANRIIRALQHQLRLLHRAGAEFFVLGVTGNVYTVTLSTTPACTCPDPAVPCKHILFVLLRVLGLSLDEACVWRQTLHPCQVARLVGTPTYPDVLAGARARERFHQLWSARPANNVADDRQEASSHRPLDGAACPVCLEEMAPAQPSQGSGATAQAILTCRTCRNAVHAECFTRWKRSRSRRAATCVVCRSRWKKPNREHEHEQYMNLAAYMNDDGDVTMLSADGWLCAG

SEQ ID NO: 9534 - protein, 66 aa, Zea mays
  Clone ID: TF_ZmC14225_2.pep
VSAADVGSLSFLYVQSRCGVCSRGVKSGGSSAVFTDDCSHAFHLPCIVGHARSCCDNRVLFCPVCA

SEQ ID NO: 9535 - protein, 165 aa, Zea mays
  Clone ID: TF_ZmC35655_4.pep
HIPSRAFDNFQFVNFSEIMSKNMAQSRKEAAFALSALMEIPQQYKATVELGILGRRSSKSPNRVPLPPPSASHDAYSYSSKSFSKPTTYPQSSSSSSAYPQYGTPHTATPAAPSSTYDNQVCPICLVNPKDMAFGCGHQTCCDCGQSLESCPICRTPITTRIKLY

SEQ ID NO: 9536 - protein, 102 aa, Zea mays
  unsure (1)..(102): unsure at all Xaa locations
  Clone ID: TF_LIB3591-068-Q6-K6-G10.pep
MHVFLQSNVLRGDSSLAKLAQLKEFSHYFRRITACGGGEXFYHSLNAGDEDDDHTCCICYNCDSDATFQPCHHRSCFGCISRHLLNNQRCFFCNAVVTSVTR

SEQ ID NO: 9537 - protein, 141 aa, Zea mays
  Clone ID: TF_ZmC12187_2.pep
KVRDCFAFLHHGSRLLGWWSIDEGSKEEQARLFYTESTGYNTFCGYPPEVVRKMPKKDLAEEVWRLQAALGEQSEITKCTKQEYERLQNEKVLCRVCYEGEICMVLLPCRHRTLCKSCAEKCKKCPICRVPIEERMPVYDV

SEQ ID NO: 9538 - protein, 393 aa, Zea mays
  unsure (1)..(393): unsure at all Xaa locations
  Clone ID: TF_ZmC22395_16.pep
FKISCSHCCLRSIPYEICPLALALLQSPSPCGPIHPAPIPRRWSCANAERRRGFTASSIRSPSVACAYASRNISYVWXRTMLNGLLILSMTGHNTVRLAILFSKVELKKQHDWVACIFPTQTAPDGYVCPSCSAPIWPPSSIKDTGSRLHTELKEAIVQTGMEKNVFGNHYVTIAKADTQTPPAFASDPLKTLSNRDDREFNSANAAKDAALPSTLHSGMYSSAVGSETTIHVDPEIVEIEGSSPVSTQFSVQDSNFIRSPSPHGPGAMTRXGANTVDRQNSEISYYADDEDGNRKKYTKRGTFRHKFLRMLLPFWSSALPTLPVTAPSKKESDALEGSRSRHQRSSRGLASFKLMSDSMRCTATSHLFIQFHGCTEKMRRCQEKVDMSMCLS

SEQ ID NO: 9539 - protein, 56 aa, Zea mays
  Clone ID: TF_ZmC89425_1.pep
EAADGVRRLGNCAHAFHARCIDRWIDLVRVTCPLCRSHLLPRRRAGLLAMARLGDG

SEQ ID NO: 9540 - protein, 93 aa, Zea mays
  unsure (1)..(93): unsure at all Xaa locations
  Clone ID: TF_700381537H1.pep
SSIIPIHSYHYGDQYDGCVSSLYQCEDVDKLRVLPCGHGYHSRCVDSWLTQTRKTCPIGNQPVHRGPGDXYQEGETQGRVEGDQVDPRDHPSS

SEQ ID NO: 9541 - protein, 44 aa, Zea mays
  Clone ID: TF_LIB3158-018-Q1-K1-F12.pep
ARQFVRALPQCQHIFHVRCIDSWLLRHASCPLCRAGVHIDHIHM

SEQ ID NO: 9542 - protein, 206 aa, Zea mays
  Clone ID: TF_ZmC435619_1.pep
MASDDEEACDYFYDDDDDAEEDAAAGLEEDSSLPTPEGRADYWAITQDTVFAAQKQDLSTVMNLLNINQHQARALLIHHRWSMDGIYDSLDMGRERMLRNSGIVLQEVNSIAAAGSMTPWRTVTCKVCFEDFSMDAVSTMDCGHCFCNDCWTEYFHAAVESGKKQIRCMEVKCSAFCDEDLVRFLLVQKYPDMAKNFNRFLLGSYL

SEQ ID NO: 9543 - protein, 70 aa, Zea mays
  Clone ID: TF_uC-zmflb73019d10b1.pep
MGLQIQYMSMQVRGLPCAHNFHVECIDQWLRLNVKCPPCRCSVFPNLDLSALNNLWSTSEPDHSSCSASN

SEQ ID NO: 9544 - protein, 72 aa, Zea mays
  unsure (1)..(72): unsure at all Xaa locations
  Clone ID: TF_21210134.pep
ERSIFGAHQSTIYDPIPSQTTGVAVLVRECAQDFQVGEKVRXLPDCWHVFHVPCIDGWLIKHGSCPLCRRKL

SEQ ID NO: 9545 - protein, 109 aa, Zea mays
  Clone ID: TF_ZmC11824_5.pep
EPPRMDEYQECSSCCLHFLSNKQLQVMIHQDYQVYSDISSTKIVWSQTGQVSFRSIHSRMQQRWKWCSHLVTERGFSSSYYIYQLVLYRLQMFSTNSNNSHPLYTNLKT

SEQ ID NO: 9546 - protein, 171 aa, Zea mays
  unsure (1)..(171): unsure at all Xaa locations
  Clone ID: TF_LIB3066-048-E2-R3A.pep
MTSPPTPLRALARQAMQSPSPPTKVGPPPLPPPPLPAVDAAVIMGVLTAVLLALFLFLIYAKHCKQRGPGERPDGLGLGFAPSSYDRCRCGLSSSTVGALPXSGSALVTSTWSAPLSATVCLGAFNAAEVLRVMSACRHAFHSECIHAWLLAHSTCSVGLRCVTGVRVHDS

SEQ ID NO: 9547 - protein, 206 aa, Zea mays
  unsure (1)..(206): unsure at all Xaa locations
  Clone ID: TF_LIB3597-002-P1-K6-C5.pep
SSCPNRCRLRRCLNLLGAVHPATSTQAWVTTNKLKLSANVRESTSGGSTNNTARVRCGGGRCFDLPQEPIVPLCGHLFCWPCIYRWLHIHTHSPESPVSTDLVEEDTLVPLYGXRGKDRVDSRXKNMPIGEINNRPTGQRPDLAPQAVATQQLCHCQVQCDSRLIGTRMHLANARWRNYAFXAAVWGLYPMLSFQXHVFPHTATYA

SEQ ID NO: 9548 - protein, 80 aa, Zea mays
  unsure (1)..(80): unsure at all Xaa locations
  Clone ID: TF_3340896.pep
GGIMIECGTNQPIEKVLAAEDAECCIXVSAYDDSAELRELPCGHHFHCTCIDKWLHINATCPLMNAVRLTMPICFNFCSV

SEQ ID NO: 9549 - protein, 191 aa, Zea mays
  Clone ID: TF_ZmC6478_1.pep
GRPCPEPIFTPSRCPNPWLRLRRRDPGGLLPSSLCLRAVPPTLLNPRRATRVQAPPGCEGGTGAGEPQSAPPHSAPSEAPSTAGAAKQASVRLAESRGGGSNQQGSTMKVKILQWHAVASWTWDAQDETCGICRMAFDGCCPDCKFPGDDCPLIWGVCNHAYHLHCILKWVNSQTSTPLCPMCRREWQFKG

SEQ ID NO: 9550 - protein, 42 aa, Zea mays
  Clone ID: TF_LIB3206-072-P1-N1-G5.pep
AKGGAFIPCGHTFCRACARELRTGRGRCPLCNATIREVLNLF

SEQ ID NO: 9551 - protein, 92 aa, Zea mays
  Clone ID: TF_ZmC240975_1.pep
MADFRVVSAQFLMVDIDPVGGLILQDFEAGETARSLPECGHTFHLPCIDVWLLRTRGRGLSRCAHFSLGCLWATVSRCACTRVPDQEQSIVG

SEQ ID NO: 9552 - protein, 226 aa, Zea mays
  Clone ID: TF_LIB4758-090-R1-K1-B1.pep
LEAGRDSPLLQTSRGLAVAAEDIEAASNAIERDAGETRESREGAREGTPNPRRRLVLGLSGWRHGECRARLRGANRRRRRRRRLLRDAATITECLHTFCRKCISEEFVNKEVCCCPVCSIDLGCAPLEKLRIDHSLQYVRSKVFPSKKRKVEDPEVTSPITSPIKTKVRSLSSLTKHAPQMSMQKCLRKRRTKASCLQNLPLHSTLRSSNITKKSVETFRVSLSSS

SEQ ID NO: 9553 - protein, 263 aa, Zea mays
  unsure (1)..(263): unsure at all Xaa locations
  Clone ID: TF_ZmC21544_5.pep
MELAEAPAPVPDEDGLDERGVALHLPRLLAGVVSGALTGLFALAGALTGAVTGAVAGRASDSGGVLRGAGLGAVAGAVLSIEVLEASRAYWCSSDRLGSHGGASSMADFIEQLLRARFVQEQFTASGYASYRWQLSISYFGQDDLYNIFGDISSEALSQESLKXLPHHMNAWLECNDRFHTEICLLLNAASGLGWHLFSSSSSNNYKQRRRPTXWLASFVLPQDIVAGKTARRLPGCFHAFHQPWVDKWLVGHGSCPVCRQRV

SEQ ID NO: 9554 - protein, 132 aa, Zea mays
  Clone ID: TF_LIB4605-011-R1-K1-H12.pep
GSETSGMANRADERGGGTNSDGGGGGSKDAGSFKCNICLDLAQDPVITLCGHLFSWPYLYERLHAHAHYKECAVSKGDVQEGKLAHLYGRTGSCAVPRARSGATVEIPIRPTEQSASTALLPDHNNHYPHQN

SEQ ID NO: 9555 - protein, 185 aa, Zea mays
  Clone ID: TF_UC-ZMROTEOSINTE105E03_FLI.pep
YTATFQRLESRPNNPAQGVAPLGSTNPSVNINDNSLNLVSRPPPYDTDPRYARVQREGLVSRREKSINLAQEESLALRRNASSSGIEHLAAQKKRNSTENEGEYKVHRSESTKSLSAKAYSSSYAVVASEDEDVCPTCLEEYTPDNPKIITKCCHHFHLGCIYEWMERSDTCPICGKEMEFCESP

SEQ ID NO: 9556 - protein, 225 aa, Zea mays
  Clone ID: TF_ZmC4212_1.pep
MGGFCCCLSAEEFDEYVYPNNPIYRQCVSLRHLFHSIFGGYTATFQRLESRPNNPAQGVAPLGSTNPSVNINDNSLNLVSRPPPYDTDPRYARVQREGLVSRREKSINLAQEESLALRRNASSSGIEHLAAQKKRNSTENEGEYKVHRSESTKSLSAKAYSSSYAVVASEDEDVCPTCLEEYTPDNPKIITKCCHHFHLGCIYEWMERSDTCPICGKEMEFCESP

SEQ ID NO: 9557 - protein, 163 aa, Zea mays
  unsure (1)..(163): unsure at all Xaa locations
  Clone ID: TF_jC-zmXLIB3526060ac08b1.pep
QVVCSLCGTEQEVCDRTFTNDLLPDIICVSPVSSWFLVRWQVRQVCINCGVCMGKYFCGLCKLFDDDVSKQQYHCNGCGICRIGGRENFFHCSXCGCCYSIALKNSHACVEGAMHHDCXICFEYLFDSTXDVSVLPCGHTIHVKCLKEMEEHXQFACPLCSKS

SEQ ID NO: 9558 - protein, 190 aa, Zea mays
  Clone ID: TF_ZmC213505_1.pep
MGFPAGYSELVLPKQLLHLLLLLGYVRRFLLWAFDAVGLGDLLDLGDDHQAPPPPQQPQPQQHRRAEFRTAMPAMVIEEALPVARFDELEARVVGGDCAVCLGGIGGGDEVRRLGNCRHAFHRACLDRWMEHDQRTCPLCRAPLVPGALWPADASDLDFSYLGAPVPSPTLLPTLLRPHELLLLAGLGGY

SEQ ID NO: 9559 - protein, 178 aa, Zea mays
  Clone ID: TF_ZmC195726_1.pep
MSTAGSGSLRPAVVEDTGRHWAPHGPVLTACVVAINVLMILLVFVFFWRYFSGKRGPSASSGGGGDGDDDDASSSASLPVASPWAWSSRRRSSKDHGPQPVDDDVASALPVYLYSSSAGGEGGKAPECAVCILELRDGDSARLLPRCGHRFHADCVGAWLRLHTTCPLCRASVVAPRA

SEQ ID NO: 9560 - protein, 444 aa, Zea mays
  unsure (1)..(444): unsure at all Xaa locations
  Clone ID: TF_ZmC22619_1.pep
MLIDGMRSVVATVSGYHGDERHRLVNLIAETGASYVGSMSRSITHLVCWRLEGKKYDIARRLGTRVVSHWWFTECLREGRRLPEDPYFXCGEEAGPVPELPSRSRKQKRRKRMKHVNTSTDRDVLNLQDNVSSVMARQCLHISSHRTSQSTSKHKGNLSRLLHNEVPIRMGERNNLTENSENDSLSDSFSEPQTSDTLCIEAQRKSSAPSSSLRRSTLDSLYEFGETSRHEPAGRTKLDNVELRETSRSLLPFDLSGQEPAFCTQEQVDKCSLGTLADNKPMEKSSNMERQPELSCVICWTDFSSTRGILPCGHRFCYSCIQGWVDCLASRGKVSTCPLCKASFTWISKVDEAGTSDQKIYSQTIPCEASTDVFVPGNVGYDFSRPTSGQGACYQCHFREPEELLLSCHVCRSQWVHSYCLDPPLTPWTCMHCRDLRMLFHRYR

SEQ ID NO: 9561 - protein, 160 aa, Zea mays
  Clone ID: TF_ZmC11815_9.pep
MMGIPLVCYCLAVPKPVIAFCRLLSAVRDAALLMLAVVGLCRFPPDGAADAGHQPGEVKARLPAVEYGQLLAEHDEQQQSGDHDCDGDAASSDCIVCLETLEAADQVRRLGNCAHAFHRACIDRWIDLGRATCPLCRSDLLPRGPGWASRLGLGRLTRVR

SEQ ID NO: 9562 - protein, 264 aa, Zea mays
  Clone ID: TF_ZmC7432_2.pep
PNQARTLEIQDADPNQRPLPALPHHTTAYRHVGARYGRGRGGGAPPGAAGEAREEAALRGGRKRARRRRPGPLRRRLSSPPPPAWLVAQNLTRELSILTESSGDQDGSNNRTVPRAEEITPAIMNLLETISGDRDLETALEESLQGIIEHPQRAPPASKEVVANLPVIAVTEEVMSRLGSETECAVCRENLVVDDKMQELPCKHLFHPLCLKPWLDENNSCPICRHELRTDDHVYESRKEREREEEEDRRGAANAVRGGEFIYI

SEQ ID NO: 9563 - protein, 234 aa, Zea mays
  Clone ID: TF_LIB5074-010-R1-XP1-A11.pep
RPGPECTRPRALHGGAASSPRPGAASAPVRPPPREPFPMLLPVFILFVLLLCFLSIFLLRDLLHFLSLWLRRRRRLRADADAASDATPDTHASHKPAGLDPAVLATFPTVRWFEETHRPASGQAECAVCLSEFAAGDAVRLLTVCRHAFHTACIDSWLGAHTTCPVCRSELDAPAATPRYGGGGRIAILVDDQGDGSAAVADTDHAESSPAKRWRAIAPLTDDIHIVPKSPSAR

SEQ ID NO: 9564 - protein, 508 aa, Zea mays
  Clone ID: TF_ZmC4578_2.pep
MSYRNMLWTHQSVNPEWEQGHVQVQPRSSYYAGTVSDSSNLGMQVAVGVPVNTVNVGICDLWNHERLPVHNSYPHASVTSRFVLPTSMYNPCMPAAAVNIYIPQTQSFGLGNVLPPSLHSQVSTGTIDENNSSFNFGDSAIGSMKRKTAVVAGNHHILHGFAGSSSSVHVPQNPVYGPWNASSQSNCLPSSAASNLPEYHNSNGWPFLEESSANASNSFTSVDACPELVPHGNNLYPACHIIQCNTWVPQTASHGIPQWGYGNVMVNPPGTVDMPNGNIQDYQAGHSSIHGPLPHFCQIPLRSMQVPQIQVPHQQFIGNNVVHGLNPSAAGLPLDPRMLAFPFNDEHTFGHQVHPPLINQANNGALRILPYQNATVMDHSRIYEAGHVIDEHRDMRLDVDNMTYEELVALQEQIGDVNTGLTESYIQENLRSTFHVPGAASISDHFCELSLENDACIICQEEYEARELIGALECGHKYHEDCIKQWLMVKNVCPICKTTALSSDRRNG

SEQ ID NO: 9565 - protein, 157 aa, Zea mays
  Clone ID: TF_LIB4740-104-A1-K1-A8.pep
MSGGNAWSPLPSHGFGSESSGMANRAGEPVARTNSDGGGGGSKDSGSFECNICLDLAQDPVVTLCGHLFCWPCLYEWLHVHAHSQECPVCKAVVEEGKLVPLYGRGGSSAVPRARSVAGVEIPSRPTGQRPSTAPQPDHNNHYPHPNPWVHGAGAPP

SEQ ID NO: 9566 - protein, 179 aa, Zea mays
  unsure (1)..(179): unsure at all Xaa locations
  Clone ID: TF_LIB4826-003-R1-N1-E5.pep
GRVPRQTAVASHALRLVPCSARPNFAAGGSKDSGSFECNICLDLAQDPVVTLCGHLFCWPCLYEWLHVHAHSQECPVCKADDEEGKLVPLYGXRGGSYAAPRARSEAGVEIPNRPTGQRPSTAPQPDHNNHYPHHNPWVNGAGAAPVANGRRGSYPLSAAIGGLIPLMSFRGPGFPQAT

SEQ ID NO: 9567 - protein, 220 aa, Zea mays
  unsure (1)..(220): unsure at all Xaa locations
  Clone ID: TF_LIB4828-091-A1-N1-E3.pep
RGRPETAVASHPLRLVPCSARPNFAAGGGSKDSGSFECNICLDLAQDPVVTLCGHLFCWPCLYEWLHVHAHSQECPVCKAVVEEGKLVPLYGRGGSSAVPRARSVAGVEIPSRPTGQRPSTAPQPDHNNHYPHQNPWFNGAGAPPVANGRWGSYTFSAAIGGLFPLLSFQVHGFPQATAYGPAAGFPYGYXHSFHGWHGHGFPRQAXQGQQVDAYLEVLL

SEQ ID NO: 9568 - protein, 246 aa, Zea mays
  Clone ID: TF_ZmC4170_1.pep
MSGGNAWSPLPSHGFGSESSGMANRAGEPVARTNSDGGGGGSKDSGSFECNICLDLAQDPVVTLCGHLFCWPCLYEWLHVHAHSQECPVCKAVVEEGKLVPLYGRGGSSAVPRARSVAGVEIPSRPTGQRPSTAPQPDHNNHYPHQNPWFNGAGAPPVANGRWGSYTFSAAIGGLFPLLSFQVHGFPQATAYGPAAGFPYGYGHSFHGWHGHGFPRQAPQGQQVDAYLKVLLLAVGVLVIASLIAF

SEQ ID NO: 9569 - protein, 247 aa, Zea mays
  Clone ID: TF_ZmC4170_2.pep
MSGGNAWSPLPSHGFESDSGGMGSRAGEPVARTNSGGGSSSKDSGSFECNICLDLAQDPVVTLCGHLFCWPCLYEWLHVHAHSQECPVCKAVVEEGKLVPLYGRGGNSTSPRARSVAGVEIPSRPTGQRPSTAPQPDHSNHYPPQNPWFMGAGAPPVAGGRWGNYTFSAAIGGLFPLLSFQVHGFPQVSAYGPAAGFPYGYGHSFHGWHGHGYGFPRQAPQGQQVDAYLKVLLLVVGVLVIASLIAF

SEQ ID NO: 9570 - protein, 218 aa, Zea mays
  Clone ID: TF_ZmC4170_3.pep
MSGGNAWSPLPSHGFESDSGGMGSRAGEPVARTNSSGGGGSSKDSGSFECNICLDLAQDPVVTLCGHLFCWPCLYEWLHVHAHSQECPVCKAVVEEGKLVPLYGRGGNSTSPRARSVAGVEIPSRPTGQRPSTAPQPDHSNHYPPQNLWFMGAGAPPVAGGRWGNYTFSAAIGGVFPLLSFQVHGFPQVSAYGAAAGFPYGYVQSFHGWHGHGYGFPR

SEQ ID NO: 9571 - protein, 275 aa, Zea mays
  unsure (1)..(275): unsure at all Xaa locations
  Clone ID: TF_ZmC4170_4.pep
PTRPPTRPPTRPPTRPVRDRANLQPFPLRPPALSLPQAGVRSTAVAPPSWRPSGDGSRIASPPPRSLLGSKDSGSFECNICLDLAQDPVVTLCGHLFCWPCLYEWLHVHAHSQECPVCKAVVEEGKLVPLYGRGGSSAVPRARSVAGVEIPSRPTGQRPSTAPQPDHNNHYPHQNPWFNGAGAPPVANGRWGSYTFSAAIGGLFPLLSFQVHGFPQATAYGPAAGFPYGYGHSFHGXWHGHGFPRQAPQGQQVDAYLKALLLAVGVLVIASLIAF

SEQ ID NO: 9572 - protein, 157 aa, Zea mays
  Clone ID: TF_ZmC4170_5.pep
MSGGNAWSPLPSHGFGSESSGMANRAGEPVARTNSDGGGGGSKDSGSFECNICLDLAQDPVVTLCGHLFCWPCLYEWLHVHAHSQECPVCKAVVEEGKLVPLYGRGGSSAAPRARSVAGVEIPSRPTGQRPSTAPQPDHNNHYPHQNPWFNGAGAPP

SEQ ID NO: 9573 - protein, 116 aa, Zea mays
  Clone ID: TF_ZmC4170_8.pep
LISASRRSDSGGMGSRAGEPVARTNSSGGGGSSKDSGSFECNICLDLAQDPVVTLCGHLFCWPCLYEWLHVHAHSQECPVCKAVVEEGKLVPLTAVVGTPLTPCRVVAGVEIPSRP

SEQ ID NO: 9574 - protein, 93 aa, Zea mays
  Clone ID: TF_ZmC1176474_1.pep
DSQDTAPTLADMFETAAAGMPAAAIAALPVTAVTESTVTDASGEPIGCPICLQDFEAGETARRLPECGHTFHLPCIDVWLLRHASCPLCRRAV

SEQ ID NO: 9575 - protein, 122 aa, Zea mays
  Clone ID: TF_ZmC588778_1.pep
MLAVTVSQVVALLSKAAGAEAERWRRRCGGGHDRSAPSPAVGYCCVCISACRDDGDDVRRLPCGHAFHRDCVDRWLARCRRTCPLCRLHVAGGPTVGFVDQQQLQLSDDLVIWFSSLFVAGL

SEQ ID NO: 9576 - protein, 466 aa, Zea mays
  Clone ID: TF_ZmC15150_3.pep
MAGWTDSTGSGGRGSGGRGFTTPRYTTNSTNDMIHGGTSGGGGGSGRWRGGRSRGWPPPQPHHRYRRVDAVHRDSAPVSLSELQAASSTSSRHRYLTRSISADKSSASGTAGSTDTKEPDDKANRSAANFECNVCFDMAAEPVVTRCGHLFCWECLYQWLHVHSHHRECPVCKGQVADDAIIPIYGRGGSAASVDNAPPRPTGARVESTRQQQQQLPIFHPPNVFEFIGLGLAAAARGEHSTEQLLLPTFSHPTVFDDDDGHEWDMDLVNNGIDPLDLITPGTQDLDMDDYDGTIDFDDDDYEYDYHLAGATLFASAGTEASNPSSSQAHAGMINIRDNILGTATSIYHQQEFGYSGVRPHNNRGRRRHRNRARASANHSGADEMVIEDTSHFYLQNGGSSNISAGAAFRPNGGWTGRRGRSNLNSNSGGGSNLNSNSGGGSNMNSNSGGGRGGIQGTRRQRTNYN

SEQ ID NO: 9577 - protein, 108 aa, Zea mays
  Clone ID: TF_ZmC3359_1.pep
AAAYEVLVAGGEGLFLKTKPPAARSAVEALPSAVVAAGQEVQGDECAVCKDGVAVGQRVKRLPCSHRYHDGCIVPWLQVRNSCPLCRFELPTDDPEYESWKAGRTDAA

SEQ ID NO: 9578 - protein, 143 aa, Zea mays
  Clone ID: TF_LIB5072-065-A1-XP1-E8.pep
MVIVLAALLFALLFALGINSLARCLIRWARRAPAAEGGGGGLQKRVLRSMPVEVYGTAAVTVADVCAICLGEFADGEKVRVLPRCAHGFHVRCVDTWLLSHDSCPTCRASVLDGAKAATPAGGGSRRQGPQGSEAAAIAVVIG

SEQ ID NO: 9579 - protein, 294 aa, Zea mays
  unsure (1)..(294): unsure at all Xaa locations
  Clone ID: TF_ZmC17955_2.pep
MSAGRQAYWCYQCRQRVRPRGREMVCPYCDSGFVAEMDDVDALMSHFVGTDPDFHRDPRFGIMEAISAVMRHGMAGMNREVDVRGRPNFFSDLEMEFGSGPWLLFRGQLPGHLTEDNGFDVFVNGRRGGGGGGGGVGXRRANIADYFVGPGLDDLIEQLTQNDRRGPPPAAQSSIDAMPTVKITQRHLSGDSHCPICKEKFEMVSEEAREMPCKHLYHSDCIVPWLEQHNSCPVCRYELPSQGSATGASCSRARSTDQSQSSSSSSSSGRTSGRQRRKDPFSFLWPFRSSSSSR

SEQ ID NO: 9580 - protein, 191 aa, Zea mays
  Clone ID: TF_ZmC22858_1.pep
MGVHARSMSWYMGSPAPGSAAEGEGQRALRSSSGGSDGSFDTNMVIILAALLFALLFAMGLNSLARCLIRWARRAPAGEDGGAGGLKKRALRSIPVEVYGACGADGAAAVAADVCAICLGEFADGEKVRVLPRCAHGFHVRCVDTWLLSHDSCPTCRGSVLDGAKAAASAPAAGGNRRQGSEAAAIAIVIG

SEQ ID NO: 9581 - protein, 125 aa, Zea mays
  unsure (1)..(125): unsure at all Xaa locations
  Clone ID: TF_LIB3228-004-P1-K1-F1.pep
ALACVIGIAVCCCLPCIIGILYAVTDQEEGASEDDVNNLSKFKFRTMSDADKLAAGIAAPVGGVMTECGXCCICLCPYEDGVELLELPCNHHFHCSCIDKWLHINATCPLCKFNIVKSNLHREEV

SEQ ID NO: 9582 - protein, 401 aa, Zea mays
  Clone ID: TF_ZmC5544_1.pep
MEQATGVSGPEHIIDIPREIGPPASVSRSAGRENHEESNPVDRPSTRALVPALQAPSAIGAVPITGHTSGTRRNDNYVRRHRSPLNSGLWISIEVIVNFSQIVAAIVVLCVSRKEHPQAPLLEWVIGYTVGCFATLPHLYWRYIHRNIVNGEHESSHTPQGSAHNNSNEATHAASASERRRNAARNAVLANPRINALFDHFKMALDCFFAVWFVVGNVWIFGGRSSAADAPNLYRLCIVFLTFSCIGYAMPFILCAMICCCLPCIISVMGFREDTNNTRGASSESINALPTYKFKIKKRRHGSGSETEGQEGGILAAGTDKERSLSAEDAVCCICLAKYAHNDELRELPCAHCFHKDCVDKWLKINALCPLCKSEIVSSSGTSDARQSDQNTVPVQEIEMH

SEQ ID NO: 9583 - protein, 200 aa, Zea mays
  unsure (1)..(200): unsure at all Xaa locations
  Clone ID: TF_LIB4732-093-Q1-K1-A9.pep
MDWCLCCIRVYTLSIANSLYLGVTGILVYVLARSHSRTTSGIVVASVFLVLWVSIGAVIYASLCFAFFPWAALENARLCCVRCTAGWLRRPSGGGGSALPQYAARSRSHAMNELPGEPTVRAGEARVAAAADIPAYELRDDAWQGQPDGSSDCAVCLGEMVKRLPVCLHMFHQQCVDKWLNNNSTCPVCXXASCSRRCRR

SEQ ID NO: 9584 - protein, 397 aa, Zea mays
  Clone ID: TF_ZmC348_1.pep
MDAAAAAAAQMERHSSAAAHLERHSSAAAFVEGGVQDGCDDTCSICLETFSDSDPSAVTSCKHEFHLQCILEWCQRSSQCPMCWQAISMKDPTSQELLEAVEEERNDVQENHARTTTVFRHPLLGDFEVPVDADDAEIEERIMQHLAAAAAIRRSHRHARREGRRSSRAAAAHGHGHPQPQTQVLFFPSAGEATPGGSGSPSPHPRQEHAASSVVSPPPLPAVASAEGTDADSTASVGGAVGPDDSVSRSQSSPVNHDEAGPSADAQSFSDTIKSRLQSAYGRYKDSITKSTRGWKERWFAQSSAMSNLGSEMRREVGAGIAAVSRMIEKQLETRPDGSGTAPSPATASSPAHAHPGSDASSQGQGAAVPATPAAALNNATPAAAAALNDASSSSTA

SEQ ID NO: 9585 - protein, 245 aa, Zea mays
  unsure (1)..(245): unsure at all Xaa locations
  Clone ID: TF_ZmC5151_3.pep
DRHDTTDTMSTTTTKASDPGSAWFGSGARTRSAAGISHNARLVTTAVAAFVSVLGLALFLHLYVCHVRRRNRRRAAAVLPTTTXPRXXXAAPKRGLDPAAVAALPTVLYXDAGGADDGAECTICLGAVQEGELVRALPACGHVFHVPCVDTWFASSSSCPVCRAEVEPPPPPALSSSALFVQAEKVVQDAVKEEAGSSTPERGIGACASLMKMLSRERPAPRRPHADAGDLDDLERQQHSVAVNN

SEQ ID NO: 9586 - protein, 261 aa, Zea mays
  Clone ID: TF_ZmC17955_3.pep
MSAGRQAYWCYQCRQRVRPRGREMVCPYCDSGFVAEMDDVDALMSHFVGTDPDFHRDPRFGIMEAISAVMRHGMAGMNREFDVRGRPNFFSDLEMEFGSGPWLLFRGQLPGHLTEDNGFDVFVNGRRGGGGGMRRANIADYFVGPGLDDLIEQLTQNDRRGPPPAAQSSIDAMPTVKITQRHLSGDSHCPICKEKFEMGSEAREMPCKHLYHSDCIVPWLEQHNSCPVCRYELPPQGSATGASCSRARSTDQSQSSSSSSS

SEQ ID NO: 9587 - protein, 306 aa, Zea mays
  Clone ID: TF_ZmC42210_1.pep
VCPPSSICGCSEPASFPALIWSGSSISGMASSPVSYWCYSCSRFVRVSPSTVVCPECDGGFLEQFTQPPPRGGGGSGRRGTMNPVIVLRGGSLSGFELYYDDGAGEGLRPLPGDVQHLLMGSGFHRLLDQFSRLEAAAPRPPASKAAVESMPSVTVAGGGAHCAVCQEAFEPGAAGREMPCKHVYHQDCILPWLSLRNSCPVCRQELPAAATPDAEADAGLTIWRLPRGGFAVGRFAGGPREQLPVVYTELDGGFSNGVGPRRVTWPEGDGQVDGGEGRIRRLLRNLFGCFGHGSWPASSSQSRSG

SEQ ID NO: 9588 - protein, 226 aa, Zea mays
  Clone ID: TF_ZmC9753_2.pep
MDTDTDTTTSTGSRLHPAAGARAGVRSLAARGAESLVTCVFATVGTVLGAITGGLIGLATETGVLRGTGVGGITGALVSMEVVESLWRSDEPAIWSVVYVLDVIWSLLTGRLVREKVDPAVLSAVESQMSAADTPALHGDHADIFDTGGTNGMARVAMDALPVVRFTERSNVDANGDLIACSVCLQEFQAGDSARSLPVCRHTFHLPCIDGWLLRHASCPLCRRAV

SEQ ID NO: 9589 - protein, 240 aa, Zea mays
  Clone ID: TF_ZmC27511_1.pep
MSIPSMSSSSPSVGSPLPPAHDGGPGPLVWRQKEQPHPQPQHPDYSFTGRVLLTAVVILAILTVVFVLIRLLLYQFVARGRGRLAVGVRRSFGSFGMRSARHGLAASALAALPVTTYRVRGADDDGPSSASGGAGTGTADCAVCLSELADGEKVRALPGCSHVFHVDCIDAWLRSRTTCPVCRAEVRPKATADTRPSPPPALIDAAGGTLVVTVVGGAAETGDAHRTSVLGSGQPAGAVG

SEQ ID NO: 9590 - protein, 165 aa, Zea mays
  Clone ID: TF_ZmC3483_1.pep
GLPWRRTSPSWLSKVKGLNFPLPDEHQSRTRQIETDEMFARRLQEQLNQQQLGSQHSEATDTTIAWTLHERDAEHARFAAREGQSNMDLQTRLAVLDSLSEAFRNCEDTHSPDSDDDDYEDQIALGVVPMNPAIYAWTALLLVIHSGVCHACTSFTKSALTGGSG

SEQ ID NO: 9591 - protein, 160 aa, Zea mays
  Clone ID: TF_LIB4756-051-R1-K1-B1.pep
MQFAMSPDNLLFFCSVTASVAASFALVSLCRHLAHRRPQQPTADGLATSSSGGSAEPEELLPLSAVAAAVPTFMYNRLVRHCGKGASWTECAVCLGTIQVGAMVKLLPACSHVYHRDCIDLWLSSRSTCPLCRCRVGPPSETGAGQETARELAQPSPPIR

SEQ ID NO: 9592 - protein, 154 aa, Zea mays
  Clone ID: TF_ZmC12693_1.pep
MGFPPVCCCAPIPKPVVAFCNLLGAIKDAVLLTLAAVGFPHDAARGSADAHQPEEVKTRLPAVEYAQLLAEQQPSPATHAACIVCLDTLEAADEVRRLGNCAHAFHRACIDRWIDLGRTTCPLCRSDLLPSPRGRAGLLGLGRLASRLTRVRVW

SEQ ID NO: 9593 - protein, 119 aa, Zea mays
  unsure (1)..(119): unsure at all Xaa locations
  Clone ID: TF_LIB3066-035-Q1-K1-F7.pep
ICCCLTCIISDLGVHEDLDMNRGATTEAINTLVAYKFQSKRVHDGDVGGDGGGALXVGTDRKRAITRLKALCCICLITFXYYEDLGELSCAHAFHTECIDKWIQMNTLCPVCKAEIMGS

SEQ ID NO: 9594 - protein, 74 aa, Zea mays
  unsure (1)..(74): unsure at all Xaa locations
  Clone ID: TF_5761830.pep
SSPSSGLGAEPTCRVCLEWLEAKXEVRRLGNCTHAFHTRCIDPWIDLGEVTCPLCRSHLLPRRRAGLLGMARLG

SEQ ID NO: 9595 - protein, 540 aa, Zea mays
  Clone ID: TF_ZmC28561_1.pep
MAGHHHNNTHASRMDHVNRFQSEAQPFGPKLFMHSRTDAANGALPSGYVGAPIRPNGIPFSSHTGQSHIQHSDAPGTMLASYSGYPLAGSSSSTYAPHNTHHLPALSYPHRSDDNFILSSHMDDRRVALKRRNPIIYPVDGVNNGSCYAGSSSNPQFPCYMPPNPIPAPEPCPPRITSNMGSSYWTDQPFGSNGGSQRNVRGRHDHNPIHLGHNPGVACATSSTHGPPHHANVIGPQSTAVPQNRAYFSIPPRVTAPGSDGNCSMVFREGTYYSAPQRTNINAPPVLAPPGSSDSLHFVHGGYAPRAAPPNSISTYPAPAFATPNNSVTVTHEPDIPCYRPAVPGYPPATSAAAAAASVHAEGAAASSRHLGHVALGSSGSARSRRLRDSYHAFRPLVIEENNLRGPATERFMMLNQLFIHESREDSDPHWDMRLDIDDMSYEELLALGERIGNVNTGLADEKLSSCVTEIPCCSSARTHDDNESARCVICLEDYKFEDSVGKLKCNHKYHADCIKKWLQVKNACPVCKASAADDGGGTE

SEQ ID NO: 9596 - protein, 246 aa, Zea mays
  Clone ID: TF_ZmC3771_1.pep
MDSVPSPSSSTRATAAPGPCCRFDALRRACARHAAAAARAAGWALGALLTCVFAVVGSLVGIFIGAFMGMSTESGMFRGAGVGAVSGAVFSIEAVESCIEIWRSSHSGKYSILYVLDIISSLFSGRIVWEKVSPALQRAVQSQMSLMSTPFIDNNDLFETGSTGGMSRALIDRIPKMRFSAASNCDKETDSSCCSVCLQDFGAQQFVRALPQCQHIFHVRCIDNWLLRHASCPLCRAGVHIDHIHM

SEQ ID NO: 9597 - protein, 260 aa, Zea mays
  Clone ID: TF_ZmC8011_1.pep
MEAGRMDQPFMAAINSQPFVEDIEPVKKASGDMPATTGSGCFECNICLDFASEPVVTFCGHLYCWPCIYEWLRPGVESAASDNSSSARRQCPVCKATLSTDTLVPLYGRGGNSKKSLDGMAIPRRPMVHRETVEQQNAQSNVNDQHYHQSMEDNSQRQPLLQAHHHPIPTGFDFIYPPAPVGRGLIHSTAGGVLGGMAEIVLPLALRGQMPASLHYTNPYHVATQNVNPRLRRHQMEIERSLHQIWFFLCVFVVLCLLLF

SEQ ID NO: 9598 - protein, 343 aa, Zea mays
  Clone ID: TF_ZmC8011_3.pep
MYFDHYWRLCLLPQPLPQKQAHLNPYRCDWRYPPAPVGRGLIHSTAGGVLGGMAEVVLPWVLRGQLPASLHYTSPYHVAAQNVNPRLMDQPFMAAINSQPFVEDIEPVKKASGDMPATTGSGCFECNICLDFASEPVVTFCGHLYCWPCIYEWLRPGVESAASDNSSSARRQCPVCKATLSTDTLVPLYGRGGNSKKSLDGMAIPRRPMVHRETVEEQQNAQSNVNDQHYHQSMEDNSQRQPLLQAHHHPIPTGFDFIYPPAPVGRGLIHSTAGGVLGGMAEIVLPLALRGQMPASLYYTNPYHAATQNVNPRLRRHQMEIERSLHQIWFFLCVFVVLCLLLF

SEQ ID NO: 9599 - protein, 806 aa, Zea mays
  Clone ID: TF_ZmC219_12.pep
MDIVVGALSGIVDALPGKLGELLEQEYALLSGVRGDVIFLKDELSSMRAAIHYCESLDHHDSQTTGWISLVREVAYDIEDWVDLFSIRVHGGAQSTSGFRAWLSRSVDKLTALPARHTIASELQGLKERVLEISRQRNRYRLGQMVGTTSQHPHDPRLSALFVDPGRLVGFDGKVEDVSKTVMDAGGSNGLRIVSIVGMAGSGKTTLANAVYRRLQADNTFQCSAFVSIGPKPDMVKTVKDMLSRLGDGHRGGEDISQLIPRVRGILEKKRYLAWIDDIWSSEQWGVIRCCFPDNSLGSRIITTSRNDALPTNHHYGSSKFVYKIGLLTDNEARELFLKKAFSSRNDCPQHLVDAFTKVLRRCAGLPLAVVSVAAKLAHKQSREEWEKHGLNLLYSSHSDGSDGLKQILHLSYSDLQPQLRSCLLYLSIFPENSEVETDRLVRRWIAEGLIAASNEDTAISSLNELIGRNLVQPLDLNHDSIPRCCRVHPVIYDFIVCMSMQDNFATVTDAQHVPINNKTVRRLSLNLKSNSKQDQPAARNETTDLSHARSVTVFGHASATPHLTDLKVVRVLDLEGCKGPVCLDGLCKLVLLRYLSLRGTDVSELPAAIGDLRCLETLDVRSTKVEELPPSIVRLQKLMHLLAGSAKLPDGMDKMKALRSLSCAATTKSSANVVEELSKHHNLRQLELYYYATETPGNEKQIKFPADGLQTVKQLCIRCTSPSVTFEPRVLPKVQALVLRFEKGRADDTIGVSGLEHLSSLKHLVLEFEQHDAGAMATVTAVRMAAEGLHLDHQYITLKVDGKKY

SEQ ID NO: 9600 - protein, 276 aa, Zea mays
  unsure (1)..(276): unsure at all Xaa locations
  Clone ID: TF_ZmC748101_1.pep
MSASPENVVAGGSGPPVAWWSAASPVGGDVVLCSVALLFVALALAFVLYXTPRPRSVAAAAARGWGAAPTSAQQHQQHGTLGRGRDATGGLDPSVLRALPVTVYEAKDDHRAGEALECAVCLAELADGEPARFLPRCAHGFHAECIDQWLRGHSTCPLCRVDVGLLPAPAPAAVLGPXPALPAPATYPTDLPTNVLFWGSQGAVTVARAAVRSGPSAPRGAPPPLVIHVRETAPAPPPPPPPREGGAAKAQGLARLSSLRRLWSRGRHDDAAAATT

SEQ ID NO: 9601 - protein, 215 aa, Zea mays
  Clone ID: TF_ZmC18438_1.pep
MSRKATQEMMCMVCLKIQPVGPFCQTPSCNRLSMAKYYCNICKFFDDERTVYHCPFCNLCRLGKGLGVDFFHCMKCNCCLGMKLTEHKCREKGLETNCPICCDFLFTSSAAVRALPCGHFMHSACFQAYTCSHYTCPICCKSLGDMAVYFGMLDALLAAEELPEEYRDRCQDILCNDCERKGRCRFHWLYHKCGSCGSYNTRVIKTDTADCSTPN

SEQ ID NO: 9602 - protein, 183 aa, Zea mays
  unsure (1)..(183): unsure at all Xaa locations
  Clone ID: TF_LIB4570-011-R1-K1-B7.pep
MSANVGESTSGVSSSDAAGGSFECNICFELPQEPIVTLCGHLFCWPCLYRWLHIHAHSPECPVYKALVEEDKLVPLYGRGKDRVDPRSKNMPEGEIPHRPTGQRPATAGNXAFSAAFGGLFPMLSFQVHGXFPDAAAYAQPAGFHYGYGHGHGHGGXHGGHMGTAQAHGRXPTGTGWGNNSSR

SEQ ID NO: 9603 - protein, 189 aa, Zea mays
  Clone ID: TF_ZmC26341_1.pep
MGFPSVCYCVILPQPLILVLQLLDFLRHAVLLCLSSLGLAAPPAADDHPAYAYAAPPPPPSDLWALQPSSLQQQQQQAAAAALAPPPTPAAIKARLPAVRYADLLGARRAPPGPAVCAVCLGALQARHRVRELGNCAHAFHKACIDKWVDKGQATCPLCRAFLLPGLSAGDGDGDGDGELASSSFPFSF

SEQ ID NO: 9604 - protein, 163 aa, Zea mays
  Clone ID: TF_ZmC26341_2.pep
MGFPSVCYCVILPQPLILVLQLLDFLRHAVLLCLSSLGLAAPPAADDHAAYAYAAALAPTTTPAAIKARLPAVRYADLLGARRAPPGPAVCAVCLGALQARHRVRELGNCAHAFHKACIDKWVDKGQATCPLCRAFLLPGLSAGDGDGDGDGELASSSFPFSF

SEQ ID NO: 9605 - protein, 494 aa, Zea mays
  Clone ID: TF_ZmC12362_1.pep
MPAQKRPLPSSASPGSDADVEEAPGADADGCGGADQRSPKVTLNGVEERDGGPLQAKDQRHDSDADDEEEGDREGGGGGDGSGSGGDDDCDSQSSQSDGVMDEFTLVKLVDVRKEVQCPICLGIIRKTRTVMECLHRFCRDCIDKSMRLGNNECPACRTHCASRRSLRDDPNYDALILALYPDIDKYEEEELAFSEEERTRNKRIQESIAETFRRQTEALVKKRSTVKATDAASTRKTRRNMRPRRRGRISSPDIAPTDFDDDDREENGDDGSKESSSVDDHSPDVRPKRSRRWPMPRRSPAKAIGNTDNSIEDNDDSGGARDFMTASPLRGEMLAWGKNGTRSQTRHGNSSGSSGRMGRSGRVAKLVDQFRNADDFDNELNLYLVLLPLDGQSVPKLEKPYLSCLPTLSVRHLCQFVALQLSRQPKEVEIYIRKSKDACLSANYTCKYETKPEQPNGLERLWEEKSLSDLYPSLATRQGDLELLYSLKAQGQG

SEQ ID NO: 9606 - protein, 174 aa, Zea mays
  Clone ID: TF_ZmC147852_1.pep
LPLGAPQRGRLLRVFHHVRQLLPHFSPTTADERRIKSLPSAQYLAGAGAGASSRGSGASRECAVCLLEFADGDELRTLPLCAHAFHADCIDVWLRAHASCPLCRAAVALPPPVPSPPQRAARRTRPSLDDLLFFHPVPQPLTAAAEIAPASPDQQLAAGARDFLLKRRTRGRTG

SEQ ID NO: 9607 - protein, 457 aa, Zea mays
  Clone ID: TF_ZmC2185_1.pep
MAAPTSDATSGGGVEGRGGRPPLPSRGACRPRLTDPEPQGGLEDDSDTEGDGGADGDSESSQSDGGGTDEFMLVKLAEIRKEVQCPICLGIIRKTRTVMECLHRFCRDCIDKSMRLGNNECPACRTHCASRRSLRDDPNYDALIAALYPDIDKYEEEEFAFSEQERIRNKKIQETIEETFRRQSDAIGKKRSMAKATATAFARKYRRTRGRVRTIPPDIAPTGSSEEESGEGNSKETIREQSSADDHSPDLRQKRCRKRSGPQGSPAGTIGSIDYSFEENDELVGGKEILATSPLQGEMLAWGKNGARSQNRHGSVGSNGRTGRSGRIAKLVDYLHTADEMDKEFQLFLLLLPVDGQTIPNLEKPYLSCRPTLSIKHLAQFVALQLSCEVEELEMYIRMDRHRVSVGSRPSSTGEAKSRPFDDLERLNEEKLVSELHPSFVSSNGDMELRYALRTRE

SEQ ID NO: 9608 - protein, 143 aa, Zea mays
  Clone ID: TF_ZmC341_33.pep
FCVALACIIGIAVCCCLPCIIAILYAVSDQEGASEDDIRQIPRYKFRRTDEPEKQDVDPMGPFGGIMIECGTNQPIEKVLAAEDAECCICLSAYDDSAELRELPCGHHFHCTCIDKWLHINATCPLCKYNIRKSSSSSGSEEV

SEQ ID NO: 9609 - protein, 382 aa, Zea mays
  Clone ID: TF_ZmC341_57.pep
MATPRSPSPSAAARLDSAPLLGGASGGGSRRRGGALRRPSLRGAARLLRRGGRRAMREPSVLVREAAAEHLEERQADWAYSRPVVALDLLWNLAFITVAAVVLVLSRDEDSPMPLRTWVAGYALQCVVHMICVAIEYRMRHGQRGGAGAGAAPADVERGSDASSSSSDEDDRELDLHGRRTDYASIAKHLESANTMFSFIWWIIGFYWISAGGEEVIRDAPQLYWLCIVFLAFDVFFVVFCVALACIIGIAVCCCLPCIIAILYAVSDQEGASEDDIRQIPRYKFRRTDEPEKQDVDPMGPFGGIMIECGTNQPIEKVLAAEDAECCICLSAYDDSAELRELPCGHHFHCTCIDKWLHINATCPLCKYNIRKSSSSSGSEEV

SEQ ID NO: 9610 - protein, 387 aa, Zea mays
  Clone ID: TF_ZmC341_66.pep
SLTEFLSMATPRSPSPRAEAPLDSAPLLGGASGGGSRRRGGALRRPSLRGAARLLRRGGRRAMREPSVLVREAAAEHLEERQADWAYSRPVVALDLLWNLAFITVAAVVLVLSRDEDSPMPLRTWVAGYALQCVIHMVCVAIEYRMRHGQRGGAGAAPADEERGSDGSSSSSDEDDRELDRHGRRTDYASIAKHLESANTMFSFIWWIIGFYWISAGGEEVIRDAPQLYWLCIVFLAFDVFFVVFCVALACIIGIAVCCCLPCIIAILYAVSDQEGASEDDIRQIPRYKFRRTDEPEKQDVDPMGPFGGIMTECGTNQPIEKVLAAEDAECCICLSAYDDGAELRELPCGHHFHCTCIDKWLHINATCPLCKYNIRKSNSSSGSEEV

SEQ ID NO: 9611 - protein, 479 aa, Zea mays
  unsure (1)..(479): unsure at all Xaa locations
  Clone ID: TF_ZmC6308_1.pep
MTSPGGVFSAALVAEDFPWVDMEEEMGMAPDMYREVFDLAQRGTRAFRDRLFDEAISCYTKAQNLRPDPIILGNRSLTFCRLSQLLRERSAADSEYQPLNGLDPTTHAELALKDAEKILSINSNSPRPYILKAYALFLMEHYHEARETLLAGLQVDPLSHVLQTCLNDLDRNTNIAAGARRARLARIDDFECTLCFKLLYEPVTTPCGHSFCRSCLHQSMDHGNKCPMCRTVLFIGPRTCPISVTLSNIIQKASSGFWGFLSGXFKSSDLLYGDAILLVYFYLIMDVIWFGKYPFGSGFEDGERXVQMEFSDIRMVAIDSATGTVAGCGCEVEISMCETLSDMRFXLXVEGTRRFRIVRSWARVGDRVAEVEWLKDLPLPQGSQGRRELMELANGASQLARAYIRHARDTVRTARRTRHLDLEGMPGPQDPEKFSFWLANLISLRPSDRLDTLRLRDTRERISSSISLLRDSEQGCRVQ

SEQ ID NO: 9612 - protein, 177 aa, Zea mays
  Clone ID: TF_LIB4764-057-R1-K1-C6.pep
GTLEAGRHFFVLPFVPVLLFYYVVLSSEHVVMVDRCSVCLAEYEPDERLQKIPPCGHTFHINCIDHWLSTNTTCPLCRVSLLPAPKATSTGLDLEAQTAVEEESPNAHHRQEEGLVDANTPQEGEAAGGDGSSSVQVEELHGDAAEPLAVTVVAVAAPQADAEGSPSTACQTVKGKK

SEQ ID NO: 9613 - protein, 240 aa, Zea mays
  Clone ID: TF_ZmC2248_1.pep
MSCTSPDPPDYCSAESPELKLYQAFIFSVPVFFTFVLLLFFYLFYLRRRRANWQSLRMRTNNLIRGDNARLECGLKKEMREMLPVVIFKESFLIRETQCSVCLAEYEPDERLQKIPPCGHTFHINCIDHWLSTNTTCPLCRVSLLPAPKATSTGLDLEAQTVVEEESPNAHHRQEEGLVDANTPQEGEAAGGDGASSVQIEEPHRDAAEPLVVTVVAVAAPQADAEGSPSTACQTVKGKK

SEQ ID NO: 9614 - protein, 169 aa, Zea mays
  Clone ID: TF_ZmC208303_1.pep
IAVLLPTTAAAPAPKGGLDPAAIAALPTTLYRNDAAEAGAGSDECTICLGAVQDGEVVRALPACGHVFHVPCVDTWLASSSSCPVCRAEVEPPPPTAVGSARFVQEKVQDAVKQEAGSSTPDRGIGACASLIKMLSRERPAPRRPQGAYADAGDLDDLERQQYAVAVNN

SEQ ID NO: 9615 - protein, 142 aa, Zea mays
  unsure (1)..(142): unsure at all Xaa locations
  Clone ID: TF_ZmC50086_4.pep
EGAECXVCKEDFSPGEVAKQMPCKHIYHTDCIVPWLELHNSCPICRFELPTDDPDYEGRKGTNPQPAVGVAAAASGSSTAAEGQMEERQENPRVVERRFNVSLPWPFSGLGGQTSQQNGNSGGSGSNSQGNAQDGDPPSNKN

SEQ ID NO: 9616 - protein, 279 aa, Zea mays
  Clone ID: TF_ZmC628035_1.pep
MGPINGRRRRRLLLLAAVALAGAAVDAQPDYFNPKNFNPSMAIVMVVLVTAFFLLGFFSIYLRRCAGPPLGGPDDHYHVRQLGLGLGNNSYAPPPSRRMRGLDRAVLDSFPTMAYADVRAHKGALECAVCLSEFDDGDTLRLLPRCAHAFHTDCIDAWLASHVTCPVCRAILLVPDAAEPTALAAAPVTAAPDDDHAVVVDAAAAAGETEDQRLMEGGGRRAAADRQRQARAAKQQVAVPALAHHGALNFRRVAAWLRSSFTPSGRVLYSFFLQQKACT

SEQ ID NO: 9617 - protein, 186 aa, Zea mays
  Clone ID: TF_ZmC146415_1.pep
MGAGDGNGTRPKANEVTISCDEGPGHAFPFPKPHAPDPDPPQASDPANYAVAGKILLAAAGAFAGVLLALVALHLYSSTRRRRLGAGQPRLLRSLAIAGGDEDRRDGDGDGAGAPSPRGLDYAVLAAIPVVSIEAGAGAGDCAVCLAELESGEKARALPRCGHRFHVECIDAWFRGNATCPLCRAD

SEQ ID NO: 9618 - protein, 229 aa, Zea mays
  unsure (1)..(229): unsure at all Xaa locations
  Clone ID: TF_ZmC7896_6.pep
LGTSRPAGTTFFFLRTRSFVREGAPSCPHIRSSLPDTDRPLVRSPPSPIPTAMAAAAAAASSSSSSGVPIAARTCVSVGEVAVGAVATGSGDRVAADCGVCAICLDRIALQETALVKGCDHAYCVTCILRWASYKENPLCPQCKHPFEFLSVHRSLDGCLHDYLFEESVCLLLRAAWFEPLIVEAHEEALEEEEFLHQQYQYDDDEDDLDEESYYMNRXSPSIRIGNRR

SEQ ID NO: 9619 - protein, 224 aa, Zea mays
  Clone ID: TF_ZmC3507_2.pep
MKGATNMTKRERRTTKRNWSTTSASTTTSTPRAMVRERAGEGEGAEGSDYDEEFEEDEEGEPEVDPAEFEDDEAYARALQDAEEREVAARLMALAGLSDWRTVEVEHEEDHANDPQEAWQEVDPDEYSYEELVALGEVVGTENRGLSADTLGSLPSVTYKLQHVQDGNTEQCVICRVELEEGESLIALPCKHLYHPECINQWLQINKVCPMCSAEVSTSGNKEP

SEQ ID NO: 9620 - protein, 118 aa, Zea mays
  Clone ID: TF_ZmC3507_4.pep
HEEDHVNDPQEAWQEVDPDEYSYEELVALGEVVGTENRGLSADALASLPSVTYKMQSVQDGNTEQCVICRVELEEGESLIALPCKHLYHPECINQWLQINKVCPMCSAEVSTSSNKEP

SEQ ID NO: 9621 - protein, 178 aa, Zea mays
  Clone ID: TF_ZmC420590_1.pep
MSMGTPTSWLFASDNSRYSTRARLLFMGLSFAIGILTFLLYLAIWYLCSRRRQLRRRQRGELFAPGVGDTDGDHGMSADAIAALPTFVHGAEAPALDCPVCLGQVEAGEKVRRLPKCAHSFHADCVDAWLRAHSTCPMCRAAVGTAAAATATKQQAEVAAVVVVVPVPSPPAEALPPV

SEQ ID NO: 9622 - protein, 212 aa, Zea mays
  Clone ID: TF_LIB4828-050-R1-N1-D2.pep
MGSSRPAGGCPYPPNWFAKHSSLVPMETTLPMVRGNGRLLPLSLLLLAAADFTTVHGQGQQPEGPYYSRSFNPSMAIVIVVLIAAFFFLGFFSVYVRHCYGDGSSGYSASPAPGGAAARSRRQQRGLDSAVLESFPTMAYADVKAHKAGKGALECAVCLSEFDDDETLRLLPKCSHVFHPDCIDTWLASHVTCPVCREASRLIAVDAEERPD

SEQ ID NO: 9623 - protein, 257 aa, Zea mays
  Clone ID: TF_ZmC6833_1.pep
RGRLLRAVWSRQPPWHRRVRGAGGGGLTGRRDEPSSVVRGDGRRGLGLPLIRMLPVVKFTAASCDAGAGAGGVAPRISVSECAVCLSEFVERERVRLLPNCSHAFHIDCIDTWLQGSARCPFCRSDVTLPAIPSARRAPAAAAAVLPTSRRRDDALASESIVIEVRGERERWFSSSHGTTTTTPRRQPPKQPAPRCSKAAESVGDEAIDTRKTDAEFAVQPLRRSVSLDSSCGKHLYVSIQELLATQRWDDGDVGRP

SEQ ID NO: 9624 - protein, 212 aa, Zea mays
  Clone ID: TF_ZmC6833_2.pep
QRPRPRGVVKFTAASCDAGAGAGAGGVAPRISVSECAVCLSEFVERERVRLLPNCSHAFHIDCIDTWLQGSARCPFCRSDVTLPAIPSARRAPAAAAPVLPTSRRRDDALASESIVIEVRGERERWFSSSHGTTTTPRRQPPKQQPPLPRCSKAAESVGDEAIDTRKTDAEFAVQPLRRSVSLDSSCGKHLYVSIQELLATQRQVRDPSVRS

SEQ ID NO: 9625 - protein, 130 aa, Zea mays
  Clone ID: TF_ZmC3313_1.pep
RRRTASSPLRSRLSCAPSPPPSSRATSSAPRHACVVLVGAAVVCRYRKEEAWNESTCPVCLADFDDGEVVRVLPECMHYFHADCIDTWLRGSTSCPMCRAETTPTPTPSPASVRHHLELSVSLEEILVAT

SEQ ID NO: 9626 - protein, 173 aa, Zea mays
  Clone ID: TF_ZmC4566_1.pep
MHSGARKLMWGTSPDRPDDHDVVIVLASLLCALITVLGIGLVARCACARGPSAQAAAAANRGVKKSVLRRIPTVPYAACSQGEGDDADECAICLAEFEEGEPTRVLPQCGHAFHAACVDRWLRAHSSCPSCRRILSLQLPPGERCRRCGARPLDDGDAGWKPTYYSAMPPFLA

SEQ ID NO: 9627 - protein, 308 aa, Zea mays
  Clone ID: TF_ZmC364867_1.pep
MDGGRPEMRRTMTLSEQLSSTPDPAIRDFLKIPQDADVGGILHDEDSPSAVDAQGPRAGRTSGWKPLRDRLRLRRAAGAWQTPPNKPGAAAAHAPTNSGNLSNRYNYNPGEAAAAFSRTFSRAPSLRAPSLRATPTFSRVASTRLGPASSRSSSRRPATYDFRDLDERRHDADADDGGEEEDDEGEGEDDDDEGDEEDEKEEAPAAQMSLMALLEQTDSQWDDDEDEEESGGGGGARKKGEGDDDEDDGEGREEEMVHVCCVCMVRHKGAAFIPCGHTFCRLCSRELWVSRGNCPLCNGFIQEILDIF

SEQ ID NO: 9628 - protein, 157 aa, Zea mays
  Clone ID: TF_LIB5026-037-Q1-XP1-B12.pep
PAGSRESSKPQALKETQESPRDPKRGGEIEMADVGSLERMGRELKCPICLSLLTSAVSITCNHIFCNACLTESKKSASCCPVCKVPFHRREIRPAPHMDNLVAVFKSMEAAAGISVVSTQLTPAPKAAECGEYTAGKPRRSNKKKLASEKKKKKRPL

SEQ ID NO: 9629 - protein, 115 aa, Zea mays
  Clone ID: TF_LIB4744-093-A1-K1-F1.pep
MSDLLSYISKVMCIKARSEATQAGEDSGCPADECRVCLSKIRLGEATRRLPCRHVFHRDCVDRWLSSCKRTCPLCRVYVADGNKQPVAAKHTSREAQALADDLVIWFSTVLVPGF

SEQ ID NO: 9630 - protein, 111 aa, Zea mays
  Clone ID: TF_ZmC28409_2.pep
HTQGAWEDVDPDEYSYEELIALGEVVGTESKGLAADTIASLPWVTYQAQDKQDGNMEQCAICRVEFDEGESLVALPCKHPYHFECINQWLQLNKVCPMCSAEVPTFVNKQA

SEQ ID NO: 9631 - protein, 115 aa, Zea mays
  Clone ID: TF_ZmC592_1.pep
MSDLLSYISKVMCIKARSEATQAGEDGGCPADECRVCLSKIRLGEATRRLPCRHVFHRDCVDRWLSSCKRTCPLCRVYVADGNKQPVAAKHTSREAQALADDLVIWFSTVLVPGF

SEQ ID NO: 9632 - protein, 115 aa, Zea mays; identical to SEQ ID NO: 9629
  Clone ID: TF_ZmC592_2.pep

SEQ ID NO: 9633 - protein, 333 aa, Zea mays
  Clone ID: TF_ZmC8390_2.pep
MAMPSSRSPAPPPTASSSYWCYMCDRFVRAAASSSSSPTSPSSSSPACPSCGGGFLEEMGAPPPRARRPRRAARRGADSRASPFNPVIVLRRSPPADADADGSSSPAAATGSSFELFYDDGAGSRGRPLPESMSDFLMGSGFERLLEQLAQMEAGGGLAARARDAPPASKAAVDSMPALRVGAAHVAADAHCAVCKEAFELGAEAREMPCAHIYHADCILPWLALRNSCPVCRHEMPADNAAPRAAAAAAADEDARVGLTIWRLPGGGFAVGRFAGGPRPDERELPVVYTEMESGFNFNSGHAPRRISWGARQAAATDRGTVRRFLRSVFACF

SEQ ID NO: 9634 - protein, 139 aa, Zea mays
  Clone ID: TF_LIB4172-009-Q1-L1-C10.pep
MEAAWRKAKRALGSSLCVHHPAVAGDREDGASERRASDALSLDTTAAAHASTPNAPAPPEAGALRRSKSGGKSTNRMCAICFDSMKPGRGQALFTAECSHMFHFHCISSSVKHGNHVCPVCRAKWKEIPFNRSLSSIVP

SEQ ID NO: 9635 - protein, 343 aa, Zea mays
  Clone ID: TF_ZmC299_2.pep
MRLGTAMPDLPCDGDGVCMVCRVASPPEVDLLTCSTCTTPWHSPCLSKPVLSGDPETDKQIRRATKRAHLSVAERLLKEFGCSICRAVIKEPLTTPCAHNFCKTCLLGAYDSQSSMRERSRGGRTLRAQKIVKTCPSCPTDICDFLENPQINREMMELIESLQRKAVEEGKMAAGDAEESGDGDSEENGGALVKGEDDSNLNEEGQDGVDADGSVKIVVEMEGAKDDKKSKMGAAEVVDVLVEDAAAKQPKKRTADEDAAAKQTKHKADAETGGKRVKSSAAVEEVDVCVTPMKRTRKSGDMHDDGNGSPAVSSGRRVTRSSVNATGADDSPARRTRSRGRAC

SEQ ID NO: 9636 - protein, 174 aa, Zea mays
  Clone ID: TF_ZmC8696_1.pep
MAAQEAAAGGGSPQVVMRWRYGDVGDSNFAVHGRAVPLLVGLLCAVVFFVALCLYLRWRCHRHAPDDPEADASSPSSAAAASLPGLDADAIRGLPVTLYRPPASPRLRGEAGDDDPAAALCSICISALVAGEKVKVLPPCGHCFHPDCVDAWLRSQPSCPLCRCLLAAAAKDAV

SEQ ID NO: 9637 - protein, 137 aa, Zea mays
  Clone ID: TF_LIB4738-004-R1-K1-A5.pep
LGIERTRTGLEPLVIAAIPTMKYNCEAFNSKDDVQCSICLGEYREKEILRIIPTCRHSFHLACLDLWLEKQTTCPICRVSLEELQAAMPSVCSISNSRPSPTPTPTQRILITQHLSVSNLLVNIPEIKIIARRRTNQ

SEQ ID NO: 9638 - protein, 321 aa, Zea mays
  Clone ID: TF_ZmC188828_1.pep
REAIAPIPRPPADWRGLGCAAAAQAHAPAAAVEAARPTADWRRLGCAAGAAPAVQAQAPRRSEEWRVRRRRNERERRKARAGGVSGGGGASAGMGVGGDVWCTPGIPFAAEASSVDCVVAPHHTVAARRRAEADRPRRERPGAPPARRVTMREHMSSSPLSSPPHHVMPFVDVDRAPSGRIRHVSGRRHSHARVEEEMMFQTRMLLGRMGIYDQYQDWRLDVDNMTYEELLDLEDRIGYVSTGLREDEIIQSLRMVKYSAFNPRHFSTEMDRRCSICQEEFEVHEETGKLSCGHSYHVHCIKQWLSRKNACPVCKTTVSKT

SEQ ID NO: 9639 - protein, 88 aa, Zea mays
  Clone ID: TF_ZmC188828_2.pep
RSRNPRVSTGLREDEIIQSLRMVKYSAFNPRHFSTEMDRRCSICQEEFEVHEETGKLSCGHSYHVHCIKQWLSRKNACPVCKTTVSKT

SEQ ID NO: 9640 - protein, 198 aa, Zea mays
  Clone ID: TF_ZmC366351_1.pep
MFGSGLNLVSAALGFGMTAAFAAFVCVRFICCRERRGDTRAPPSPDFAAELDGPIERTRTGLEPLVIAAIPTMKYNCEAFNSKDDVQCSICLGEYREKEILRIIPTCRHSFHLACLDLWLEKQTTCPICRVSLEELQAAMPSVCSIQQLPPEPDPDPDPENSDNPAPQCFQPARQHPRDQNNSQETHESVEVIIEIRR

SEQ ID NO: 9641 - protein, 310 aa, Zea mays
  Clone ID: TF_ZmC4447_6.pep
MDAGRGSSATIFPVPQVPALALLFPPPPPAAAALPSSSLSLSSSSSSRHAPSITSFPILVLTVLGILAACVLILAYYVFVIRCCLTWHRDRSASDAVSRRPQRARARVRTSTGGTPASSAEPRGLEDAVIRALPAFTYRKKPADLPPSAPAPASECAVCLGEFEEGDSVRMLPACLHVFHVGCVDAWLQGNASCPLCRARADVDAASCCRLLPPPPPEEEEDVAAIQVVVVVPGAEEDDRQGTVPQRQRETTVAPAAAAEVEGEDPPQVGGEKERRKDGDVAPRTRSFSTDGDGGEEVQSILQRNGQGLP

SEQ ID NO: 9642 - protein, 154 aa, Zea mays
  Clone ID: TF_ZmC54317_2.pep
MLMGFPVGYSETPKLLLHLLFLLDHLRRLSSWLLRLAGAADADADTDAGHPRHPCAAAQRLEEHSPALRFDSLSCGSGGGVTAPRPLPEGCCVCLGDFHAAAEVRRARGCRHVFHRACLDRWAAHGHRTCPLCRTPLLPPLPLPLPLPLPLPPS

SEQ ID NO: 9643 - protein, 249 aa, Zea mays
  Clone ID: TF_ZmC25614_1.pep
MYLLGNKSGKKKVYVDYMNVPLPYAIEENYGGRFFDDDDDLAQVLQDQEILYHLIQGSNGGGSSRTHSIPSSSYGHDRTSNAQKLSGDVNCECELQLAVDEALARELHEMESKLANTSLNDNNGRKTTSSSAFDRGNNSASRPPQVLEEDVIDPDNMTYEELQQLGEAIGTQSKGLPESVIALLPTSTYKTGIFSRKEKHDECVICCMAYKNRDRLTKLPCGHHYHQACVAKWLQINKVCPVCNKEVFS

SEQ ID NO: 9644 - protein, 101 aa, Zea mays
  Clone ID: TF_cC-zmle18900088d08a1.pep
DIDGMSYEELLALGERIGTVKTGLSDDALSTCLNRSLYMPTAPGSHEDCETKCSICQEEYLSGEDVGKMACKHYYHLSCIEHWLRQKNRCPICKSVALKTK

SEQ ID NO: 9645 - protein, 230 aa, Zea mays
  Clone ID: TF_ZmC47563_1.pep
MDLSPSSSAPSAPPVPCEWSGAGLGSAACGLACRVLCAVATCVFAAVGSLVGAVTGSMVGLATESGMLRGAGIGAISGAVFSIEVAESSRDLWHSGDSGVWTLLYMVDIISSLLSGRLVREKVGPAVQSAVQSQISAISSPFEETSDLFETGSVRGLPEAAVRRLPETVVAEDGAVDAAGQALCCSVCLQDFRVGDRARRLPGCRHLFHVPCIDCWLLRHGSCPLCRRDI

SEQ ID NO: 9646 - protein, 129 aa, Zea mays
  Clone ID: TF_ZmC47563_3.pep
VPATQERSSWSASACCKHVTDLFLPSVCRGRTQISAISSPFEETSDLFETGSVRGLPEAAVRRLPETVVAEDGAVDAAGQALCCSVCLQDFRVGDRARRLPGCRHLFHVPCIDCWLLRHGSCPLCRRDI

SEQ ID NO: 9647 - protein, 228 aa, Zea mays
  Clone ID: TF_ZmC10261_5.pep
PAFRRSLSSAAISHSTCSCVPLQHRGNSFSSHEIRNHQPGSRFRPPATLPGSSTAACASATSGSPATSGASPTAIASREGGRPMSEIRNVFDQIRQGRNARLEDLLLIDRSLIMRRANLIDRHRDMRLDVDNMSYEELLALGERIGYVNTGLSEEKILSNLKQRKYVLISLEDPPTGVEPCCICQEDYAEGEDLGRLDCGHDFHTACIKQWLVIKNVCPICKKTALDA

SEQ ID NO: 9648 - protein, 206 aa, Zea mays
  Clone ID: TF_ZmC22858_2.pep
MDRRDSSEAPGPAVNGTGGVGGAGAAAPGVVDATFDTNTVILLAALFLALLLAIALNSLARFALWCGGRAAAGGGEVAASPSVAASSCAGVRGGIKKRALRSIPVEVYVGGDAKDDEEEGAGSGDVCAICLGEFADGEKVRVLPRCGHAFHVPCVDAWLLSRGSCPTCRRPVMDAKPASASATGGRGVAQQSARRPDSDTVAVVIA

SEQ ID NO: 9649 - protein, 85 aa, Zea mays
  Clone ID: TF_ZmC2009_1.pep
MVDTPKVNTFKWIQVPPEPVKEVPKEPKLSCPICMNEITEAASTVCGHIFCQPCIKAAIKAQKKCPTCRRKLTPRQQHRVYLPSP

SEQ ID NO: 9650 - protein, 222 aa, Zea mays
  Clone ID: TF_ZmC21544_1.pep
MELAEAPAPVPDEDGLDERGVALHLPRLLAGVVSGALTGIFALAGALTGAVTGAVAGRASDSGGVLRGAGLGAVAGAVLSIEVLEASRAYWCSSDRLGSHGGASSMADFIEQLLRARFVQEQLTASGYASYRWQDDLYDIFGDISSEGLSQESLKKLPHHVVSDHQTRDLLGEILCCPICLQDIVAGETARRLPGCSHAFHQPCVDRWLVGHGSCPVCRQRV

SEQ ID NO: 9651 - protein, 230 aa, Zea mays
  Clone ID: TF_ZmC21544_2.pep
MELAEAPAPVPDEDGLDERGVALHLPRLLAGVVSGALTGLFALAGALTGAVTGAVAGRASDSGGVLRGAGLGAVAGAVLSIEVLEASRAYWCSSDRLGSHGGASSMADFIEQLLRARFVQEQFTASGYASYRWQLSISYFGQDDLYDIFGDISSEGLSQESLKKLPHHVVSDHQTRDLLGEILCCPICLQDIVAGETARRLPGCSHAFHQPCVDRWLVGHGSCPVCRQRV

SEQ ID NO: 9652 - protein, 203 aa, Zea mays
  Clone ID: TF_ZmC21544_7.pep
MALCGACVHVPRTSACKAGALTGAVTGAVAGRASDSGGVLRGAGLGAVAGAILSIEVLEASRAYWCSSDRLGSHGGASSMADFIEQLLRARFVQEQFTASGYASYRWQLSISYFGQDDLYDIFGDISSEGLSQESLKKLPHHVVSDQTRDLLGEILCCPICLQDIVAGETARRLPGCSHAFHQPCVDRWLVGHGSCPVCRQRV

SEQ ID NO: 9653 - protein, 261 aa, Zea mays
  Clone ID: TF_ZmC8011_2.pep
MEAGRMDQPCMASINSQPFVADTEPVKKASGDMPAAPTGSGCFDCNICLDFAAEPVVTLCGHLYCWPCIYEWLRPGVESTASDNGSSARRQCPVCKATLSPDTLVPLYGRGGNSKKSLDGMAIPRRPMVHREAVEQQNARSNVNDQHYHQSTGDSPQHQPLMQAHHHPVPPGFDFIYPPAPVGRGLIHSTAGGVLGGMAEVVLPWVLRGQLPASLHYTSPYHVAAQNVNPRLRRHQMEIERSLHQIWFFLFVFVLLCLLLF

SEQ ID NO: 9654 - protein, 250 aa, Zea mays
  Clone ID: TF_ZmC886_2.pep
RHPQRTHRSSPSPVVTTMGDEMSDGRRADGSYGPEYGPVPREFQHAWYPQLPSRTRRRSPWPLHHGDYPWRLSEHRFRRPPFERSSSWHPLQPPFHIHRVHGSSGSGAPLNPRHRRGDAGLTNEEFREAMDQLRKDEYRQQQKHGGGGRGNLRTGKETSEEEKVCTICLETFLPGEQVAVTPCNHTFHQGCIAPWVQGHGSCPVCRFALCERSVADEDGGGMDLDLLAMVMAMEEAFSRFRFSDSTQHYH

SEQ ID NO: 9655 - protein, 180 aa, Zea mays
  Clone ID: TF_LIB4746-060-Q1-K1-B7.pep
MATPAPAGAAMPELAPGQGREAKHGRAGGGPRQSAGARLLSLSVQAAVMAATLAVLLVFAAASALLLLVLVLAARAFRHHRVTSLDLAPSSPPPPLRAGLSPVDIRRLPSFAFPSTRGGAGDDTAAASPSCVVCLDAARGGERWRAMPACTHAFHAACVDRWVARTPVCPVCRAAVAVPI

SEQ ID NO: 9656 - protein, 392 aa, Zea mays
  Clone ID: TF_ZmC38662_1.pep
SRPAGFEPLDSNEFFEPLSIAFDTLQSTMVHGFQLFDIWQRHLMESGADFLDLQKSYKQAAGSFSEWRGKLTRDFGFAIDLISLLMSLGHYSMIFWLRGMAFHLVDAVLLLNSRALIVSFLKRIKAHIKLRKALSSLDGALPDATYDEICAYDDECAICRGPMGRAKKLSCNHLFHLACLRSWLDQGLMEGYSCPTCRRPLLLSSEGQRRSTTAEVANVQRIAEQLTMGMNQQRVPGNEHPVEQQNPSDAVWRGAGLDASWIPPWSSPVMDHPSSSSAVRSVGLTGVQMMMTQLASVTDNYGHADGTWNLWPEPMAGSSLVPSTSSISGTASASGLRLRGSAGISNGSLSEVLTMVDRVREVLPHIPDELILEDLMRTNNINATVNNLLLMQ

SEQ ID NO: 9657 - protein, 199 aa, Zea mays
  Clone ID: TF_ZmC12601_1.pep
MASANNDNREAAGILRLLMGMAAAAPASALPRGGGGGGGGGLMVVQHVILDVDGELFSGGVGGGGVPPASKAAIAALKEVKAGEGEGEGEDALGECAICLDAVEGTGKEMPCGHRFHGRCLERWLGVHGNCPVCRRELPAPAKEEEEDSAASAEGGEEERRRPRAAVVVSYLVFGGGRAEAQQEPEREEPWNIRIEDVD

SEQ ID NO: 9658 - protein, 375 aa, Zea mays
  Clone ID: TF_ZmC3294_1.pep
MATLRSPSPRGDVLLDSAPLLGGVGRRRAGALRRPSLRGAARLLRRGGRRAMREPSLLVREAAAEQLEERQADWAYSRPVVALDFLWNLAFILVSAVVLVLSHHESPSMPLRFWIAGYTAQCVVHMVCVAIEYRLRYGQLGGSPIPVDEESGSGSASSSSSDDDREHGSHSRSGDCLSIAKHLESANTMFSFVWWIIGFYWVSAGGEVLTRDAPQLYWLCIVFLAFDVFFVVFCVALACIIGIAVCCCLPCIIAILYAVSDQEGASEDDIRQIPKYKFRKMEEPEKQSVGVPGSSGGIMIECGTNQPIEKVLAAEDAECCICLSAYDDGAELRELPCGHHFHCVCIDKWLHINATCPLCKYNVRKNSSSSGSEEV

SEQ ID NO: 9659 - protein, 218 aa, Zea mays
  Clone ID: TF_ZmC3532_1.pep
MEVPPLPTASEGERRSVATGSCLPRLVSGVLSGALTGIFAVAGGLTGAFTGALAGRASDSGVLRGAGLGAFAGAVLSIEVLEASRAYWSADRSSPQSTSSMGDFIEQLLHARFVQDQYEPSAYMAYRWQVGIADNDDMFDVLEDVLSEGLSQDTLKKLPHHVVPAPIGESLSCAICLQDVISGETARKLPKCSHTFHQPCVDRWFIDHGSCPVCRQDV

SEQ ID NO: 9660 - protein, 185 aa, Zea mays
  Clone ID: TF_ZmC779404_1.pep
MEPARRLLLSDYDGAIESPLPSPPPSSATPFRPGVAVVVGILTSVFSITFLLLLYAKHCKRSAAESSGPYGSAGSGGGFGSSGNGAGGDRRNSGVDRAVVESLPVFRFGALRGQKEGLECAVCLGRFEPTEALRLLPKCRHGFHVECVDTWLDAHSTCPLCRSRVDPEDVLLLPEPPKPSTTGPP

SEQ ID NO: 9661 - protein, 203 aa, Zea mays
  Clone ID: TF_ZmC2722_1.pep
MTSPPTPLPALARQAMQSPSPPTKVGPPPLPPPPLPAVDAAVIMGVLTAVLLALFLFLIYAKHCKQRGPGERPGGLGLGFAPSSCDRCRSGLSSSAVGALPAVRFGDGDVDVGRATECAVCLGAFDAAELLRVLPACRHAFHAECIDTWLLAHSTCPVCRRRVTGGHVDDSEPEDSAATRQHGRRSADDAEVQVVVHRAWDQR

SEQ ID NO: 9662 - protein, 182 aa, Zea mays
  Clone ID: TF_ZmC54753_1.pep
MSLARYDANVLLAAVTALSAAVAFVAALHLYARCLLQRRVALAEGSPRVVALQRQRPPDGYVVEVVRIVEDASVCGQQAAGLDAKALRALPVFTLESEQANEEGGVAAELHGQCVVCLGEMEDGELGRLLPGCRHVFHVECIDTWLGVSSTCPVCRTAATPAAPSAVGVDHGGGEESIAVEC

SEQ ID NO: 9663 - protein, 201 aa, Zea mays
  Clone ID: TF_ZmC1258_1.pep
KKKKKKSTWLDLGDDIFEELGESRYFHRRRHGSIRVSQYSRSRIREHRRAVFDSGNEQSTAACPLGIHQTGRCTCDSFLVAEESSARASISRIVMLTEALFEVLDEIHRQPASLSLSMVSVQAPESVVNSLPCKSYKKLEAPQRSDDMEQCHICLNEYEDGDQIRTLPCKHEFHLQCVDKWLKEIHRVCPLCRGDVCEVAS

SEQ ID NO: 9664 - protein, 378 aa, Zea mays
  unsure (1)..(378): unsure at all Xaa locations
  Clone ID: TF_ZmC17651_1.pep
MLAGAPTGDAGPSSGAGSNPPTRPRRFPGAAQPEIMRAAEKDDSYAAHVTEACRDAFRHLFGTRVAVAYQNEIKLLGQSLYYLLTTGSGQQTLGEEYCDISQVATLHGLPPTPARRILFILYQTTVPYLAERISSRIVARSIVLNESQFDDHPESDNSSSDIAQSTTNSDIPSRSLSVSALSGFRGRVHALWQWVLQKWPSMLPYAQDFIQLAIRTNLMFFYFEGLYYHLPKRAAGIRYVFIGKPMNQRPRYQILGIFLLIQLCILGAERLRRSNISSIASSINQISSGGYPSTTGRGIPVLNEDGNIISDIRSGKAADIASHSEXPMARANAPFVSASGKILLPQPVDMFSAGIAXWSGAMRSLSAPYAELRLPIRV

SEQ ID NO: 9665 - protein, 138 aa, Zea mays
  unsure (1)..(138): unsure at all Xaa locations
  Clone ID: TF_21217091.pep
SRXXXXSTEFTCCTSFCQRLLEVSTGPPRSSREVRRTHRPAGRRGIYVVGVADRQAQSEYTHISLQERSRHQSLELLIAERARGDDPEPPVHALEVEHVRARQLPNLLLLPVLRKADAALLQLQFQTWVLQDCYASCS

SEQ ID NO: 9666 - protein, 111 aa, Zea mays
  unsure (1)..(111): unsure at all Xaa locations
  Clone ID: TF_LIB3594-030-Q6-N6-A1.pep
LHILIVVWALRRGVVLRAAESRQDEERAEGLSAEDLNELPCHAHECKAGAGAECXVCLXAFQAGDRCRVLPRCDHGFHAQCVDQWLRKSRVCPVCRAEVGGGADREGNAER

SEQ ID NO: 9667 - protein, 193 aa, Zea mays
  Clone ID: TF_ZmC188299_1.pep
HVLISGLSYHQQPAVSPGDGASAAPSDDDRDHNLTVLLTFGIFFSFTLLYLVAGVICASVVTACAVALSCCYLKARQRVALHRREALLLHAERSHGRRTEASAALVLSAIPAFAYKREGGTTGRGGDAAGWAQCVICLGLVQVGEVVRRLPVCQHLFHVECIDMWLRSHSTCPICRAAVEEPNAAGQPVPPPV

SEQ ID NO: 9668 - protein, 79 aa, Zea mays
  Clone ID: TF_LIB4740-006-R1-K1-F6.pep
MANRAGEPVARTNSDGGGGGSKDSGRFECNICLDLAQDPVVTLCGHLFCWPCLYEWLHVHAHSQECPDCKAVVEEGKLV

SEQ ID NO: 9669 - protein, 167 aa, Zea mays
  Clone ID: TF_ZmC19309_1.pep
MNSPPGDDGGGSAHGLFGSGGIRGFGYGVGVSIGILLVASTIALAIYFCTRTSMPESAAALAPPRQGGDAGRGIDEATLEAFPAVAYAEARKAAANQACCCPVCLDCYGDGDVVRVLPDCGHLFHRACVDPWLRQRPTCPVCRTSPLPSPMPTPLAEVTPLASARPS

SEQ ID NO: 9670 - protein, 276 aa, Zea mays
  Clone ID: TF_ZmC2062_1.pep
MSPRVVLLFLAALRPCAALVRLHSTTFSFTFLDAPARFGPRVSGDGICGSLRAADPAEACETIKDRGGRRGAGRKAFVLIARGNCSFEEKVRAAQQAGFDASIVYDDEEKASLYSMVGESDGIHIPAIFVSKMAGETLKKFARGEDEECCINSSMDETAGTVLVMSFVSLVVIMSVLASFLFARNCRLLRHGVDNHPPYVKKQVVEKFPCSAYSAPCSSEDNFQEACAICLEDYNNGDMLRHLPCKHEFHKICIDSWLTKWGIFCPICKLEVTLGG

SEQ ID NO: 9671 - protein, 166 aa, Zea mays
  Clone ID: TF_21209483.pep
MSLQHEEDTHRTSRTLRRFQNHTRGARATRLSSYRNALRAELATANNMISRQRNTAPINLGLRAALARYPGALHIQPNIDLNDYDALLALDENNHQHTGASESQINNLPQSVVQSNSIEDPCSVCLENPSVGDTIRHLPCFHKFHKECIDEWLRRKKLCPVCKFGD

SEQ ID NO: 9672 - protein, 391 aa, Zea mays
  Clone ID: TF_ZmC107_1.pep
MNTLFFWSIYCWRTNMSYFCYICYCRVDLSTAGTYLNKNFSDISTEQGWRTTHNHTSKLPISFMGNITSSSGWESGSSTTRSNQNHGSAGGNHSSVSGANIIVPDKIGNKTIMLGRERRKQTSTSSHIGESSSAADEPRGDLQSSKISAGPNHSSHQHNIPVINIDDISPEARPSSSGFTNRTVDPTIEAQLESDELLARQLQEQLYNESARFAPTEEIDAIVAMSLQHEEDTHRTSRTLRRFQNHTRGARATRLSSYRNALRAELATANNMISRQRNTAPINLGLRAALARYPGALHIQPNIDLNDYDALLALDENNHQHTGASESQINNLPQSVVQSNSIEDPCSVCLENPSVGDTIRHLPCFHKFHKECIDEWLRRKKLCPVCKFGIN

SEQ ID NO: 9673 - protein, 50 aa, Zea mays
  Clone ID: TF_ZmC107_2.pep
SEDPCSVCLENPSVGDTIRHLPCFHKFHKECIDEWLRRKKLCPVCKFGIN

SEQ ID NO: 9674 - protein, 127 aa, Zea mays
  Clone ID: TF_ZmC238393_1.pep
LPPVLPYAAAAARKKGLPEDCPICLDAFGEDDGVRVVPACGHLYHAPCIDRWLDVRNSCPVCRCAVASLYAADRDRGADALTAFDDDNDDQEAVLQRVVAMIEAIRDEQQREDAVARRAPAGGGGGS

SEQ ID NO: 9675 - protein, 106 aa, Zea mays
  Clone ID: TF_cC-zmpo14820003f04a1.pep
RRFGLLSDCDHSFCISCIRNWRSTSPTSGMDVNSTLRACPICRKLSYYVVPSITWYSSKEEKQEIVEGYKAKLRSIDCKHFDFGKGTCPFGSSCFYKVHNTVFGVI

SEQ ID NO: 9676 - protein, 91 aa, Zea mays
  unsure (1)..(91): unsure at all Xaa locations
  Clone ID: TF_ZmC3483_2.pep
SDDDDYEALIALDDCNHHRGASDDQIXSLPLSLIEGENCSDEPCNICLDCPSAGDSLRHLPCLHKFHKECIDRWLGMKIWCPICKLNVFSQ

SEQ ID NO: 9677 - protein, 183 aa, Zea mays
  Clone ID: TF_ZmC189769_1.pep
MSNPSFDHSYELPLRRNLLLLRDLLDLLRFIAGVILDRLGVAPCQGEVRLPGQALGGVGEHANDVDLERLLEARLWETVTRSLTAPRYRRRRVAPAQPADVQLDAEGDAEGAAVCAICLAGLEQGDFQTVVELCGCSHVLHAACIDAWVRSGDDAATCPLCRAPMLPTAWDDEQSSFGARRGD

SEQ ID NO: 9678 - protein, 286 aa, Zea mays
  Clone ID: TF_ZmC763809_1.pep
ICTHRLPILSYCSPFFLLIPACADVRQRASPGLRFLPSFRRRCRLSSPLPERGNPEEAETAGQMDFGAEQHGCEHYTRRCRIRAPCCGEVFGCRHCHNQAKNSLEVDLLDRHEIPRHEISKVICSLCNKEQDVQQNCSGCGACMGKYFCEKCNFFDDDISKKQYHCDGCGICRTGGIDNFFHCEKCGCCYSNVLKDSHHCVERAMHHNCPVCFEYLFDSTMDISVLHCGHTIHLECLNEMRVHHHFSCPVCSRSACDMTDAWQKLDQEVAATPMPEFYQKKMVWIL

SEQ ID NO: 9679 - protein, 134 aa, Zea mays
  Clone ID: TF_ZmC588778_2.pep
MMLAVTVSQVVALLSSALSGTEGGSGVAVAVGTAKAVGAEQGERWRRRCGGHDDHPASAAGYCCVCISACRDGDDVRSLPCGHAFHRDCVDRWLALCRRTCPLCRLHVGGPAVGLAEQQQQLSEDLVIWFSSLF

SEQ ID NO: 9680 - protein, 241 aa, Zea mays
  unsure (1)..(241): unsure at all Xaa locations
  Clone ID: TF_ZmC146862_1.pep
LDQDVIDALPVFLYREVVGAGAGAKEPFDCAVCLCEFAGEDRLRLLPLCGHAFHIGCIDTWLLSNSTCPLCRCALGADAAALFDEEGMWEHEDAVLPVRLGKFKNLARAAPGPVRAGAGXIVTREAGETSSSSLDARRCYSMGSYQYVLAEASLQVSVHRRHGDGHGRGGAGLRGVGVGSNRAGATEGKRIGAGSKGDSFSVSKIWQWPRNGKEKLPVLASDDSPAMNGRLPWQRPSPGDS

SEQ ID NO: 9681 - protein, 254 aa, Zea mays
  Clone ID: TF_ZmC67427_1.pep
MPPPPLPEEKPLARRKPEPKPPKPKPKGPRPIGPLPQRDGDPGGGVATSPPLLFCGDGCSGPCAYLPQCQPPPPPSPGATVRLRSSRLPTPLVALSASLLTVSAVLLLALLVHCLVARRRRRAQGAPLVHHAEAGGAQVLAGAVEQQAGEGEDEEAAGGGVHHVWYIRTKGLDERAISAIAAVVYDAKKRGAGASSDGGGSCAVCLAEFRHGETLRLLPRCAHAFHRACIDTWLRAHVNCPLCRAPVQGRRRRR

SEQ ID NO: 9682 - protein, 208 aa, Zea mays
  Clone ID: TF_ZmC13111_2.pep
MHKDMEYPRRTLLHTPFSGHPSGPSQPIDGATATDGSNFDANVVMILAVLLCALICALGLNSIVRCALRCSSRVVVGPEPNQVTRLVQSGLRRKALRAMPVLVYSPGLRINAANPTCAICLSDFEAGEHVRVLPKCNHGFHVRCIDRWLLARSTCPTCRQSLFGVPQKASGCSEASRAAEPEPAPAPAPARSVLVPLRPEGLVTHYDF

SEQ ID NO: 9683 - protein, 583 aa, Zea mays
  Clone ID: TF_ZmC25863_1.pep
MDADEAVGSSGRMDLNLYLGPPRAPRPRRSDLGSDLALSTPMPSSPSSSAASVDAPPPPPESMHPPYTHSRADLSPPPLPLEVYFPYNPEDSPVPDAHMSYMQPPELLIPGPRNMPPPDSLISGLREGIRELRYAFHPPPPPPPPPPLVRANELLGWEERPSSSTASSSFFPDTAARCGLLLEQTGSRWLRTRRFRSDLPPLSSEARPSGQDATEPVPQHEPAADANELNKVAPNGLELGAPENSSEERSKTATAFECNICFEMASEPVVTSCGHLFCWSCLYQWLNVYSSHKECPVCKGEVTEANITPIYGRGNSDAEKTVEDWKSPGPTIPPRPHGHRLESFWQQFHHIRPISRRLGEAHGILSSWRRLLDQQILGSVSRLEGPSESATQEINDIRQHDHLSGLALASRMRARRFQIEALSRPDGSSTSPPDNGLTGNNPSEILTGNNALLERLAGSNSRRLELLERLAFGIANTAGAMSDDFRRIASPNQYRGSASSSNLQNNEPAVDGARIAGAPSADQASNSSTVAVIQGDGGISESAGEPSNAGSSGSLRRRGRSNASGSLDVDGGSLQQNKRHRMN

SEQ ID NO: 9684 - protein, 192 aa, Zea mays
  unsure (1)..(192): unsure at all Xaa locations
  Clone ID: TF_LIB3354-087-Q6-K6-D6.pep
MGFPVGYSDSETLLPRVLLQALLLLGHLHRFLLWAFHAVGLGDLIDLGCNYPPPPPSASTAAAAVAAQEGRDVAAPLQHRRPEFRPVPAVRIEEALPVVRFDELAXRGARGRRXDCDCDCAVCLDGIGGGDEVRRLGNCRHAFHRACLDRWMAHGQRTCPLCRAPLVPGAAAADPWAEAPWLDAADYDVLPY

SEQ ID NO: 9685 - protein, 133 aa, Zea mays
  unsure (1)..(133): unsure at all Xaa locations
  Clone ID: TF_700169649_FLI.pep
TQELIDALPTYKFKPKRVKNWGIDHASSSEHLDEGGILGPGTKKERVVSAEDAHXVCCICLTKYGDDDELRELPCTHFFHVQCVDKWLKINAVCPLCKTEIGGVVRSFFGLPFGRRRVDRIAARGVASSRFSV

SEQ ID NO: 9686 - protein, 301 aa, Zea mays
  unsure (1)..(301): unsure at all Xaa locations
  Clone ID: TF_ZmC1904_1.pep
GWHSPLFAWIXGYTCFSCICCLPLIYWRYVHRNRHLDQEPQQPPTTYPTLTPSQSSEGRNHRTSGIVLHLGCISISCPRLSVLAYHFKTGVDCFFAVWFVVGNVWIFGGRSISSDAQDAPNMYRLCLAFLALSCVGYAIPFIMCAAICCCFPCLISVLRLQEDLGQNRGATQELIDALPTYKFKPKRVKNWGIDHASSSEHLDEGGILGPGTKKERVVSAEDAVCCICLTKYGDDDELRELPCTHFFHVQCVDKWLKINAVCPLCKTEIGGVVRSFFGLPFGRRRVDRIAARGVASSRFSV

SEQ ID NO: 9687 - protein, 415 aa, Zea mays
  Clone ID: TF_ZmC1904_2.pep
MEHASCDDVHEHAISVSHGETASTSTNHQDMYSDSDEPHQEDRPSTSTQTPSSESSPSTSPTAYSSRNLSFPRRDSIYGHGRNPWNSGLWISFEIVMYIAQVVAAIVILLFSRHEQPHAPLFAWIIGYTVGCIASLPLIYWRYVHRNRHLDQEPQQPPTTYPTLTPSQSSEGRNHRTSGIVLCLGCVTISCPRLSVLAYHFKTAVDCFFAVWFVVGNVWIFDGRSISSDAQAAPNMYRLCLAFLALSCVGYAIPFIMCAAICCCFPCLISILRLQEDLGQNRGATQELIDALPTCKFKPKRNKNWGIDHASSSEHLDEGGILGLGTKKERVVSAEDAVCCICLTKYGDDDELRELPCTHFFHVQCVDKWLKINAVCPLCKQEIGGVVRSFFGLPFGRRRVDRMAGRGVASSRFSV

SEQ ID NO: 9688 - protein, 121 aa, Zea mays
  Clone ID: TF_ZmC1904_8.pep
GRVKPKRVKNWGIDHASSSEHLDEGGILGPGTKKERVVSAEDAVCCICLTKYGDDDELRELPCTHFFHVQCVDKWLKINAVCPLCKTEIGGVVRSFFGLPFGRRRVDRIAARGVASSRFSV

SEQ ID NO: 9689 - protein, 268 aa, Zea mays
  Clone ID: TF_ZmC21265_2.pep
MATVGQSGALRRVTVHYASSPTRGAVVEVSLDDLDDELLQFVLADLLPGQEGLHQSILEGAHGSNQENYMRGAGSSAPSQEYHAQSSTAAAAAAASSRRNPGTDDAQIASDFEYATKLQQEMEGLSVDDDGDGISCVPSPSDSDDGHDHHDEEDEDEEDGNGGGDDDDDPDNMTYEQRQALVESVGSEDRGLSDELISYLQPWKYKASGFFSRKTNHDDCPICLSTFRNRETMITLPCMHHYHAACVTKWLRVNKTCPVCKYELFGPC

SEQ ID NO: 9690 - protein, 298 aa, Zea mays
  Clone ID: TF_ZmC4695_1.pep
MADFGDELFLDVGDDGFGDLSYVSFSESIELDLACPRDVFSAGFDPETLTHIPGSPISFDSDPDLRHLSPSLTCSPPFWGCLDDAASFEWEEIADAALGVGGGAGGAGGGGQGLEGDADADADVFGFLDEREMLGVMEGIDSGDDDSIFSDEPPFDFGDGDTELEGIFRSGVGWELLPVPLDEDEFEVLPGHVVEVGGAPPAALAVVERLQVVAVRGEEVVQECAVCKEGMEQGELTTGLPCGHFYHGACIGPWLAIRNTCPVCRYELPTDDPEYEKRRTRRHSAGGSTPQLGAPMQV

SEQ ID NO: 9691 - protein, 346 aa, Zea mays
  Clone ID: TF_ZmC28548_1.pep
YEPTRDCSQGLCSMYCPQWCYFVFPPPPPAFDIAGPGGGGGDDDSSGPTFSPLVIAIIGLLASAFLLVSYYTVISKYCGTFSSLRNMVFGSRRGRGRGRGGGGGGGGGGDSGAQVPWGAMPPDGLDETLINKITICKYKRGDGFVDSTDCSVCLGEFRDGESLRLLPKCSHAFHLPCIDTWLKSHSSCPLCRCNIAFVTVGVGAVSPEPEPERRAPREDRDWRRDNPELVLTVGGPSSDPVRGAPQSQSQNAVSGSGGDDGQDALARKDCPERSEEGSGNAEIKEDCALPAVRAASSLSDTHREGRMSIADVLQASLEDELTMARESGLLAGSSGRCPCHGEHSKD

SEQ ID NO: 9692 - protein, 154 aa, Zea mays
  unsure (1)..(154): unsure at all Xaa locations
  Clone ID: TF_jC-zmshLIB3569P008d01b1.pep
MLMGFPVGYSETPKLLLHLLFLLDHLRRLSSWLLRLGGATDADADTDAGHPRHPCAAAQRLEEHSPAVRFDSLPCGSGGGVMAPLPLPQGCCICLGDFHAADEVRRARSCRHVSHRACLDRWAXHGHRTCPVCRTPLLPXAAVPHPLTVPLPPS

SEQ ID NO: 9693 - protein, 241 aa, Zea mays
  unsure (1)..(241): unsure at all Xaa locations
  Clone ID: TF_ZmC502938_1.pep
MAAANVGEXTSGGSSSSGADAGGGFECNICFELPQEPIVTLCGHLFCWPCLYKWLRIHSHSPECPVCKAVVEEEKLVPLYGRGKDRVDPRSKNVPGAADIPSRPAGQRPATAPQADPNNAHFPNAANPANPWFMGGGGGGIPLANARWGNYTFSAAFGGLFPLLSFQVHGFPDATAYGQPAGFPYGYGHGHAFHGGHAGAHAHAAAAAPRHAQHQQQQADVYLKALLILVGVLVIASLVTF

SEQ ID NO: 9694 - protein, 439 aa, Zea mays
  Clone ID: TF_ZmC7715_1.pep
DSVGDLEASSTPQPNAARAAGPCCPGVYCSLTPRAATPGPRHHSSRPPRRRSGQQEQDVQSGRPGAVSLTTRGPRPIGRTALWCTGVSRPSSLTPSPATPSSILPDGAPGSRNKMSNRATHWCYACRRPIRLRGQDIVCPNCNDGFIQEISEMGGILNTYGLIEPDFEERRARRFGMMDAMSSLMRQRMEEMGRDGLFDIRGRQGTGTEYGRRPTAVPTLVFGGIPSPGVGSGDVNVVLRGGRRAGAAQPNFSSLVVGPSLEALFEQLLLQNNRQGPAPAPQSAIDSMPVVKINRRHLDDDPQCAVCKDKFEVGAEAREMPCKHLYHTDCIIPWLVQHNSCPVCRHPLPSQRSGSTSSARPSAYYNEAADPPGVTRADLEPAPRDGGRESQERRRSFSFLWPFGPSSSRSSSYQYEQNVDEPAVYDPNQIAYSEWHYDH

SEQ ID NO: 9695 - protein, 402 aa, Zea mays
  Clone ID: TF_ZmC7715_2.pep
GRGHWVPRGGTGQRPFPPRATRPIGCTALVVCTPLVTHSLPHIPFPPTALLAARNNMSNRATHWCYACRRPIRLRGQDIICPNCNDGFIQEISEMGGVLNTYGLIEPDFEERQARRFGMMDAISSLMRQRLSEIGRDSLFDIHGRQGTGTEYGRRSTAIPTLVFGGIPSPAVGSSDINVVIREGRRAGAARPNFSSLVVGPSLEALFEQLLLQNNRQGPPPAPQSAIDSMPVVKINRRHLDEDPQCAVCKDKFEVGAEAREMPCKHLYHTDCIIPWLVQHNSCPVCRHPLPSQRSGSSTSSARVPSAYYNETACPPAVARADFDPVPSAYYNETATDPPAVTRADFDPAPGNYGSESQESHDPFSFLWPFGPSSSYQYEENVDEPAVYDPNQIAYSAWHYDH

SEQ ID NO: 9696 - protein, 198 aa, Zea mays
  Clone ID: TF_ZmC2205_10.pep
MNTVSGTKRAPRRQSQDGSGDKLVVIVEASSRGVGSRRGPHTPIPGALNSPIDVEAIEDEVQAVSPSRVPLPRRNRRTRREPITVVDLEVEASREGSKRQRVEPVGRHLYPDWGARSSLQSNAVQTSKEPAKEVPEEPSFTCPICWNKMEEPSTTTCGHVFCDTCIKQAIKVQKKCPTCRKGLKMNSVHRIYLPNGSS

SEQ ID NO: 9697 - protein, 249 aa, Zea mays
  Clone ID: TF_ZmC2205_2.pep
MDKSGRGERTFASEFGRGFAPPFLNSSARSNSVPIRQVHCEVEVGGISIEESMSTASGTRRAPRRQSQDGSADKVVVIIEATSPVVGSRRGPPTPVPGAQNSPIDVEAIEDEVQAVSPSRVPPPRRDRRTRREPITVVDLEVDASQEGSKRQRVVAVDHLSPDWGARSSLQSNGVQTSKEPAKEVPEEPSFTCPICWNKMEEPSTTTCGHVFCDTCIKQAIKVQKKCPTCRKGLKMNSVHRIYLPNGSS

SEQ ID NO: 9698 - protein, 158 aa, Zea mays
  Clone ID: TF_ZmC2205_5.pep
DPNGPGSSARPPRRRGCEDEVQAVSPSRVPLPRRNRRTRREPITVVDLEVEASREGSKRQRVEPVGRHPASDWGARSSLQSNAAQTSKEPAKEVPEEPSFTCPICWNKMEEPSTTTCGHVFCDTCIKQAIKVQKKCPTCRKGLKMNSVHRIYLPNGSS

SEQ ID NO: 9699 - protein, 170 aa, Zea mays
  unsure (1)..(170): unsure at all Xaa locations
  Clone ID: TF_21214430.pep
MGYDNKPMEKSSNLERQTELSCVICWTXXXSTRGILPCGHRFCYSCIQGWSDCLASRGKVSTCPLCKASFTWISKVDEAGTLDQKVYSQTIPCEASTDXXVLGSEGYDFSGPTSGQGACYQCHFREPEELLLSCHVCRSLWVHSYCLDPPLTPWXXXXXXDLRVLFHRYR

SEQ ID NO: 9700 - protein, 152 aa, Zea mays
  Clone ID: TF_ZmC1181_1.pep
MARYRSDLQGELSSLDDSMEDPNGYLRFDVGGIEELENYFIFNDRHRGMRMDIDGMSYEELLALGERIGTVNTGLSDDALSACLNRRLYMPTASGSHEDCERKCSVCQEEYLAGEEVGEMACKHYYHLSCIDHWLRQKNWCPICKSVALKIN

SEQ ID NO: 9701 - protein, 200 aa, Zea mays
  Clone ID: TF_ZmC60888_1.pep
MMFQGTKGITLLQPSLRGQSERQQGFFTRPPAQGFFTTAARRGRTTAGFPTPCSRPGNGSFRGSAAWTWSWRRDEGALHKTWPLQTLWAGAGGLARPVVDASSGGGQTSCFQFQFQPGEREPIPVFPKPAAFVAVQEVEDGRAAPADAASDCSICLERCGAGGGLTQLRCGHVFHSACLQRWLRSRADCPYCRATVRARS

SEQ ID NO: 9702 - protein, 215 aa, Zea mays
  Clone ID: TF_ZmC11035_1.pep
MRHLQATVEHLAGVAATPPPASAGGGVHTDTFLILAAVLCFLLCVVGLAFVARCSRLCNPSSYSVDARGPVDDDDDEAAMPAPRKGVDRAALEKLPTVPFAFEDEDAQDGERPECAICLAEFAPGDEVRVLPPCAHAFHAACVDTWLLCTSTCPSCRTALVLAQAQAPPASADPLMQCCACASAQASAGPAECPVLPLPLAVVVVERGPCRTSVP

SEQ ID NO: 9703 - protein, 428 aa, Zea mays
  Clone ID: TF_ZmC1307_29.pep
MPTQKRPPPPPPPSPSPSAAPGAGSPPPSSPPLPTAEPAEKKPKLEVNGSAGAEANGNANDFGAKEGTEVEASESESEDADAAKQEFVPVKLSDVRKEVQCPICLGIIRKTRTVMECLHRFCRECIDKSMRLGNNECPACRAHCASRRSLRDDPNYDALIAALYPDIDKYEEEELAFNEEENDRNKQIQASIAEAFRKQSEVIGRKSTAKATAAAFVRRSRRNIRPNGQNTYFRGRGKASSDDVALACSEDEEDGNGESCSKEASSAEESSPEKKQKRLPKWPTPRSSPARACNDEVASDEKDDVGISRENFSTSPLRAWGKNGTRSQTRHSSFSGSNGRMVKGGRMIKLVECLRNSDDNEGERDFVASQTSHKDEEVEMYALKPSCSKPVSTNTCGPDKARLAGEERLSDLRSSFTFPNGVLVRSNT

SEQ ID NO: 9704 - protein, 374 aa, Zea mays
  Clone ID: TF_ZmC5523_1.pep
MPMRGVDFKWYDGFFLSMLATSVIIVSINWKRYRLCAHPLHIWIVVDYTTVFIDCILMIKIMITLAAGMLDLGWQQRYARFCGRIIVLSVLVLLLYPFLWVWTVIGTLWFSTARGCLPEEGQKWGFLIWLLFSYCGLACIACVAIGKWLHRRHALQQRAQQGIPVSEHGVLVDMIRVPDWAFEAVGLEMRVGQDTAYHPGLYLTDAQREAVEALIQELPKFRLKAVPTDCSECPICLEEFHVGNEVRGLPCAHNFHVECIDQWLRLNVKCPRCRCSVFPNLDLSALNNLRSTSEPDHPSASASNVTTATAATRYVRSQPAGQSYLVRLQGLLLRPVRHDSVESDGEPAVGNSRLVGTEELPSILVDDGHQLPDR

SEQ ID NO: 9705 - protein, 292 aa, Zea mays
  unsure (1)..(292): unsure at all Xaa locations
  Clone ID: TF_ZmC17955_1.pep
MSAGRQAYWCYQCRQRVRPRGREMVCPYCDSGFVAEMDDVDALMSHFVGTDPDFHRDPRFGIMDAISAAAAXRRANIDGYFVGPGLDDFIEQLTQKDRRGPPLVFRSSIPAMLTEENSXDVFVRTRRGGGGGGGSRRDPNIADYFVGPGLDDLIEQLTQNDRRGPPPAAQSSIDAMPTVKITQRHLSGDSHCPICKEKFEMGSEEAREMPCKHLYHSDCIVPWLEQHNSCPVCRYELPPQGSATGASCSRARSTDQSQSSSSSSSSGRTSGRQRRRNPFSFLWPFRSSSSSR

SEQ ID NO: 9706 - protein, 851 aa, Zea mays
  Clone ID: TF_ZmC10271_1.pep
MSTCLHVQDPRNIAMSRPLDFAVLKYKNQKLAEQLEVHKFEFCALESRFNDLKEKQRTHNKTLVLVKSYWERLIADLGIVSVCKNESSRSSCSTGNNNIRKDFLNGLLEAGATESSGSPNCQLGNDVSSEQSTTIDILQKLFLPSSGPWHVNNEFVSAALMKLPENEHSRQLHNATSDVLSKLHVVMRTVDNLHLKHRQLAANYQKQRDSSAWNRAEQKRLKEELTSVVAKLEGSKQKLAVLKAQGDNKQATPILVPTLGNKNMTAEKVRDKQTELQDLEATHKELMELISKRLEEIRRLHTERIEILNKLATFQNILTDFKSIHSSKAFQLVNDQLQKSQAELDDHQTLLEKLQVEMDTFVWRERQFNQKVDLAEIPQKVSAYCVSRIADLEKDVQKLCNEKNMLVLKLEEASREPGRNQVISEFKALVSSLPREMGAVQSELSKHKDASLQLHSLRAEVHSLSSIQTRKEQEIEEMSFRSAHAGSDISQLQSLVRELRENTQELKLFVELYKHESTDSRQLMESRDRELAEWARVHILKYSLSESKLEQRVISANEAEAISQQRLATAEAEIAELGQKLETSRRDLVKQSDILKSKHEECEAYVVEIESIGHAYEDIMSQNQQLLQQIIERDDHNTKLFMEGVKSKQSHDALHLEVRSLQRNLQHASTLMDLCNQKTIRLEDQLRGWSERLRRLSEDGMQQSISLGNYQKKLSGMHGEAPKLRQSMDVLQAKAGSNRLEIAELLIELENERFGKKRLEDDLDLMSSKANSLREKTDNSAVLQKLLHEAKEYRGILKCGICHDRQKEVVIAKCYHLFCSQCIQKPLGSRQKRCPSCGLSFGVNDVKPIYI

SEQ ID NO: 9707 - protein, 173 aa, Zea mays
  Clone ID: TF_LIB4756-071-R1-K1-H3.pep
MGGCCCCCCSARASDSDRAPVRIYHRQNPEEHAPLSSAFDGPSPTSAIVAVDTNLDTSSLDTYRAPPAPLPYDVCFTVSENPDVEKSGIKIKTDGQQAPKVDEFESCEKGAPEDKADEEDVCPICLEEYDKENPRSVTKCEHHFHLCCILEWMERSETCPVCDQITLIDGMYE

SEQ ID NO: 9708 - protein, 174 aa, Zea mays
  Clone ID: TF_ZmC19345_1.pep
MGGCCCCCCSARASDSDRAPVRIYHRQNPEEHAPLSSAFDGPSPTSAIVAVDTNLDTPSLDTYRAPPAPLPYDVCFTVSENPDVEKSGIKIKTDGQQSPKVDEFESCEKGAPEDKADEEEDVCPICLEEYDKENPRSVTKCEHHFHLCCILEWMERSETCPVCDQITLIDGMYE

SEQ ID NO: 9709 - protein, 174 aa, Zea mays
  Clone ID: TF_ZmC19345_3.pep
MGGCCCCCCSARASDSDRAPVRIYHRQNPEEHAPLSSAFDGPSPTSAIVAVDTNLDTSSLDTYRAPPAPLPYDVCFTVSENPDVEKSGIKIKTDGQQSPKVDEFESCEKGAPEDKADEEEDVCPICLEEYDKENPRSVTKCEHHFHLCCILEWMERSETCPVCDQITLIDGMYE

SEQ ID NO: 9710 - protein, 226 aa, Zea mays
  Clone ID: TF_ZmC75319_1.pep
FRSDPSHCLTRPRPGTEGSKSKGMDQAAAMSPSPRAAAGIHWEAHGRLLTACLVVLNVLLVLLVYAYFWRFFSRSRTRGGGGGGGGEDDDSADGASASSEASSPPASPKARDRREVQLAITALPVFVHSSSGVGVGVGGPAAECAICIAEFADGDQGRLLPRCRHRFHARCVDTWFRSHTTCPLCRATVLADAAPAPAETANQNQPPHHLHTDTPNGTDSSTESPV

SEQ ID NO: 9711 - protein, 457 aa, Zea mays
  Clone ID: TF_ZmC989_1.pep
MASDGHPPEPGKKEDVATTAAGPGANDLDDPQFMCCVCLDLLYKPVVISCGHMSCFWCVHKAMHIFRESHCAVCRQPYIHFPSICQLLHHLLLKLETNDYKRREKEVLEEEKRMQTYSPQIIEFLNYKTNVGSYKENRNEDSKARPPQEVPLNDSVPDEHLKKIKLEDVSCPLCMEMLYQPAVLNCGHVYCVSCLSSLNEETLKCHVCGSLHPGDFPNVCLDLDHFLEEYFPAEYELRGQKVQFKKDQCNRETSSSGTSGRKGSTRALHAEDPSNIHIGVGCDSCGVYPIRGKRYKCQDCTELIGFDLCEACYNSSSKLPGRFNQRHTPNHRMEVDNSALVHRILRHHGIPEEGPEGLMMEVVGPDAMVQILIDNQGMEEGNDEGPGEAAIEEPVGSLGSMSRLSHLFMYNPEMEDGNDEDSGEEAAIEEPVGSLGAMAPLFMYDQEMEDNEEDQAH

SEQ ID NO: 9712 - protein, 204 aa, Zea mays
  Clone ID: TF_ZmC412090_1.pep
MDMLGGAVAEEDGADDARGSSADEEEDEEDDDEEEEPEGAQLVAGDCGPSLRARVSEFAAVAGAAVERAHTSNCPVCMDPWTSQGPHRISCIPCGHVYGRSCLEKWLTLRGNQSATCPQCGKRFKHKDIINLYAQEVAVPNSELEKEISYLRREICSLKKMVVHHDKMFEEMIKRQNDGVRSKRQKVAEHSYEAANLVASTPAQ

SEQ ID NO: 9713 - protein, 60 aa, Zea mays
  Clone ID: TF_LIB3354-068-Q6-N6-B2.pep
GPKYECCICLCPYEDGVELRELPCNHHFHCSCIDKWLHINATCPLCKFNIVKSNLHREEV

SEQ ID NO: 9714 - protein, 357 aa, Zea mays
  Clone ID: TF_ZmC2201_1.pep
MASTSPRRSSGGDSASPSAPLIPSPPTSPASGPSGGPLGRLTSLRGAARFIRRTGSRRLMREPSVAVRETAAEHLEERQTDWAYSKPVVVLDMLWNLAFVAVAAAVLAASVGERPTVPLRVWIVGYVLQCLLHVLSVTVEYRRRRRNADQEGAGDEDLKLSIVKHLESANTMFSFIWWILGFYWVSAGGQALSHDAPQLYWLTIVFLAFDVFFVVFCVALACVIGIAVCCCLPCIIAILYAVTDQQEGASEDDINNLSKFKFQTMSDADKLAAGIAAPVGGVMTECGTNPPVEHILSAEDAECCICLCPYEDGVELRELPCNHHFHCSCIDKWLHINATCPLCKFDIIKSNRDIEEV

SEQ ID NO: 9715 - protein, 87 aa, Zea mays
  unsure (1)..(87): unsure at all Xaa locations
  Clone ID: TF_ZmC2201_3.pep
IAAPVGGVMTECGTNPPXVERWHDILSAEDAECCICLCPYEDGVELRELPCNHHFHCSCIDKWLHINATCPLCKFNIVKSNLHREEV

SEQ ID NO: 9716 - protein, 205 aa, Zea mays
  Clone ID: TF_ZmC9720_2.pep
MAMAPQGQAEHGQVHVHDHQLGHRPEPNSRHPDPGAAATSSIATNRWGPYSGAGDFASNMAVILAALLTALALALALNAAVRYLLSRSRRARRGRAGSSSGERDRDSDANISDPEKLAVEAPPPPPPPPPALVYSAAGTKLAGAAAECAICLAEFADGDTVRVMPVCGPGFHARCIELWLAGGRRSSCPTCRAPAGAAAATPSSS

SEQ ID NO: 9717 - protein, 498 aa, Zea mays
  Clone ID: TF_ZmC514_2.pep
MACPRGRTPFPLCFFLMICLMAQLGASNVVLMANNTTLSLDDVEATFTPAVEGSGVSGVLYAVEPKDACSPLRAKAIQGSVSPFALIIRGGCQFDDKIRNAQNAGFKAAVVYNNEDNDILVSMAGSSLGVQIYAVFISKASGEELKKYSGQTDAELWIIPTYENSAWPIMAISFVSLLAMSAILVACFFARRHQIRRDRARLPRAQESHGMSSQLVKAIPSLIFTKVQEDNCTSATCAICLEDYSVGGTRRVLPCRHKFHAACVDLWLTSWRTFCPVCKRDASAGTSDPPVSESTPLLSSSATRLPESTVLASLRSTAAASPPRTISRHPLLRSISRNYSVSGSSILRTPDSRFDANSSICTSGSNLDLANVPSPWSGTWHRASAHSLCRGYLSPPIGIRNTSAHVSRSANGSPSRYVGSSRMSHGSSGQQHPHLRHCTLSGPSLFTMVPQSPQQNQLQHGGYSETNLSAAASAQSFRQLYLQHCPDSDTSSQSLPGC

SEQ ID NO: 9718 - protein, 161 aa, Zea mays
  Clone ID: TF_LIB5120-011-A1-PF1-G11.pep
MARILVEAPAGSGSPEDSINSDMILILAGLLCALVCVLGLGLVARCACSWRWATESGRAQPGAAKAANRGVKKEVLRSLPTVTYVSDSGKAAAEGGADECAVCLAEFEGGQAVRVLPQCGHAFHAACVDTWLRAHSSCPSCRRVLAVDLPPAERCRRCGAR

SEQ ID NO: 9719 - protein, 195 aa, Zea mays
  Clone ID: TF_ZmC128844_1.pep
MSGQSSSSYGDTDPGTDRAYSTTSSSIRWGPHGRGMTACLVVVNVVLVALVYLYFWRVFSRRSAASPSAANPTDHDDDASSTSTPPSPLSSQDQHGRIVASLPTFVVRSGSGAGAECAVCIAELRDGDEGRALPRCGHRFHAACVDAWLRRRHTTCPLCRASVVVAAEEVGPTKGSGVTDTTTTTVALEDMDAPV

SEQ ID NO: 9720 - protein, 165 aa, Zea mays
  Clone ID: TF_ZmC235641_2.pep
GLATAMSFLSSLSSLGLGYSIAIALGFLVLLASLLLAFYFCFGRGGDYWAGEAATTASSSGHLSITVPRVLFVAEGSESPDADAAYSSAAVAACSPVGLDAAAIASYPKVPFSSSGATDADAMCSICLSEYRDGETLRVMPECRHGFHVACLDAWLRRSASCPVC

SEQ ID NO: 9721 - protein, 151 aa, Zea mays
  Clone ID: TF_ZmC461818_1.pep
GLALVARCACRRGGGASVSVSATTSGGRSSAQAPSGLEKAAIEALPTVSVSSSLKQASRRDAADKEECAICLAAFVEGDQLRVLPRCAHGFHAACVDTWLAAHASCPSCRATIVSVVSPLCRRCGAACCDQQEETPMAAPEPAAAGRGLHA

SEQ ID NO: 9722 - protein, 569 aa, Zea mays
  Clone ID: TF_ZmC6343_1.pep
MGPAVRSSVVIRATVVGLVLVGIALALPLAAALRPLREHVASIGAAASAGSWGDEHAFYKRDENDIGPYSWNITGTYKGSWTFAGATNGSSRFLEFVESKGDSVLELLSTPTKISGVHYVQGSVTFHDVIDNAHNGGVAQIRLEGVYIWPFRQLRMVANSGADGEPLQEEDYFLSNPYHLLRIFSSQVFQESSEEKNRRKNSLTYDMEKHCNTEIAAKVVRVSSNPNDGEHEKYRLEGLMESPAVDDDGECFSPILLNATSLNVEVYYNKAVNYTLMVTFISFLQVLLLIRQMEHSNTQSGAAKVSILMIGQQAIMDAYLCLLHLTAGILVESLFNAFATAAFFKFVVFSIFEMRYLLAIWKASRPLNSGEGWEIMRRELSVLYSRFYGILLGGILLMYELHNFLRPLLLLMYSFWVPQIVTNVIRDTRKPLHPQYILGMTVTRLAIPLYIFGCPSNFMRIEPDKKWSIAVTVFMGIQAAVLLLQHYLGSRCFIPRQILPEKYCYHRKVEDSTNQPIDCVICMTTIDLTQRTSEYMVAPCEHIFHSGCLQRWMDIKMECPTCRRSLPPA

SEQ ID NO: 9723 - protein, 272 aa, Zea mays
  Clone ID: TF_ZmC21265_1.pep
MATVGQSGALRRVTVHYANSPTGSTVAEVSFDDLDDELLLFVLADLLPGQEGLHQSILEGTYNNQENHMRGAAPSAPYGYSRPEEYRAESSTAAAAATGSRNSGMDEAQIASDFEYAKQLQQEMEDLSVDEDDNDISCVPSPSDSDDEHEHHDEEEEAEEDGDGGWNHDDPDNMTYEQGQALVESVGTEYRGLSDELISYLQPWKYKAVKASGLFSRKTNHEDCPICLSTFRNRETMITLPCRHHYHAACVTRWLKVNKTCPVCKYELFGPS

SEQ ID NO: 9724 - protein, 107 aa, Zea mays
  unsure (1)..(107): unsure at all Xaa locations
  Clone ID: TF_ZmC21265_3.pep
FVALFLVMQQXQALVESVGTEYRGLSDELISYLQPXXKYKXQSRASXGSSPRKTNHEDCPICLSTFRNRETMITLPCRHHYHAACVTRWLKVNKTCPVCKYELFGPS

SEQ ID NO: 9725 - protein, 259 aa, Zea mays
  Clone ID: TF_ZmC1320_3.pep
ISIDEAVEENEGSPRACACQIACSTSASRPSRNSALPGCAKFMASDTRKKLIQIDVSSDTVCPWCFVGKKNLEKAMEQSKGKFDFEVRWHPFFLNPDAPKEGVKKSDFFKMKFGPVQYEGAMSRMTEIFRGLGLEYDMSGLTGNTMDSHRLITLAGHQGYDKQNVLVEELFLNYHCQGKYIGDKQVLLDAARKVGIEGAEELLEDPIKGVDEVQEELKKYSSDISGVPHFVINNKYQLSGGQPPNEFTRAFEMAAKDGT

SEQ ID NO: 9726 - protein, 501 aa, Zea mays
  Clone ID: TF_ZmC3547_2.pep
MKSSRFLFLCAMFCLMARLGAANVVLMGNNLTLSFDDIEASFSPGVKGSGVSGVVYASEPLNACSPLTIKTVNGPPSPFALIIRGGCTFDEKVKNAQDAGFKAAIVYDNKNSGVLVSMAGSSSGIHIYAVFVSKASGEVLKKFSGNMDVEVWILPTFENSAWSIMAISFVSLLAMCAVLGTCFFVRRHRIRREHPRIAEDREFHGMSSQLVKAIPSLIFTKVQEDNCTSSMCAICLADYNVGEKLRVLPCRHKFHAACVDLWLTSWRTFCPICKRDARSGASEVVATEATPLLSSAARLPSFRSSVAASPPRPISRHPSSHSVSRAYSVSSTPNSPNPFISSHISSPGIRASRSITDLGNISSLHPRISHLSSTHSLVGSHLSPPISIRYWSSHVAHSGYGSPSPHVSSSYISNSGYGSSSYCYLGLGGSSHSQHGTYLRRCGESGPSLCTMVPQQLQWETNVAAGASSAKSLRQSSYLRHCGDSDASLSDMTSAQSLPRC

SEQ ID NO: 9727 - protein, 223 aa, Zea mays
  Clone ID: TF_ZmC134339_1.pep
MDAPTASSPSSSFPGTSFVVLSVSIVGILATSLLLLAYYLVLTRCGLLFFWRPGMHDDDDDVAAGPGHRRHVVVTVHDEPPRRSGMEEAAIRRIPTFRYRHGSTRLVLAAEAKQAACAVCLADFRDGERLRVLPPCLHAFHIDCIDAWLQSAASCPLCRAAVSDPAALALRCHHLDVPLPRAATDDVAVDVVSSSPTPTSADAAGETEAVPSHETAHRNSSCR

SEQ ID NO: 9728 - protein, 386 aa, Zea mays
  Clone ID: TF_ZmC50086_1.pep
MSTPAAAYYAAAARKQYFCYQCNRTVLIAASAAAAGELSCPECHGDFLEEVTVPAPTFIPLPFPFPFAPTTIPAASTTPAPAPAAGSGGSPSLSSSSSSAATSPSQPNDISSILNSFLGLGEQPIRVGGSASRAAAGTATPENEPEPFDPVMFFQNYIHSLVEGGANIQVLLDDASVTLGSGPGLGRIGGASFGDYFVGPGLEQLIEQLAENDPNRYGTPPAAKSVLSSLPDVLVTHAMVAAAEGAECAVCKEDFSPGEVAKQMPCKHIYHTDCIVPWLELHNSCPICRFELPTDDPDYEGRKGTNPQPAVGVAAAASGSSTAAEGQMEERQENPRVVERRFNVSLPWPFSGLGGQTSQQDGNSGGSGSNSQGSGSQDGGPPSSKN

SEQ ID NO: 9729 - protein, 141 aa, Zea mays
  unsure (1)..(141): unsure at all Xaa locations
  Clone ID: TF_LIB4572-004-R1-K1-H2.pep
MDEKATMESKLSSAAAFVXGGVQDACDDACSICLDAFCDSNPSTMTKCKHDYHLQCILEWCQRSSQCPMCWQHISMKDPMSQELLEAVEQERNIRANPSRNTXAVFHHSNAGXDFEIPVXADDAELERRIIQHLAAAAAVR

SEQ ID NO: 9730 - protein, 121 aa, Zea mays
  unsure (1)..(121): unsure at all Xaa locations
  Clone ID: TF_ZmC3546_7.pep
MDEKATMESKLSSAAAFVEGGVQDACDDACSICLDAFCDSNPSTMTKCKHDYHLQCILEWCQRSSQCPMCWQHISMEDPMSQELLEAVETERNIRANPSRNTAGFHHQMLGEFEIPVXADD

SEQ ID NO: 9731 - protein, 122 aa, Zea mays
  unsure (1)..(122): unsure at all Xaa locations
  Clone ID: TF_LIB5116-055-A1-PF1-C1.pep
MAANVGESAAVGGSSSDAAGGSFECNICFELPQEPIVTLCGHLFCWPCLYRWLHMHANTPECPVCKAIVEEDKLVPXYGRGKDRVDPRSKNTPGVDIPQRPAGQRPATAQQADPNNNFGNAH

SEQ ID NO: 9732 - protein, 502 aa, Zea mays
  Clone ID: TF_ZmC12547_1.pep
MSDQQRHYGSYELLPAHPDLRCLVCTRPFTLDAEVTDSLEALAICRECKTTVLSDSNRDDTPRANRQRRWRRQQSSIRGVSVFSQLINLARQQGHEADTDSPTVPRRHTSYSSTPSRSQRGHTSDDESDGLSYADSVFGEIESNISFGDEGGESDTSLDRHTMVGREIGIQLDNESYMNTDTDIDPMNAGVYQWDSDDPEDDEDEESEESGLDEGDDTMQERRQQWHDIAPSGLNEQESEGAAWTWRTVGSQDINRTDLRVDMEGREIRRLFIGNPGDYVDARQFEMLLEQFADEDNNSRRGAPPAAASSIENLSSVVISKGYEINGGVTCPVCKDDMPITTVAKQLPCMHLYHSSCILPWLNSRNTCPVCRYELPTDDSEYERSKHAAVNEGGIHGVERTHPQEVVEETYEPEVDGGSNTGGDTMNETNTHEQHTAQQPNGAHGRHRWLFIAAAPVVSLVSLALVLCFTNPAGNVRRQLCRRSQTTTTAHVDTRRSWWSMF

SEQ ID NO: 9733 - protein, 400 aa, Zea mays
  Clone ID: TF_ZmC31511_1.pep
MGNAGSNGGGPATGHRRRSSGHGHHQQAPPPPQPQETAPNRYVFAAATPYPPQYPNPNPPQYYPQYGNYYPPPPPSVPVPLPAPYDHHHRPPTAAPGEFPPPPTAHPHNYPGWAGRYPSYGPHLSMPTPYVEHQKAVTIRNDINLKKETLRIEPDEECPGRFLVAFTFDATVAGSMTVYFFAKEELNCNLTTVKEDLIKPITVSFKEGLGQKFRQPSGTGIDFSVFEESDLLKQGDMDVYPLAVKAETTLSVDHPPEGDDQKMITPNSQITQAVFERKENGDYQVRVVCQILWVNGTRYELQEIYGIGNSMEGDADANDPGKECVICLSEPRDTTVLPCRHMCMCSECAKVLRYQTTRCPICRQPVERLLEIKVNNKSEDQQQTPQSPPLPDLAPQQEGV

SEQ ID NO: 9734 - protein, 224 aa, Zea mays
  unsure (1)..(224): unsure at all Xaa locations
  Clone ID: TF_ZmC31511_4.pep
STYLFTIQRLCWDELSSIIKHVTVSFKEGLGKKFKQSSGTXIAFSVFEESDLLKQGDMDVYPLAVKAETTLYVDHPPDVGDQKIKTPNSXDHSGSQVVFEKKENGDYHVRVVCQILWVDGTRYELQEIYGIGNSVEGDADANDPGKECVICLSEPRDTTVLPCRHMCMCSECAKVLRYQTTRCPICRQPVERLLEIKVNNKSEDQQQMPQSPPLPALDPQQEEV

SEQ ID NO: 9735 - protein, 167 aa, Zea mays
  Clone ID: TF_ZmC270420_1.pep
PLSAATGEQHGAAAERALGAQRQPPSDAVRVERVAARRQRPSPYRYRRFGSSRQLGQAHRALVRWGRQRRATRPRCRSGPAPAARLVDGRRRHGRSGRNGGCGHGARDGHGGRPANGFFAARSLVLCFASARVSVPLQDVRCVRMYIAPPGGPTPRGGGDYRAYQLT

SEQ ID NO: 9736 - protein, 223 aa, Zea mays
  Clone ID: TF_ZmC888799_1.pep
MSVGQLHTRRLLSHAAAAAAASSAGPPATEVQVPAAHAHAAAPFSSLNTMVITALSLLLCGLVVVLAVHAVVRCAFRVTRRVCYGQDEPHGGGGGADALAVAASFSCQAGPRRKRGPRTGLPPWILYSREVELTGCGAAECAICLTEFVRGDRVRALPHCNHGFHVRCIDRWLAARQTCPTCRRAPFAANPSLSLPDSAEAPESVQLQARVESGAGQHQHETQ

SEQ ID NO: 9737 - protein, 119 aa, Zea mays
  unsure (1)..(119): unsure at all Xaa locations
  Clone ID: TF_ZmC3298_4.pep
VNSNSSKPAGLPFKSKDEPRIESFLQKNGNLHPKRYTYADVKRMTRSFTEKLGQGGFGPVYRGSLHDGRQVAVKMLKDTKSEGXEFMNEVASISRTCHVNIVTLTGFCLQGSKRALVYE

SEQ ID NO: 9738 - protein, 305 aa, Zea mays
  unsure (1)..(305): unsure at all Xaa locations
  Clone ID: TF_ZmC3219_3.pep
MRGWRHSPGGLEEEIRMFQTRVLLGGMNMYDRYQDWRLDVDNMTYEELLELGDKIGYVNTGLRDDEITRNLRKVKHPSFSSLRFATEMERKCSICQEEFETNEEMGRLDCGHSYHVYCIKQWLSQKNICRALPEPQRPCMSRRXTVQEQISSPFMDSPPPHLDAPFFGADLIPSGRLRRMRGYRXSPGGLEEEIMMFXTRVLLGGMNMYDRYQDWRLDVDNMTYEELVELGDRIGYVNTGLREDEIARSLRKAKHPSFGSLRFAAESNEEMGXLVCGHSYHVLCIKHGLSXKNXCPVCQTAVTRN

SEQ ID NO: 9739 - protein, 335 aa, Zea mays
  unsure (1)..(335): unsure at all Xaa locations
  Clone ID: TF_ZmC11494_1.pep
RSAEDDDRRRAAWMVLMAGMLPGVECARRRRVRQGGAGMGAEAAGGGTGRRSSFCLYAAGHGGAGNSGKRSGGVVHGHGWTLDSNAREAKERLDQKLRTKREAAIKRHHSTGSIKLGVPHRSAGADERGESSAPAMAGVQREVYSKKGVMRRLMRWSRPRWAAAEQAECAVCLDEFRAGDVLAHLRCGHRFHWACALPWLEGTSRCPFCRAAVDAXPPPPPTAPRSGRGSGLAGACPGLGRRGAPCRCRPTPATPPPWRCHARQWLVGVVMVSGDRPACACGAERRRTARRARRTRECLGSFCTLCARKGTVGAHLLVGPFGPPLPCPPPIIASK

SEQ ID NO: 9740 - protein, 159 aa, Zea mays
  unsure (1)..(159): unsure at all Xaa locations
  Clone ID: TF_ZmC11494_2.pep
PCSRHHSTGSIKLGVPHRSAGADERGESSAPAMAGVQREVYSKKGVMRRLMRWSRPRWAAAEQAECAVCLDEFRAGDVLAHLRCGHRFHWACALPWLEGTSRCPFCRAAVDAXPPPTAPRSGRGSGLAGACPWDGAGRLVAVGPRQPRHPHGVATLGSG

SEQ ID NO: 9741 - protein, 310 aa, Zea mays
  Clone ID: TF_ZmC1250_1.pep
MSSSPAALRFYCHQCDRTVSLAPPASPDADVFCPRCGGGFVEELPPNPSPAPPAAAFFAPPSFDIRHPSDLSAFFGPASPEPLAPGLFDPSNFLHDHFGGLLSGGATIQIVLEGGPPPPGLNFADYFVGSSGLEQLIQQLAENDPNRYGTPPAAKAAVASLPDVAVSADMMQADGGAQCAVCMDDFHLGAAAKQLPCKHVFHKDCIVPWLDLHSSCPVCRFELPTDDPDYNHTHQQHGDSSAPAPPSPAPAVSSPRVAERRFRISLPWPLRAAFGAAQAESSNPTDDDVPPSGSDAAGGPQSQTGYDDLD

SEQ ID NO: 9742 - protein, 120 aa, Zea mays
  Clone ID: TF_uC-zmroteosinte115a04a1.pep
VPILLCCKHVFCEDCVSEWFLWGRSCPLCRALVRPADLRSFGVGSASLFFQLLWSFRASCSWASWGAPPCAYVSCVCVCVFLLAARASCSALMRFWVGVRQPEAAVRFMCVLLCIFPFPL

SEQ ID NO: 9743 - protein, 526 aa, Zea mays
  Clone ID: TF_ZmC3083_1.pep
MVGGCASGDGAAEGTLARWRRAAAKRIGLSCASFFSYAASPSPPPSKTISHSALNAPDGEQQKMEEPTSTRVADKNLCAICLELLSTSISSDVDSGEAAAIYTAQCSHSFHFLCIASNIRHGNVSCPICRAQWSELPRDLKVPPLLHNQSDPILRILDDNIASSRVNRRSSIRAARYNDDDPVEPFTLAEHVDPCLRFVLIPAPVSAHHHVLGHYPCGRMLPLQQQCQYSGSSMLSPPQIASPSGQRRAYLSVSLAPQPAMDLVLVASPNGPHLRLLKQAMALVVFSMRAIDRLAIVTNATTATRAFPLRRMTSHAKRMALQVIEHLCCVGGTDPVGALHKGLKILEDRAHRNPSNCILHLSDHPVRNCVGGVDMNHSSIPVHQFHVGLGFGVRSGFIMHEFEELLARLLGGVIGDTQLRIGEHGGMVRLGELRGGEERRIPLDLAADCGFILVGYSYLEGGREEQLRTGEIAVGFEEKGDNGYCGMREMGLSIGGERRSCCAERRDYHDPFMARRWAKHFNVYRA

SEQ ID NO: 9744 - protein, 342 aa, Zea mays
  Clone ID: TF_ZmC24905_2.pep
MISSSHLSPSQEEGVDRKTTQDSGDTPTIAADGVQIVFFLPPTLAGWLSRSTFGSSAPLGKAMSHYTMHAAINYAALPPTSPLQLPLPYLPPPPPPPLPLPPLLSPPPPAAASSDAGFQSRISPSVLLIILILAVIFFVSGLLHLLVRFLLRPAPRDPGDAYGGDANATAFQGQLQQLFHLHDAGVDQSFIDALPVFLYGAVVGAGGKDPFDCAVCLCEFADDDRLRLLPKCSHAFHVDCIDTWLLSHSTCPLCRRSLLADFPTCGGACSPLVFVLESGSEGSVSDRHDAASSARLSFGMEQEQAGQDRKHVAAAEAAEKNDEVVVPVKLGKVRKPGHPKEP

SEQ ID NO: 9745 - protein, 145 aa, Zea mays
  Clone ID: TF_ZmC538896_1.pep
MEAYAPAGSYRPVCDTVVFVCLASASALIVFMVAVCFRNAFAANGYATAAVATNGAARATAANGRSRCGLAPSALSAIPMLAYQRGAGWAQCAICLALVRDGETVRLLPACGHLFHVECIDLWLRSHATCPLCRRGVVEAPVEKV

SEQ ID NO: 9746 - protein, 144 aa, Zea mays
  Clone ID: TF_LIB3689-243-Q1-N6-A10.pep
CNCRTGSRQGNPDEETSTRASISRIVMLAEALFEVLDEIHHQSAALSSSRSAFSSIGSVPAPREIVERLPAKVYRRPLKYHSEEAAQCYICLVEYEEGDCLRILPCHHEFHLTCVDKWLKEIHRVCPLCRGDVCRSDALIGKVS

SEQ ID NO: 9747 - protein, 321 aa, Zea mays
  Clone ID: TF_ZmC4557_1.pep
FRYNLQNYCTGCSCIVWRNLIESEDASFRSSYRRMGSHEPFEGSVRFSRTLSVGRLRDRVLRRPPFSDGLFTPSLLYDRAVWPSGNASARQDSAVMQRTNSDRSSEPRSDPSTSDMYNSSSERQASNGDLLERRSAFLERRRIRSQVRALQRLGSRFENLSGHERSCILSGQHRTGNCNCRTGSRQGNPDEETSTRASISRIVMLAEALFEVLDEIHHQSAALSSSRPSFSSIGSVPAPREIVERLPSKVYRKPLKYQSEEAAQCYICLVEYEEGDCLRILPCHHEFHLTCVDKWLKEIHRVCPLCRGDVCRSDAPIGKTS

SEQ ID NO: 9748 - protein, 169 aa, Zea mays
  Clone ID: TF_ZmC4557_3.pep
FPRGFENLSGHERSCILSGQHRTGTCNCRTGSRQGNPDEETSTRASISRIGMLAEALFEVLDEIHHQSAALSSSRPAFSSIGSGPAPREIGERLPAKVYRRPLKYHSEEAAQCYICLVEYEEGDCLRILPCHHEFHLTCVDKWLKEIHRVCPLCRGDVCRSDALIGKVS

SEQ ID NO: 9749 - protein, 225 aa, Zea mays
  unsure (1)..(225): unsure at all Xaa locations
  Clone ID: TF_ZmC28375_1.pep
AAPASGTSGSGCFDCNICLECATEPVVTLCGHLYCWPCIYEWLRHDVAEAGARSSARRQCPVCKAAVSPDALVPLYGRGGSSSAKKPLASIPRPRRPALXRARMTAAAVATTTTIGTQRPARQPGRCGTQPTPTPRSSTPSSXAPFGDRGMLHSTSTTGGMLGGMAVAVLPLVLRGQARVPGMYYPSPYHLMSPRQRRWHVEVERSLHQIWFFLCVFVVLCLLLF

SEQ ID NO: 9750 - protein, 357 aa, Zea mays
  Clone ID: TF_ZmC3609_1.pep
MEALHEEMPFDLDFHPSSPLVVTSIITGELCLFRYGPESQPERLLLLKAHKESCRAVRFVDSGKVILSGSADCSVLASDVESGKAIARLEDAHENAINRLVCLTESTIATGDDEGCIKVWDTRERSCCNSFEVHDDYISDMTYVAETNQILATSGDGTLSVNNLRRNKVRSRSEFSEDELLSLVLMKHGKKVVCGTPSGALLLYSWGYFNDCSDRFIGHTQSVDTMLKLDEDTLVSGSSDGVIRLVGILPNRIKQPLAEHSEYPIEALALSNDKKYLGSISHDKMLKLWDLEELLSGPQVANGDEPAEAGSDDSDDDSDDDVMDVDMAATSSKGSRSKKAGKGQSSSRPASDFFADL

SEQ ID NO: 9751 - protein, 160 aa, Zea mays
  unsure (1)..(160): unsure at all Xaa locations
  Clone ID: TF_ZmC36740_2.pep
RIWDNTTPVNNVDSANVVLQGGEAPRTTANTINKECIQQVHQSPGSPQVIRHEXNIDPDNMTYEELLDLGEAVGTQSRGLSQECISLLPITKYKCGFFSRKKTRRERCVICQMEYRRGNLQITLPCKHVYHASCVTRWLSINKVCPVCFAEVPGEDSQRQ

SEQ ID NO: 9752 - protein, 180 aa, Zea mays
  Clone ID: TF_ZmC348_2.pep
MDAAAAAAAQMERHSSAAAFVEGGVQDGCDDACSICLEAFSDSDPSAVTSCKHEFHLQCILEWCQRSSQCPMCWQAISMKDPTSQELLEAVEEERNDVQENHARTTTVFRHPLLGDFEVPVDADDAEIEERIMQHLAAAAAIRRSHRHARREGRRSSRVAAAHGHGHPQTQVLFFPSAGE

SEQ ID NO: 9753 - protein, 456 aa, Zea mays
  Clone ID: TF_700052368_FLI.pep
MACPRAPAVEGSGVSGVLYAVEPKDACSPLRAKAIQGSVSPFALIIRGGCQFDDKIRNAQNAGFKAAVVYNNEDNDILVSMAGSSLGVQIYAVFISKASGEELKKYSGQTDAELWIIPTYENSAWPIMAISFVSLLAMSAILVACFFARRHQIRRDRARLPRAQESHGMSSQLVKAIPSLIFTKVQEDNCTSATCAICLEDYSVGEKIRVLPCRHKFHAACVDLWLTSWRTFCPVCKRDASAGTSDPPVSESTPLLSSSATRLPESTVLASLRSTAAASPPRTISRHPLLRSISRNYSVSGSSILRTPDSRFDANSSICTSGSNLDLANVPSPWSGTWHRASAHSLCRGYLSPPIGIRNTSAHVSRSANGSPSRYVGSSRMSHGSSGQQHPHLRHCTLSGPSLFTMVPQSPQQNQLQHGGYSETNLSAAASAQSFRQLYLQHCPDSDTSSQSLPGC

SEQ ID NO: 9754 - protein, 184 aa, Zea mays
  Clone ID: TF_ZmC2018_1.pep
IRLEAVAALPTRAFAARPRGSAASDAESQCVICLEEYEERDVLRVLPHCGHDFHMACIHVWLEQNSTCPVCRISLLDNPNSEHNAPPPPPPPLPGVAVTMSSPGSPEPPGSDPCRCLFAGAGHSSRASSEAPPRHEPDQENQVASGPSVDGGANSNGMPLSEVNPTPPESNSQTVRKQQPGPCK

SEQ ID NO: 9755 - protein, 566 aa, Zea mays
  Clone ID: TF_ZmC3494_1.pep
MERYSDMRPKAEVSYLGRGSRFSSRNQSSEERTNHSSDKPGSSTRFNPTKARIGGNQGRPRYVCDSFKSPSSKVSPAGSSKFPLSKFEERRRQPFVPGFDIAESSRRKADAKQLQGSKKIAAENDSSDNLRGESEGFTTEQVVKPEGSHVVGHSGVSAYTVGSLVQTASLGSRTHRQKHKEVNLGTPGASSSTLTNRSTIPGNSTMGVRPAYGHVNGGQIHGLKNLGCSSVPDAQPSGCPSESVISRRRFEFMRKRAFDQESSSRSVNLSLGHSTPTDIRRIRMNEQSLCQQIPRSSSRSHQESAGSVRTRRPSPHATRMSVPDGRADGVLSLHESSTKDVQPAQEHLSLEEVSTESSIRPFFVEFDNNIFSSSHLRRSSTRAERGRPSSLFEESPRQMFHSLMGERDRHRHITMEGITEVLAALERIEQQAELTYDQLLMLEANLFFGAFASYDRHRDMRMDIDDMSYEELLALEERIGSVSTALSEEQFTKCLKRSIYSQVALEVNKSTVDDMKCSICQEEYAEGEEVGRLPCEHRYHVCCIGQWLGQKNWCPVCKASAVPSKG

SEQ ID NO: 9756 - protein, 186 aa, Zea mays
  Clone ID: TF_ZmC6690_21.pep
MARILLEAAAGSGPPTNSINSDMILILAGLLCALVCVLGLGLVARCACSWRWAAASRSQPAADATKAANRGVKKEVLRSLPTVTYVPDSGKAKAAAGADECAICLAEFEEGQAMRVLPQCGHAFHAACVDTWLRAHSSCPSCRRVLAAPADLPPGEPCRRCGARPGFRALWKAPAPCSAEGPTFLA

SEQ ID NO: 9757 - protein, 110 aa, Zea mays
  Clone ID: TF_ZmC1258_3.pep
LCSDGLHNSFEVLDEIHRQPASLSLSMVSVQAPESVVDSLPCKSYKKLEAPQRSDDMEQCHICLTEYEDGDQIRILPCKHEFHLQCVDKWLKEIHRVCPLCRGDVCEVAS

SEQ ID NO: 9758 - protein, 137 aa, Zea mays
  unsure (1)..(137): unsure at all Xaa locations
  Clone ID: TF_cC-zmpo14820018a08d1.pep
CAPSPPPSSRATYSAPRHACVVLVGAAVVSRPKEEAWSEXTCPVCLADFXAGEVVWVLPECMRYFHSDCIDTWMRGSSSCPMCRSETTPTPKPRTASVRPLLELSVSSRGDPRRDVSRATTGRVGGRVGGRDGRTRG

SEQ ID NO: 9759 - protein, 53 aa, Zea mays
  Clone ID: TF_ZmC10271_2.pep
CGICHDRQKEVVIAKCYHLFCNQCIQKSLGSRQKRCPSCGLSFGVNDVKPIYI

SEQ ID NO: 9760 - protein, 188 aa, Zea mays
  Clone ID: TF_ZmC669712_1.pep
MPRATASLRLQAAASSTSTATPREQQASSSSSSWPVPPPLPQQPAVSVNSDTVMILASFLCALVCVLGLALVSRCTCRPASSSTATGIPQQARPPKGLKKKAIDALPTAPFTAAASSDCAICLDEFSDGDALRVLPRCGHAFHVACVDAWLRTRATCPSCRAGIVIAHQPLMAASLSPGYLDPSVVSI

SEQ ID NO: 9761 - protein, 219 aa, Zea mays
  Clone ID: TF_ZmC20235_2.pep
MGAFCSCLQPDYSDHHGNQASSAFRNCMCLRCFTQQLINAYTVLFRAGAVHSVSPAIEATPVDSTESSFDTYRSPPRPLPYDDPRFSPPARDWLRSENPSHSPEESEPLRANEDDEEMETPSIIQKASKTNYNTKMKICSSTYGDKVPPREHGNYFSYFSPSAEDEDVCPTCLEDYDSENPRIVMQCSHHFHLGCIYEWMERSEACPVCGKKMEFDETT

SEQ ID NO: 9762 - protein, 216 aa, Zea mays
  Clone ID: TF_ZmC9757_1.pep
MLMLHPRLVSSSAVDDEDHCESCACYCAMVSCVSLLLFIVLAAAVSIPRACAIAGVMLLLLGLVGWLVPTGNGAGPAAQQQQQQGQAAADPGARRLVVHHRCACGLTDAAIAALPAAFTYYEAPAVKNGVGSEDDKQPRGSSLLCAVCLDDVRGGEMVRQLPACRHLFHVDCVDAWLRAHRTCPLCRCQLSPRNDVSTKRAAAVVGESSIDALPPV

SEQ ID NO: 9763 - protein, 189 aa, Zea mays
  Clone ID: TF_ZmC6690_23.pep
MARILVEAPAGSGSPEDSINSDMILILAGLLCALVCVLGLGLVARCACSWRWATESGRAQPGAAKAANRGVKKEVLRSLPTVTYVSDSGKAAAAAEGGADECAICLAEFEGGQAVRVLPQCGHAFHAACVDTWLRAHSSCPFCRRVLAVDLPPAERCRRCGARPGAGAGISALWKAPTRCSAEGPTFLA

SEQ ID NO: 9764 - protein, 248 aa, Zea mays
  unsure (1)..(248): unsure at all Xaa locations
  Clone ID: TF_ZmC20996_1.pep
MFHGGRPLSLRGSLKALEADIHHANTLAHAIHRAYGGACVQMRLSYSSMAPIFLNLIQWMDCSCSLSYTLPSYLGLLEVLVYKVYVDEDASISTIERRASLKEFYTIIYPFLQQLEDNLMDKDCKXQRVVCCCRRRRRXRKLVAEDDREDECGICLETCTKMVLPNCNHAMCINCYRDWYTRSQSCPFCRGSLKRVRSRDLWVLTGDDDVIDTVTLEKENVKHFLSFIDSLPLIVPDNMLLVYYDYLV

SEQ ID NO: 9765 - protein, 248 aa, Zea mays; identical to SEQ ID NO: 9764
  unsure (1)..(248): unsure at all Xaa locations
  Clone ID: TF_ZmC20996_3.pep

SEQ ID NO: 9766 - protein, 249 aa, Zea mays
  Clone ID: TF_ZmC20996_4.pep
MFHGGRPLSLRGSLKALEADIHHANTLAHAIHRAYGGACVQMRLSYSSMAPIFLNLIQWMDCSCSLSYTLPSYLGLLEVLVYKVYVDEDASISTIERRASLKEFYTIIYPFLQQLEDNLMDKDCKDKGWSAAAAAGGGGGRKLVAEDDREDECGICLETCTKMVLPNCNHAMCINCYRDWYTRSQSCPFCRGSLKRVRSRDLWVLTGDDDVIDTVTLEKENVKHFLSFIDSLPLIVPDNMLLVYYDYLV

SEQ ID NO: 9767 - protein, 410 aa, Zea mays
  Clone ID: TF_ZmC22066_1.pep
MAEAATSSSSSGSFAPRRLHDAGVVRESLPYSVLAAPPPPPLPPVQVQVAGSGGGGGGKISPAVLFIIVILALVFFISGLLHLLVRVLLKKQHRRGGRRGTASAAAPRTGVEAGGVDVALQRQLQQLFHLHDSGLDQAFIDALPVFAYRDIVVGGGGDGDKEPFDCAVCLCEFDAEDRLRLLPLCGHAFHLNCIDTWLLSNSTCPLCRGVLFVPGLMGDGNPMFDFEERLEEGRLSEDCDVGFGLPGLKASGLAQTPVVEKKVFPVRLGKFKNVGTQGAVEGGNANASVLSRDEGESSSSSLDGRRCFSMGTYQYVLGTSELRVALQPGRIRNGTGGAMMGRPPGLSSINADIMEGKKICTRNKGESFSVSKIWQWSHIKGKLPAGSDECSDAGSLPWMKRGGAADTSNL

SEQ ID NO: 9768 - protein, 208 aa, Zea mays
  Clone ID: TF_ZmC1120_3.pep
ILSRRAHPSHLSAAPLSQSVTRLLFLPSAGLILSLSLRGETGGERGKKRNRNQPVLFAWIAVLASCSETLGQFLIRNALEMIQRGENVRLESIFYGGLDIHDRHRDMRLDIDNMSYEELLALEERIGNVSTGLSEEAVIKLLKQRKFSSWRLKASLDPEPCCICQEEYVDGDDLGRLDCGHDFHAGCIKQWLVVKNVCPICKNTALKA

SEQ ID NO: 9769 - protein, 502 aa, Zea mays
  Clone ID: TF_ZmC3547_1.pep
MKSSRFLFLCAMFCLMARLGAANVVLMGNNLTLSFADIEASFSPGVKGSGVNGIVYASEPLNACSPLTIKAVKGPPSPFALIVRGGCTFDEKVKNAQDAGFKAAIVYDNENSGVLVSMAGSSSGIHIYAVFVSKASGEVLKKSSGHTDVEVWILPTFDNSAWSIMAISFISLLAMSAVLATCFFVRRHRIRRDHPRIPEAREFHGMSSQLVKAMPSLIFTKVQEDNCTSSMCAICLEDYSVGEKLRVLPCRHKFHAACVDLWLTSWRTFCPVCKRDATSGVSELPATEATPLLSSAVRLPSQPSSFRSSVAASPPRPISRHPSSHSVSRAYSVSSTPHSPNPFRSHTNLPGVIHASRSTTDLANMSSPHPRISHLSSSTHSLVGSHLSPPISIRYPLPHSRHESPSPHVSSPYISNSGYGSSSYYYLGGSSQHGSYLRRCGESGPSLSTMVPRSSQQQFQSEANVAAGASSAQSSRQSYLRRCGDSDASLSDMASAQSLPGC

SEQ ID NO: 9770 - protein, 317 aa, Zea mays
  unsure (1)..(317): unsure at all Xaa locations
  Clone ID: TF_ZmC3547_3.pep
MKSRFLVLCAIVCVMAQMGDANVVLLGNNLTLSFADIEASFSPGVKGSGVNGIVYASEPLNACSPLTIKAVKGPPSPFALIVRGGCTFDEKVXNAQDAGFKAAIVYDNENSGVLVSMAXSSSGIHIYAVFVSKASGEVXKKSSGHTDVEXTCFFVRRHRIRRDHPRIPEAREFHGMSSQLVKAMPSLIFTKVQEDNCTSSMCAICLEDYSVGEKLRVLPCRHKFHAACVDLWLTSWRTFCPVCKRDATSGVSELPATEATPLLSSAVRLPSQPSSFRSSVAASPPRPISRHPSLHSVSRAYSVSSTPHSPNPFRSHT

SEQ ID NO: 9771 - protein, 743 aa, Zea mays
  Clone ID: TF_ZmC1018_1.pep
MSISPHERTGGAYYPRPHNPSPSPQHGSDRRRHGRRSPPASVSPPGAAAEASDGGVGSSSNPVVPAIGESINAPEKVVGFIISGEENDTCTQEVGNVSECHSSEQGDSGLPVDNFGSVGSYPERPKMVGSLQADHLASGSTGLGNGTQIAARKNQTVNANHLLNFQYDPISRPQPRGPRTYLPRRQRKIKPYNKDLFIQANYKFVVLDTGNYQIDSMDPDKMLQWEDIICVRYYSPSEVQCPICLERPLCPQITSCGHIYCFPCILRYLMMGKDDYRGECWKKCPLCFMMISSKDLYTIQITQVQNVRAGDVVTFTLLSRSRNSLTPSIKSSSSESSTTDEEHYNVFSKFILTSDVELSVRDAKLDLSNWLHMADLGLVDDLEKLPFVSAALEQLEEKTKYWIDYRNYGGSPPSKDSFSPGSSFKSRNSFDVNTSQQMSEHKISLSDRDMVNGISELSMSPELSKTSGKGTISKVNEKCTTTIDSNEHDPYTFYQVSDGQHLILHPLNMRCLLNHFGGSDMLPPRITAKILELETVTQSEAIRKRYRFLSHFSLTTTFQFCEIDLSDVVSPNSLAPFLDEIKKREKQRKRAAKKEESERVKAEVAAAVQASAMRFEYTNSSQSHNDVMFSLDDFEALGNNAGPSTSPPASERKLFSDVTRLGFASAQDSPPLRLGTGDANGQSETSRDQGPLATPALSFASIISSSRAVTAADNSEMQKANGAGKKGKKATRVLLSTGGGRRY

SEQ ID NO: 9772 - protein, 253 aa, Zea mays
  Clone ID: TF_ZmC17335_1.pep
MAQRGELGRQLPLRGPLKALEADIHHANAMADAIQRNYGGACVQMRLSFSSLAPLFLYFIQWLDCGCCYALPSYLGLFHILICKVYADGDSSVSTYERRASLREFYAIIYPILQQLESSLIERDLKGKGRCKDIVSRRRMEDWKKVSGRDVEREDECGICMEACTKMVLPNCSHAMCIKCYRDWYKRSESCPFCRGSLKRIRSTDLWVLTNSNDVIDPAHLEKENVRHFYSYIDSLPLILPDSIFFFYYEYLL

SEQ ID NO: 9773 - protein, 76 aa, Zea mays
  Clone ID: TF_ZmC140839_1.pep
DALSECLKRNLYVPTTSSSNEDGDIKCIICLEEYSSGVEVAKMACEHYYHTTCIQQWLQQKNWCPICKCDASAISS

SEQ ID NO: 9774 - protein, 160 aa, Zea mays
  Clone ID: TF_ZmC11815_2.pep
MMGIPLVCYCLAVPKPVIAFCRLLSAVRDAALLMLAVVGLCRFPPDGAVDAGHQPGEVKARLPAVEYGQLLAEHDEQQQSGDHDCDGDAASSDCIVCLETLEAADEVRRLGNCAHAFHRACIDRWIDLGRATCPLCRSDLLPRAPGWASRLGLGRLTRVR

SEQ ID NO: 9775 - protein, 160 aa, Zea mays
  Clone ID: TF_ZmC11815_6.pep
MMGIPLVCYCLAVPKPVIAFCRLLSAVRDAALLMLAVVGLCRFPPDSAVDAGHQPGEVKARLPAVEYGQLLAEHDEQQQSGDHDCDGDAASSDCIVCLETLEAADEVRRLGNCAHAFHRACIDRWIDLGRATCPLCRSDLLPRAPGWASRLGLGRLTRVR

SEQ ID NO: 9776 - protein, 213 aa, Zea mays
  Clone ID: TF_ZmC27970_1.pep
GTARHGTTELQSAPAPIRTSALIRQMASPARRLLQTNSVQYPTLPAADPPSPLAVDSDVVVILAALLCALICVVGLASVARCARSRAAPAAARRGLRKKALRALPSLAYEDAVAARAADGAAEVLAECAICLSEFAPREEVRVLPQCGHAFHVACIDTWLAAHSSCPSCRRVLVVGDASSKRPPQPKRCRKCEAAMDEPSSSSGSAGDTPAGS

SEQ ID NO: 9777 - protein, 179 aa, Zea mays
  Clone ID: TF_LIB3608-056-Q6-K6-C10.pep
RLDAQKCKTSVSRSKLINSGSSSSCCLCRTGGVENFFHCDKCGCCYSNVLKDSHHCVERAMHHNCPVCFEYLFDSTKDISVLQCGHTIHLECMNEMRAHHHFSCPVCSRSACDMSATWRKLDEEVAATPMPDIYQKHMVWILCNDCSATSSVRFHVLGHKCPACSSYQHPETRAACPQI

SEQ ID NO: 9778 - protein, 211 aa, Zea mays
  Clone ID: TF_ZmC2210_2.pep
DGFGGGAARVSCSLCSKEQDVQQNCSSCGACMGKYFCKVCKFFDDDVSKGQYHCDGCGICRTGGVENFFHCDKCGCCYSNVLKDSHHCVERAMHHNCPVCFEYLFDSTKDISVLQCGHTIHLECMNEMRAHHHFSCPVCSRSACDMSATWRKLDEEVAATPMPDIYQKHMVWILCNDCSATSSVRFHVLGHKCPACSSYNTRETRAACPRI

SEQ ID NO: 9779 - protein, 210 aa, Zea mays
  Clone ID: TF_LIB5045-072-A1-K1-G9.pep
MTQGSDEGAGAAHPSWPSGADADTPVAPTAGAAAAMTLGSILTVSGILLLFVIFAFALASLQYCFESRRDRDRDARTGRPAGSSRGGMMRASRGGGVDPELLRSLPVTVYRAPPQGSDKGRQQGVVLECAVCLAELQDGEEARFLPRCGHGFHAECVDMCLASHTTCPLCRTTVTKPDASPPTPSLALPPVPPEPANYYATASLPATSVL

SEQ ID NO: 9780 - protein, 119 aa, Zea mays
  Clone ID: TF_ZmC39016_1.pep
FRLLAWNAVVYSLPFLLFLLLCCFVPAVGYALGYNMNTASVGRGASDEQLAALPRWRFKEPDVARDRERDDQECCICLAQYGEKEEVRQLPCTHVFHLKCVDRWLRIISSCPLCKQELK

SEQ ID NO: 9781 - protein, 270 aa, Zea mays
  Clone ID: TF_ZmC235641_1.pep
VLNPTTRRERGEGKERKTSITSSRRHQPPPTFTPLPTRPRFHPGHPAEAPPPCARSANAIPPLPTAMPLLSSLSNLGLGYSIAIALGFIILFASFLLAFYFCFGRGGDYWAGEAVTTASSSGHLSITVPRVLFVAEGSESPEDDAYPSSAAAAACSPVGLDAAAIASYPKVAFSSRAAEADAMCSICLSEYRDGETLRVMPECRHGFHVACLDAWLSRSASCPVCRSSPVPTPNSTPLATPLSELVPLSQYAADRRRRSFSGRLAQNHLT

SEQ ID NO: 9782 - protein, 584 aa, Zea mays
  unsure (1)..(584): unsure at all Xaa locations
  Clone ID: TF_ZmC4657_9.pep
MTVTAAAWPVCTICYEDLRPLSDQHLHCLPACGHVFHALCLEQWLEYCPGGKKKRTCPVCKQPCGAAHPPTRLYFSSTGTCPTQACSSPGSASGSADPEALAAEVARLEQKAASLGKVVEEQRQSINDLKSEAAWLREQAEAGDFMLQAAKKDKESVQILLNAKTEELSRKTSECGRLQEKSLALAKELAALKLSADMNLQEEEIMKFASLGNQGNLQNAVDVLKRSLAIRNKSYKELMVQCNVLGRSESRMQQKLEKAKEILKKLKARVQELEKELEDKENGLLRDLKSSKKFKADHIKSGNATANSAFTSSSPGYENQTNKLDEVMQDPCNDKTHFDRSKSEAGSVLNAQDNLDNKDVDVIDLEANDSVFGYEQKAQFSAKPFGTEDSTPNSENKSSLCQNDDRQSVASECTTAHATNGGPFLKHREATVKSTFMANIRAKLHIPRESPSVRTNATSSTLESETLTIDGISKQATRLASGTGPQQIHNFNSFSDDFQAPGIPGTDGARRSIGKWXGPADPSSASGSRGNLIAVGPDGRGGKVKILRDLGRPQDSKSQALWPKAQKVGGRGGQSQIHQFFGKR

SEQ ID NO: 9783 - protein, 332 aa, Zea mays
  Clone ID: TF_ZmC9505_1.pep
MIPRTSSVSSSAAAAPTAGAPPAWPSGSDAAAFQASGSSGHQQVVISNGVLLAAVIFLFMVVVFVFLLYLYAKRYLGAGNPLAAPPSSRFLFVAASPLPQRGLPASALRSLPVAVYGGGGGGPGTKSSKEALECAVCLSEVADGEKVRTLPKCGHAFHVECIDMWFHSHDTCPLCRAPVGGDLDALPREEPFGASLEFPTNVLFWGTHDEVANAGLATPPPPPPPVASAVSASSSASGRRKENLVIDIPTRPVALTTTPPFNSPLPTSRVAGSADETRSPVSARLRSLRRLLSRGKQAVVGTSYSPRGAGDVEQGLAGAEAARPPKTPPASD

SEQ ID NO: 9784 - protein, 331 aa, Zea mays
  Clone ID: TF_ZmC9623_1.pep
MADGGNCGPGGGNASAPVCSFVRKPPKNIRKRPAAPAGSDDDDDGGGGALAAARSKKGPPSSTAGKLVFSTAGASSEAPRFQYESSRTIQSTDTRATATLETETEFDRDARSIRERQLKQAEESLKKNPSAVAASASASTAGEVYKGIHGYTDYKAGFRREHTVSSEKAGGSHGPLRASAHIRLSQRFDYQPDICKDYKETGYCGYGDSCKFMHDRGDYKSGWQLEKEYEEAEKARKRRIAMGGGGESDDEAADDEDEEEALPFACFICREPFVDPVVTKCKHYFCEHCALKHHSKNKKCYVCNKPTLGIFNAAQEIRKKMAQDKKQQQQE

SEQ ID NO: 9785 - protein, 164 aa, Zea mays
  Clone ID: TF_ZmC38394_1.pep
MVVGGEDTDSDDADLNLVDALARRVGEATRRLPASRAVVDGLPEVALSDQEASHGCAVCKDGVVAGQSVLRLPCKHYFHGECIRPWLAIRNTCPVCRFQLPTGDAAEYDSPRSTTGGGVVSVAQQHSAPAQSGGAGAASGATEGAGDDAAECPGEDRAGRGTSW

SEQ ID NO: 9786 - protein, 53 aa, Zea mays
  Clone ID: TF_uC-zmroteosinte020e08a1.pep
CETKCSICQEEYLLGEDVGKMACKHYYHLSCIEHWLRQKNWCPICKSVALKIK

SEQ ID NO: 9787 - protein, 288 aa, Zea mays
  Clone ID: TF_ZmC28409_1.pep
MDGSSKRIGGGGDDMPSPDHDQNASPNVPPSAAGDGGASATAAAAPAAGRRPFTSLSQEEADLALARVLQEQERAYMMLTGGEYAISDAESYDYDEEEDGDGSDYEEEGEALDEDEQVGDAEAEGAEGDLDLDPSQYEDDGEGDVSDRLMALVGIGDWRAMEQDDAGDEEDDEDAEVHTQGAWEDVDPDEYSYEELIALGEVVGTESKGLAADTIASLPWVTYQAQDKQDGNMEQCVICRVEFDEGESLVALPCKHPYHSECINQWLQLNKVCPMCSAEVPTSVNKQA

SEQ ID NO: 9788 - protein, 357 aa, Zea mays
  Clone ID: TF_ZmC1149_45.pep
MIRLPMYAAFSLLATASAAYYAFSSREQFYPAMVYLSTSKICFVLLLNTGLVAMCVAWQLARRLFLGSLREAEVERLNEQSWREVIEILFAVTIFRQDFSVSFLAMVAALLLVKALHWLAQKRVEYIETTPSVPLLSHIRIVSFMVFLLTVDCLFLSNSLRSLIQKREASVAIFFSFEYTILATSTLSTFVKYIFYVSDMLMEGQWERKAVYTFYLELISDLVHLSLYMLFFIAIFLNYGVPLHLIRELYETFRSFRIRIADYIRYRKITSNMNERFPEATSEELDASDATCIICREEMTTAKKLLCGHLFHVHCLRSWLERQHTCPTCRAPIVPADNGRAASSRQHGAQAGVQPGT

SEQ ID NO: 9789 - protein, 359 aa, Zea mays
  Clone ID: TF_ZmC1149_78.pep
MIRLPTYAAFSLLATASAAYYAFSSREQFYPAMVYLSTSKICFVLLLNTGLVAMCVAWQLARRLFLGSLREAEVERLNEQSWREVIEILFAVTIFRQDFSVSFLAMVAALLLVKALHWLAQKRVEYIETTPSVPLLSHIRIVSFMAFLLTVDCLFLSNSLRSLIQKQEASVAIFFSFEYMILATSTVPTFVKYIFYVSDMLMEGQWEKKAVYTFYLELISDLVHLSLYMLFFIAIFLNYGVPLHLIRELYETFRNFRIRIADYVRYRKITSNMNERFPDATSEELDVSDATCIICREEMTTAKKLLCGHLFHVHCLRSWLERQHTCPTCRAPIIPADNGHAVSARQHGAPAGVQPGTAT

SEQ ID NO: 9790 - protein, 279 aa, Zea mays
  unsure (1)..(279): unsure at all Xaa locations
  Clone ID: TF_ZmC9227_1.pep
MSLYMLFFIAIFLNYGVPLHLIRELYETFRXRIRIADYVRYRKXTSNMNERFPDATSEELDVSDATCIICREEMTTAKKLLCGHLFHVHCLRSWLERQHTCPTCRAPIIPADNGHAVSARQHGAQAGVQPAAGTATPSSEGAPGENMSRHQAKLEAAAAAASLYGRSFVYPPANTLKRSVPPQPASSTPQSEASSSNHQSQKDQEMQSRNSSDGLVPLPLNADGAVGSGTSTRDLENSLQKAQENFIKSQIEMLQIQLQMVQRGAAGLSSSENTEHTED

SEQ ID NO: 9791 - protein, 159 aa, Zea mays
  Clone ID: TF_LIB4826-094-A1-N1-H5.pep
MMGIPLVCYCLAVPKPVIAFCRLLSAVRDAALLMLAVVGLCRFPPDSAVDAGHQPGEVKARLPAVEYGQLLAEHDEQQQSGDHNCDGDAASSDCIVCLETLEAADQVRRLGNCAHAFHRARIDRWIDLGRATCPLCRSDLLPRAPGWASRLGLGRLTRV

SEQ ID NO: 9792 - protein, 246 aa, Zea mays
  unsure (1)..(246): unsure at all Xaa locations
  Clone ID: TF_ZmC3771_2.pep
MDPVPAPSSSRRAAAAPGPCCRFDALRRACAGNAAAAARAAGWAIGALLTCIFAVVGSLVGIFIGAFMGMSTESGMFRGAGVGAVSGAVFSIEAVESCIEIWRSSHSGKYSILFVLDIILSLFSGRIVWEKVSPALQRAVQSQMSLMSTPFIDNSDXFETGSTGGMSRDLIDRIPKTRFSAASNCDQETDSSCCPVCLQDFGARQFVRALPQCQHIFHVRCIDSWLLRHASCPLCRAGVHIDHIHM

SEQ ID NO: 9793 - protein, 97 aa, Zea mays
  unsure (1)..(97): unsure at all Xaa locations
  Clone ID: TF_700345248_FLI.pep
ASISRIVMLTEALFEVLDEIHRQPASLSLSMVSVQAPESVVDSLPXCHICLTEYEDGDQIRTLPCKHEFHLQCVDKWLKEIHRVCPLCRGDVCEVAS

SEQ ID NO: 9794 - protein, 157 aa, Zea mays
  Clone ID: TF_UC-ZMFLB73175A10_FLI.pep
REHRRAVFDSGNEQNTAACPLGIHQIGRCTCNSFFIAEESSARASISRIVMLTEALFEVLDEIHRQPASLSLSMVSVQAPESVVDSLPCKSYKKLETPQCSDDMEQCHICLTEYEDGDQIRTLPCKHEFHLQCVDKWLKEIHRVCPLCRGDVCEVAS

SEQ ID NO: 9795 - protein, 259 aa, Zea mays
  unsure (1)..(259): unsure at all Xaa locations
  Clone ID: TF_ZmC3219_1.pep
ALRGQGRRRKRGRDKGHKREGRRGGGRVTGGIGDDVWCAPGKPXRRRVYCVNCEVARYQMVWRCGRGAEGDRSHRERPCLSRRVTVQEQISSSFMDSPPPPHLDAPLFGADLIPSGRLRRMRGWRHSPGGLEEEIRMFQTRVLLGGMNMYDRYQDWRLDVDNMTYEELLELGDKIGYVNTGLRDDEITRNLRKVKHPSFSSLRFATEMERKCSICQEEFETNEEMGRLDCGHSYHVYCIKQWLSQKNICPVCKTAVSKN

SEQ ID NO: 9796 - protein, 232 aa, Zea mays
  unsure (1)..(232): unsure at all Xaa locations
  Clone ID: TF_ZmC3219_2.pep
VTGGIGADVWCAPGIPFAAEASSVNCVVARHQMLXXXXXXXXXXXXHRERPCLSRRVTVQEQISSSFMDXXXXXXXDVALFGADLXXXXXCQGTRGSRXSAGGLEEEIRMFQTRVLLGGMNMYDRYQDWRLDVDNMTYEELLELGDKIGYVNTGLRDDEITRNLRKVKHPSFSSLRFATEMERKCSICQEEFETNEEMGRLDCGHSYHVYCIKQWLSQKNICPVCKTAVSKN

SEQ ID NO: 9797 - protein, 585 aa, Zea mays
  Clone ID: TF_ZmC4668_1.pep
MDESACRSTAPVGFLRRGSGISLRNQSNEDRSNQYNKQPGKSSNPNPVKLRFTENKEKPRYFQGTFHSSGSRASSVSSSKAPARKYCDERQKQPFLAETDIAESSNRRTEVRRLQSGKKASVFGDGHPYTQKSISEASSSSTITGGLPEEHDLGALYVSGSSGSSAHPVNPRNAALNASAHMQKDKEEMSSGRPQGAPTFVRRHTLPQSFSTGVKSPTAPGTGAQRRGLKNLGCTSISDVLPSGCSSSDSARDRRIEVTKKRTSGAGSSSRSRISEQSNFSQPRASYPGSTGPRARAAEQSASQQTARTNSRNIPDHTDSIRTRRPFTLRARERMMPGEREDSVFALHETVASIHPECGHFHMDGTPPERLGRPFYAELPHAIYSSNRQGSSSQTARRRSTSRTEESPQRMFHGMFWERDGYRGINMEGIAQALLALDRIEHDVELTYEQLLLLETNLLLSGLDLHDQHEDMRLDIDNMSYEELLALEEHIGSVTTALTEEQFTKCVNQSVYEARNSYRDVSKIAADDVKCSVCQEEYVDGEEIGTMQCEHQYHVRCIHEWLKQKNWCPICKASAIPSEMTKGDA

SEQ ID NO: 9798 - protein, 111 aa, Zea mays
  unsure (1)..(111): unsure at all Xaa locations
  Clone ID: TF_LIB4829-029-R1-N1-G3.pep
RAGAGSSVAADAXGXGXGAAECAVCLGVLGEGQMVRQLSGCKHVFHQECIDVWLATRASCPVCRGKAEPPARAEDRATAASAPPRVAAVEMLGDELELASSSTPVAAXPGR

SEQ ID NO: 9799 - protein, 311 aa, Zea mays
  Clone ID: TF_ZmC3804_1.pep
MTEAAVITRYWCHGCEKVIEEAMGEEIKCPFCGGGFIEEMAGEDSEGLQLEREWGTPPGDSEDDDDDDIAHEFEGFIRRHGRASALRRVLDSIQDDLRADRERDNSVLINAFNQALASQGSALLDADEARDGRGGSSNSNDDGLLEEYDVLGAGLSLLLQHLAENDPNRYGTPPAKREAVEALPTVQIAEAVSCSVCLDDLELGSPAKQMPCGHRFHSSCILPWLELHSSCPVCRFELPSEETKDLNEPSDVHRRTESTRENDSESGNSAWPLVPWFFSGLFSVPEPSHTDRGTLTTDQQSPSTNPNAGGN

SEQ ID NO: 9800 - protein, 242 aa, Zea mays
  Clone ID: TF_ZmC60532_1.pep
MGRSFRDSLKVLEADIQHANSIASEFRREYDGASLQMRMAYCPAAHFFLFLVQWTDCNLAGALGLLRILIYKVYADGTTTMCTHERKASIREFYAVIFPSLMQLHERINEVEDRKQKAICLERYRRRDEDPKTVVSEIDDNIEEECGICMEINVKVVLPTCSHAMCIKCYREWRSRSQSCPFCRDSLKRVNSADLWIYTDSNDIVDMATVRRENLRRLFMYIDKLPTVIPESVFDVYDSHVK

SEQ ID NO: 9801 - protein, 192 aa, Zea mays
  unsure (1)..(192): unsure at all Xaa locations
  Clone ID: TF_ZmC12601_2.pep
MASANNDDREAAGILRLLMGMAAAAAPASALPRGGGLMMVQHVILDVNGELFSGGVGGGGVPPASKAAIAALKEVKAGEGEDALGECAICLDAVEGTGKEMPCGHCFHGRCLERWLGVHGNCPVCRRELPAPAKEEEEEDSAASAEGGEEERRRPRAAVVVSYLVFXGGRAGGAAGAXEXEEPWNIRIEDVD

SEQ ID NO: 9802 - protein, 348 aa, Zea mays
  Clone ID: TF_ZmC8390_1.pep
MAMPSSPSPTRLPTASSSYWCYQCDRFVRAASPLSSPACPSCGGGFLEEMSAPPPRPAYLRRPRAHHAADSRAASPFNPVIVLRRSPPAAASFELLYDDGAGSGLRPLPETMSDFLMGSGFQRLLDQLAQIEAAGGLAAGARDAPPPASKAAVQAMPVVSVAAADAHCAVCKEAFHLGAEAREMPCAHIYHADCILPWLALRNSCPVCRHQMPTDAIPLEQEEEATVGLTIWRLPGGGFAVGRFAGGRTPEERELPVVYTEMDGAGFNSGRRPRRVSWGSRQAASTNRGTVRRFLRNVFACFGRGHASSSSRSHAVPELNDDAFSHGSRSRSTSWRLEDGHADATVQS

SEQ ID NO: 9803 - protein, 163 aa, Zea mays
  unsure (1)..(163): unsure at all Xaa locations
  Clone ID: TF_LIB3354-124-Q1-N6-A1.pep
FLKVVCCLYIDLXAKQYREEAPRAVDGAVGGSRVWLLRTVFGGGGADGDVGATEWCQEGGLDDKAMARLPRRKVGAGEALDCAVCIAEVAAGEAARVLPRCGHAFHVGCVDAWLRSHSTCPLCRCPAVDDPPAVATPVADRESPNFPTNVLFFGSQDDVSTGR

SEQ ID NO: 9804 - protein, 147 aa, Zea mays
  unsure (1)..(147): unsure at all Xaa locations
  Clone ID: TF_LIB4721-008-R1-K1-E4.pep
GHRRAVFDSGNEQGTAACPLGIHQTGRCTCDSFLVAEESSARASISRIVMLTEAXFEVLDEIHRQPASLSLSMVSVQAPESVVXSLSCKSYKKLEAPQRSDDMEQCHICLTEYEDGDQIRILSCKHEFHLQCVDKWLKEXHRVCPLC

SEQ ID NO: 9805 - protein, 272 aa, Zea mays
  Clone ID: TF_ZmC97939_1.pep
FGTRRETQLSSVSAALDHQTWASATATATAPKASEEAVSCEGSPEYRLPFSKPHVPSPPQVSDPTNYAMTGKILLAAAGAFAGVLLALVALHLYNSTRRRRLGGNQRRLFRSLAIAGGDEDRRDGDGEGAPPPHRGLDSAVLAAIPVVLIEAGADAGGGDCAVCLAELEPGEKARALPRCGHRFHIECIGAWFRGNATCPLCRADVVVVAPGAIVPAEGGALSEEVRIDVAGDAVAATPNGSTVVPVMGRLHSGRDLEKARRVFASTRFSSF

SEQ ID NO: 9806 - protein, 175 aa, Zea mays
  Clone ID: TF_ZmC3485_1.pep
MATPTTYSVRISSETHKIEAWVVSDEALARQLQEEENTRDAAADTREVAGNVPLESSSPAVEYRPAQNAAQVAREDNVDPDNMSYEQLQALGEAVGIQSRGLSDELISYLEPFRNKCTFFSRKKNSEECVICKTTYRSRQKLIRLPCSHCYHADCITRWLKINKACPVCNEEVFG

SEQ ID NO: 9807 - protein, 305 aa, Zea mays
  unsure (1)..(305): unsure at all Xaa locations
  Clone ID: TF_ZmC26130_1.pep
MSSPAPSPPAGAPSEPLLLPLPPPEFYCYQCEATVSLPEPAAPSSARLLCPLCHSDFIEENPSTPSPPPPPPPPPPPLFLSDSSSSSLSDDPDDDFDLVMDPDVVRAYLSRFAHRHHLQQIGHGPGPHGRGEPPATAASIAALPTVEVAEPTAVCAICKDDLPLASEARKLPCAHLYHSFCIVTWLGMHNSCPVCRFRIPPADDPDQAXHRRSRTRRPRGSPSASAPPHAAASASAAMRHWRLISRRRPRSSHRLLPGMELVDLPIAARLCHLSGLRTPNRIQSCRRHARGVAFLIEPEVPIIRR

SEQ ID NO: 9808 - protein, 185 aa, Zea mays
  Clone ID: TF_ZmC828795_1.pep
MAELALLSPPQRPYNNTHSVISSGSKENLPGDVITPCSRCSRKLLLAGAASFAFCLLSVAACLLLRFLLRRWCRRRRGPGLVQQEEEEAQLKLGGGGGLDAEAIALLPSSFPYHRRGNDNPEVECAVCLGVLDEGQTARQLPGCAHVFHQQCVDAWLASNASCPVCRRRTGPQAEEEAAAAPVDV

SEQ ID NO: 9809 - protein, 92 aa, Zea mays
  unsure (1)..(92): unsure at all Xaa locations
  Clone ID: TF_LIB3354-042-P1-K1-E1.pep
APVFIIIIFCYLLKPSKYIVLHTFELLGLIIPFLIQECCICLCPYEDGXELRELPCNHHFHCSCIDKWLHINATCPLCKFDIIKSNRDIEEV

SEQ ID NO: 9810 - protein, 278 aa, Zea mays
  Clone ID: TF_ZmC42210_2.pep
MDSSPVSYWCYSCSRFVRVSPSTVVCPECDGGFLEQFTQPPPRGGGGSGRRGTMNPVIVLRGGSLSGFELYYDDGAGEGLRPLPGDVQHLLMGSGFHRLLDQFSRLEAAAPRPPASKAAVESMPSVTVAGGGAHCAVCQEACRPGRAGREMPCKHVYHQDCILPWLSLRNSCPVCRQELPAAATPDAEADAGLTIWRLPRGGFAVGRFAGGPREQLPVVYTELDGGFSNGVGPRRVTWPEGDGQVDGGEGRIRRLLRNLFGCFGHGSRPASSSQSRSG

SEQ ID NO: 9811 - protein, 264 aa, Zea mays
  unsure (1)..(264): unsure at all Xaa locations
  Clone ID: TF_ZmC13117_1.pep
CGQQPDPAPRKPKLPQTNTLFPFCPSPAQHAIPPHDHSPAAAAAAAHDHHVGSERGMSFLDPLASLGLGYAIAIAFGFLVLLASVLLASYFCLRRGAASQGFGAGAGVGVGSAPPGTPPPPXSSSGHISITVPRVVFVAEDYDSPGSSSRGPAAAASPVGLDASVIASYPMVPFSKAGAGADTEVACSICLCEYKEGEMLRVMPECRHRFHLTCLDAWLRRSASCPVCRSSPIPTPVATPLSTPLSELVPLSQYAADRRRSRFG

SEQ ID NO: 9812 - protein, 154 aa, Zea mays
  Clone ID: TF_LIB4073-011-Q6-K1-C3.pep
MNSNSRGQNRRIDLVFRPRARTVQPSFFDDPDYDPLWDDDLAAAAAVFGDDDDDYLVAAPAHGSSSKRPHVAAASEEAILRLQEVTGRSRLGSAGEEQCAVCRQDFRADETLRAMPCSHAFHQHCISEWLRRNADCPLCRCRLPDEEEEDKQRR

SEQ ID NO: 9813 - protein, 236 aa, Zea mays
  unsure (1)..(236): unsure at all Xaa locations
  Clone ID: TF_ZmC13088_2.pep
CKIRAPCCGEVFGCRHCHNEAKDSLEVSVHDRHVLPRHDIKLVICSLCNKEQDVQQDCANCGACLGKYFCAKCNLFDDDXGGAENFYHCGRCGCCYATPLKDSHRCVDGAMHHNCITTXPVCMEYLFDSMKAISVLHCGHTIHLECLYEMRAHQQFSCPVCLRSACNMSDIWQKLDQQVAASPMPAIYQKKMVWILCNDCGVTSNVQFHILAHKCPGCSSYNTRQTRGDPAACSRV

SEQ ID NO: 9814 - protein, 256 aa, Zea mays
  Clone ID: TF_ZmC10261_1.pep
MLRPAVNVGTQVPEFNVSQPSTTLRGSSDVFRRSLISAGISHSRSSSIPLQHRGNSSTSHEIRNHQPGSSSRAHQQHPLRPGHSSVDRQSSGYLDLQSFMQTIASREGGRPMSEIRNVFDQIRQGRNARLEDLLLIDRSLIMRRANLIDRHRDMRLDVDNMSYEELLALGERIGYVNTGLTEEKILSNLKQWKCVLKSLDDPPTSVEPCCICQEDYVEGEDLGRLDCGHDFHTACIKQWLVIKNLCPICKKTALDT

SEQ ID NO: 9815 - protein, 299 aa, Zea mays
  Clone ID: TF_ZmC26137_1.pep
IHLIRQVPNPHPPRPNCNLPRVLQVPWPAPRSSPIPIQVSNGSHRWRSSERVRPEPSEDGHLEHAGARGQPAGVRAVQHGGVGGDPGGAGARRAAVPGPGGGGGRGAAAAGGGRDGHGRGAQPRGPVPEQVPAVALRAAPGRGLPRVPGAVRDGVGGAAAPLRPPLPPRLPRDLDRLRPRHLPAVPPPPPAPRRCRRRGAPDCLISALGIESRRSTLHLAAAVSLYRFFFLFLFVRGRERTERRLKEENGGNKAVPPFVSPKLSVVFIHSKSIIYSYEPSTQNCLWACAGVDAKTTILL

SEQ ID NO: 9816 - protein, 133 aa, Zea mays
  Clone ID: TF_LIB3245-012-P2-N1-A7.pep
QANRWPDAAAGGISLSIRILVGASFSGAYLISIYRCLGFTAKFAAAWGFGDWSQFYHCSCVEKKQDGLKADGTGKTPQNELTCSVCLEQVMVGDLLRSLPCLHQFHVNCIDPWLRQQGTCPICKHQVSDGWHA

SEQ ID NO: 9817 - protein, 121 aa, Zea mays
  Clone ID: TF_ZmC3298_15.pep
VPLSLPRPAGSRRCCSRPPLASESLARRRGGRYLAFDQKKQDGLKADGTGKTPQNELTCSVCLEQVMVGDLLRSLPCLHQFHVNCIDPWLRQQGTCPICKHQVSDGWHATGNGEEDASYMV

SEQ ID NO: 9818 - protein, 145 aa, Zea mays
  Clone ID: TF_ZmC3298_6.pep
RANRWPDAAAGGISLSIRILVGASFSGAYLISIYRCLGFTAKFAAAWGFGDWSQFYHCSCVEKKQDGLKADGTGKTPQNELTCSVCLEQVMVGDLLRSLPCLHQFHVNCIDPWLRQQGTCPICKHQVSDGWHATGNGEEDASYMV

SEQ ID NO: 9819 - protein, 120 aa, Zea mays
  Clone ID: TF_ZmC3855_1.pep
MVFVPLVIVVFERSQADVVAYALCLANIIVMVVWLSPDTGSTVSAAKSLLRLSDDEDEGSGGSSGAEDKCCVCLAGMREDQALRALPRCGHSFHDKCIGKWLKAHPTCPVCRATAVPNSS

SEQ ID NO: 9820 - protein, 196 aa, Zea mays
  unsure (1)..(196): unsure at all Xaa locations
  Clone ID: TF_LIB4764-025-R1-K1-F2.pep
MSTASGTRRAPRRQSQDGSADKVVVIIEATSPVVGSRRGPPTPVPGAQNSPIDVEAIEDEVQAVSPSRVPPPRRDRRTRREPITVVDLEVDASQEGNKRQRVVAVDHLSPDWGAGSSLQPNGVQTGKEPAKEVPKEPSFTCPICWNKMEEPSTTTCXHIFCDTCIKQAIKVQKKCPTCRKGLKMNRVHRIFLPNAS

SEQ ID NO: 9821 - protein, 198 aa, Zea mays
  Clone ID: TF_ZmC2205_4.pep
MNTVSGTKRAPRRQSQDGSGDKLVVIVEASSRGVGSRRGPHTPIPGALNSPIDVEAIEDEVQAVSPSRVPLPRRNRRTRREPITVVDLEVEASREGSKRQRVEPVGRHLYPDWGARSSLQSNGVQTGKEPAKEVPKEPSFTCPICWNKMEEPSTTTCGHIFCDTCIKQAIKVQKKCPTCRKGLKMNSVHRIFLPNASS

SEQ ID NO: 9822 - protein, 197 aa, Zea mays
  Clone ID: TF_ZmC2205_9.pep
MSTASGTRRAPRRQSQDGSADKVVVIIEATSPVVGSRRGPPTPVPGAQNSPIDVEAIEDEVQAVSPSRVPPPRRDRRTRREPITVVDLEVDASQEGNKRQRVVAVDHLSPDWGAGSSLQPNGVQTGKEPAKEVPKEPSFTCPICWNKMEEPSTTTCGHIFCDTCIKQAIKVQKKCPTCRKGLKMNSVHRIFLPNASS

SEQ ID NO: 9823 - protein, 76 aa, Zea mays
  Clone ID: TF_uC-zmroB73070d02b1.pep
AVEQSNPCAICLGAMGADGGQAMATFTAECSHTFHFHCISASVAHGHLVCPLCNAQWRELPSVRPSHPLSMPPILP

SEQ ID NO: 9824 - protein, 115 aa, Zea mays
  Clone ID: TF_ZmC36740_1.pep
VVWQDNIEPDNMTYEELLDLGEAVGTQSRGLSQERISSLPVTKYKCGFFSRKKTRRERCVICQMEYRRGNLQMTLPCKHVYHASCVTRWLGINKVCPVCFAEVPGEDPEAMSQQL

SEQ ID NO: 9825 - protein, 475 aa, Zea mays
  unsure (1)..(475): unsure at all Xaa locations
  Clone ID: TF_ZmC38633_1.pep
MDAGECSTSKPPQPSAASPSSPTVWARLVPADSACPTVEVAEDDSVVCSLVAPPCGGEEVAWCEIRRNAGDASFATIRNLSLDAIIVDGRIVKQECVGIKPGSEIVSGPQKEGHLIYTFEITEAEDHEKKNVKIVLDIENAKCSICLNLWHDVVTVAPCLHNFCNGCFSEWLRRSSSNSRDKSQSAACPQCRTTVQSVARNHRMRGLLXAILQAFSSLQRSDEEIALLESYASVKSNMVLGQQKNQSRKRRFSRSSDDTDNSDLPCPQCRNEFGGFRCSPGSVHLQCSGCGGMMPARSNISISQKCLGCDKTFCGAYWYSQGVSSSHCNLICNQDTLKSISQRHISALPDTIHGGNPYEKDITERCIQQSGKTLQVVISEWISKFDNMEIDRSRLQLNNVDAITSRTYICNHCYSKFVDFLLYWFRVSLPQNLLPRDAAERESCWYGFMCRTQHHRPDHAKKLNHVCRPTRGNQP

SEQ ID NO: 9826 - protein, 211 aa, Zea mays
  Clone ID: TF_LIB5116-043-A1-PF1-G8.pep
ISDLVHLSLYMLFFIAIFLNYGVPLHLIRELYETFRNFRIRISDYVRYRKVTSNMNERFPDATPDELDASDVTCIICREEMTTAKKLLCGHLFHVHCLRSWLQRQHTCPTCRAPIIPPDNGRAASAQQHGAQPGVQPGTGTPSSGGAPTENVNMRQLKLEAAASAASLYGRSFAYPPVNTLNRHSGPLHATPSTSQSGEASTSTGHPLEPQ

SEQ ID NO: 9827 - protein, 211 aa, Zea mays
  Clone ID: TF_ZM4578.C2.o3.fg.pep
MSSGGTPPVGLAPVDGNSGGMFSTDRIGGFGYGVGVSVGILLLITTITLASYFCTRAPVDAAGEAAAAAAAPSSSRRHGGGGGGGEGAQAHDVELGIDEDTLKGYPEVVYEKEAKAAAANKKGTTCTCCSICLDNYGDGEVLRMLPDCGHLFHRECVDPWLRYHPTCPVCRTSPVPSPMPTPLAEVTPLAMAGVIVNLGWAQALSVFSISP

SEQ ID NO: 9828 - protein, 228 aa, Zea mays
  unsure (1)..(228): unsure at all Xaa locations
  Clone ID: TF_ZmC21544_4.pep
MEVAEAPDEDGLDERGVALHLHLPRLLAGVVSGALTGLFALAGALTGAVTGAVAGRAXRQRRVLRGAGLGAVAGAVLSIEVLEASRAYWCSDRLRLGSHGASSMANFIEQLLRARFVQEQFTTSGYASYRWQVSISDFGHDDLYDIFGDISSKGLPQESLKKLPHYVVTDQTRADSFGQILSCPICLQDIVAGDTARRLPSCSHTFHQPCVDRWLVDRGSCPVCRQDV

SEQ ID NO: 9829 - protein, 142 aa, Zea mays
  unsure (1)..(142): unsure at all Xaa locations
  Clone ID: TF_uC-zmflteosinte051b01a1.pep
RLLCSDRLRLGSHGASFMAIXIEQLLRXRSVQEQFTTSGYASYRWQVSISDFGHDDLYDIFGDISSKGLPQESLKKLPPILVTDQTRADSFGQILSCPICLQDIVAGDTARRLPSCSHTFHQPCVDRWLVDRGSCPVCRQDV

SEQ ID NO: 9830 - protein, 412 aa, Zea mays
  Clone ID: TF_ZmC21204_1.pep
MDVLPVGSERESQTDSHPLLMEHAIGIPRHDVASTSTPHRDNNDGMDQLPRDSESSSGTTDASYSPNAPLARRDDNRLRRQQSLNSGFWISIELAVNLSQIIAAICVLSVSKNEHPHAPLFEWVIGYTIGCIATLPHLYWRYLQRNQLATVQGSNQNYVPDNSFESSSFTGISPPPVSEAGVVTVSNGVLRNNVVITNPRAQAFADHFKMALDCFFAVWFVVGNVWVFGGHSSAHDAPNLYRLCIAFLTFSCIGYAMPFILCALICCCLPCIISLMGFREDLDENRGATSDAINALGTYRFRSKKPRNGEANEGGGGVFAPGTDKERAVSAEDAVCCICLARYVDNDDLRLLPCGHFFHKDCVDKWLKINALCPLCKAEIDVVPRTAPPAIGFGRRDSHRRVGNDIESQRLP

SEQ ID NO: 9831 - protein, 272 aa, Zea mays
  Clone ID: TF_ZmC483_1.pep
MTSASELFTARRAARGARLSDLDLDPHADALRDQHGLGARHRRRGCRPRRQLDAAGDVRQHLHTGAPPPRRRGSYTDQILSYIDNNNLGVGDSAARRNRLDRLMFRTNERLPGAVLQAQARVLERLRGISLGSSASRPSISLDEFSASDVFRIIDFRNREARHEANRHHSSSFHPSSESDEERPTVSSTHSNRSTGLTKAAFLRLQVEIFEASKDDSREASPECSICLDGFYDGDELIRLRCGHRFHSTCLEPWARKCADCPYCRTNIRSRS

SEQ ID NO: 9832 - protein, 169 aa, Zea mays
  Clone ID: TF_LIB3354-120-Q1-K6-F6.pep
MIPRPSSRFLFVAASPLPQRGLPASVLQSLPVTVYGSPGGKDKDALECAVCLSEVGDGEKVRTLPKCSHGFHVECIDMWFHSHDTCPLCRAPVGDLDALPREEPSGAPLELPVFPTNVLFWGTHDEVTNAGLVAPPRAAPSASSSASGRRKENLVIDIPTRAVATTTTT

SEQ ID NO: 9833 - protein, 302 aa, Zea mays
  Clone ID: TF_ZmC9505_2.pep
HASAHASAPVSAGKSGVLLAAVIFLFMVVVFVFLLYLYAKRYLGANPLLAPSSPSSRFLFVAASPLPQRGLPASVLQSLPVTVYGSPGGKDKDALECAVCLSEVGDGEKVRTLPKCSHGFHVECIDMWFHSHDTCPLCRAPVGDLDALPREEPSGAPLELPVFPTNVLFWGTHDEVTNAGLVAPPRAAPSASSSASGRRKENLVIDIPTRAVATTTTTPPPANSPLPASRMPGSADEMRSPVSARLRSLRRLLSRGKQAMVGTSSSYSPRDIEQGLAGGEAAAAATARPPKTPKTPPSAHAH

SEQ ID NO: 9834 - protein, 134 aa, Zea mays
  Clone ID: TF_700577710_FLI.pep
NCCCCFVRRFMMDQLVFYESRAAAADPHRDMRLDIDNMSYEDLLALGESMGNVNTGLADEKISKCVKEVVCCSSDQTQTDQDDQDDGSCVICLEGYRDKDMLGILKCRHDFHAGCIKKWLQTKNSCPVCKAAAA

SEQ ID NO: 9835 - protein, 225 aa, Zea mays
  unsure (1)..(225): unsure at all Xaa locations
  Clone ID: TF_LIB4974-022-Q1-K1-D10.pep
MEHDAEARRGFARMGFGCKHYRRRCRIRAPCCGDVFHCRHCHNESTKDGHELDRHDVQSVICLVCDTEQPIAQVCCNCGVCMGEYFCAACNFLDDDVDKEQFHCDDCGICRVGGKENFFHCQKCGSCYSTTLRDRHCCIENSMKNNCPICYEYLFDSLRETSVLRCGHTMHLQCFHEMLKHDKFSCPICATPIFDMDKFFKXLDAEMGASYLYTGKGWVVCNDCR

SEQ ID NO: 9836 - protein, 452 aa, Zea mays
  Clone ID: TF_ZmC9878_1.pep
MDPPPVSPDRWGPSQGAGVGPSGLRRYGLNFSASSLLQAPIAALLEYSGVVQSGPALSAHHPSAGPSSPLSASEVDGLLSAAAAGDGEVSIRIQGGPGDTEATGGPDAGTSSEDLIEATAGSEVDQASAAGRGAGATDAEANGGGAGTSGNGGGDRAYQRYDVHHVARWFEQILPFSLLLLVVFIRQHLQGFFVTIWIAAVMFKSNDILRKQTALKGERKISVLIGITVIFMIHVFGVYWWYRNDDLLRPLFMLPPKDIPPFWHAIFVIMVNDTMVRQAAMAVKCMLLLYYKNCRGRNYRRQGQMLTLVEYLLLLYRALLPTSVWYRFFLNKEYGSLFSSLTTGLYLTFKLTSVVEKVQSFLAAVKALSRKDVHYGSYATAEQVLAAGDMCAICQEKMHVPVLLRCKHIFCEDCVSEWFERERTCPLCRALVKPADIRSFGDGSTSLFFQLF

SEQ ID NO: 9837 - protein, 367 aa, Zea mays
  unsure (1)..(367): unsure at all Xaa locations
  Clone ID: TF_ZmC279877_1.pep
QKKRAFYCGDVGEGCRQKFKGYDAAGTIXENYANILVLLLRVXQACDHPLLLXGHESDLGEGNSIERGKQLPKETVTNLLEKVEKGAGICSICNDPPEDAVVTTCGHVFCYQCVHERLTSDGHVCPYALCGNKLSFRSVFTPAVLKLCISPKPEFGEETSCSTAADKPSSICESSYISSKIRAAVEILNSIIKTPALTAGDTTESIPSMAPPVKAIVFSQWTGMLDLLELSLSRNGIQFRRLDGAMSLDLREKEVNGFKTDPEVRVMLMSLKAGNLGLNMVAACHVIMLDPWWNPYAEDQAVDRAHRIGQTRPVTVSRFTVKDTVEDRILALQEKKREMVESAFGEDGSRGTATKLTVEDLRYLFMV

SEQ ID NO: 9838 - protein, 267 aa, Zea mays
  unsure (1)..(267): unsure at all Xaa locations
  Clone ID: TF_ZmC18703_1.pep
AAVLSSSAEESPVKPLRLWVVGYAAQCLVHVGLVCADTRGETRGARRSAYDXRPRCAGTDSSDADSEDDERGLGRSSYTGRGESMNTLISFLXDAIGCYCLSSYGDGAELAALPCRHHFHWSRITTWCFAVFCVAVACLLGIALCCCLPCVIAILYALAGQEGASDADISVLLRYRYSDPSEDGEKGVDEGLMIPILNNSGMSTSERILLREDAECCICLSSYEDGAELSALPCNHHFHWPCITKWLRMNATCPLCKYNILKGSDSA

SEQ ID NO: 9839 - protein, 135 aa, Zea mays
  Clone ID: TF_LIB4764-042-Q2-K1-E12.pep
RLRGRSISPTSTSTTISLATGPSPTAGAGSSSGERDRDSDANISDPEKLAVEAPPPPPPPALVYSAVGTKLVGAAMECAICLAEFADGDTVRVMPVCGHGFHARCIELWLAGGRRSSCPTCRAPDGAAAATPSSS

SEQ ID NO: 9840 - protein, 440 aa, Zea mays
  Clone ID: TF_ZmC11659_1.pep
MSGANSSLPMPPPAPAASALDNVEAKISPSIVFVVAILAIVFFVCGLLHLLVRHLLRLRRRRRRAREDADSVTAFQGQLQQLFHLHDAGVDQAFIDALPVFLYRNVVGAAPGGKDPFDCAVCLCEFSPDDRLRLLPQCSHAFHLECIDTWLLSHSTCPLCRRNLLADLSPASSSPVVVVQLGSGSARDMAASAGGATHDDADGGEPSDRATPAQEMVEVKLGKFVCVEGNSDSASATATDAAGTSGDGDGGASAEEGLGQRRCHSMGSYEYVMDDRASLRVAIKPEPKKKPAASKSRRRGAMSECELGASKRGETSLRLPFPATVPKQQQQSDSDATMAKLAKDSFSVSKIWMVPSSKEDPDAAGERRTVSFRWPVRSKDEGDGRNRKSGSEADWDVEAGSGGGGNSAASSLAEERPSFARRTLLWVVGGRQQSRVGSCS

SEQ ID NO: 9841 - protein, 238 aa, Zea mays
  Clone ID: TF_ZmC22803_1.pep
RVPSLVLTARSLKQLDSAADFSRDYDGACLQMRMSYSPAAHFFLFLVQWTDCSLAGALGLLRILIYKVYVDGSTTMSTHERKASIREFYAVIFPSLMQLPKGISDVDDRRQKAACTERYRRRDEDEGKRPVSEADIEREEECGICMEMNGKVVLPSCSHAMCIKCYRQWRSRSQSCPFCRDSLKRVNSGDLWMLTDCRDVVDMATVTRENIRRLFMYVEKLPLVAPDNIFYAYDSHVK

SEQ ID NO: 9842 - protein, 250 aa, Zea mays
  unsure (1)..(250): unsure at all Xaa locations
  Clone ID: TF_ZmC22803_3.pep
RPRPRGLLQRSRSGLAQVLEADIQHANTLAAGFSRDYDGACLQMRMSYSPAAHFFLFLVQWTDCSLAGALGLLRILIYKVYVDGSTTMSTHERKASIREFYAVIFPSLMQLXQGISDVDDRRQKAACTERYRRRDEDEGKRPVSEADIEREEECGICMEMNGKVVLPSCSHAMCIKCYRQWRSRSQSCPFCRDSLKRVNSGDLWMLTDCRDVVDMATVTRENIRRLFMYVEKLPLVAPDNIFYAYDSHVK

SEQ ID NO: 9843 - protein, 120 aa, Zea mays
  unsure (1)..(120): unsure at all Xaa locations
  Clone ID: TF_LIB3069-029-Q1-K1-D11-TCA.pep
TSPKAFFXRSVINGAHYICHSGGHCPMDTYMRPMCQECGLLKCRQAAMHQECVLSEEQIRLNNLMLXEEEQAHATSLPPRAYXPPQILPQLTPEQLGMIEKLISCQHQCNPGSFSDRSSN

SEQ ID NO: 9844 - protein, 342 aa, Zea mays
  Clone ID: TF_ZmC3751_3.pep
VVNTAILLRRLLPCIVNGVGKTTGMEYPERPGQPLCEYYAKNGTCKFGSNCKFDHPRESGFVPVALNNSGFPLRLGEKECSYYMKTGHCKFGGTCKFHHPELGFLTETPGMYPPVQPSPISSPHPYPHHSNWQMGRPAVVPGSFLPGPYPPMMLPPTVMPMQGWNPYVSPMNQTTPAGGQQAVPAGPSYGLSHQEPTSAVTYGSHYAQLYSSGTSSSNIQEYVFPERPGQPECEHYMKTGTCKYGAACKYHHPQYFSGPKSNCILSPLGLPLRPGSQRCAYYAHHGFCKFGPTCKFDHPMGTPNYSLPAPSLTDLPVAPYPHTFSVTPIAPYLLPPDPRPQF

SEQ ID NO: 9845 - protein, 279 aa, Zea mays
  unsure (1)..(279): unsure at all Xaa locations
  Clone ID: TF_ZmC39160_3.pep
ATAACGFGERCRYNHPRNRXAALEFGGGAKNGAAQYFPERQGQPVCEYYLKTGTCKFGSNCKYHHPKQDGSVQSVILNNNGFPLRPGEKECSYYMKTGQCKFGSTCKFHHPEFGGIPVTPGIYPALQSASVPSPLTYASNWQMGRSPAVPGSYIPGSYTPMMISSGMVPLQGWSPYPASVNHVASGGAQQTVQAGPLYGIGHHGSSTAIAYGGTYLPYSSSAGQSSNNHQEHGFPERPGQPECQYYMRTGDCKFGTTCKYNHPRDWSTPKTNYMFSHLC

SEQ ID NO: 9846 - protein, 172 aa, Zea mays
  Clone ID: TF_ZmC2870_1.pep
MEDVLTPPPQPELAGEKRKREESSLDASIEDAPSAPASTCSAEDAAGSDVARHPMWKTSLCSFFRRRGAGAEGCSHGDSCRYAHTEEELRPRPDGTWDPTSDRAKELRKVAAEAQEEAEEEVTVDEQSLDKCLVGLPRGWTADRLKSLLQDQGISYATAWDKKGMTVGFWDF

SEQ ID NO: 9847 - protein, 419 aa, Zea mays
  unsure (1)..(419): unsure at all Xaa locations
  Clone ID: TF_ZmC493_3.pep
MDDAGRPPPHAPVAVTASASASATAAPAPPQPSATAAVDRSSPDPDALYEEGMWQQMAMDSGATMQPGSYPERPGEPDCTYYLRTGLCRFGMSCRFNHPPDRNLAIASARMKGEYPERAGQPECQYYLKTGTCKFGPTCKFHHPREKAGIAGRVQLNTSGYPLXPGHCKYANTCKFHHPELFNVVPSSRGSPIYTSVHSSASAGPQSYTGTMPSWAFPRASFIPSPRWQSPSNYAPMIVPQGLVQMPSWNSYTGQLQSPGAQQTYGSSQQGEASTGNQGMLSPYRSSSFPVPQYALQRENVFPERPDEPECQYYMKTGDCKFGAVCKFHHPRVRSLPPPDCVLSPMGLPLRPGEELCKFYSRYGICKFGANCKFDHPTVVAPMVYAYGFSASASPASASTNVPMARRLLGSPPGSGYTS

SEQ ID NO: 9848 - protein, 238 aa, Zea mays
  unsure (1)..(238): unsure at all Xaa locations
  Clone ID: TF_ZmC5498_5.pep
LGFCPPPPSIKTPAALARARHGHRTQAHRAGGRQRRGRPEARESTAGCPFGSNCHFLHNFPGGYLAVSKMTNLGGPPVPAPPGRMPMGPGGPDGPPSPALKTRLCNKYNTAEGCKWGSKCHFAHGERELGKPLQMDNSMGAPPMGPGPNGHFMPPPMPIPDMVPHSTFGASATAKISVDASLAGAIIGKSGINTKHISRVTGAKLAIRENEADPTXNIELEGTFDQIXHASAMVTELI

SEQ ID NO: 9849 - protein, 264 aa, Zea mays
  Clone ID: TF_ZmC493_7.pep
MDDAGRAPPPAPAAVTVSATAAPAPTPPSATVAADKSSLDPDALYEEGMWQQMAMNSGATMQPGSYPERPGEPDCTYYLRTGLCRFGMSCRFNHPPDRNLAIASARMKGEYPERVGQPECQYYLKTGTCKFGPTCKFHHPREKAGIAGRVQLNTLGYPLRPNEKECAYYLKTGQCKYANTCKFHHPELFDVVPSSRGSPIYTSVHSSASAGSQSYTGTMSSWTFHELLGVFWEGVFLGGVYVFFFFFFWVVFFFIKSMALPQAL

SEQ ID NO: 9850 - protein, 163 aa, Zea mays
  unsure (1)..(163): unsure at all Xaa locations
  Clone ID: TF_ZmC2222_1.pep
GKXYCDYCDKQFQDTPAARKRHLQGVQHQRARALWYDSIRHQDQHGGASSLLLPDGTLAKGICHHFVRTGTCKYGDSCRYFHPKPDGANPALAAPGPGSGPGPMVQQSDFIANQPNFVGYQGVDINSSSGKILGGHASWGNLPPSLQPPPEGGYPPLPFIDWG

SEQ ID NO: 9851 - protein, 80 aa, Zea mays
  Clone ID: TF_ZmC2222_2.pep
SPRAYATTSSARGLASMGIHVDTSIRSQMVPIQQSDFIANQPNFVGYQGVDINSSSERIVMYDKLDAYHILTSVSCHAMM

SEQ ID NO: 9852 - protein, 317 aa, Zea mays
  Clone ID: TF_ZmC35732_1.pep
DETDIAHQEVLKGSKDKRKETFAEGNTQEECKYYSTPGGCKFGKTCKYLHREGNGGKTEVEKAELNFLGLPLRPGEKECPYYMRTGSCKFATNCKFHHPDPTNASSKEPGLEHENGDVPLQNVQGSSQPSLQMWPDQRALNEQHVPFLAPAPSYSGGMVPPQGMYPSSDWSGYHQVPLNPYYPPGVPFPHFPAAHMNHPMYKAADIPGHQPPPSDEYPERPGQPECQHFVKSGFCKYRMKCRYHHPRSRQSAPPPAGLSPIGLPIKPDQPVCTYYGRYGFCKYGPACMFNHPFNFGPPVPAAGPPLPGQYPTHGNFA

SEQ ID NO: 9853 - protein, 199 aa, Zea mays
  unsure (1)..(199): unsure at all Xaa locations
  Clone ID: TF_jC-zmshLIB3587P032f11b1.pep
AGHGRKRRSREEVPDGDGERGCRRREALQSTIGCPFGEGCRFLHFVPGGYPAVAKMLNLGSPAVSAPSRTHVDHAALTGASHSASSGKTRMCTKYNTTEGCRFGDKCHFAHSERELGKPAYMPYGEPPMGGRFGGRPEPVQPAAMGPPAGNXGASATAKISVDASLAGGXIGXRGGVNTKQISRVTGVKLCIREHESSP

SEQ ID NO: 9854 - protein, 164 aa, Zea mays
  Clone ID: TF_LIB4766-083-R1-K1-H10.pep
KIVWKFSVRPELPTPNTMPLGKYYCDYCDKQFQDTPAARKRHLQGVQHQRARALWYDSIRHQDQHGGGSSLLLPDGTLAKGICHHFVRTGACKYGDSCRYFHPKPNGVNPALAAPGLGSGPAPMVQQSDIIGNQPNFVVYQGVDILHQKIHQESHCCVGARESG

SEQ ID NO: 9855 - protein, 92 aa, Zea mays
  Clone ID: TF_700424071_FLI.pep
HPFDRSAPHSKENEDTQQPVALTLAGLPRREDAEACAFYMRSGTCGFGARCKFDHPPRQRQLKKRRKYPVSGCGTMRIALLMLDAVTAMVGA

SEQ ID NO: 9856 - protein, 50 aa, Zea mays
  Clone ID: TF_ZmC292_11.pep
GRVGQQPVALTLAGLPRREDAEACAFYMRSGTCGFGARCKFDHPPRQDDV

SEQ ID NO: 9857 - protein, 326 aa, Zea mays
  Clone ID: TF_ZmC292_3.pep
SSRAAATAGGGETSVLDLPELAMDCILDQRVRAELRSMAAVCRSMRERCRGDHLWERHMTNRWGRVLGRAARDEWRTHLASASESRAAGGGGGGKRRRWLAALSCVCPVVSWMRPRADGGKSSAPVLDDSIMSWYLSVESGKFWFPAQVYNREHGHVGFMMSCYDAALSYDFHTDTFRARYPPHGRRTVVLEDGVQWDRVRAPPVDTLAHDLHTSDCLHELRPGDHIEIQWRRNKEFPYGWWYGVVGHLESCDGSEHFCRCHLSDTVVLEFNQYTPGSRWRQALVKRKEHREEGNEGDGFYGGIRKLRGNDDISKWRQLWPTDVLE

SEQ ID NO: 9858 - protein, 208 aa, Zea mays
  unsure (1)..(208): unsure at all Xaa locations
  Clone ID: TF_LIB4746-091-R1-K1-D4.pep
MDDAGRAPPPAPAAVTVSATAAPAPTPPSATVAADKSSLDPDALYEEGMWQQMAMNSGATMQPGSYPERPGEPDCTYYLRTGLCRFGMSCRFNHPPDRNLAIASARMKGEYPERVGQPECQYYLKTGTCKFGPTCKFHHPREKAGIAGRVQLNTLGYPLRPNEKECAYYLKTGQCKYANTCKFHHPXELFHVVPSSRGSPIYTSVHSS

SEQ ID NO: 9859 - protein, 67 aa, Zea mays
  Clone ID: TF_ZmC292_8.pep
QQPATLASLPRREDAEACAFYMRSGMCRFGAHCKFDHPPREEAISELQAAGKEGIEGPSLVQRDHDV

SEQ ID NO: 9860 - protein, 216 aa, Zea mays
  unsure (1)..(216): unsure at all Xaa locations
  Clone ID: TF_ZmC1553_10.pep
AGHGRKRRSREEVPDGDGERGCRRREALQSTIGCPFGEGCRFLHFVPGGYPAVAKMLNLGSPAVSAPSRTHVDHAALTGASHSASSGKTRMCTKYNTTEGCGFGDKCHFAHSERELGKPAYMPYGEPPMGGRFGGRPEPVQPAAMGPPAGNFGASATAKISVDASLAGGIIGKGGVNTKQISRVTGVKLCIRDHESSPNLKNIELEGNXDQIKQAR

SEQ ID NO: 9861 - protein, 143 aa, Zea mays
  unsure (1)..(143): unsure at all Xaa locations
  Clone ID: TF_ZmC1553_3.pep
AGHGGNRHGLKEVPAGDDERGCSRREALQSVDASLAGCIIDKGGVNTKQXTGVKLSIRDHESNPNLKNIELEGNFDQIKQASDLLRDLIATISASMPAKNPSSAVAPAGGGQGSGPGGTSSNYKTKLCENFLKLCENFQHDYV

SEQ ID NO: 9862 - protein, 389 aa, Zea mays
  Clone ID: TF_ZmC3751_2.pep
SAVQAGRPREEPAPVNGVGKTTGMEYPERPGQPLCEYYAKNGTCKFGSNCKFDHPRESGFVPVALNNSGFPLRLGEKECSYYMKTGHCKFGGTCKFHHPELGFLTETPGMYPPVQPSPISSPHPYPHHSNWQMGRPAVVPGSFLPGPYPPMMLPPTVMPMQGWNPYVSPMNQTTPAGGQQAVPAGPSYGLSHQEPTSAVTYGSHYAQLYSSSGTSSSNIQEYVFPERPGQPECEHYMKTGTCKYGAACKYHHPQYFSGPKSNCILSPLGLPLRPGSQRCAYYAHHGFCKFGPTCKFDHPMGTPNYSLPAPSLTDVPVAPYPHTFSVTPIAPYLLPPDPRPQYTLAKDPSAYPPQAPGTTYGPVGAISKVYARHTLIRSPTSGAAGMQAS

SEQ ID NO: 9863 - protein, 607 aa, Zea mays
  Clone ID: TF_ZmC5023_1.pep
MAATSPAPAPPRILLAGDAHGRLHQLFKRVKSVNQSTGPFHALLCVGQFFSPEGAAEGSPEDVTDYLEGRASVPIPTYFTGDYGPAAPRLLSKAAAGARGFAPGGIEICPNVFWLRGSNRFTLHGLSVVYLSGRKGLGGPGCYSQDDVDALRALAEEPGIDDLFLTNEWPTGVVSGSDTSNVPNQVLDPNGYDPIVAELVAEIKPRYHIAGTKGVFYSREPYVNDSAAHVTRFIGLANVGNKEKQKFIHAISPTPASVMSSADINAKPPNATLSPYVGSAKSVPIEEAPKRAAENIDSQYWRYDVKRQRHGEAGGGGLCFKFVSSGSCQRGSRCSYRHDEEAVEHYQRNVCFDFLNKGKCERGPECKFVHSLSGETALRDARPPSERRRVESSCWFCLSSPDVESHLVISIGEGYYCTLAKGPLVPNHVLMIPVEHCPSTLMMPPEAEAELGRYKIALSKYFEKQGKTAVYFEWVSPRSHHANLQAVPVPLSKADAVNKIFHLAAKKLGFEFSMVNPDGAKTARESLMSQCESKSGLFYVELPEGRILLHMVDSNEKFPVQFGREVLAGLLSMADRADWRNCKISKEEEIKLVDDFKQGFREFDPAE

SEQ ID NO: 9864 - protein, 428 aa, Zea mays
  unsure (1)..(428): unsure at all Xaa locations
  Clone ID: TF_ZmC5023_2.pep
PTGVVSGSDTSNVPNQVLDPNGYDPIVAELVAEIKPRYHIAGTKGVFYSREPYVNDSAAHVTRFIGLANVGNKEKQXSVMSSADINAKPPNATLSPYVGSAKSVPIEEAPKRAAENIDSQYWRYDVKRQRHGEAGGGGLCFKFVSSGSCQRGSRCSYRHDEEAVEHYQRNVCFDFLNKGKCERGPECKFVHSLSGETALRDARPPSERRRVESSCWFCLSSPDVESHLVISIGEGYYCTLAKGPLVPNHVLMIPVEHCPSTLMMPPEAEAELGRYKIALSKYFEKQGKTAVYFEWVSPRSHHANLQAVPVPLSKADAVNKIFHLAAKKLGFEFSMVNPDGAKTARESLMSQCESKSGLFYVELPEGRILLHMVDSNEKFPVQFGREVLAGLLSMADRADWRNCKISKEEEIKLVDDFKQGFREFDPAE

SEQ ID NO: 9865 - protein, 401 aa, Zea mays
  Clone ID: TF_ZmC202_1.pep
MDRRQELCRNFQRGSCKYGSHCRFVHASSQQQQQAKPNPFGFGLGSRQQQQQQSSFRAQFQQQQQQKPNPFGFGVQGSAAAQSRNAPGQAKPFQNKWVRDPSAPTKQQEAAQPPAAAHTSCTDPESCRQQIAEDFKNETPLWKLTCYAHLRSGPCDITGDISFEELRANAYEQGRQGHPLQSIVEGEKKLKNAKLTDFNNFLNMPRLSVSQTPSFPTVASFPEVKNNSAFGVSQNNGPPVFSSFSQIGVTTNMGPGSRTTPGVPTNTLFGQSTQPSHPTFPAPTFGRSDMKFGVSGPFGSQISQQSSGSFQGSNMSSFGNFSKPHASYQQSPSSSSHHRDIDRQSQDLLSGIVVPTSATNEAPVEDNKNENQDDSIWLKEKWSIGEIPLGEPPQRHVSHVF

SEQ ID NO: 9866 - protein, 152 aa, Zea mays
  unsure (1)..(152): unsure at all Xaa locations
  Clone ID: TF_ZmC493_13.pep
VESPRVRAIASARMKGEYPERVGQPECQYYLKTGTCKFGPTCKFHHPREKAGIAGRVQLNTLGYPLLPVCFFLPVTCPLLHMSVCFAEKESTLLLXNEKECAYYLKTGQCKYANTCKFHHPELFNVVPSSRGSPIYTSVHSSASAGPQSYTG

SEQ ID NO: 9867 - protein, 205 aa, Zea mays
  unsure (1)..(205): unsure at all Xaa locations
  Clone ID: TF_LIB4759-098-Q1-K1-E12.pep
PPPPPPPATAAPAPPQPSATAAVDRSSPDPDALYEEGMWQQMAMDSGATMQPGSYPERPGEPDCTYYLRTGLCRFGMSCRFNHPPDRNLXMKGEYPERAGQPECQYYLKTGTCKFGPTCKFHHPREKAGIAGRVQLNTSGYPLRPNEKECAYYLKTGHCKYANTCKFHHPELFNVVXLSSRGSPIYTSVHSSASAGPQSYTGTMP

SEQ ID NO: 9868 - protein, 227 aa, Zea mays
  Clone ID: TF_LIB5117-029-A1-PF1-C11.pep
RTSGPSGGLSSTRPNAARGFLSHALGVPDRPRPRPNAANSRLPTASFQRRKLAGVIYTASASPSSSSPSSSPFPEREACAGIIYSPLPRCAEPFLEWRKTRKQKMAWMSDQPCRSYIIDGSCKYGSDCLFSHGLDLFGRIEMQIRALLHVPDVYQVPVEHLPWSRPELGIMLRQVGMGWDSWSPNEFARAFHTICVVYNSYGYYAILVGECFTLPGLLTLQSKCDGC

SEQ ID NO: 9869 - protein, 214 aa, Zea mays
  Clone ID: TF_LIB3969-004-Q1-K1-E7.pep
PWVDPASASSWLHPLARRLDCSKRGCCPPHSGAMREGMRERDRGGSPDASGPPPFRGPAYKTKLCALWRGRGGCPRPNCGFAHGEAELRRPPPRASFQPRPRPGRRDYRDHEFRLRPDRRHSPHGRYSPERDIRRRSFHDKRPSSEDRGSSHSRSPIRKSERKHSKSPDGGETDSSVSVRSPDNEDRGKDERYLSSDEKNGHEDHLKQMHLDME

SEQ ID NO: 9870 - protein, 395 aa, Zea mays
  Clone ID: TF_ZmC4867_1.pep
MREGMKERDRGGSPDASGPPPFRGPAYKTKLCALWRGRGGCPRPNCGFAHGEAELRRPPPRASFQPRPRPGRRDYRDNDFRVRPERRHSPYGRFSPERDIRRRSFRDKRQRASSEDRGSSHSRSPIRKSERKHSKSPDGGKTDSSVSFRSSDNEDKGKDERYLSSDEKNGREEQLKQMHLDMEALREDKSKLEAILEKKTDEERKLCSRVEDLELQLNKEKDDFQRMTSKTKKLIKAHGRYIKAQEDLKRSQARFERLADLLASDILKPYTKEQGSIGITANDDPYNANEMSPSDQRQNHVSASRKRPISLPRSEEAKTGKRQRENGDDMIPTPENYRPEDALEHVQDSKGTDRLESFTVKKLRVGDYDDEGNIVSSSNIFADRYKGDDEEVDVD

SEQ ID NO: 9871 - protein, 472 aa, Zea mays
  Clone ID: TF_ZmC28685_1.pep
HLLLAAGASADALAFSGLRAGDLLPRANAAADRDRALRVLLKSPAASPSSSPKKSASPPPPTAAAAAPEPRKEYPPDLTLPDLKSGLFSTDEFRMYSFKVKPCSRAYSHDWTECPFVHPGENARRRDPRRFSYSCVPCPEFRKGGACRKGDNCEYAHGVFECWLHPAQYRTRLCKDEVGCARRICFFAHKPEELRAVNPSAVSVGMQPTVSSPRSSPPNGLDMGAMLNPAWPSSPASRLKTALAAGRELDLDLELLALDQYQQKLFDKVSSPRAGWGGGMGSPLPAAAPSTRAVPDYADLLGSVDPAMLSQLHALSLKQAGDMPAYSSMADTQLHMPASPMVGPNSAFGLDHSMAKAIMSSRASAFAKRSQSFIDRGGRAPAARSLMSQQPTAGAPSMLSDWGSPDGRLDWGVQGDELHKFRKSASFAFRGQSPAPAPAPAEPDVSWVNSLVKDGHAGDIFAQWPEQEQMVA

SEQ ID NO: 9872 - protein, 179 aa, Zea mays
  unsure (1)..(179): unsure at all Xaa locations
  Clone ID: TF_ZmC292_7.pep
MSTSSRPVTPAPHGLIHPLPTSAPSNRISARDDSRKVLNDEDSYPERPGEPDCPYLLSSRCKFKSKCKFNHPKEMVNALGTRTDNEXRPSEPVCSFYAKTGKCKFGAVCKFNHPKLEDIKTSSLIAKETIYRATTDAAAHIGGTDDSVPAKTHAPIAPAEAHNAKGLPIRPVCIYQMVV

SEQ ID NO: 9873 - protein, 59 aa, Zea mays
  Clone ID: TF_jC-zmX700082717a1.pep
MLEKNSFAPGAPFEDQGGGLGAKTTSKPKLCETFVKGVCPFGKGCPFAHGKNEQRKGAV

SEQ ID NO: 9874 - protein, 676 aa, Zea mays
  unsure (1)..(676): unsure at all Xaa locations
  Clone ID: TF_ZmC533_1.pep
MVDLADLEGAGEAARSHLAACGQRDRLAALLELAAADDVAGFREALAGGGGXGDAAELADGVGMWYGRSKAYEPRTPLMVAATYGSVEVVXRWLGLGXVDVNRRPGVDVATPINRREXAVRMAREMRELLLGAGACPVTPDSXDRLPADVILSPCASPDALGDLEMLLGRRRGLAVATSVPSLSSSPPLSTSPDEGXRSPHRXASSLSPITVDRAKKEYPVDPTLPDIKSRVYASDEFRMFAFKVRPCSRAYSHDWTECPFVHPGENARRRDPRKHPYTAVPCPNFRRPGGCPSGDSCEFSHGVFESWLHPSQYRTRLCKEGAACARRICFFAHDEDELRHVPHNSGAGLLSPRASSSIDMTAAAAALGLLPGSPTRHFVPPPLSPSAANNGGGAAAHWLQGSRLRSSFNARDAQADDLGSLLEWESQYLGALSLPQSSRSQPRLSTGLTIRPTAVAPSYLEEMYASDMAMSPRFTNDQGHSVFSPAHKSALLNKFHHQQKGLLSPVNTNRMYSPRGLDPSIIHSPFGGMSPRSPRTMELTSPLSVRVGAAATPRDMLDQFSSLNKHQVPSAGSPRNLNVSWGNIGTPKSKVDWGVDNDELVRLRHPVQPGNTEEEPDVSWVQSLVNHAELSGKRGEMAGMASPSTNKPELSSQDDSLDESVIASWLEQQMHLEPK

SEQ ID NO: 9875 - protein, 105 aa, Zea mays
  Clone ID: TF_LIB5116-018-A1-PF1-C7.pep
MDAGRKRAVPEGTNGGAAVKRARESESVQTGVGSKSKPCTKFFSTAGCPFGSSCHFLHNFPGGHQAVSKMTNLGGPAVSAPQGRMPMGPGVPDGPPTPSLKTRLC

SEQ ID NO: 9876 - protein, 114 aa, Zea mays
  unsure (1)..(114): unsure at all Xaa locations
  Clone ID: TF_LIB4727-020-R1-K2-C6.pep
FGGGTKNGAAQDFPERQGQPVCEYYLKTGTCKFGSNCKYHHPKQDGSVQSVILNNNGFPLRLGEKECSYYMKTXQCKFGSTCKFHHPEFGGIPVTXWIYPPLQSPSVPSPHTYA

SEQ ID NO: 9877 - protein, 91 aa, Zea mays
  Clone ID: TF_LIB3205-035-P1-N1-F9.pep
AKTHAPIAPAEAHNAKGLPIRPGEVDCSFYMKTGSCKYGSICRFNHPDRSVVDIAFMAPVQATLPFPATTKKTEEVSCIRMWYHANRTVNA

SEQ ID NO: 9878 - protein, 165 aa, Zea mays
  Clone ID: TF_LIB5116-066-A1-PF1-D7.pep
MPLGKYYCDYCDKEFQDTAAARRRHLQGAQHHRARALWYDSVRRQESHGGASPLLQPDGAILGQGVCNHFVRTGTCKFGDACRYFHPKPHAVNPAFAPSGPVPGAMGQQSNFLGTQPNFVGYQAMEGNSFSGNILRGHTSWGNLPPSLQPPPEGGYPPLPFVDWG

SEQ ID NO: 9879 - protein, 147 aa, Zea mays
  Clone ID: TF_21209055.pep
ACRYRSGIPGPAHASGQFYMKTGDCKFGAVCKFHHPRERIIPTPNCALSPLGLPLRPGEPICSFYNRYGMCKFGPNCKFDHPMGNAMYGQAPSPASEAPAPRRMLAHVPPSHPEASPDGGSGRSRRIAHSDSQQIPSGERSAEREAS

SEQ ID NO: 9880 - protein, 206 aa, Zea mays
  Clone ID: TF_LIB3587-272-Q1-K6-G8.pep
GHHGGKAVEGVFLQDQDEAVEQCTSDQLRTITDGRCSYGSSCHFNHPRLKAKLEVSSFPSEQRNHEAEFLELNRVGLPIREGARKCIYYMRNGTCRYGKKCCFNHPEQVLDVQHHTATGWDDTNLQSSPHSKKLPEHKTMDDISSGSEVLPPNILRMLLPPQNVPPSTKEKEIRIKKDPDWASASDDSDGCCSADSSNGPLCKQEH

SEQ ID NO: 9881 - protein, 245 aa, Zea mays
  Clone ID: TF_LIB5117-050-A1-PF1-C5.pep
MSGYPFYPYGRGGVGEDASAMSGYPFYPYGRGGVGDDAAARYSSYEIDLIAARYAGDPSPYPYPSASGGFDPHVGARRPADVLYHQSIMGSHSTIGQSYAFYSPNTMVKRPRLESSLPIYPQRPGEKECAFYMRTRTCKYEETCKFDHPQWVPEGGIPNWKEGTKAGESYPERPGEPNCPFFVKTGDCKFGSKCKSNHSKKKDDGTVAGPGDKESLFSGNSTLPVKPSEPCPEPLISYSTLPGEF

SEQ ID NO: 9882 - protein, 213 aa, Zea mays
  Clone ID: TF_ZmC39160_1.pep
LCYVSFLHVKKNCADHVDSAIAYGGTYLPYSSSAGQSSNNHQEHGFPERPGQPECQYYMRTGDCKFGTTCKYNHPRDWSTPKTNYMFSHLCLPLRPGAQPCAYYAQNGYCRYGVACKYDHSMGTLGYSSSALPLSDMPIAPYPIGFSVATLAPSSSSPEYISTKDPSINHVVSPVAGPAPVGAILPKGVFHHDTIMQTQTPTSAGSSSPGGGR

SEQ ID NO: 9883 - protein, 98 aa, Zea mays
  Clone ID: TF_LIB3076-015-Q1-K1-B7.pep
MPFDLSMYLLKVFCVFQVNGVGKTAVTVEYPERPGQPLCEYYAKNGTCKFGSNCKFDHPREGGFVPVTLNSGGFPLRLGEKECSYYMKTGHCKFGATC

SEQ ID NO: 9884 - protein, 220 aa, Zea mays
  Clone ID: TF_21209753.pep
MSDPFYPYYRGAFPGGDGAQPPPRYSDFEVDLIAARYAGTLLPYPSSADVGAFDSYVGARRSAEVLYHQSFMGSHSTVGQNEALYSSNTMAKRPRLESSLPIYPQRPGQKDCAFYMSTGTCKYGETCKFDHPQWVPEGGVPNWKEVLNDEDSYPERPGEPDCPYLLSSRCKFKSKCKFNHPKEMVNALGTRTDNESLIADTAILPVRPSEPVCSFYAKTG

SEQ ID NO: 9885 - protein, 301 aa, Zea mays
  Clone ID: TF_ZmC5498_3.pep
MDTGRKRTAPEGANGAGGPKRARESETTGVGSKSKPCTKFFSTAGCPFGASCHFLHNFPGGYQAVSKMTNLGGPPVPAPPGRMPMGPGGPDGPPSPAVKTRMCNKYNTAEGCKWGSKCHFAHGERELGKPLQMDNPMGPPPMGPGPNGHFMPPPMPFPDMVPPSTFGASATAKISVDASLAGAIIGKGGTNTKHISRVTGAKLAIRDNEADPNHKNIELEGTFDQIKHASAMVTELIVRISGKPPPQAKNNPGRGPGSHAGGPGSNFKTKLCENFNKGSCTFGDRCHFAHGEGELRKPAAA

SEQ ID NO: 9886 - protein, 221 aa, Zea mays
  Clone ID: TF_ZmC1553_7.pep
MDAAARKRSRPESANGGAAGGKRSRESESQQTGLSSKSKPCTKFFSTVGCPFGEGCHFAHFVPGGYQAVSKSHSLGHAAVSAPSRAPADHAASGVKTRMCTKYNTAEGCKFGDKCHFAHGERELGRPPSSYMSQESSYAPPMGGRYGGRHEPPLPASMGPPAGNFGASSTCKVSVDAALAGGIIGKGGVNTKQICRITGVKLSIRDHESNPDLKNIELEGS

SEQ ID NO: 9887 - protein, 209 aa, Zea mays
  Clone ID: TF_ZmC1784_7.pep
MAEHLASIFGTEKDRVNCPFYFKIGACRHGDRCSRLHNKPSVSPTLLLCNMYQRPDMITPGVDAQGNPIDPVKIQGDFEDFYEDIFDELSKHGEVENLHVCDNLADHLIGNVYVQFREEDQAAKALQALQGRFYSGRPIIAEFSPVTDFREATCRQFEEHNCNRGGYCNFMHVKEIGRDLRKRLYGHLHRSRRSHSRSSRSPSPYRHHA

SEQ ID NO: 9888 - protein, 322 aa, Zea mays
  Clone ID: TF_ZmC493_11.pep
RMKGEYPERVGQPECQYYLKTGTCKFGPTCKFHHPREKAGIAGRVQLNTLGYPLRPNEKECAYYLKTGQCKYANTCKFHHPELFNAVPSSRGSPIYTSVHSSASAGPQSYTGTMSSWTFPRASFIPSPRWQSPSNYAPMIVPHGLVQVPSWNSYPGQLQSPGAQQTYGSSQQGEASAGNQGMLSPYRSSSFPVPQYALQRDNVFPERPDEPECQYYMKTGDCKFGAVCKFHHPRVRSQPPPDCVLSPMGLPIRPGEELCKFYSRYGICKFGANCKFDHPTMAAPMGVYAYGFSGSASVAPASTNAPMTRRLLGSPSGSGYMS

SEQ ID NO: 9889 - protein, 444 aa, Zea mays
  Clone ID: TF_ZmC292_1.pep
MSDPFYPYYRGAFPGGDGAQPPPRYSDFEVDLIAARYAGTLLPYPSSADVGAFDSYVGARRSAEVLYHQSFMGSHSTVGQNEALYSSNTMAKRPRLESSLPIYPQRPGQKDCAFYMSTGTCKYGETCKFDHPQRVPEGGVPNWKEAPTVEDSYPERPGEPDCPYLLNSRCKFKSKCKFNHPKDMVNALGTGTNNESLIADSAVLPVRPSEPICVFYAKTGKCKFGAICKFNHPKDIKTSPLIAKETIYTATTDAADAPTEACNAKGLPIRQGEVDCSFYMKTGSCKYGSICRFNHPDRPGPAADITFMVPLVQATLPSSAPIVPAVVEPLPMIYPQRPGETVCDFYMKTGSCKYSQKCKFHHPISRFAPHSKENGDPQQPATLASLPRREDAEACAFYMRSGMCRFGAHCKFDHPPREEAISELQAAGKEGIEGPSLVQRDHDV

SEQ ID NO: 9890 - protein, 556 aa, Zea mays
  Clone ID: TF_ZmC263_1.pep
WSVWSAQEVLDKVAQETPNFGTEQDKAHCPFHLKTGACRFGLRCSRVHFYPDKSITLLMKNMYNGPGLALEQDEGLEVYEEIEQSYEEFYEDVHTEFLKFGELVNFKVCRNGSFHLRGNVYVHYKSLDSALLAYSSMNGRYFAGKQITCEFVAVTRWKAAICGEYMRSRYKTCSHGVACNFIHCFRNPGGDYEWADWDNHPPRYWIRKMVALFGPSVDEMNEKASHTPDFRSSVGSDRKKLKISSNRYVSRGSRNEDVHTRHSPQDYSHSKQERSSHNMNYEYRRHKRDSSAADKHRRQDVGDTNDRQFSTMGNDSKSHRHKHEERHRSDHGNGEKEDDSKTRPRKHCSVRRGSLEVGYSDWSPDFTGTDISKGPSGEKSTSRYDDAKGSRRGSSEYYNLERHHSTAQKQSRNEHSTTRRRRHDIEDYHDEKNDGRGESRKHNRHESNDRWVATNSDVDSDVDRYQSSSCKGTRLGRKDDDPGIEVRHQRSGRSTKDDKRRKHHSGNRWHSGTEEGTSDSSGGDLSSDSWSGRSRNSENFSAHRSKRKRSRSKESG

SEQ ID NO: 9891 - protein, 301 aa, Zea mays; identical to SEQ ID NO: 9885
  Clone ID: TF_ZmC5498_4.pep

SEQ ID NO: 9892 - protein, 115 aa, Zea mays
  Clone ID: TF_ZmC1784_5.pep
MAEHLASIFGTEKDRVNCPFYFKIGACRHGDRCSRLHNKPSISPTLLLCNMYQRPDMITPGVDAQGNPIDPERIQEDFEDFYEDIFVELSKHAEIESLHVCDNLADHMIGNVYVE

SEQ ID NO: 9893 - protein, 81 aa, Zea mays
  Clone ID: TF_ZmC1784_6.pep
MAEHLASIFGTEKDRVNCPFYFKIGACRHGDRCSRLHNKPSISPTLLLCNMYQRPDMITPGVDAQGNPIDPERIQEDFEDF

SEQ ID NO: 9894 - protein, 430 aa, Zea mays
  Clone ID: TF_ZmC493_1.pep
MDDAGRPPPHAPVAVTASASASATAAPAPPQPSATAAVDRSSPDPDALYEEGMWQQMAMDSGATMQPGSYPERPGEPDCTYYLRTGLCRFGMSCRFNHPPDRNLAIASARMKGEYPERAGQPECQYYLKTGTCKFGPTCKFHHPREKAGIAGRVQLNTSGYPLRPNEKECAYYLKTGHCKYANTCKFHHPELFNVVPSSRGSPIYTSVHSSASAGPQSYTGTMPSWAFPRASFIPSPRWQSPSNYAPMIVPQGLVQMPSWNSYTGQLQSPGAQQTYGSSQQGEASTGNQGMLSPYRSSSFPVPQYALQRENVFPERPDEPECQYYMKTGDCKFGAVCKFHHPRVRSLPPPDCVLSPMGLPLRPGEELCKFYSRYGICKFGANCKFDHPTVVAPMVYAYGFSASASPASASTNVPMARRLLGSPPGSGYTS

SEQ ID NO: 9895 - protein, 397 aa, Zea mays
  Clone ID: TF_ZmC493_5.pep
MDDAGRPPPHAPVAVTASASASATAAPAPPQPSATAAVDRSSPDPDALYEEGMWQQMAMDSGATMQPGSYPERPGEPDCTYYLRTGLCRFGMSCRFNHPPDRNLAIASARMKGEYPERAGQPECQYYLKTGTCKFGPTCKFHHPREKAGIAGRVQLNTSGYPLRPNEKECAYYLKTGHCKYANTCKFHHPELFNVVPSSRGSPIYTSVHSSASAGPQSYTGTMPSWAFPRASFIPSPRWQSPSNYAPMIVPQGLVQMPSWNSYTGQLQSPGAQQTYGSSQQGEASTGNQGMLSPYRSSSFPVPQYALQRENVFPERPDEPECQYYMKTGDCKFGAVCKFHHPRVRSLPPPDCVLSPMGLPLRPGEELCKFYSRYGICKFGANCKFDHPTVVAPMVYA

SEQ ID NO: 9896 - protein, 301 aa, Zea mays
  Clone ID: TF_ZmC5498_1.pep
MDTGRKRTAPGGANGAGGPKRARESETTGVGSKSKPCTKFFSTVGCPFGLDCHFLHNFPGGYPAVSKMINLGGPPVPAPPGRMPMGPGGPDGPPSPAVKTRMCNKYNTAEGCKWGSKCHFAHGERELGKPLQMDNPMGPPPMGPGPNGHFMPPPMPFPDMVPPSTFGASATAKISVDASLAGAIIGKGGTNTKHISRVTGAKLAIRDNEADPNHKNIELEGTFDQIKHASAMVTELIVRISGKPPPQAKNNPGRGPGSHAGGPGSNFKTKLCENFNKGSCTFGDRCHFAHGEGELRKPAAA

SEQ ID NO: 9897 - protein, 408 aa, Zea mays
  unsure (1)..(408): unsure at all Xaa locations
  Clone ID: TF_ZmC493_2.pep
MDDAGRAPPPAPAAVTVSATAAPAPTPPSATVAADKSSLDPDALYEEGMWQQMAMNSGATMQPGSYPERPGEPDCTYYLRTGLCRFGMSCRFNHPPDRNLAIASARMKGEYPERVGQPECQXKAGIAGRVQLNTLGYPLRPNEKXECAYYLKTGQCKYANTCKFHHPELFNVVPSSRGSPIYTSVHSSASAGPQSYTGTMSSWTFPRASFIPSPRWQSPSNYAPMIVPHGLVQVPSWNSYPGQLQSPGAQQTYGSSQQGEASAGNQGMLSPYRSSSFPVPQYALQRDNVFPERPDEPECQYYMKTGDCKFGAVCKFHHPRVRSQPPPDCVLSPMGLPIRPGEELCKFYSRYGICKFGANCKFDHPTMAAPMGVYAYGFSGSASVAPASTNAPMTRHLLGSPSGSGYMS

SEQ ID NO: 9898 - protein, 166 aa, Zea mays
  Clone ID: TF_ZmC3518_1.pep
GGRLADEFSGLRLAEEHTTPPPLSPLPAAPVMPKSISVRSPGYLKMIQNGKHRASKPTKGSQRVLVGMEGGVKEEEKLNGGLQFEVYNQGMLKTELCNKWEETGTCPYGNQCQFAHGIAELRPVIRHPRYKTEVCRMVLAGVVCPYGHRCHFRHSITPADLFLPRP

SEQ ID NO: 9899 - protein, 88 aa, Zea mays
  Clone ID: TF_ZmC17484_2.pep
SHETRTCQFGSACEFYHPKDRCSGRGGVIDGTDYGHDFATKSRKPGRELAIYPERPDELECSHYMKHGYCKYKMNCKFHHPRDRLPKK

SEQ ID NO: 9900 - protein, 515 aa, Zea mays
  Clone ID: TF_ZmC292_5.pep
KKSYDACSPPTSTSNSAPATDITTHAGPGGFLPSLARAETLTVEEPTMSDPYNPYYRGAFPGGDGAPPPLPPYSDFDVDLVATRYTGTPRSHPSSGPVGAFESHLGARRFAEVLYQYHQSCMGSHSTVGQSETLYSSITMAKRPRLESSLPIYPQRPGQKDCAFYMSTGTCKYGETCKFDHPQWVPEGGVPNWKEVLNDEDSYPERPGEPDCPYLLSSRCKFKSKCKFNHPKEMVNALGTRTDNESLIADTAILPVRPSEPVCSFYAKTGKCKFGAVCKFNHPKLEDIKTPSLIAKETIYRATTDAAAHIGGTDDSVPAKTHAPIAPAEAHNAKGLPIRPGEVDCSFYMKTGSCKYGSICRFNHPDRSVVDIAFMAPVQATLPFPAPIVPAVALNPAANFLQSFDFHATHVPVEPMPMIYPQRPGEIVCDFYMKTGSCKYAQNCKFHHPIDRSAPHSKENEDTQQPVALTLAGLPRREDADACAFYMRSGTCGFGARCKFDHPPRQDDVLPDPDV

SEQ ID NO: 9901 - protein, 131 aa, Zea mays
  unsure (1)..(131): unsure at all Xaa locations
  Clone ID: TF_LIB3245-496-P1-K1-C3.pep
MGRPTRPPTRPRTRGQSKARESVAMSVSPTVGGXXYNAASANGVMVQKPSNWKTRICNKWEMTGYCPFGSKCHFAHGSTELHKYGGGLVDIDGRDILSTPDSKQAGGSAKAPLESAAASTALPPHADVYHL

SEQ ID NO: 9902 - protein, 450 aa, Zea mays
  Clone ID: TF_ZmC3751_1.pep
MEPYAAAKSGGADAGTGTGLEDSMRRLGLGDDGEAGEEKLPERPGEADCAYYLRTGACGYGERCRYNHPRDRPAPVNGVGKTAVTVEYPERPGQPLCEYYAKNGTCKFGSNCKFDHPRESGFVPVALNNSGFPLRLGEKECSYYMKTGHCKFGGTCKFHHPELGFLTETPGMYPPVQPSPISSPHPYPHHSNWQMGRPAVVPGSFLPGPYPPMMLPPTVMPMQGWNPYVSPMNQTTPAGGQQAVPAGPSYGLSHQEPTSAVTYGSHYAQLYSSGTSSSNIQEYVFPERPGQPECEHYMKTGTCKYGAACKYHHPQYFSGPKSNCILSPLGLPLRPGSQRCAYYAHHGYCKFGPTCKFDHPMGTPNYSISTSSLTDVPIAPYPQSFPVTPMPSYLPSSDLRPQYTQVKDSSANPPPSPGTTYGPVGSISKVYAPHTLIRSPASAAAGMQAS

SEQ ID NO: 9903 - protein, 143 aa, Zea mays
  unsure (1)..(143): unsure at all Xaa locations
  Clone ID: TF_ZmC1553_4.pep
AGHGGNRHGLKEVLAGDDERGCSRREALQSLDASLAGGIIDKGGVNTKQXTSVKLSIRDHESNHNLKNIELEGNFDQIKQASDLLRDLIATISASMPAKNPSSAVAPAGGGRGSGPGGTSSNYKTKLCENFLKLCENFQHDYV

SEQ ID NO: 9904 - protein, 122 aa, Zea mays
  Clone ID: TF_ZmC493_4.pep
DNVFPERPDEPECQYYMKTGDCKFGAVCKFHHPRVRSQPPPDCVLSPMGLPIRPGEELCKFYSRYGICKFGANCKFDHPTMAAPMGVYAYGFSGSASVAPASTNAPMTRHLLGSPSGSGYMS

SEQ ID NO: 9905 - protein, 263 aa, Zea mays
  unsure (1)..(263): unsure at all Xaa locations
  Clone ID: TF_ZmC214_2.pep
MDYTNAIHIIPPMASDARTNAAASPGEDPDIWATEKDYRQWSADQGYNDRNPSSRAGSEQPPPGKKAHGGGGSSDSGGGGSTSKSXAIGKMFFKTKLCCKFRAGTCPYVTNCNFAHGMEELCKPPPNWQEIVATHEDATTKQGEEHQIPIMTSRSVIAGDDGGGGRAYKGRHCKKFYTEEGCPYGDTCTFLHDEQSKARESVAISLLPTIGGGGYNAASASGSMAQNSSNWKTRICNKWEMTGYCPFGSKCHFAHGSTVIPNL

SEQ ID NO: 9906 - protein, 301 aa, Zea mays
  Clone ID: TF_ZmC5498_2.pep
MDTGRKRTAPEGANGAGGPKRARESETTGVGSKSKPCTKFFSTAGCPFGASCHFLHNFPGGYQAVSKMTNLGGPPVPAPPGRMPMGPGGPDGPPSPAVKTRMCNKYNTAEGCKWGSKCHFAHGERELGKPLQMDNPMGAPPMGPGPNGHFMPPPMPFPDMVPPSTFGASATAKISVDASLAGAIIGKSGINTKHISRVTGAKLAIRDNEADPNHKNIELEGTFDQIKHASAMVTELIVRISGKVPPQAKNNPGRGPGSHAGGPASNFKTKLCENFNKGSCTFGDRCHFAHGESELRKPAAA

SEQ ID NO: 9907 - protein, 443 aa, Zea mays
  Clone ID: TF_ZmC1969_1.pep
MAAPSGGGGGGAGEGSSSAAAAATIGVHGVDQVAEAMWQMNLEEAMELGPYPERVGEPDCSYYMRTGMCRFGMTCKFNHPADRKLAVAAARMKGEYPQRIGQPECQYYLKTGTCKFGATCKFHHPREKAAMATRVQLNELGYPLRPNEKECAYYLRTGQCKFGSTCKFHHSQPSTMMVAVRGSVYSPGQSATSPGQHAYQGAVTSWPLSRSASFIASPRWPGHSSYAQVIVPPGLVQVPGWSPYTAQIGSSSSEDQQRTPGAAQYYTGSRQSGTSIGDQGMFSSYQAGSVPVGLYAVQRENLFPERPDQPECQFYMKTGDCKFGAVCKFHHPRERIIPTPNCALSPLGLPLRPGEPICSFYNRYGMCKFGPNCKFDHPMGNAMYGQAPSPASEAPAPRRMLAHVPPSHPEASPDGGSGRSRRIAHSDSQQIPSGERSAEREAS

SEQ ID NO: 9908 - protein, 40 aa, Zea mays
  unsure (1)..(40): unsure at all Xaa locations
  Clone ID: TF_700570940H1.pep
DDFACKYGDKCQFAHSIHVVRSLSRHPKYXTELCRTFQST

SEQ ID NO: 9909 - protein, 123 aa, Zea mays
  unsure (1)..(123): unsure at all Xaa locations
  Clone ID: TF_LIB3959-023-Q1-N6-F11.pep
RKPRASNXXTNRSSRVYKGNGGDKRSEEPKEHRTAGGVELEVYNQGMLKTELCNKWEETGACPYGDQCQFAHGVAELRPVIRHPRYKTQVCRMVLAGEVCPYGHRCHFRHTLTPAERLHLPRP

SEQ ID NO: 9910 - protein, 206 aa, Zea mays
  unsure (1)..(206): unsure at all Xaa locations
  Clone ID: TF_LIB5116-061-A1-PF1-B7.pep
MDAAARKRSRPESANGGSAGGKRSRESESQQTGLSSKSKPCTKFFSTVGCPFGEGCHFAHFVPGGYQAVSKSHSLGHAAVSAASRAPADHAASGVKARMCTKYNTAEGCKFGDKCHFAHGERELGRPPSSYMSQESSXMXPPMGGRXGGRHEPPPPASMGPPAGNFGASSTCKVSVDAALAGGIIGKGGVNTKQICRITGVKLSIR

SEQ ID NO: 9911 - protein, 343 aa, Zea mays
  Clone ID: TF_ZmC214_1.pep
FPSLFSLLRRVRAGSKVGFGPQSSCLWGQRRRWTTPTPSTSSRTPRAPTPGPTRRRPRAPTPASGPPRTTTAIGKMFFKTKLCCKFRAGTCPYVTNCNFAHGMEELRKPPPNWQEIVAAHEEATEQREEHQIPIMTSGSVVAGDGGGGSGGGSQGGRAFKGRHCKKFYTEEGCPYGDTCTFLHDEQSKARESVAISLSPTVGGGGYNAASANGVMVQKPSNWKTRICNKWEMTGYCPFGSKCHFAHGSTELHKYGGGLVDIDGRDILSTPDSKQAGGSAKAPLESAAASTALPPHADVYHLGIQSQRSAIASQRSGQLQRPIQKWKGPDKISRIYGDWIDENE

SEQ ID NO: 9912 - protein, 359 aa, Zea mays
  Clone ID: TF_ZmC214_3.pep
MDYTNAIHIIPDAAGPDAWANAASAAGADASIWATEDDYRQWSAEPGYGDRNPSSRAGSEQPPPGKKARGGGGGSDSGGGGSTSKSRAIGKMFFKTKLCCKFRAGTCPYVTNCNFAHGMEELRKPPPNWQEIVAAHEEATEQREEHQIPIMTSGSVVAGDGGGGSGGGSQGGRAFKGRHCKKFYTEEGCPYGDTCTFLHDEQSKARESVAISLSPTVGGGGYNAASANGVMVQKPSNWKTRICNKWEMTGYCPFGSKCHFAHGSTELHKYGGGLVDIDGRDILSTPDSKQAGGSAKAPLESAAASTALPPHADVYHLGIQSQRSAIASQRSGQLQRPIQKWKGPDKISRIYGDWIDENE

SEQ ID NO: 9913 - protein, 338 aa, Zea mays
  Clone ID: TF_ZmC1969_2.pep
QYYLKTGTCKFGATCKFHHPREKAAMATRVQLNELGYPLRLNEKECAYYLRTGQCKFGSTCKFHHPQPSTMMVAVRGSVYSPGQSATSPGHHAYQGAVTSWPLSRSASFIASPRWPGHSSYAQVIVPPGLVQVPGWSPYAAQIGSSSSDDQQRTPGAAQYYTGSRQSGTPGIGDRGMFSSYQAGSVPVGLYAVQTENVFPERPDQPECQFYMKTGDCKFGSVCKFHHPRERIIPTPNCALSPLGLPLRPGEPICSFYNRYGMCKFGPNCKFHHPMGNPMYGHASSPTSEAQTSRRMLAHVPSHPEVSPDSGSGRSRRIVHSDSQQIPSVERITEREAS

SEQ ID NO: 9914 - protein, 200 aa, Zea mays
  Clone ID: TF_ZmC258661_1.pep
IRHEGTITDGNDVEDQEVHREKVGLSEGYPQKPGKLNCRFYMSTGRCSYGSSCHFNHPRLKAKLEVSSFPSEQRNHEAEFLELNRVGLPIREGARKCIYYMRNGTCRYGKKCCFNHPEQVLDVQHHTATGWDDTNLQSSPHSKKLPEHKTMDDISSGSEVLPPNILRMLLPPQNVPPSTKEKEIRIKKDPDWASASDDSD

SEQ ID NO: 9915 - protein, 208 aa, Zea mays
  Clone ID: TF_ZmC218_39.pep
MAEHLASIFGTEKDRVNCPFYFKIGACRHGDRCSRLHNRPTTSPTIVLANMYQRPDMITPGVDAQGVAIAPEKMQEHFEDFYEDIYEELSKFGEVETLNVCDNLADHMIGNVYVQFREEEQAVAAHNALQGRFYSGRPIIVEYSPVTDFREATCRQFEENSCNRGGYCNFMHVKQIGRELRRKLYGGRSRRSHGRSRSPSPQHRRDNP

SEQ ID NO: 9916 - protein, 307 aa, Zea mays
  Clone ID: TF_ZmC218_81.pep
MAEHLASIFGTEKDRVNCPFYFKIGACRHGDRCSRLHNRPTISPTLVLANMYQRPDMITPGVDAQGQPIDPEKMQEHFEDFYEDIYEELGKFGEIENLNVCDNLADHMIGNVYVQFREEEQAAAAYNALQGRFYSGRPIIVEYSPVTDFREATCRQFEENSCNRGGYCNFMHVKQIGRDLRRKLYGRSASRRYHGRSRSRSPPPQRRGHRDRDDYHHRDRDDYRGGGGGGRGRGSRYDRYDDGAGRGGRHDRYDDGAGRGGRHDRYDDGGRRRHGSPPRRARSPVRESSEERRAKIEQWNREREGKQ

SEQ ID NO: 9917 - protein, 307 aa, Zea mays
  Clone ID: TF_ZmC218_83.pep
MAEHLASIFGTEKDRVNCPFYFKIGACRHGDRCSRLHNRPTISPTLVLANMYQRPDMITPGVDAQGQPIDPEKMQEHFEDFYEDIYEELGKFGEIENLNVCDNLADHMIGNVYVQFREEEQAAAAYNALQGRFYSGRPIIVEYSPVTDFREATCRQFEENSCNRGGYCNFMHVKQIGRDLRRKLYGRSASRRYHGRSRSRSPPPQRRGHRDRDDYHHRDRDDYRGGGGGGRGRGSRYDRYDDGAGRGGRHARYDDGAGRGGRHDRYDDGGRRRHGSPSRRARSPVRESSEERRAKIEQWNREREGKQ

SEQ ID NO: 9918 - protein, 305 aa, Zea mays
  Clone ID: TF_ZmC218_85.pep
MAEHLASIFGTEKDRVNCPFYFKIGACRHGDRCSRLHNRPTISPTLVLANMYQRPDMITPGVDAQGQPIDPEKMQEHFEDFYEDIYEELGKFGEIENLNVCDNLADHMIGNVYVQFREEEQAAAAYNALQGRFYSGRPIIVEYSPVTDFREATCRQFEENSCNRGGYCNFMHVKQIGRDLRRKLYGRSASRRYHARSRSPPPQRRGYREDYHHRDRDEYRGGGGGGGGRGRGSRHDRYDDGAGRGGRHDRYDDGAGRGGRYERYDDGGRRRHGSPPRRGRSPVRESSEERRAKIEQWNRERESKQ

SEQ ID NO: 9919 - protein, 307 aa, Zea mays
  Clone ID: TF_ZmC218_87.pep
MAEHLASIFGTEKDRVNCPFYFKIGACRHGDRCSRLHNRPTISPTLVLANMYQRPDMITPGVDAQGQPIDPEKMQEHFEDFYEDIYEELGKFGEIENLNVCDNLADHMIGNVYVQFREEEQAAAAYNALQGRFYSGRPIIVEYSPVTDFREATCRQFEENSCNRGGYCNFMHVKQIGRDLRRKLYGRSASRRYHGRSRSRSPPPQRRGHRDRDDYHHRDRDDYRGGGGGGRGRGSRYDRYDDGAGRGGRHGRYDDGAGRGGRHDRYDDGGRRRHGSPSRRARSPVRESSEERRAKIEQWNREREGKQ

SEQ ID NO: 9920 - protein, 299 aa, Zea mays
  Clone ID: TF_ZmC218_93.pep
MAEHLASIFGTEKDRVNCPFYFKIGACRHGDRCSRLHNRPTISPTLVLANMYQRPDMITPGVDAQGQPIDPEKMQEHFEDFYEDIYEELGKFGEIENLNVCDNLADHMIGNVYVQFREEEQAAAAYNALQGRFYSGRPIIVEYSPVTDFREATCRQFEENSCNRGGYCNFMHVKQIGRDLRRKLYGRSASRRYHGRSRSRSPPPQRRGHRDRDDYRGGGGGGRGRGSRYDRYDDGAGRGGRHDRYDDGAGRGGRHDRYDDGGRRRHGSPPRRARSPVRESSEERRAKIEQWNREREGKQ

SEQ ID NO: 9921 - protein, 183 aa, Zea mays
  unsure (1)..(183): unsure at all Xaa locations
  Clone ID: TF_ZmC218_25.pep
MAEHLASIFGTEKDRVNCPFYFKIGACRHGDRCSRLHNRPTISPTLVLANMYQRPDITPGVDAQGQPIDPEKXRSRSPPPQRRGHRDRDDYHHRDRDDYRGGGGGGRGRGSRYDRYDDGAGRGGRHARYDDGAGRGGRHDRYDDGGRRRHGSPSRRARSPVRESSEERRAKIEQWNREREGKQ

SEQ ID NO: 9922 - protein, 287 aa, Zea mays
  unsure (1)..(287): unsure at all Xaa locations
  Clone ID: TF_ZmC1784_1.pep
MAEHLASIFGTEKDRVNCPFYFKIGACRHGDRCSRLHNKPSISPTLLLCNMYQRPDMITPGVDAQGNPIDPERIQEDFEDFYEDIFVELSKHGEIESLHVCDNLADHMIGNVYVEFREEEQAARALQALQGRYYSGRPIIAEFSPVTDFREATCRQFEEHSCNRGGYCNFMHVKQVGRDLRRKLFGHLHRSLRSHSRGSRSPSPYRRRGSSSRSRDRDDYPTTXYYYYRSGSGSRRSSERHRSHDSDGSRRRRGRSRSRSRSPVREGSEERRAKIEQWNREREAAQV

SEQ ID NO: 9923 - protein, 287 aa, Zea mays
  Clone ID: TF_ZmC1784_2.pep
MAEHLASIFGTEKDRVNCPFYFKIGACRHGDRCSRLHNKPSISPTLLLCNMYQRPDMITPGVDAQGNPIDPERIQEDFEDFYEDIFVELSKHGEIESLHVCDNLADHMIGNVYVEFREEEQAARALQALQGRYYSGRPIIAEFSPVTDFREATCRQFEEHSCNRGGYCNFMHVKQVGRDLRRKLFGHLHRSLRSHSRGSRSPSPYRRRGSSSRSRDRDDYHDYYYHYYRSGSGSRRSSERHRSHDSDGSRRRRGRSRSRSRSPVREGSEERRAKIEQWNREREAAQV

SEQ ID NO: 9924 - protein, 286 aa, Zea mays
  Clone ID: TF_ZmC1784_3.pep
MAEHLASIFGTEKDRVNCPFYFKIGACRHGDRCSRLHNKPSISPTLLLCNMYQRPDMITPGVDAQGNPIDPERIQEDFEDFYEDIFVELSKHGEIESLHVCDNLADHMIGNVYVEFREEEQAARALQALQGRYYSGRPIIAEFSPVTDFREATCRQFEEHSCNRGGYCNFMHVKQVGRDLRRKLFGHLHRSLRSHSRGSRSPSPYRRRGSSSRSRDRDDYHDYYYHYRSGSGSRRSSERHRSHDSDGSRRRRGRSRSRSRSPVREGSEERRAKIEQWNREREAAQV

SEQ ID NO: 9925 - protein, 284 aa, Zea mays
  Clone ID: TF_ZmC1784_4.pep
MAEHLASIFGTEKDRVNCPFYFKIGACRHGDRCSRLHNKPSISPTLLLCNMYQRPDMITPGVDAQGNPIDPERIQEDFEDFYEDIFVELSKHGEIESLHVCDNLADHMIGNVYVEFREEEQAARALQALQGRYYSGRPIIAEFSPVTDFREATCRQFEEHSCNRGGYCNFMHVKQVGRDLRRKLFGHLHRSLRSHSRGSRSPSPYRRRGSSSRSRDRDDYYYHYYRSGSGSRRSSERHRSHDSDGSRRRRGRSRSRSRSPVREGSEERRAKIEQWNREREAAQV

SEQ ID NO: 9926 - protein, 303 aa, Zea mays
  Clone ID: TF_ZmC17484_1.pep
KKDPDWASASDDSDGGCSAETADGPLCKQEHEDYPERPECPFLLRFGNCKFASSCQYYHPKDKFSSTYHPEDKFQSRYHQKEKSSRHHPKKEPALSGELMVYPDRPSEPDCPFYVKTGSCKFGANCKFHHPKDITPNMQGPASPKRSVAAKEHHAAARATLQDQMYQQQKFPERPGQPDCRYYMQFGKCKFQSACIFNHSKDILSSGWHPAECPFYMKTRTCQFGSACEFYHPKDRCSGRGGVIDGTDYGHDFATKSRNVLQELAIYPERPDELECSHYMKHGYCKYKMNCKFHHPRDRLPKK

SEQ ID NO: 9927 - protein, 319 aa, Zea mays
  Clone ID: TF_ZmC493_6.pep
MSCRFNHPPDRNLAIASARMKGEYPERAGQPECQYYLKTGTCKFGPTCKFHHPREKAGIAGRVQLNTSGYPLRPNEKECAYYLKTGHCKYANTCKFHHPELFNVVPSSRGSPIYTSVHSSASAGPQSYTGTMPSWAFPRASFIPSPRWQSPSNYAPMIVPQGLVQMQSWNSYTGQLQSPGAQQTYGSSQQGEASTGNQGMLSPYRPSSFPVPQYALQRENVFPERPDEPECQYYMKTGDCKFGAVCKFHHPRGEELCKFYSRYGICKFGANCKFDHPTVVAPMVYAYGFSASASPASASTNVPMARRLLGSPPGSGYTS

SEQ ID NO: 9928 - protein, 235 aa, Zea mays
  unsure (1)..(235): unsure at all Xaa locations
  Clone ID: TF_ZmC491307_1.pep
MAEHLASIFGTEKDRVNCPFYFKIGACRHGDRCSRIHNRPTISPTIVLMNMYQRPDMITPGVDAQGQPIDPRKMQEHFEDFYEDIFEELSKFGEIETLNVCDNLSDHMIGNVYVQFREEDQAAAAHTALQGRFYSGRLIIVDFSPVTDFREATCRQYEENTCTRGGHCNFMHVKQIGKDLRKKLFGRYRRSQRGRSRSPSPHHXRERHDRDDYRGRDDFRRGGGGGGGGREGWEQ

SEQ ID NO: 9929 - protein, 235 aa, Zea mays
  Clone ID: TF_ZmC11235_3.pep
MEPPHAEQAVAAVAAGGEGGTASPGTGLEGPVLRRGLDGGGEGEDGELGAGQEADARLPERPGEADCGYYLRTGACGFGERCRYNHPRDRGGTEFGGGTKNGAAQDFPERQGQPVCEYYLKTGTCKFGSNCKYHHPKQDGSVQSVILNNNGFPLRLGEKECSYYMKTGQCKFGSTCKFHHPEFGGIPVTPGIYPPLQSPSVPSPHTYAPNWQMGRSPAVPGSYIPGSYTPMMISS

SEQ ID NO: 9930 - protein, 548 aa, Zea mays
  Clone ID: TF_ZmC4916_435.pep
MDTHRPPHFDGTNFPYYSARMACYLEAIDLGVWRVTRDGMKPLKNPEKPTTSEEKEIHLNARAKNCLYESLSMDIFNQVFTLKTANEIWLKLHELHDGTSNVREQKHCLVLNEYNSFAMKDDELVRYMYSRLNLIINELNSIGINKLGDADIVRKIISLLPQQRYGSIITILHNMEDLSNMTPTIVEDLLFNIDRKKQRKRGCFACGEKGHFRDNCPNMVKPKKERSKGKALTSVRTWNDSSSEDEPPRTRSHRSSSRSSRSSHKCLMARGNKSIPSSSDESSSDDEGEGKPSVDELAEAVEFFQDVCTKQKAQLKTLKNKLVSSQNDYKGLLEKFETFANLNSELSTKIELLECSAPSTATDDSLIKKNEKLKAKLASSQEAIENLLEKMEILSIHNNELTTKLENIGSTPAASLVEIPEIIKKDASTSCFDLIDDSNPCNQVVVENIVVETCSDEVAKENEQLKQEVARLGKALYDKKGKAKQIRPPQDNTIAGVNKPVEGETVICRLCNMEGHKSFQCKAMTGDKQRQKLKQKPSSKISTPTSKR

SEQ ID NO: 9931 - protein, 92 aa, Zea mays
  Clone ID: TF_LIB3245-047-P1-N1-A3.pep
GFLVLNCPMGKRKKPCLVCGLFGHNAKQCKQVDCFICKKGGHMAKDCPDKHKRNDHQSTLCIRCGETGHDMFGCANDYPPDDIEQIRCYACN

SEQ ID NO: 9932 - protein, 446 aa, Zea mays
  Clone ID: TF_ZmC11229_1.pep
FNFHSARSRNLEVLGRRNVPVDLVYKFAPDLIMLDAYETVESWMMARNRLNPGKLIPAMMRYVSEPHAKNETHEVIKYLEFCVKDLNNVDPGVHNLLLSLYAKKEDESQLLQFLDTKFGKGQTNGPDFFYDPKYALRLCLQEKRMRACVRIYSMMSMHAEAVALALKVDLELAKAEADKVEDDEELRKKLWLKVAKHVIEQEKGVKRENIKKAIEFLSETNNLLKIEDILPFFPDFVLIDDFKEEICKSLKDYNSQIEQLKQEMDDATRGADNIRSDIGALAQRYTVIDREQDCGVCRRKILTVGGLHQVGRSYTSVGHMAPFYVFPCGHAFHANCLIGHVTRCSNQVQAERILDLQKRLSLMDRKAAKDNGASVNGEPITSTTPVDKLRSQLDDAVASECPFCGDLMIKEISQPFILPQESDEKASWEIKPQPTPQKILPMTMSI

SEQ ID NO: 9933 - protein, 1292 aa, Zea mays
  Clone ID: TF_ZM3615.C3.o3.fg.pep
MSTQRDHVDPILEDIPVTSSGEEVDPKVLDLAMKIAERMFLKMKEEDAKKKAEEEESRRKAEEDKCKGKFDYNDDLVDLLVSKVLSKVCISPPKEKSPEMMQEVHRNAQAVSIIKGSLCSEEYRKVQGREDARDIWNILKMSHEGDPKAKRHRVEAFESELARYDWIKGESLQSLFDRLMVLVNKIRVLGSEDWSDSKVTRLFMRAYKEKDKSLARMIRDRDDYEDMTPHQLFAKIQQHESEEAPIKTRDSHALITNEQDTPKKNKDHKAKKVVETSSDEDSSSDEDTTMFIKTFKKFVRKNDKFQRKGKKRACYECGQTGHFIADCPNKKEQEAKKEYKKDKFKKGGKTKGHFKKKKYGQAQIGEEWNSDEESSSSEEEEVVANVAIQSTSSSQLFTNLQDDYYTPTCLMAKGDKDALESSILSLNVQNQELQLQLENCKNINASSLLIESKSSSSNNTFCKHCAKCHASCCLTNHARKKSPQVKVKEILKRCSSNDGLKKIEPKYKSLKPNNGRRGLGFNSSKENPSTVHKGWRSPKFIEGTTLYDALGRIHSSNDKSTQVKVYSSGGSSWVLDSGCTNHMTGEEDMFHSLQLTQEAQEIVFGDSGKSKILRREDSSVAFTGRLKGKLYLVDFTTSRVTPETCLVAKSDRGWLWRRRLAHVGMRNLAKLQKDGHIIGLTNVVFEKDRVCGACQVGKQHGVPHQSKNVVTTKKPLELLHMDLFGPMAYISIGGSKYGLVIVDDFSRFTWVFFLSDKGETQETLKKFMRRAQNEFEVKIKKVRSDNGTEFKNTGVEEFLGEEGIKHEFSVPYTLQQNGVVERKNRTLIEAARTMLDEYKTPDNFWAEAVNTTCHAINRLYLHKIYKKTAYELLTGNKPKIDYFRVFDCKCFILNKKVKSSKFAPRVDEGFLLGYASNAHEYRVFNNTTGLVEIAIDVTFDESNGSQGHVSNGTAGNEEPPCEAIKRLAIGEVRPQEKDDDEGTLWMTNEVFDVGAKVVGDKSSTQANPSTSSHPNLEENHQPQRMPTVVEDEHESIDGVVALDQVDDEEEQIQRQPSVPHPRVHHTIQRDHPVDNILGSIRRGVTTRSRLANFCEFYSFVSSLEPLKVEEALGDPDWIIAMQEELNNFTRNEVWSLVPRPKQNVIGTKWVFWNKQDEHGVVTRNKARLVAQGYAQVEGLDFGETYAPVARLESIRILIAYATNHDFKLYQMDVKSAFLNGPLQERVYVEQPPGFEDPRKPNHVYLLHKALYGLKQAPRAWYDCLKDFLIKNGFTIVSGTIIRGTLKTPNLSW

SEQ ID NO: 9934 - protein, 1276 aa, Zea mays
  Clone ID: TF_ZM3973.C7.o2.fg.pep
MSTQRDHVDPLLEEIPVTSSGEEVDPKVLDLAMKIAEKMFLKMKEEDARKKAEEEESRRKAEEDKCKGTFDYNDDLVDLLVSKVLSKVSLNTKGSSTKSRGNDFSKVQFDYSRNYIPNFSSAPLGKLPTLSELNYEEWADKMKSHLIGVHPSLWEIVHVGMYKPAQGEEMTPKMMQEVHRNAQAVSIIKGSLCPEEYRKVQGREDARDIWNILRMSHEGDPKAKRHRVEALESELARYDWTKGESLQSLFDRLMVLVNKIRVLGSEDWSDSKVTRLFMRAYKEKDKSLARMIRDRDDYEDMTPHQLFAKIQQHESEEAPIKTRDSHALITNEQDNLKKSKDHNAKKVVETSSDEDSSSDEDTAMFIKTFKKFVRKNDKFQRKGKKRACYECGQTGHFIADCPNKKEQEAKKEYKKDKFKRGGKTKGYFKKKKYGQAHIGEEWNSDDESSSSEEEEVVANVAIQSTSSAQLFTNLQDDSYTPTCLMAKGDKVTLFSNDFSNDDDDDQIAMKNKMIKEFGLNGYNVITKLMEKLDKRKATLDAQEDLLVLEKERNLELQELIHNKDKEVINMKTSIDNLANEKNALESSMLSLNIQNQELQVQLENCKNINASCLVLESKSRLNDNSCKHCAKYHASCCLTNHARKNSPQVKVKEIFKRCSSNDGLKKVEPKYKSLKPNNGRRGLGFNSSKENPSTVHKGWRSPKFIEGTTLYDALGRIHSSNDKSPQVYSSGGSSWVLDSGCTNHMTGEKDMFHTLQLTQEAQEIVFGDSGKSKVIGIGKIPISDQQSLSNVLLVDSLSYNLLSVSQLCGMGYNCLFSDVDVKILRREDSSVAFTGRLKGKLYLVDFTTSKVTPETCLVAKSDKGWLWHRRLAHVGMRNLAKLQKDNHIIGLTNVVFEKDRVCGACQAGKQHGVPHQSKNVVTTKRPLELLHMDLFGHVAYISIGGSKYGLVIVDDFSRFTWVFFLSDKGETQEILKKFMRRAQNEFELKIKKVRSDNGTEFKNTGVEEFLGEEGIKHEFSVPYTPQQNGVVERKNRTLIEAARTMLDEYKTPDNFWAEAVNTACHAINRLYLHKIYKKTAYELLTGNKPKVDYFRVFGCKCFILNKKVKSSKFASRVDEGFLLGYASNAHGYRVFNNSTGLVEIAIDVTFDESNGSQGHVSNDTAGNEELPCDAIKKLAIGEVRPQERDDEEGTLWMTNEVVDVGARVVSDNVSTQANPSTSSHPSLEQNHQRMPTVVEDEQENIDGEVPLDQITDEEEQIQRHPSVPHPRVHHTI

SEQ ID NO: 9935 - protein, 1503 aa, Zea mays
  unsure (1)..(1503): unsure at all Xaa locations
  Clone ID: TF_ZM4272.C4.o2.fg.pep
MSTQRDHVDPLLEEIPITSSGEEVDPKFLDLAMKIAEKMFLKMKEEDANKKVLSKVSLNTEGSSTKSKGNEFSKVQFDYSRNFIPNFSSAPLGKLPTLSELNYDEWADKMKSHLIDVHPSLWEIVNVGMYKPAQGEEMTPEMMQEVHRNAQAVSIIKGSLCPEEYRKVQGREDARDIWNILKMSHEGDPKAKRHRVEALESELARYDWTKGEPLQSLFDRLMVLVNKIRVLGSEDWSDSKVTRLFMRAYKEKDKSLAWMIRDRDDYEDMTSHQLFAKIQQHEFKEAPIKTRDSHTLITNEQDTPKKNKDHKAKKVKFVRKNDKFQRKGKKRACYECGQTGHFIADCPNKKEQEAKKEYKKDKFKKGGKTKGYFKKKKYGQAHIGEEWNSDEESSSSEEEEVVANVAIQSTSSSQLFTNLQDDSYTPTCLMAKGDKVTLFSNDFPNDDDDEQIAMKNKMIKEFGLNGYNVITKLMEKLDKRKATLDAQEDLLILEKERNLELQELLLNKDEMLDVLTKEDALESSMLSLNVQNKELQVQLENCKNINASSLVIESKSSSSNNTFCKHCAKYHASCCLTNHARKNSPQVKVKEILKRCFSNDGLKKVEPKYKSLKPNNGRRGLGFNSSKENPSTVHKGWRSPKFIEGTTLYDALGRIHSSNDKSTQVKVYSSGGSSWVLDSGCTNHMTGEEDMFHSLQLTQEAQEIVFGDSGKSKMIGIGKIPISDQQSLSNILLVDSLSYNLMSVSQLCGMGYNCLFFDVDVKILRREDSSVAFTGRLKGKLYLVDFTTSKVTPETCLVAKSDKGWLWHRRLAHVGMRILAKLQKDNHIIGLTNVVFEKDRVCGACQAGKQHGVPHQSKNVVTTKRPLELLHMDLFGPVAYISIGGSETQEILKKFMRRAQNEFELKIKQVRSDNGTEFKNTGVEEFLGEEGIKHEFSVPYTPQQNGVVERKNRTLIEAARTMLDEYKTPDNFWAEAVNTACHAINRLYLHKIYKKTAYELLTGNKPKVDYFRVFGCKCFILNKKVKSSKFAPRVDEGFLLGYASNAHGYRVFNNTTGLVEIAIDVTFDESNGSQGHVSNGTAGNEELPCEAIKKLAIGEVRPQEKDDEEGTLWMTNEVVDVGAKVVGDKSSTQANPSTSTHPSLEENHQSQRMPTVVEDEHESVNGEVPLDQVNDEEEQIQRQASVPHPRVHHTIQRDHSVDNILGSIRRGVTTRSCLANFCEFYSFVSSLEPLKVEEALGDPDWIIAMQEELNNFTRNEVWSLVQRPKQNVIGTKWVFRNKQDEHGVVTRNKARLVAQGYTQVEGLDFGETYALVARLESIRILIAYATNHDFKLYQMDVKSAFLNGPLQERVYVEQPPGFEDPKKPNHVYLLHKALYGLKQAPRAXLKYFLGFQVKQLKEGTFLCQTKYTQXFGMEKAKHAKTPMSSNGHLDLNEEDYAGCKVDRKSTTGTCQFLGRSLVSWSSKKQNCVALSTAEAEYIAAGACCAQLLWMKQNLRDFGC

SEQ ID NO: 9936 - protein, 1569 aa, Zea mays
  Clone ID: TF_ZM4333.C6.o1.fg.pep
MSTQRDHVDPLLEEIPVTSSGEEVDPKVLDLAMKIAERMFLKMKEEDAKKKAEEEESRRKAEEDKGKGTFDYNDDLVDLLVSKVLSKVSLNTEGSSTKSKGNEFSKVQFDYSRNYIPNFSSAPLGKLPTLSELNYDEWADKMKSHLIGVHPSLWEIVNVGMYKPAQGEEMTPEMMQEVHRNAQAVSIIKGSLCPEEYRKVQGREDARDIWNILKMSHEGDPKAKRHRVEALESELARYDWTKGESLQSLFDQLMVLVNKIRVLGSEDWSDSKVTRLFMRAYKEKDKSLARMIRDRDDYEDMTPHQLFAKIQQHESEEAPIKIRDSHALITNEQYNPKKNKDHKAKKVVETSSDEDSSSDEDTTMFIKTFKKFVRKNDKFQRKGKKRACYECGQTGHFIADCPNKKEQEAKKEYKKDKFKKGGKTKGYFKKKKYGQAHIGEEWNSDEESSSSEEEEVVANVAIQSTSSAQLFTNLQDDSYTPTCLMAKGDKNVITKLMEKLDKRKATLDAQEDLLILEKERNLELQELIHNKDEMLDVLTKEVSLVKITIENKDKEVINMKTSIANLANEKNALETSMLSLNVQNQELQVQLENCKNINASSLVIESKSSSSNDNSCKHCAKYHASCCLTNHARKNSPQVKVKGILKRCSSNDGLKKVEPKYKSLKPNNGRRGLGFNSSKENPSTVHKGWRSPKFIEGTTLYDALGRIHSSNDKSPQVKVYSSGGSSWVLDSGCTNHMTGEEDMFHSLQLTQEAQEIVFGDSGKSKVIGIGKIPISDQQSLSNVLLVDSLSYNLLSVSQLCGMGYNCLFSDVDVKILRREDSSVAFTGRLKGKLYLVDFTTSKVTPETCLVAKSDKGWLWHRRLAHVGMRNLAKLQKDNHIIGLTNVVFEKDRVCGACQAGKQHGVPHQSKNVVTTKRPLELLHMDLFGPVAYISIGGSKYGLVIVDDFSRFTWVFFLSDKGETQGILKKFMRRAQNEFELKIKKVRSDNGTEFKNTGVEEFLGEEGIKHEFSVPYTPQQNGVVERKNRTLIEAARTMLDEYKTPHNFWAEAVNTACLAINRLYLHKIYKKTAYELLTGNKPKVDYFRVFGCKCFILNKKVKSSKFAPRVDEGFLLGYASNAHGYRVFNNTTGLVEIAIDVTFDESNGSQGHVSNDTAGNEELPCEAIKKLAIGEVRPQEKDDEEGTFWMINEVVDVGAKVVSDKVSTQANPSTSSHPSHEENHQRMPTVVEDEHESIDGEVPLDQVNDEEEQIQRQPSVPHPRVHHTIQRDHLVDNILGSIRRGVTTRSRLANFCEFYSFVSSLEPLKVEEALGDPYWIIAMQEELNNFTRNEVWSLVQKPKQNVIGTKWVFRNKQDEHGMVTRNKARLVAQGYTQVEGLDFGETYAPVARLESIRILIAYATNHDFKLYQMDVKSAFLNGPLQERVYVEQPPGFEDPKKPNHVYLLHKALYGLKQAPRAWYDCLKDFLIKNGFTIGKADSTLFTRKVDNELFVCQIYVDDIIFGSTNENFCEEFSKVMTNRFGMSMMGELKYFLGFQVKQLKEGTFLCQTKYTQDMLKKFGMEKAKHA

SEQ ID NO: 9937 - protein, 436 aa, Zea mays
  unsure (1)..(436): unsure at all Xaa locations
  Clone ID: TF_ZM4642.C3.o3.fg.pep
VDPLLEEIPVTSSGEEVDPKVLDRXLAMKIAERMFLKMKEEDAKKKAEEEESRRKAEEDKGKGTFDYNDDLVDLLVSKVLSKVSLNTKGSSTKSKGNDFSKVQFDYSRNYIPNFSSAPLGKLPTLSELNYDEWVDKMKSHLIGVHPSLWEIVNVGMYKPAQGEEMTPEMMQEVHRNAQAVSIIKGSLCPEEYRKVQGREDACDIWNILKMSHEGDPKAKRHRVEALESELARYDWTKGESLQSLFDRLMVLVNKIRVLGSEDWSDSKVTRLFMRAYKEKDKSLARMIRDRDDYEDMTPHQLFAKIQQHESEEAPIKTRDSHALITNEQDNLKKSKDHKAKKVVETSSDEDSSSDEDTAMFIKTFKKFVRKNDKFQRKGKKRACYECGQTGHFIADCPNKKEQEAKKEYKNDKFKKGGKTKGYFKKKKYGQAHIGEE

SEQ ID NO: 9938 - protein, 1929 aa, Zea mays
  Clone ID: TF_ZM4678.C6.o7.fg.pep
MSTQRDHVDPILEDIPVTSSGEEVDPKVLDLAMKIAERMFLKMKEEDAKKKAEEEESRRKAEEDKGKGKFDYNDDLVDFLVSKVLSKVSLNTEESSTKSKGNEFSKVQFDYSRNFIPNFSSAPLGKLPTLSELNYDEWADKMKSHLIGVHPSLWEIVNVGMYKPAQGEEMTPEMMQEVHRNAQAVSIIKGSLCPEEYRKVQGRDDARDIWNILKMSHEGDPKAKRHRVEALESELARYDWIKGESLQSLFDRLMVLVNKIRVLGSEDWSDSKVTRLFMRAYKEKDKSLARMIRDRDDYEDMTPHQLFAKIQQHESEEAPIKSRDSHALITNEQDNPKKNKDHKAKKVVETSSDEDSSSDEDTTMFIKTFKKFVSKNDKFQRKGKKRACYECGQTGHFIADCPNKKEQEAKKEYKKDKFKKGGKTKGHFKKKKYGQAHIGEEWNSDEESSSSEEEEVEFGLNGYNVIIKLMEKLDKRKATLDAQEDLLILEKERNLELQGLLLNKDEMLDALTKEVSLVKITIEDKEKEVINMKTSIASLANEKDALESSILSLNVHNQELQVQLENCKNIKASSLLIESKSISSNNTFCKHCAKYHASCCLTNHARKKSPQVKVKEILKRCSSNDGLKKIEPKYKSLKPNNGRRGLGFNSSKENPSIVHKGWRSPKFIEGTTLYDALGRIHSSNDKSPQVYSSGGSSWVLDSGCTNHMTGEKDMFHTLQLTQEAQEIVFGDSGKSKVIGIGKIPISDQQSLSNVLLVDSLSYNLLSVSQLCGMGYNCLFSDVDVKILRREDSSVAFTGRLKGKLYLVDFTTSKVTPETCLVAKSDNGWLWHRRLAHVGMRNLAKLQKDNHIIGLTNVVFEKDRVCGACQAGKQHGVPHQSKNVVTTKRPLELLHMDLFGPVAYISIGGSKYGLVIVDDFSRFTWVFFLSDKGENQEILKKFMRRAQNEFELKIKKVRSDNGTEFKNTGVEEFLGEEGIKHEFSVPYTPQQNGVVERKNRTLIEAARTMLDEYKTPDNFWAEAVNTACHAINRLYLHKIYKKTAYELLTGNKPKVDYFRVFGCKCFILNKKVKSSKFAPRVDEGFLLGYASNAHGYRVFNNTTGLVEIAIDVTFDESNGSQGHVSNDTAGNEEPPCEAIKKLAIGEVRPQERDFEEGTLWMTNEIVDVGARVVSDKVSTQANPSTSSHPSHEENHQRMPTVVEDEQESTDGEVPLDQVIDEEEQIQRHPSMPHPRVHQSIQRDHPVDNILGSIRRGPLKVEEALGDPDWIIAMQEELNNFTRNEVWSLVQRPKQNVIGTKWVFRNKQDEHGVVTRNKARLVAQGYTQVEGLDFGETYAPVARLESIRILIAYATNHDFKLYQMDVKSAFLNGPLQERVYVEQPPGFEDQKKPNHVYLLHKALYGLKQAPRAWYDCLKEFLIKNGFTIGKADSTLFTRKVDNELFVCQVYVDDIIFGSTNEKFCEEFSKVMTNRFEMSMMGELKYFLGFQVKQLKEGTFLCQTKYTQDMLKKFGMEKAKHAKTPMSSNGHLDLNEEEAEYIAAGACCAQLLWMKQTLRDFGCLSPAIFSVAQHLFDRSQQLCMQKLFPLSRMTVLPKGGNQMNVLGESRVFFLLLAPNSLARINVFDMIWEEIVRASWSPLKGCVHAPFIMKMIEVVTQTHFEKPVKHSRYVPYWVDSSNPAARTKRAPSRSGGPASSTEPPRQPPHHPSSSPPAAASRPSPGRGSPMPRARGRGRGRGRGMGARLVHGVATFFSMCRNISADVHEVARRQRETDDNLRCQASSMGMPFVPRSPDVPLHPPPPEINEWHQQAYGVPFMSADDEDEEVYVDDREEFAPPPYHGDPGQSSSHPPPPYPGPGPIPGDPRPSGSGYHHHPPPSPDHRTSSASVFSAADEPPRDSTFEEDAMRTFFPDYTSYPPSYPPSYPPPGGY

SEQ ID NO: 9939 - protein, 702 aa, Zea mays
  unsure (1)..(702): unsure at all Xaa locations
  Clone ID: TF_ZM4938.C1.o1.fg.pep
MDTHRPPHFDGTNFPYYSARMACYLEAVDLGVWRVTRDGMKPLKNPEKPTTSEEKEIHLNARAKNCLYESLSMDIFNQVFTLKTANEIWLKLHELHDGTSNVREQKHCLVLNEYNSFAMKDDELVRDMYSRLNLIINELNSIGINKLGDADIVRKIISLLPQQRYGSIITILHNMEDLSNMTPTIVIGKIAAFEMSRKMSQGEEPTSSKPYAFACDERKGKKKAPTPSSSSEEEEEEESDDDEDNQPCTSXRGRRNNSMRRKGXRMIRKINLMGCFTCGEKGHFRDNCPNMAKPKKVRSKGKALTSVTTWDDSSSNKSIPSSSDESSSDDEGEGKPSVDELAEAIEFFQDVCTKKKAQLKTLKNKLVSSQNDYKSLLEKFETFANLNSELSTKIELLESSASSTATDDSLIKKNEKLKAKLASSQEAIENLLEKMEILSIHNNELTTKLENIGSTPAASLVEIPEIIKKDASTSCFDLIDDSNPCNQVVVENIVVETCTDEVAKENEQLKQEVARLGKALYDKKGKAKQIQPPQDNTTAGVNKPVEGETVICRLCHMEGHKSFQCKAMTGDKQRQKLKPSSKISNTYIKKVNKKDATPYLIKKKKNGKVIAIQANKQANKGKGAKRIWVPKEIISTMKSTKKVWIPKGKRVDRRSSGNLETWQSWDVYHGVHHIGLSLLPSGLVKTLDPNFPPMTKIYVSII

SEQ ID NO: 9940 - protein, 413 aa, Zea mays
  Clone ID: TF_ZmC119_1158.pep
MNPPNPPPGGVDPLIAAQMRMMQQMADTMADMRAQMQQERQEMRQEREDARREMHQEREEIRQERRVQQQQLQQQLQQQQQQQQVPLPPPPPPVPPRDKHREFMSHKPPTFSNSTDPLQADDWLKSIEKMLNIAQCSDREKVLYASGRLAGPAADWWDAYCAAHAAVDTITWAEFSTQFRNYHIPAGLMKIKRKEFLSLKQGSMSVSEYRDKFIQLSRYAPRDVEDDEQKQELFLDGLIGPLQYQLVSHTFPSFQRLLDKAIVVENKRSIFGEKRKAANQGQAGSSSRPRYTTTPSTPASGSSGQQTQQAPTAPPKASTSAGPVASNTSTNRACFKCGQPGHYANYCPNRAAYTTPAPMKQGQASAGKSQPISVNRGQAYHAEVETEPGELEIQEEEPVEEEIVGEEVNEQQE

SEQ ID NO: 9941 - protein, 189 aa, Zea mays
  Clone ID: TF_ZmC483969_1.pep
PTYCDDLLAMPCSSTIDYYYSSLSCETNLLKENNKLKNKVKNLSNMFERWHKSEVTHDLIMKNQRRYDDKSGLGFNKSNIKGGQFKLKGNKIFHFMCYKCHEMGHLAKACPNKRKLKLKKEEWRLKHDQCFKCHTWGHLTSMCPTKKLVNPQVKPQPKSRVEQKKNPQKQIKINHEYNGDVGKPRRERI

SEQ ID NO: 9942 - protein, 1316 aa, Zea mays
  Clone ID: TF_ZmC4916_441.pep
MDPKGKGMVVDNNEKESIFNEPKNDKSTDLGSSHKRKDGKKKKTRRIKEIVYYDSDESSSSQKDDDNDYRKTVNSNFSFDYSRIPHSSNSHLLSIPLGKPPHFDGEDYGFWSHKMRSHLFSLHPSIWEIVENGMKFDSSDSPMFINEQIHKNAQATTVLLASLCRDEYNKVSGLDNAKQIWDTLKISHEGNDITMLTKMELVEGELGRFAMIRGEEPTQTYNRLKTLINKIRSYGSTRWTDHDVVRLLLRSFTILDPHLVNNIRENPRYIKMSPEEVLGKFVSGRMMIKEARYVDDALNGPTNEPQPLALKATRSKEALPSKVAQIEATGLNDEEMALIIKRFKSVLKGHKGQPSKTKTKGKRSCFKCGKIGHFIANCPENESDQEHGSKREKKKNYKKAKGEAHLGKEWDSDCSSSDSDNEGLAATAFNKSSLFPNERHTCLMAKEKKVCTRDGTTYDSSSDDESSDEEIDYSSLFKGLDRNKIDKINELIDALNEKDKLLEKQEDLLYEEHDKFVEAQRSHALEVKRNEMLSCELSSCHETISKFRSINDDMNAKLEIANKSNSCEEHVAICTRCKDFDINACSEHLVSISKLNDELASLNAQLKTSKNEFDKLKFARDAYTIGRHPSIKDGLGNKREAKNLTSHKAPISAKEKGKAPMASSVQKNHAFMYHDRRQPRNAYRSCNAYNVFDSHDMVASSSSYMHDRNVGRRNVIHNMPRKNVVNVPRKVNGPSTIYCALNASFAICRKDRKIVARKLGAKCKGDKTCIWVPKDICTNLVGPNKSWVYASGGSSWIIDSGCTNHMTGEKKMFTSYVKNKDSQDSIIFGDGNQGKDKSETQGTLKRFLRRAQNEFELNVKKIRSDNGSEFKNLQVEEFLEEEGIKHEFSAPYTPQQNGVVERKNRTSTGWLYQMDVKSAFLNGPIKEEVYVEQPPGFEDERYPDHVCKLSKALYGLKQAPRAWYECLRDFLIANTFKVGKADPTLFTKTCDGDLFVCQIYVDDIIFGSTNQKSCEEFSRVMTQKFEMSMMGELNYFLGFQAKQLKDGTFISQTKYTQDLLKRFGMKDAKPAKTPMGTDGHTDLNKGGKSIDQKAYRSMIGSLLYLCASRPDIMLSVCMCARFQSDPKECHLVAVKRILRYLVATPCFGLWYPKGSTFDLVGYSDSNYAGCKVDRKSTSGTCQFLGRSLVSWNSKKQISVALSTAEAEYVAAGQCCAQLLWMRQTLRDFGYNLSKVPLLCDNESAIRMAENPVEHSRTKHIDIRHHFLRDHQQKGDIEVFHVSTENQLADIFTKPLDEKTFCRLRSELNVLDSRNLD

SEQ ID NO: 9943 - protein, 1813 aa, Zea mays
  Clone ID: TF_ZmC4916_445.pep
MDPKGKGMVINDKEKETFVNELNNDKPTDSGSGHKRKDGRKKKTRRIKEIVYYDSDESSSSQKDDDNDYRKTVNSNFSFDYSRIPPSSNSHLLSLPLGKPPHFDGEDYGFWSHKMRSHLFSLHPSIWEIVENGMKFDSSDSPMFINEQIHKNAQATTVLLASLCRDEYNKVSGLDNTKQIWDILKISHEGIDITMLTKMELVEGELARFAMIRGEDPTQPYNWLKTLINKIRSYGSTRWTAHDVVHLLLRSFTILDPHLVNNIRENLRYTKMSPEEVLGKFVSGRMMIKEARYVDDALNGPINEPQPLALKATRSKEALPSKVAQIEAAGLNDEEMALIIKRFKSVLKGHKGQPSKTKTKGKRSCFKCGKIGHFIANCPENESDQEHGSKREKKKNYKKAKGEAHLGKEWDSDCSSSDSDNEGLAAIAFNKSSLFPNERHTCLMAKEKKVCTRDGTTYDSSSDDESSDDDEIDYSCLFKGLDRNKIDKINELIDALNEKDKLVEKQEDLLYEEHDKFVEAQRSHALEVKRNEMLSRELSSCHETISKLRSINDDMNAKLEIASKSTSCVENAITCTRCKDINLDAYSEHLACISKLNEEVASLNAQLKTSKSDFEKLKFARDAYTVGRHPSIKDGLGFKREAKNLTSHKTPIPAKEKGKAPMASSVQKNHAFMYHDRRQTRNAYRNYNAYDDFDSHAMFASSSSYMHGRNMSRRNATHHVPRKNIIHAPRKVVNEHSTIYCALNASFAICRKDRKIVARKLGAKCKGDKTCIWVPKDICTNLVGPNMSWVYASGGSSWIIDSGCTNHMTGEKKMFTSYVKNKDSQDSIIFGDGNQGKVKGLDVSVFRRSDGSLAFKGVLDGKLYLVDFAKEEAGLDACLIAKTSMGWLWHRRLAHVGMKNLHKLLKGEHVIGLTNVQFEKDRPCAACQAGKQVGGAHHSKNVMTTSRPLELLHMDLFGPVAYLSIGGSKYGLVIVDDFSRFTWVFFLQDKSETQGTLKRFLRRAQNEFELKVKKIRSDNGSEFKNLQVEEFLEEEGIKHEFSAPYTPQQNGVVERKNMTLIDMARTMLGEFKTPERFWSEAVNTACHAINRVYLHRLLKKTSYELLTSNKPNVSYFRVFGSKCYILVKKGRNSKFAPKAVEGFLLGYDSNTKAYRVFNKSSGLVEISSDVVFDETNSSPREQVVDCDDVDEEDVPTAAIRTMAIGEVRPQEQDERDQPSSSTMVHPPTQDDEQVHQQEAGDQGGAQDDHVMEEEAQPAPPTQVRAMIQRDHPVDQILGDISKGVTTRSRLVNFCEHYSFVSSIEPFRVEEALLDPDWVLAMQEELNNFKRNEVWTLVPRPKQNVVGTKWVFRNKQDEHGVVTRNKARLVAKGYAQVAGLDFEETFAPVARLESIRILLAYAAHHSFRLYQMDVKSAFLNGPIKEEVYVEQPPGFEDERYPDHVCKLSKALYGLKQAPRAWYECLRDFLIVNAFKVGKADPTLFTKTCDGDLFVCQIYVDDIIFGSTNQKSCEEFSRVMTQKFEMSMMGELNYFLGFQVKQLKDGTFISQTKYTQDLLKRFGMKDAKPAKTPMGTDGHTDLNKGGKSVDQKAYRSMIGSLLYLCASRPDIMLSVCMCARFQSDPKECHLVAVKRILRYLVATPCFGLWYPKGSTFDLVGYSDSDYAGCKVDRKSTSGTCQFLGRSLVSWNSKKQTSVALSTAEAEYVAAGQCCAQLFWMRQTLRDFGYNLSKVPLLCDNESAIRMAENPVEHSRTKHIDIRHHFLRDHQQKGDIEVFHVSTENQLADIFTKPLDEKTFCRLRSELNVLDSRNLD

SEQ ID NO: 9944 - protein, 516 aa, Zea mays
  Clone ID: TF_ZM5003.C1.o14.fg.pep
MDPKGKGMVINDKEKESFINEPKDDKPSDSGSSHKKKDGKKKRCIKKIVYYDDSDESSSSQKDEDDYEKKKTIWDTLKISHEGNDVTMLTKMELVEGELGRFAMIRGEEPTQTYNRLKTLVNKIRSYGSTRWTDHDVVRLMLRSFTVLDPHLVNNIRENPRYTKMSPEEILGKFVSGRMMIKEARYVDDALNGPIHEPQAIALKATSSREVLPSKVAQIEAAGLNKDEMALIIKRFKTTLKGRKEHPNKSKTKGKRSCFKCGKIGHFIANCPENDSDQEQEKKREKKKAYKKAKGEAHLGKEWDSDCSSSESDNEGLAASAFNKLSLFPNEHHTCLMAKEKKVYASGGSSWIIDSGCTNHMTGEKKMFTSYVKNKVSQDSIIFSDGNQGKDKSETQGTLKRFLRRAQNEFELKVKKIRSDNGSEFKNLQVEEYLEEEGIKHEFSAPYTPQQNGVVERKNRTLIDMARTMLGEFKTPERFWSEAVNTACHAINRVYLHRLLKKTSYELLNGVFGIGS

SEQ ID NO: 9945 - protein, 1512 aa, Zea mays
  Clone ID: TF_ZmC119_1409.pep
MVNTRRGGGIDLPPNRHTRRIFRQPQPQPVEMDPPPPPPPAGVDPLVAAQMRMMQQMADTMTDMRAQMQQERQEMRQEREDIRRELRQEREEIRQERRAQQQQLQQQMQQQQQQVPLPPPPPPVPPRDKHREFMSHKPPTFASSPDPLDADDWLKSVEKMLNIAQCTDREKVLYASGRLTGPAADWWDSYTAAHDAADTITWAEFSTQFRNYHIPAGLMKIKKKEFLSLKQGSMTVSEYRDKFIQLSRYAPDEVAEDERKQEHFIEGLNGPLQYALVAHTFPSFQRLLDKALAIEHKRVQLGDLKRKAISQGQGSSSVRPRYSSPQGTPARTGGGQRPIQQSPLRTPPPRQATPTGTPTKFSGQSPGTTCYKCGKTGHYANVCPQRIATTPVQNRQQTPGSSKGYSIARVNQVSVDDTPDGGDLVIGMFYVNAIPATILFDSGATHSFMSARYANTNEIPLLNMRKPMIVITPKGPVEANQMTRRLTLTIMGREFGATAIILESSSIDLILGMSWLRKAKAVIACGRGTVELTTAKGERFQVNIAVTSSSMRAMFFMPEEFVGNNIRVVRDFPDVFPEELPGMPPDREVEFVIDLLPGTAPISKRPYRMSVEELKELKKQLTELQEAGYIRPSSSPWGAPVLFVQKKDGSQRMCVDYRSLNDVTVKNKYPLPRIEDLFDQMRGARVFSKIDLRSGYHQMRIRPSDIPKTAFSTRYGLYEFTVMSFGLTNAPAYFMNLMNKVFMEYLDRFVVVFIDDILIYSKNESDHEQHLRLVLQKLRDNQLYAKFSKCEFWIDKVPFLGHIISNGGIAVDPAKVKEIMEWRVPTTVTEIRSFLGLAGYYRRFIEGFSKIAKPMTSLLEKGREFKWDEKCQESFDQLKERLMSPPILIMPDLQKGFDIYCDACGQGLGCVLMQEGHVIAYASRQLRKHELNYPTHDLELAAVVHALKIWRHYIMGTKCQVYTDHKSLKYIFTQKDLNLRQRRWLELIKDYDLEIHYHPGKANLLPDELAKDFERLNLGIVTHTEGVTIELEPTLEQEIRKGQVGDAKIQEIKDLITEGRVPEFTEDEQGTIWFKDRICVLEIDSLRETILKEAHDSDYSIHPGSTKMYQDLKQKYWWYGLKRDVAAHVAKCDVCQRVKAEHQRPAGLLHPLKIPEWKWEKIGMDFTVGLPRTPAGYDSIWVIVDRLTKVAHFIPVRTNYTGAKLAELYMTRIVCLHGVPKKIVSDRGSQFTSRFWKKLHESLDTKLNFSSAYHPQTDGQTERTNQVLEDMLRACALKHGGSWEKSLPYAEFSYNNSYQASLKMSPFEALYGRKCRTPLYWDQTGERQFFGPELIQEAEEQVQMIRENSRIAQSRQKSYADNRRRLLEFKEGDHVYLKVSPLRGMRRFKVKGKLSPRFIGPFLILKRVGEVAYQLELPNHLSDVHDVFHVSQLKKCLRVPEEQLPMEDLSVQDDLTYAEYPIKILDTLTRVTRNKVIKMCKVQWSHHGEDEATWEREEELRIDFPHLFPRSS

SEQ ID NO: 9946 - protein, 1111 aa, Zea mays
  unsure (1)..(1111): unsure at all Xaa locations
  Clone ID: TF_ZM4410.C4.o3.fg.pep
MDTKGKGMVINDKEKESFINEPKDDKPTDSGSSQKKKDGKKKRRIKKIVYYYSDESSSSQKDDEYEEKKKTVNSNFSFNYSCIPHNSNAHLLSIPLATTVLLASLCREEYNKVSGLDNAKKIWDTLKISHEGNDATMLTKMELVEGELGRFAMIRGEELTQTYNRLKTLVNKIRSYGSTRWTDHDVVHQDDARGNTRKVRXGRMMIKEARYVDDALNGPMPIYEPQTVALKATSSREALPSKVAQVEVAGLNEDEMALIIKRFKTVLKGRKEHPNKSKTKGKRSCFKCGKIGHFIANCPNNDSDQEQGKSGKWEKKKTYKKAKGEAHLGKEWDSDCSSSDSDNEGLTASSFNKSALFPNEHHTCLMAKEKKVHTRSLDRTKIDKINELYDALNEKNRLLEKQEDLLYEEHDKFVSAQNSLALEVKRNEMLSCELSTCHESISSLKSINVDLNTKLEIANKSSSCVEHVVICNRCKDFNVDACSEHLISISKLNGEVASLNAQLKTSKNDFDKLKFARDAYTIGRHPSIKDGLGFKREAKNLTSQRAPISNKEKGKAPMANSSQKNHAFIYDRKISRNVHHYRSCNAYDSNAMFASSSSFVHGRDMPRINVVHVYASGGSSWIMDSGCTNHMTGEKKMFTSYVKNKDSQDSIIFGDGNQGKVKGLGKIAISFEHSISNVFLVDSLGKNVMTTSRPLELLHMDLFGPIAYLSIGGSKYGLVIVDDFSRFTWVFFLQDKSETQGTLKRFLRRAQNEFELKVKKIRSDNGSEFKNLQVEEYLEEEGIKHEFSAPYTPQQNGVVERKNKTLLDMARTMLGEFKTPERFWSEAVNTACHAINRVYLHRLLKKTSYELLTGNKPNVSYFCVFGSKCYILVKKGRNSKFAPKAVEGFLLGYDSNTKAYRVFNKSSGLVEVSSDVVFDETNGSPREQVDLNDVDEDDVPTVAIRNMAIVDVRPQEQTEQDQPSSSTMVHPPTQSDEQQNVVGTKWVFCNKQDEHGVVTRNKARLVAKGYAQVAGLDFEETFAPVARLESIHILLAYAAHHSFRLFQMDVKSAFLNDPIKKEVYVEQPHGFEDERYPDHVCKLSKALYGLKQAPRAWYECLRDFLIANAFK

SEQ ID NO: 9947 - protein, 388 aa, Zea mays
  Clone ID: TF_ZM4796.C5.o1.fg.pep
MDPKGKGIVINDKEKESFINEPKDDKPTDSGSSHKKKEGKKKRRIKKIVYYDDSDESSSSQKDNDDNDYEKKKTVNSNFSFDYSRMPHSSNAHLLSIPLASLCRDEYHKVSGMDNAKQIWDTLKISHEGNDVTMLTKMELVEGKLGRFAMIRGEEPTQMYNRLKTLVNKIRSYGSTQWTDHDVVRLMLSSFTVLDPHLVNNIRENPRYTKMTPEEILGKFVSGRMMIKEARYVDDALNGPIHEPQTVALKATRSKEVLPSKVAQVKAAELNKEEMALIIKRFKTTLKGRKEHPNKNKTKGKRSCFKCGKIGHFIANCPNNDSDQEQENKREKKKAYKKAKGEAHLGKKWDSDCSSSDSDNEGLAVSAFNKLSLFPNEHHTCLMAKEKK

SEQ ID NO: 9948 - protein, 310 aa, Zea mays
  Clone ID: TF_ZmC10764_2.pep
MEGKEEGRIFVGGLSWQTDERKLQDAFGRFGKVVDVQIMLERHTNRHRGFGFVTFEDRRAVDSAIKEMRGQELDGRTISVNKAEPKMNTDDTRFDNGGGRDYRGGRGDGPPPGNCYECGRPGHWVRDCPSAAGGRSGRFPSKFSGGGRGDRFSGSDRFSDRYMDDRYDGGRYGYRDQVDARDKYAGGRDRYANDRYSAGGDHFDGDRYGGGPDRYAPNGYGRERERSYERDGVRGGGGYDRNDSRGGGSYDRDGPRGGKGGGYVRDGPRGGVADRYGGGGPARYDGGSYRDRPGPYDRPSRGGGRFDDRH

SEQ ID NO: 9949 - protein, 184 aa, Zea mays
  Clone ID: TF_ZmC7043_1.pep
MARLYIGNLDPRVTARELEDEFRTFGVLRSVWVARKPPGFAFIDFDDKRDAEDAIRDLDGKNGWRVELSRNASGGRGGRDRHGGSESKCYECGETGHFARECRLRIGSGGLGSGRRRSRSRSRSRSPRYRRSPSYGRRSYSPAARSPRRRSVSPARGRSYSRSPQHKGAREESPYDNGYRRSRS

SEQ ID NO: 9950 - protein, 184 aa, Zea mays; identical to SEQ ID NO: 9949
  Clone ID: TF_ZmC7043_2.pep

SEQ ID NO: 9951 - protein, 190 aa, Zea mays
  Clone ID: TF_ZmC7043_3.pep
MARLYIGNLDPRVTARELEDEFRTFGVLRSVWVARKPPGFAFIDFDDKRDAEDAIRDLDDFYGSVGKNGWRVELSRNASGGRGGRDRHGGSESKCYECGETGHFARECRLRIGSGGLGSGRRRSRSRSRSRSPRYRRSPSYGRRSYSPAARSPRRRSVSPARGRSYSRSPQHKGAREESPYDNGYRRSRS

SEQ ID NO: 9952 - protein, 184 aa, Zea mays; identical to SEQ ID NO: 9949
  Clone ID: TF_ZmC7043_4.pep

SEQ ID NO: 9953 - protein, 184 aa, Zea mays; identical to SEQ ID NO: 9949
  Clone ID: TF_ZmC7043_5.pep

SEQ ID NO: 9954 - protein, 197 aa, Zea mays
  Clone ID: TF_ZM4454.C1.o3.fg.pep
MDYHLHTVSAPSSHQFQETKGKHGKSQEITSRKACYLCGREGHYFRNYLEKSSLPDTSEIKLSQSLDMEYEQKCVETFINIVKNNKRYRKTFGYMSSPPQPQAKAPKNMDTQTEESSQTQLYEIQTPNHPSFPIGQAKLTRKELNARGACFYCKNEEHIIHECPKKRLDRLKKKTVKQDPNNNPEDQPVISTMMKIG

SEQ ID NO: 9955 - protein, 1216 aa, Zea mays
  unsure (1)..(1216): unsure at all Xaa locations
  Clone ID: TF_ZM4992.C2.o1.fg.pep
MSGDHAKREIETGDKPASLGKAPSRESGNKAKEGSPPSIKLHRSGDKKKKMKKVVYYETDSSSPSTSSSEASIASKRHERKKYSKMPLCYPRISKRTPLLSVPLGKPPYFDGEDYCMWSDKMRHHLTSLHASIWDIVEFGAQEYNKVQELKSAKEIWDVLKTAHEGDEVTKITKHETIEGELGRFVLNKGEEPQAMYNRLKTLVNQVRNLGSTKWDDHEMVKVILRSLVFRNPTQVQLIRGDPRYMLMSLEEQRRGEDYKPRSKRVCYKCGKPGHFIAKCTNSSDSDRGDDKKGNKREKKRYYKKKGGDAHVCREWDSDESSTDSSSDEDDTNIVVNKGLLFSNVGHKCFMAKDDKKKEVEKCENLTKELNICNDSIISLRNENASLNAKIDELNVCNDTISSLRTENDNLISKIKELSVCKDSISCLRNDNAILHAKIEELNVCKPSTSTVEHVSICTRCRDINVEAIDDHLAIIKQQNDHIAKLTAKINEHELENEKFKFARSMLYNGRRHGIKDGIGFQQGSNVKLNAPKRLSNFVKGKAPMVQDNEGYILYPANYPEHKIRRIHARKPHNVSHHAFMYKNEASSSRHSTRVKMPKKKTPAVSNESNISFKTFDASYVFTNKSDKVVAKYVGGKHKGSKTCVWVPKEKPQTQETLKGFLRRAQNEFGLRIKKIRSDNGTEFKNSQIEGFLEEEGIKHEFSSPYTPQQNGVVERKNRTLLDMARTMLDEYKTLDRFWAEAINTACYSINRLYLHQILKKTSYELLTGRKSKFAPKAVEGFLLGYDSNTRAYRVFNKSTRLVEVSYDIVFDETNGSQVEQSPYKHKINRHLPIKHLHQLKMRNRXQDNKDEDQEDEPPQEEDNDQGGDEENEDKEDDQEIXVKDRHTQESTKQFNEITPSTASLVTFIRGVEDALRDSDWVLAMQEELNNFTRNEVWYSVPRLNPNVVGTKWVFRNKQDEHGVVTRNKAQLVAKARLELIRILLAYATYHGFKLYQMDVKSAFLNGPIKEEVYIEQPPRFEYGEYPNHVYKLSKALYGLKQAPRGWYECLRDFLITNGFKVGKADPILFTKIVAKDLFKIEMSMMGELKYFLGFQIKQLQEGTFICQTKYIQDILKKFGMKDGKPIKTPMGTNGHLDLDTGGKPVDQKVYRSMIGSLLYLCASQPDIMLSVCMCARFQANPKEVHLRAVKRIMRYLVYTPKFGLWYPKGSTFDLI

SEQ ID NO: 9956 - protein, 224 aa, Zea mays
  Clone ID: TF_ZmC210941_1.pep
CLFQMAGRARRGQNECIPPPPPPPPTMQELMAQQNEILRQLAQRQPPPQHYGGGDHHQRPPAAATYQEFLSTQPPLFTRAEDPLDADVWLRVVESKFPLLTGVCSDVAKVCFATQQLRGPARTWWIHFLAMQPVDHAVEWGEFKAAFRGHHIPAGIMDRKLNEFLALTQGNRTVLHYTQAFNDLCQYVGYLADTDEKKRDRFRRASVLSSATVSIQSGPIAIMS

SEQ ID NO: 9957 - protein, 285 aa, Zea mays
  Clone ID: TF_ZmC4527_1.pep
AEIIRDYKTGDSLCYAFIEFDTKEACERAYFKMDNCLIDDRRIHVDFSQSVSKLWGQFRQSKRNAKKDGCFKCGAPDHLARDCDQDGEQKNKGPSYVLKDENTQRGGNHRRSYDLVFDEDEADCSEERDHENGHRRKNRRIDDRKSELPPRGGRDRNSHERTHSDEKGSKHGKDDRNRGDRKHDDYHSYSRSGDRSSGRNDDRDYSKRHDRSRSGEEEKGYRRRDKSDGERHHRDDGYDRRRRDEDSHRKRSPDSKHRREDGGHHVRNQQSDDRSYKERRHRDGR

SEQ ID NO: 9958 - protein, 674 aa, Zea mays
  Clone ID: TF_ZmC10872_11.pep
MSGKSAKREMETGKKATSHGKAPSRESSTKAKEGSPPCVKSHRRGDKKKKMKRVVYYEIDSSLPFRSDSNATSITSKRQERKKYSKMPLRYPRISKRTPLLSVPLGKPPCFDGEDYSMWSDKMRHHLTSLHESIWNIVEFGVQVPKVGDDGYDSDEVAQIRHFNSQATTILLASLCREESNKVQGLKSAKKIWDVLKTAHEGDEVTKITKRETIEGELGRFILNQGEEPQTMYNWLKTLVNQVRNLGSTKWDDHEMLKVIHRSLTFCNPTQVQLICGDPRYKLMSLEEVIGKFVSFELMIKNSKHIVNLEQGATSTPKVQPVAFKATEEKKEESTSSRLPIDASKLDNEEMALIIKSFRQILKQRRGKDYKPRSKRVCYKCGKPGHFIAKCPMSGDSDRGDDKRGKKKEKKRYYKKKGSDAHVCREWDSDESSIDSSDEDAANIVVNKGLLFPNVGHKCFMAKDGKKKKVQTRTTPKYTTSSDEGSSSEDEDDLLTLFANLNMQQKEKLNELIGAIHDKDELLDSQEEFLIKENKRHVKFKNAYAQEVEKCEKLSKELSICHESISNLRTENANLIANVEKLNVCNDSISNLRKENASLIAKIDELNVCKKSISCLKNENATLHAKIEELNVCKPSTSTIDHCWGLVLKCCELRIRQHKMLKFKALRPLKHYFP

SEQ ID NO: 9959 - protein, 911 aa, Zea mays
  Clone ID: TF_ZmC951_370.pep
MILKVFLRRKISRDISVEYLGSISGKNLKGITREISGQYFWKEFEGDNGETFVSKFEKISRFEFLGCYNSQATTILLASLCREEYNKVQGLKSAKEIWDVLKTAHEGDEVTKITKRETIEGELGRFVLNQGEEPQAMYNRLKTLVNQVRNLESTKWDDHEMVKVILRSLIFCNPTQVQLIRGDPRYKLMSPEEVIGKFVSFELMIKGSKQIVNLEQGSTSTPEVQSVAFKATEEKKEESTSSRLPIDASKLDNEEMALIIKSFRQILKQRRGKDYKPHSKRVCYKCGKPGHFIAKCPMSSDSDRCDDKRGKKEKKRCYKKKGGDAHVCQEWDSDESSTNSSFDEDAANIAVNKGLLFPNVGHKCFMAKDDKRKKVKSRASTKYTTSSDEGSSSEDEDNLLTLFANLNMQQKEKLNELIGAIHEKDGLLDSQEEFLIKENKKHVKVKNAYAQEIEKCENLTRELIICHDTISNLRTENVSLIAKVEKSDVCHDSITNLRNENASFIAKIDKLNESISSLKDENARLISKAKDLNVCNDAISSLRNENAILHAKIDELNACKHLHLLLIMFLFALDGKAPVAHDNKGYILYPVGYPEHKIRRIHAKKSHYVSHHAYMYKNETSSSRHSTHIKMPKKKSPTASNESNVSFKTFDASYVLTNKSGKVVAKYVGGKHKGSKTCVWVPKVYESGGSSWIINSGCTNHMTGEKRMFSSYEKNKDPQRAITFGDGNQDVGVTVFRRCDDSVAFKGVLEGQLYLVDFNIAELDTCLIVKTNMGWLCQRRLAHVGMKNLHKLLKGEHILGLTNVHFEKDRVCSACQAGKQVGSHHPHKNIMTIDRPLELLHMDLFGPIAYISIDEKTTDQANDGGKKSFEVPSAREKVKETRNPKPGVKKKTCKVKVDRVKKSYGASRITT

SEQ ID NO: 9960 - protein, 267 aa, Zea mays
  Clone ID: TF_ZmC10764_3.pep
SQCFSSEIMVERHTNRHRGFGFVTFEDRRAVDSAIKEMHGQEIDGRTISVNKAEPKMNTDDTRYAGGGGRGEYRGGRGDGPPPGNCFECGRPGHWVRDCPSAAGGRSGRFPSKFSGGSGVGRGDRFSGSDRFGDRYMDDRYDGGRYGYRDQADARDRYAGGRDRYANDRYPSGGDHFGGDRYGGGPDCYVPSGYGRERERSYERDGVRGGGGGGGGYDRSGPRGGGGYDRDGPRGGGGSARYDGGNYRERPGPYDRPSRGGRFDDRY

SEQ ID NO: 9961 - protein, 343 aa, Zea mays
  Clone ID: TF_ZmC10764_5.pep
MSVSTCRVPRGRPGFPLAVADFSSRQTLILLLPFSSPTVGRAVAVAMEGKEEGRIFVGGLSWQTDERKLEDAFGRFGKVVDAQIMVERHTNRHRGFGFVTFEDRRAVDSAIKEMHGQEIDGRTISVNKAEPKMNTDDTRYAGGGGRGEYRGGRGDGPPPGNCFECGRPGHWVRDCPSAAGGRSGRFPSKFSGGSGVGRGDRFSGSDRFGDRYMDDRYDGGRYGYRDQADARDRYAGGRDRYANDRYPSGGDHFGGDRYGGGPDCYVPSGYGRERERSYERDGVRGGGGGGGGYDRSGPRGGGGYDRDGPRGGGGSARYDGGNYRERPGPYDRPSRGGRFDDRY

SEQ ID NO: 9962 - protein, 211 aa, Zea mays
  Clone ID: TF_ZmC10764_7.pep
MNTDDTRYAGGGGRGEYRGGRGDGPPPGNCFECGRPGHWVRDCPSAAAGRSGRFPSKFSGGRGDRFSGSDRFGDRYMDDRYDGGRYGDRYMDDRYDGGRYGCRDQVDARDKYAGGRDRYANDRYSTGGDHFDGDRYGGGPDRYAPNGYGRERERSYERDGGGGYVRDGPRGGVADRYGGGGPARYDGGSYRDRPGPYDRPSRGGGRFDDRH

SEQ ID NO: 9963 - protein, 1116 aa, Zea mays
  Clone ID: TF_ZmC119_1388.pep
MRSPWDRLTAVSKQRTELPNITDSDVIGAFLAGTTCRDLVSKLGRKTPTRASELMDIATKFASGQEASTQRGAKKKGKKKSQAKHDAADADLVAVAEYKNPRKPPGGANLFDKMLKEPCPYHQGPVKHTLEECAMLRRHFHKAGPPAEGGRARDDDNKEDHQAGEFPEEAVLVDFLRANADVFVWSSSDMPGIPRDVAEHSLDIRAGARPVKQPLRRFDEEKRRAIGEEIHKLMAAGFIKECMNHVFGEHIGRTVEAYVDDIVVKTREASNLLSDLEVTFRCLKAKGVKLNPKKCVFGVPRGMLLGFIVSERGIEANPEMIATITSTGPIKDLKGIQRVTGCLAALSRFVSRLGKRGLPLYRLLRKAECFTWTPEAEEALGNLKALLTNAPILVPPAAGEALLIYVAVTTQVVSAVIVVERREEGHALPVQRLVYFISEVLSETKIRYPQIQKLLYAVILTRWKLRHYFESHPITVVSSFLKGKCALGPFLSILVIECQLKCLKCEFMQWMNKVQIKSKVKFLQDHLFTPPSRCSQLVSKPFSSQRDLPPEEMDPKGKGIVINDKEKESFVNEPKDDKPTDSGSGHRRKEGKKKKTRCIKEIIYYDDSDESTSSQKDDDNDYKKTVNSNFSFDYSRIQHSSNSHLLSIPLGKPPHFDGEDYGFWSHKMRSHLFSLHPSIWEIVENGMKFDSSDSPLLINEQIHRNAQATTVLLASLCREEYNKVSGLDNAKQIWDTLKISHEGNDITMLTKMELVEGELGRFAMIRGEEPTQTYNRLNTLINKIRSYGSTRWTDHDVVRLMLRSFTVLDPHLVNNIRENPRYTMMTPKEVLGKFVSGRMMIKEARYVDDALNGPLHEPQPIALKATRSKEALPSKVAQIEAAGLNDEEMALIIKRFKTALKGRKGQPSKAKTKGKRSCFKCGKLGHFIANCPENDSDQEQGKNGKRENKKVYKKAKGEAHLGKEWDSDCSSSDSDDEGLAATAFNKSALFPNEHHTCLMAREKKVITRNANTYDSSSDDESSEDEIDYSSLFKGLDRTKIAKINELIDALNEKDRILEKQEDLLYEEHDKFVSTQNSLALEVKRNGILSCELSTCNETISSLKGVRILMLMLVVNT

SEQ ID NO: 9964 - protein, 1671 aa, Zea mays
  Clone ID: TF_ZmC29741_3.pep
MDPKGKGIVINDKEKESFVNDLKDDKTTDSGSGHRRKDGKKKKTRRIKEIVYYDDSDESTSSHKENDNNDYDKRKTVNSNFSFDYSRIPQSANAHLLSIPLGKPPHFDGEDYGFWSHKMRSHLFSLHPSIWEIVESGMHFDSSDSPMFINEQIHKNAQATTVLLASLCRDEYHKVSGLDNAKQIWDTLKISHEGNDVTLLTKMELVEGELGRFAMIRGEEPTQTYNRLKTLINKIRSYESMRWTDHDVVRLMLRSFTVLDPHLVNNIRENPRYTKMSPEEVLGKFVSGRMMIKEARYVDDALNGPINEPQPLALKATRSKEALPSKVAQIEAAGLNDEEMALIIKRFKTALKGRKGQPSKTKAKEKRSCFKCGKLGHFIANCPDNDSDQDQGNKREKKKNYKKAKGEAHLGKEWDSDCSSSDSDNEGLAATAFNKLSLFPNERHTCLMAREKKVCTRDSTYASSSEDESSDEDEIDYSCLFKGLDRTKVDKVNELIDALNDKNRLLEKQEDLLYEEHDKFIEAQKSHALEVKRNEMLSCELSSCHETISNLRSINDDLNAKLEIASKSTSCVENDVICNRCKDFDINACSEHIASIAKLNDEIASLNAQLKIRKSEFDKLKFARDAYTIGRHPSIKDGLGFKREVKNLTSHKASISTKEKGKAPMASNAKKNHAFMYHDRKFSRNVHDDRSCNAYNAFDSHAMFASSSSYMHGRNVFRRNVVHHMPRRNVVNTPRKVNEPSTIYHVLNASFAICRKDRKIIARKLGAKCKGDKTCIWVPKEIVTNLVGPNKSWVYASGGSSWIIDSGCTNHMTGEKEMFTSYVKNKDSQDSIIFGDGNQGKVKGLGKIAISNEHSISNVFLVESLGYNLLSVSQLCNMGYNCLFTNVDVSVFRRCDGSLAFKGVLDGKLYLVDFAKEEAGLDACLIAKTSMGWLWHRRLAHVGMKNLHKLLKGEHVIGLTNVQFEKDRPCAACQAGKQVGGAHHSKNVMTTSRPLELLHMDLFGPVAYLSIGGSKYGLVIVDDFSRFTWVFFLQDKSETQGTLKRFLRRAQNEFELKVKKIRSDNGSEFKNLQVEEFLEKEGIKHEFSAPYTPQQNGVVERKNRTLIDMARTMLGEFKTPECFWSEAVNTACHAINRVYLHCLLKKTSYELLTGNKPNVSYFRVFGSKCYILVKKGRNSKFAPKAVEGFLLGYDSNTKAYRVFNKSSGLVEVSSDVVFDETNGSPREQVVDLDDVDEEDVPTAAIRTMAIGKVLAMQEELNNFKRNEVWTLVPRPKQNVVGTKWVFRNKQDEHEVVTRNKARLVAKGYAQVAGLDFEETFAPVARLESIRILLAYAAHHSFRLFQMDVKSAFLNGPIKEEVYVEQPPSFEDERYPDHVCKLSKALYGLKQAPRAWYECLRDFLIANAFKVGKADPTLFTNTCDGDLFVCQIYVDDIIFGSTNKKSCEEFSRVMTQKFEMSMMGELNYFLGFQVKQLKDDTFISQTKYTQDLLKRFGMKDAKPAKTPMGTDGHTDLNKGDSDYAGCKVDRKSTSGTCQFLGRFLVSWNSKKQTSVALSTAEAEYVAAGQCCAQLLWMRQTLRDFGYNLSKVPLLCDNESAIRMAENPVEHSRTKHIDIRHHFLRDHQQKGDIEVFHVSTENQLADIFTKPLDEKTFCRMRSELNVLDSRNLD

SEQ ID NO: 9965 - protein, 922 aa, Zea mays
  unsure (1)..(922): unsure at all Xaa locations
  Clone ID: TF_ZmC29741_36.pep
MDPKGKGIVINDKEKESFVNEPKDDKPIDSGSGHRRKEGKKKKTRRIKEIIYYDDSDESTSSQKDDDNDYKKTVNSNFSFDYSRIQHSSNSHLLSIPLGKPPHFDGEDYGFWSHKMRSHLFSLHPSIWEIVENGMKFDSSDSPMLINEQIHRNAQATTVLLASLCREEYNKVSGLDNAKQIWDTLKISHEGNDITMLTKMELVEGELGRFAMIRGEEPTQTYNRLKTLINKIRSYGSTRWTDHDVVRLMLRSFTVLDPHLMNNIRENPRYTMMTPEEVLGKFVSGRMMIKEARYVDDALNGPLHEPQPIALKATRSKESLPSKVAQVEAAGLNDEEMALIIKRFKTALKGRKGQPSKAKTKGKRSCFKCGKLGHFIANCPENDSDQEQGKNGKRENKKVYKKAKGEAHLGKEWDSDCSSSDSDDEGLAATAFNKSALFPNEHHTCLMAREKKVITRNANTYDSSSDDESSEDEIDYSSLFKGLDRTKIAKINELIDALNEKDRILEKQEDLLYEEHDKFVSAQNSLAIEVKRNGILSCELSTCNETISSLKGEINDLTAKLEVASNSYVENVTICTRCKDFDVNACSEHLVSISKLNDEVASLNAQLKTSKSEVDKIKFARDAYTVGRHPSIKDGLGFKREAKNLTSHKASIFVKEKGKAPMVSSAKRNHAFLYYDRKHARNAYNDFDSHAYDSYAMTASSSHVVHMPRRNFAHAPRKVVNKPSTIYYACNAPFAICRKGKKVIARKLGAKCKGDKTCIWVPKXICTNLVGPNKSWVLSPKPKFALQVYASGGSSWIIDSGCTNHMTGEKKMFTSYVKNKDSQDSIIFGDGNQGKVKGLGKIAISNEHSISNVFLVESLGYNLLSVSQLCNMGYNCLFTNVDVSVFRKSDGSLAFKGVLDGNLYLVDFAKKEVGLESTCLIA

SEQ ID NO: 9966 - protein, 1626 aa, Zea mays
  Clone ID: TF_ZmC4916_368.pep
MDPKGKGIVINDKEKESFVNEPKDDKPTDSGSGHRRKEGKKKKTRRIKEIIYYDDSDESTSSQKDDDNDYKKTVNSNFSFDYSRIQHSSNSHLLSIPLGKPPHFDGEDYGFWSHKMRSHLFSLHPSIWEIVENGMKFDSSDSPMLINEQIHRNAQATTVLLASLCREEYNKVSGLDNAKQIWDTLKISHEGNDITMLTKMELVEGELGRFAMIRGEEPTQTYNRLKTLINKIRSYGSTRWTDHDVVRLMLRSFTVLDPHLVNNIRENPRYTMMTPEEVLGKFVSGRMMIKEARYVDDALNGPLHEPQPIALKATRSKESLPSKVAQVEAAGLNDEEMALIIKRFKTALKGRKGQPSKAKTKGKRSCFKCGKLGHFIANCPENDSDQEQGKNGKRENKKVYKKAKGEAHLGKEWDSDCSSSDSDDEGLAATAFNKSALFPNEHHTCLMAREKKVITRNANTYDSSSDDESSEDEIDYSSLFKGLDRTKIAKINELIDALNEKDRILEKQEDLLYEEHDKFVSAQNSLALEVKRNGILSCELSTCNETISSLKGEINVLTTKLEVASNSCVENITICTRCKDFDVNACSEHLVSISKLNDEMASLNAQLKTSKSEVDKIKFARDAYTIGRHPSIKDGLGFKREAKNLTSHKAPIFVKEKGKAPMANSAKRNHAFLYHDRRHARNAYNDSDSHVYDSHAMFASSSSYKHDRDMCRRNVVHMPRRNFAHVPRKVVNKPSTIYYACNAPFAICRKGKKVYASGGSSWIIDSGCTNHMTGEKKMFTSYVKNKDSQDSIIFGDGNQGKDKSETQGTLKRFLRRAQNEFELKVKKIRSDNGSEFKNLQVEEFLEEEGIKHEFSAPYTPQQNGVVERKNRTLIDMARTMLGEFKTPEYFWSEAVNTACHAINRVYLHRLLKKTSYELLTGNKPNVSYFRVFGSKCYILVKKGRNSKFAPKAVEGFLLGYDSNTKAYRVFNKSSGLVEVSSDVVFDETNGSPREQVVDCDDVDEEDVPTAAIRTMAIGEVRPQEQDERDQPSSSTMVHPPTEDDEQVPQVEALDQGGAQDDQVMEEEAQPAPPTQVRAMIQRDHPVDQILGDISKGVTTRSQLVNFCEHYSFVSSIEPFRVEEALLDPDWVLAMQEELNNFKRNEVWTLVPRPKQNVVGTKWVFRNKQDEHGVVTRNKARLVAKGYAQVAGLDFEETFAPVARLESIRILLAYAAHHSFRLFQMDVKSAFLNGPIKEEVYVEQPPGFEDERYPNHVCKLSKALYGLKQAPRAWYECLRDFLIANAFKVGKADPTLFTKTCDGDLFVCQIYVDDIIFGSTNQKSCEEFSRVMTQKFEMSMMGELNYFLGFQVKQLKDGNFISQTKYTHDLLKRFGMKDAKPAKTPMGTDGHTDLNKGGKSVDQKAYRSMIGSLLYLCASRPDIMLSVCMCARCQSDSKECHLVAVKRILRYLVATPCLGLWYPKGSTFDLVGYSDSDYAGCKVDRKSTSGTCQFLGRSLVSWNSKKQTSVALSTAEAEYVAAGQCCAQLLWMRQTLRDFGYNLSKVPLLCDNESAIRMAENPVEHSRTKHIDIRHHFLRDHQQKGDIEVFHVSTENQLADIFTKPLDEKTFCRLRSELNVLDSRNLD

SEQ ID NO: 9967 - protein, 1608 aa, Zea mays
  Clone ID: TF_ZmC4916_380.pep
MDPKGKGIVINDKEKESFVNEPKDDKPTDSGSGHRRKEGKKKKTRRIKEIIYYDDSDESTSSQKDDDNDYKKTVNSNFSFDYSRIQHSSNSHLLSIPLGKPPHFDGEDYGFWSHKMRSHLFSLHPSIWEIVENGMKFDSSDSPMLINEQIHRNAQATTVLLASLCREEYNKVSGLDNAKQIWDTLKISHEGNDITMLTKMELVEGELGRFAMIRGEEPTQTYNRLKTLINKIRSYGSTRWTDHDVVRLMLRSFTVLDPHLVNNIRENPRYTMMTPEEVLGKFVSGRMMIKEARYVDDALNGPLHEPQPIALKATRSKESLPSKVAQVEAAGLNDEEMALIIKRFKTALKGRKGQPSKAKTKGKRSCFKCGKLGHFIANCPENDSDQEQGKNGKRENKKVYKKANGEAHLGKEWDSDCSSSDSDDEGLAATAFNKSALFPNEHHTCLMAREKKVITRNANTYDSSSNDESSEDEIDYSSLFKGLDRTKIAKINELIDALNEKDRILEKQEDLLYEEHDKFVSAQNSLALEVKRNGILSCELSTCNETISSLKGEINVLTAKLEVASNSCVENITICTRCKDFDVNACSEHLVSISKLNDEVASLNAQLKTSKSEVDKIKFARDAYTVGRHPSIKDGIGFKREAKNLTSHKAPIFVKEKGKAPMASSAKRNHAFLYHDRRHARNAYNDFDSHVYDSHAMFASSSSYKHDRDMCRRNVVHMPRRNFAHVPRKVVNKPSTIYYACNAPFAICRKGKKVYASGGSSWIIDSGCTNHMTGEKKMFTSYVKNKDSQDSIIFGDGNQGKDKSETQGTLKRFLRRAQNEFELKVKKIRSDNGSEFKNLQVEEFLEEEGIKHEFSAPYTPQQNGVVERKNRTLIDMARTMLGEFKTPECFWSEAVNMACHAINRVYLHRLLKKTSYELLTGNKPNVSYFRVFGSKCYILVKKGRNSKFAPKAVEGFLLGYDSNTKAYRVFNKSSGLVEVSSDVVFDETNGSPREQVVDCDEEDVPAAAIRTMAIGEVRPQEKDEQPSSSTMVQPPTEDDEQVPQVEALDQGGAQDDQVMEEEAQPAPPTQVRAMIQRDHPVDQILGDISKGVTTRSRLVNFCEHYSFVSSIEPFRVEEALLDPDWVLAMQEELNNFKRNEVWTLVPRPKQNVVGTKWVFRNKQDEHGVVTRNKARLVAKGYAQVAGLDFEETFAPVARLESIRILLAYAAHHSFRLYQMDVKSAFLNGPIKEEVYVEQPPGFEDERYPDHVCKLSKALYGLKQAPRAWYECLRDFLIANAFKVGKADPTLFTKTCDGDLFVCQIYVDDIIFGSTNQKSCEEFSRVMTQKFEMSMMGELNYFLGFQVKQLKDGTFISQTKYTQELLKWFGMKDAKPAKTPMGTDGHTDLNKGGSLLYLCASRPDIMLSVCMCARFQSDPKECHLVAVKRILRYLVATPCFGLWYPKGSTFNLVGYSDSDYAGCKVDRKSTSGTCQFLGRSLVSWNSKKQTSVALSTAEAEYVAAGQCCAQLLWMRQTLRDFGYNLSKVPLLCDNESAIRMAENPVEHSRTKHIDIRHHFLRDHQQKGDIEVFHVSTENQLADIFTKPLDEKTFCRLRSELNVIDSRNLD

SEQ ID NO: 9968 - protein, 1595 aa, Zea mays
  Clone ID: TF_ZM4266.C12.o4.fg.pep
MDPKGKGIVINDKEKESFVNEPKDDKPTDSGSGHKRKDGKKKKTRRIKEIVYYDDSDESTSSQKDDDNDYKKTVNSNFSFDYSRIQHSSNSHLLSIPLGKPPHFDGEDYGFWSHKMRSHLFSLHPSIWEIVENGMKFDSSDSPMFINEQIHRNAQATTVLLASLCREEYNKVSGLDNSKQIWDTLKISHEGNDITMLTKMELVEGELGRFAMIRGEEPTQTYNRLKTLINKIRSYGSTRWTDHDVVRLMLRSFTVLDPHLVNNIRENPRYTMMTPEEVLGKFVSGRMMIKEARYVDDALNGPLHEPQPIALKATRSKESLPSKVAQVEAAGLNDEEMALIIKRFKTALKGRKGQPSKAKTKGKRSCFKCGKLGHFIANCPENDSDQEQGKNGKRENKKGYKKAKGEAHLGKEWDSDCSSSDSDDEGLAATAFNKSALFPNEHHTCLMAREKSDNESSEDEIDYSSLFKGLDRTKIAKINELIDALNEKDRILEKQEDLLYEEHDKFVSAQNSLALEVKRNGILSCELSTCNETISSLKGEINVLTAKLEVASNSCVENITICTRCKDFDVNACNKHLVSISKLNDEVASLNAQLKTSKSEVDKIKFARDAYTVGRHPSIKDGLGFKREAKNLTSHKAPIFVKEKGKAPMASSAKRNHAFLYHDRRHARNTYNDFDSHVYDSHAMFASSSSYKHDRDMCRRNVVPRRNFAHVPRKVVNKPSTIYYACNAPFAICRKGRKIVARKLGARCKGDKTCIWVPKDICANLAGPNMSWVYASGGSSWIIDSGCTNHMTGEKKMFTSYVKNKDSQDSIIFGDGNQGKIDLVQLVKQDKSETQGTLKRFLRRAQNEFELKVKKIRSDNGSEFKNLQVEEFLEEEGIKHEFSAPYTPQQNGVNSRPPECFWSEAVNTACHAINRVYLHRLLKKTSYELLTGNKPNVSYFRVFGSKCYILVKKGRNSKFAPKAVEGFLLGYDSNTKAYRVFNKSSGLVEVSSDVVFDETNGSPREQVVDCDDVDEEDVPTAAIQTMAIGEVRPQEQDEQDQPSSSTTVHPPPQDDEHVHQQEADDHVMEEDAQPAPPTQVRAMIQRDHPVDQILGDISKGVTTRSRLVNFCEHYSFVSSIEPFRVEEALLDPDWVLAMQEELNNFKRNEVWTLVPRPKQNVVGTKWVFRNKQDEHGVVTRNKARLVAKGYAQVAGLDFEETFAPVARLESIRILLAYAAHHSFRLFQMDVKSAFLNGPIKEEVYVEQPPGFEDERYPDHVCKLSKALYGLKQAPRAWYECLRDFLIANAFNVGKADPTLFTKTCDGDLFVCQIYVDDIIFGSTNQKSCEEFSRVMTQKFKMSMMGELNYFLGFQVKQLKDGTFISQTKYTQDLLKRFGMKDAKPAKTPMGTDGHTDLNKGGKSVDQKAYRSMIGSLLYLCASRPDIMLSYPKGSTFDLVGYSDSDYAGCKVDRKSTSGTCQFLGRSLVSWNSKKQTSVALSTAEAEYVAAGQCCAQLLWMRQTLRDFGYNLSKVPLLCDNESAIRMAENPVEHSRTKHIDIRHHFLRDHQQKGDIEVFHVSTENQLADIFTKPLGEKTFCRLRSELNVLDSWNLD

SEQ ID NO: 9969 - protein, 663 aa, Zea mays
  Clone ID: TF_ZM4707.C2.o8.fg.pep
MDPKGKGIVINDKEKESFVNEPKDDKPTDSGSGHRRKEGKKKKTRRIKEIIYYDDSDESTSSQKDDDNDYKKTVNSNFSFDYSRIQHSSNSHLLSIPLGKPPHFDGEDYGFWSHKMRSHLFSLHPSIWEIVENGMKFDSSDSPMLINEQIHRNAQATTVLLASVCREEYNKVSGLDNAKQIWDTLKISHEGNDITMLTKMELVEGELGRFAMIRGEEPTQTYNRLKTLINKIRSYGSTRWTDHDVVRLMLRSFTVLDPHLVNNIRENPRYTMMTPEEVLGKFVSGRMMIKEARYVDDALNGPLHEPQPIALKATRSKESLPSKVAQVEAAGLNDEEMALIIKRFKTALKGRKGQPSKAKTKGKRSCFKCGKLGHFIANCPENDSDQEQEKNGKRENKKAYKKAKGEAHLGKEWDSDCSSSDSDDEGLAATAFNKSALFPNEHHTCLMAREKKVITHNANTYDSSSDDESSEDEIDYSSLFKGLDRTKIAKINELIDALNEKDRILEKQEDLLYEEHDKFVSAQNSLALEVKRNGILSCELSTCNETISSLKGEINVLTAKLEVASNSCVENITICTRCKDFDVNACSEHLVSISKLNDEVASLNAQLKTSKSEVDKIKFARDAYTVGRHPSIKDGLGFKREAKKLTSHKAPIFVKEKGKAPMA

SEQ ID NO: 9970 - protein, 516 aa, Zea mays
  Clone ID: TF_ZM4712.C2.o2.fg.pep
MDPKGKGIVINDKEKESFVNEPKDDKPTNSGSGHRRKEGKKKKTRRIKEIIYYDDSDESTSSQKDDDNDYRKTATRSKESLPSKVAQVEAVGLNDEEMALIIKRFKTALKGRKGQPSKAKTKGKRSCFKCGKLGHFIANCPENDSDQEQGKNGKRENKKVYKKAKGEAHLGKECDSDCSSSDSDDEGLAATAFNKSALFPNEHHTCLMAREKKVYASGGSSWIIDSGCTNHMTGEKKMFTSYVKSKDSQDSIIFGDGNQGKDKSETQGTLKRFLRRAQNEFELKVKKIRSDNGSEFKNLQVEEFLEEEGIKHEFSAPYTPQQNGVMKKMFRRPLYGPWRLEKYGHRNKMNEINLLPQLWCIPQPKMTNRLYQMDVKSAFLNGPIKEEVYVEQPPGFEDERYPDHVLSGGYTHLLVAIDKFSKWIEVRPLNSIRSEQVVAFFTNIIHRFGVPNSIITDNGTQFTGGKFLDFCEDHHIQVDWAAVAHPMMNGQVERANNMILQGLKPRIYNDLNKFGK

SEQ ID NO: 9971 - protein, 1665 aa, Zea mays
  Clone ID: TF_ZM4715.C1.o7.fg.pep
MDPKGKGIVINDKEKESFANEPKDDKPTDSGSGHRRKEGKKKKTRRIKEIIYYDDSDESTSSQKDDDNDYKKTVNSNFSFDYSRIQHSSNSHLLSIPLGKPPHFDGEDYGFWSHKMRSHLFSLHPSIWEIVENGMKFDSSDSPMLINEQIHRNAQATTVLLASLCREEYNKVSGLDNAKQIWDTLKISHEGNDITMLTKMELVEGELGRFAMIRGEEPTQTYNRLKTLINKIRSYGSTRWTDHDVVRLMLRSFTVLDPHLVNNIRENPRYTMMTPEEVLGKFVSGRMMIKEARYVDDALNGPLHEPQPIALKATRSKESLPSKVAQVEAAGLNDEEMALIIKRFKTALKGQKGQPSKAKTKGKRSCFKCGKLGHFIANCPENDSDQEQGKNGKRENKKVYKKAKGEAHLGKEWDSDCSSSDSDDEGLAATAFNKSALFPNEHHTCLMAREKKVITRNANTYDSSSDDESSEDEIDYSSLFKGLDRTKIAKINELIDALNEKDRILEKQEDLLYEEHDKFVSAQNSLALEVKRNGILSCELSTCNETISSLKGEINVLTAKLEVASNSCVENITICTRCKDFDVNACSEHLVSISKLNDEVASLNAQLKTSKSEFEKLKFARDAYTIGRHPSIKDGLGFKREAKNLTSHKTPISTKEKGKAPMANSVKKNHAFMYYDRRYSRNAFRSNDVFDSHAYDSYAMTASSSHVMHGRNVFRRNVVHQMPRRNVDHNAPRKVVNEPSEIYCALNASFAICRKDKKIVARKLGARCKGDKTCIWVPKNICANLVGPNMSWVYASGGSSWIIDSGCTNHMTGEKKMFTSYVKNKDSQDSIIFGDGNQGKDKSETQGTLKRFLRRAQNEFELKVKKIRSDNGSEFKNLQVEEFLEEEGIKHEFSAPYTPQQNGVVERKNRTLIDMARMMLGEFKTPECFWSEAVNTACHAINRVYLHRLLKKTSYELLTGNKPNVSYFRVFGSKCYILVKKGRNSKFAPKAVEGFLLGYDSNTKAYRVFNKSSGLVEVSSDVVFDETNGSPREQVVDLDDVDEEDVPTAAMRTMAIGDVRPQEQLEQDQPHSSTMVQPPTQDDEQVHQQEACDQGGAQDDRVMEEEAQPAPPTQVRAMIQRDHPVDQIMGDISKGVTTRSRLVNFCEHYSFVSSIEPFRVEEALLDPDCVLAMQEELNNFKRNEVWTLVPRPKQNVVGTKWVFRNKQDEHGVVTRNKARLVAKGYAQVAGLDFEETFAPVARLESIRILLAYAAHHSFRLYQMDVKSAFLNGPIKEEVYVEQPPGFEDDRFLDHVCKLSKALYGLKQAPRAWYECLRDFLVANAFNVGKADPTLFTKTCNGDLFVCQIYVDDIIFGSTNQKSCDEFSRVMTQKFEMSMMGELNYFLGFQVKQLKDGTFISQTKYTQDLLKRFGMKDAKPAKTPMGTDGHTDLNKGGKSVDQKAYRSMIGSLLYLCASRPDIMLSVCMCARFQSDPKECHLVAVKRILRYLVATPCFGLWYPKGSTFDLVGYSDSDYAGCKVDRKSTSGTCQFLGRSLVSWNSKKQTSVALSTAEAEYVAAGQCCAQLLWMRQTLRDFGYNLSKVPLLCDNESAIRMAENPVEHSRTKHIDIRHHFLRDHQQKGDIEVFHVSTENQLADIFTKPLDEKTFCRLRSELNVLDSRNLD

SEQ ID NO: 9972 - protein, 706 aa, Zea mays
  Clone ID: TF_ZM4843.C9.o1.fg.pep
MDPKGKGIVINDKEKESFVNEPKDDKPTDSGSGHRRKEGKKKKTRRIKEIIYYDDSDESTSSQKDDDNDYKKTVNSNFSFDYSRIQHSSNSHLLSIPLGKPPHFDGEDYGFWSHKMCSHLFSLHPSIWEIVENGMKFDSSDSPMLINEQIHRNAQATTVLLASLCREEYNKVSGLDNAKQIWDTLKISHEGNDITMLTKMELVEGELGRFAMIRGEEPTQTYNRLKTLINKIRSYGSTRWTDHDVVRLMLRSFTVLDPHLVNNIRENPRYTMMTPEEVLGKFVSGRMMIKEARYVDDALNDPLHEPQPIALKATRSKESLPSKVAQVEAAGLNDEEMALIIKRFKTALKGRKGQPSKAKTKGKRSCFKCGKLGHFIANCPENDSDQEQGKNGKRENKKAYKKAKGEAHLGKEWDSDCSSSDSDDEGLAATAFNKSALFPNEHHTCLMAREKKVITRNANTYESSSDDESSEDEIDYSSLFKGLDRTKIAKINELIDALNEKDRTLEKQEDLLYEEHDKFVSAQNSLALEVKRNGILSCELSTCNETISSLKGEINDLTAKLEVASNSYVENITICTRCKDFDVNACSEHLVSISKLNDEVASLNAQLKTSKSEVDKIKFARDAYTVGRHPSIKDGLGFKREAKNLTSHKTPISTKEKGKAPMANSVKKNHAFMYYDRRYSRNAFRSNDVFDSHAYDSYAMTASSSH

SEQ ID NO: 9973 - protein, 703 aa, Zea mays
  Clone ID: TF_ZM4989.C2.o1.fg.pep
MDPKGKGIVINDKEKEFFVNDPKDDKSNDSGSGHKRKEGKKKKTRSIKEIIYYDDSDKSTSSQKDDDNDYKKTVNSNFSFDYSRIQHSSNSHLLSIPLGKPPHFDGEDYGFWSHKMRSHLFSLHPSIWEIVENGMKFDSSDSPMLINEQIHRNAQATTVLLASLCREEYNKVSGLDNAKQIWDTLKISHEGNDITMLTKMELVEGELGRFAMIRGEEPTQTYNRLKTLINKIRSYGSTRWTDHDVVRLLLRSFTVLDPHLVNNIRENPRYTKMTPEEVLGKFVSGRMMIKEARYVDDALNGPLHEPQPIALKATRSKESLPSKVAQIEAAGLNDEEMALIIKRFKTALKDRKGQPSKAKTKGKRSCFKCGKLGHFIANCPENDSDQEQEKNGKRENKKVYKKAKGEAHLGKEWDSDCSSSDSDDEGLAATAFNKSALFPNEHHTCLMAREKKVITRNANTYDSSSDDESSEDEIDYSSLFKGLDRTKIAKINELIDALNEKDKILEKQEDLLYEEHDKFVSAQNSLALEVKRNGILSCELSTCNETISSLKGEINVLTAKLEVASNSCVENITICTRCKDFDVNACNEHLVSISKLNDEVASLNAQLKTSKSEVDKIKFARDAYTVGRHPSIKDGLGFKREAKNLTSHKAPIFVKEKGKAPMASSAKRNHAFLYYDRRHARNAYNDFDSHAYDSYAMTASSSH

SEQ ID NO: 9974 - protein, 1732 aa, Zea mays
  unsure (1)..(1732): unsure at all Xaa locations
  Clone ID: TF_ZM5043.C4.o4.fg.pep
MDHKGKGIVINDKEKESFVNEPKDDKPTDSGSGHRRKEGKKKKTRRIKEIIYYDDSDESTSSQKDDDNDYKKTVNSNFSFDYSRIQHSSNSHLLSIPLGKPPHFDGEDYGFWSHKMRSHLFSLHPSIWEIVENGMKFDSSDSPMLINEQIHRNAQATTVLLASLCREEYNKVSGLDNAKQIWDTLKISHEGNDITMLTKMELVEGELGRFAMIRGEEPTQTYNRLKTLINKIRSYGSTRWTDHDVVRLMLRSFTVLDPHLVNNIRENPRXHDDDARGSTWKIRXGRMMIKEARYVDDALNGPLHEPQPIALKATRSKESLPSKVAQVEAAGLNDEEMALIIKRFKTALKGRKGQPSKAKTKGKRSCFKCGKLGHFIANCPENDSDQEQGKNGKRENKKVYKKAKGEAHLGKEWDSDCSSSDSDDEGLAATAFNKSALFPNEHHTCLMAREKKVITRNAYDSSSDDESSEDEIDYSSLFKGLDRTKIDKINELIDALNEKDRILEKQEDLLYEEHDKFVSAQNSLALEVKRNGILSCELSTCNETISSLKGEINVLTAKLEVASNSCVENITICTRCKDFDVNACSEHLVSISKLNDEVASLNAQLKTSKSEVDKLKFARDAYTIGRHPSIKDGLGFKREAKNLTSHKTPIPAKEKGKAPMATSVKKNHAFLYHDRKNSRNAFRSYDAYDSHAYDSYAMTASSSHVVHERNVGRRNVVNIPRKVNEPSTIYHALNASFAIYRKDRKVYASGGSSWIIDSGCTNHMTGEKKMFTSYVKNNDXPDSIIFGDGNQGKKKXGSLAFKGVLDDKLYLVDFAKEEAGLDACLIAKTSMGWLWHRRLAHVGMKNLHKLLKGEHVIGLTNVQFEKDRPCAACQAGKQVGGAHHSKNVMTTSRPLELLHMDLFGPVAYLSIGGSKYGLVIVDDFSRFTWVFFLQDKSETQGTLKRFLRRAQNEFELKVKKIRSDNGSEFKNLQVEEFLEEEGIKHEFSAPYTPQQNGVVERKNRTLIDMARTMLGEFKTPERFWSEAVNTACHAINRVYLHRLLKKTSYELLTGNKPNVSYFRVFGSKCYILVKKGRNSKFAPKAVEGFLLGYDSNTKAYRVFNKSSGLVEVSSDVVFVETNGSPREQVVDCDDVDEEDVPTAAIRTMAIGEVHQQEACDQGGAQDDHVMEEDAQPAPPTQVRAMIQRDHPVDQILGDISKGVTTRSRLVNFCEHYSFVSSIEPFRVEEALLDPDWVLAMQEELNNFKCNEVWTLVPRPKQNVVGTKWVFRDKQDEHGVVTRNKARLVAKGYAQVAGLDFEETFAPVARLESIRILLAYAAHHSFRLYQMDVKSAFLNGPIKEEVYVEQPPGFEDERYSDHVCKLSKALYGLKQAPRAWYECLRDFLIVNAFKVGKADPTLFTKTCNGDLFVCQIYVDDIIFGSTNQKSCEEFSRVMTQKFEMSMMGELNYFLGFQVKQLKDGTFISQTKYTQDLLKRFGMKDAKPAKTPMGTDGHTDLNKGGKSVDQKAYRSMIGSLLYSCASRPDIMLSVCMCARFQSNPKECHLVAVKRILRYLVATPCFGLWYPKGSTFDLVGYSDSDYAGCKVDRKSTSGTCQFLGRSLVSWNSKKQTSVALSTAEAEYVAAGQCCAQLLWMRQTLRDFGYNLSKVPLLCDNESAIRMAENPVEHSRTKHIDIRHHFLRDHQQKGDIEVFHVSTENQLADIFTKPLDEKTFCRLRSELNVLDSRNLD

SEQ ID NO: 9975 - protein, 544 aa, Zea mays
  Clone ID: TF_ZmC4916_385.pep
MDPKGKGMVINDKEKESLLNEPRDDKPTDSGSSHKKREGKKKRHIKKIIYYDSDASSSSPRDDDDDDSSSKKKTVNQNYSFDYSRIPFNSNAYLLSIPLGKPSHFDGEDYSFWSHKMDEYNKVSGLDNAKQIWDTLKISHEGNDATMITKIELVEGELGRFAMIRGEEPTQSYNRLKTLVNKIRSYGSTRWMDYDVVRLMLRSFTIIDPHLVNLIRENPRYTKMTPEEILGKFVSRRMMVKEARYVDNMLNGPLLVYEPQLVALKATSSREALPSKVAQVEAAGLNEDEMALIIKRFKTALKGRKEYPNKNKARGKRSCFKCGKTGHFIAQCPDNDNDQEQEKYGKKEKKKSYRKAKGEAHHGKEWDSDCSSFDSDDEGLAASAFNKSSLFPNERHTCLMAKEKKDRLLEKQEDILYEEHDKFVSVQKSLALEIKRNESLSSELSTCHETISSLKSLNDELTTKLEGVNKSSSCEEHVVVCDRCKDFDVDACDEHLISITKLNDEVASLNAQLKTCKINFDQLKFAREAYTVGRHPSIKDGLGF

SEQ ID NO: 9976 - protein, 1599 aa, Zea mays
  Clone ID: TF_ZM4449.C5.o7.fg.pep
MDPKGKGMMINDKEKESLLNEPRDDKPTDSGSSHKKRDGKKKKRRIEKIIYYDNDASSFSPRDDDDDDSLLKKKTVNQNYSFDYSRIPFNSNAHLLSIPLGKPPHFDGEDYSFWSHKMRSHLFSLHPSIWEVVENGMHFDSTDNPVFINEQIHKNAQVTTVLLASLCWDEYNNVSGLDNAKQIWDTLKISHEGNDATMITKMELVEGELGRFAMIRGEEPTQTYNRLKTLVNKIRSYGSTRWTDHDVVRLMLRSFTVIDPHLVDLIRENPRYTKMTPEEILGKFMSGRMMVKEARYVDDALNAPLPVYEPQPVALKATSSREALPSKVAQVEAAGLNEDEMALIIKRFKTTLKGQARGKRSCFKCGKTGHFIAQCPDNDNDQEQEKYGKKEKKKNYKKAKDEAHLGKEWNSDCSSSDSDDEGLAASAFDKSSLFPNERHTCLMAKEKKVCIQNTHKYTSSSDEESSDDEVEYTDLFKGLDRAKVDKINELIDALNEKNRLLERQEDILYEEHEKFVSVQKSLALELKRNEILSFELSACQEYVSSLKNLNDELNVKLEEANATRSCVEHVAICNRCKDVDVNACDEHLIAITKLNDEVASLNAQLKTCKIDFDKLKFARDAYTIGRHPSIKDGLGFRKKTNNLTSQKTLVLNKEKGKAPMASSSQKCHAYTYVRKFSRTAHRSYDHDVFNPHAMFASRSTFVHGRSRPRRNHVVHHVPRKVYASGGSSWIIDNGCTNHMTGEKKMFTSYVKNKDSQDTIIFGDGNQGKVKGLGKIAITSEHSISNVFLVESLGYNLLSVSQLCHMGYNCLFTNVDVSVFRRSDGSLAFKGALDDKLYLVDFSKEEADLDACLIAKTSMGWLWHRRLAHVGMKNLHKLLKGEHVLGLTNDKSETQGTLKRFLKRAQNECELKVKKIRSDNGSEFKNLQVEEYLKEEGVKHEFSAPYTPQQNSVIERKNRTFIDMARTMLGEFKTPERFWSEAVNIACHAINRLYLHRLLKKTSYEVLTGNKPNVSYFRVFGSKCYILVKKGRHSKFTPKAVEGFLLGYDSNTKAYRVFNKSSGLVEVSSDVVFDETNDSPREQVDLDDIDEDDVPTTAMRMMAIDGEQVPQKEGQDQGGAHEEQVMEEEAPSVPPTQIRATIQRHHPVDQILGDISKGVTTRSRLANFCEHYSFVSSIEPFRVEEALQDPDWVLAMQEELNTFKRNEVWSLVPRPKQNIVGTKWVFRDKQDEHGVVTRNKARLVAKGYAQVAGLDFEETFAPVARLESIRILLAYAAHHSFRLFQMDVKSAFLNGPIKEEVYVEQPPSFEGDRYPDHVFKLSKALYGLKQAPRAWYECLRDFLIANAFKVGKVDPTLFTKTCDGDLFVCQIYVNDIIFGSTNQKSCEEFSRVMTQKFEMSMMVKQLKDNTFISQTKYTQDLLKRFGMKDAKPAKTPMGTDGHVDLNKGDSYAGCKVDRKSTSGTCQFLGRSLISWSSKKQTSVALSTVVPEYVAAGQCCTQLLWMSQTLRDFGYNLSKVPLLCDNGSAIRMADNPAEHDRTKHIDIRHHFLRDHQQKGDIEVFQISTENQLADIFTKPLDEKTFCRLRSELNVLDSCNLD

SEQ ID NO: 9977 - protein, 254 aa, Zea mays
  Clone ID: TF_ZM4544.C5.o1.fg.pep
MALIIKRFKTALKGRKEYPNKNKARGKRSCFKCGKTGHFIAQCPDNDDDQEQEKHGKREKKKVYKKAKGEAHLGKEWDSDCSSSDSNDEGLAASAFNKSLLFPNERHTCLMAKEKKDKPETQGTLKRFLRRAQNEFELKVKKIRSDNGSEFKNLQVEEYLEEEGVKQEFSAPYTPQQNGVMCDHKNNKSKINLLPQRWCIPQLKMMDTFLKRRRVIKGEHKKKKSWRKKHHWPLQLKSERQFKEIIPSIRFWVT

SEQ ID NO: 9978 - protein, 184 aa, Zea mays
  Clone ID: TF_ZM4647.C3.o3.fg.pep
MTPEEILRKFVSGRMMVKEARYVDDALNSPLPVYEPQSVALKATSSREALPRQVAQVEATGLNEDEMVLIIKRFKIALKGRKEYPNKNKTKGKRSCFKCGKTGHFIAQCPDNDHDQGQEKGRKREKKKNYRKAKGEAHLGKEWDSDCSSSDSDDEGLAASAFDKSSLFPKERHTCLMAKEKKFK

SEQ ID NO: 9979 - protein, 480 aa, Zea mays
  Clone ID: TF_ZM4840.C5.o1.fg.pep
MDPKGKGMVVNDKEKESFLNEPRDDKPTDSGSSHKKRDGKKRRIKKIVYYDSDASSSSPRDDDDDDSSSKKKMQIHKNAQATTVLLASLCRDEYNKVSGLDNTKQIWDTLKISHEGNDATMITKMELVEGELGRFAMIRGEEPTQTYNRLKTLVNKIRSYGSTRWTDHDVVRLMLRSFTVHQDDARGDSWEVCEQAHDGEEARYVDDALNGPLPVHEPQTIALKATSNRETLPSKVAQVEATGLNEDEMALIIKSFKTALKGRKEYPNKNKTKGKRSCFKCGKTGHFIAQCPDNDDDQEQEKHGKREKKVYKKAKGEAHLGKEWDSDCSSSDSNDEGLAASAFNKSSLFPNERHTCLMAKEKKVSVRDTSKYTTSSDDDSSDDEVDYSSLFKGLDRAKVEKINELIDALNEKDRLLEKQEDILYEEHDKFVSVQKSLALEIKRNEMLSSEFSVCHESVSSLKILNDDLNVKLEEANKSSS

SEQ ID NO: 9980 - protein, 498 aa, Zea mays
  Clone ID: TF_ZM5106.C2.o12.fg.pep
MDPKGKGMVVNDKEKESLFNEPRDDKPTDSGSSHKKRDEKKKRRIKKIIYYDSDASSSSPRDDNNDDDSSSKKKMHMGIVENGMHFDNTDNPVIINEQIHKNAQATTVLLASLCRDEYNKQLATGLNEDEMTLIIKRFKTALGRKEYPNKNKTRGKRSCFKCGKTGHFIAQCPDNDNDQGEEKSGKREKKKNYRKAKGEAQLGKGWDSDCSSSDSDDEGLAASAFNKSSLFPNEHHTCLMAKEKKVHIRDSPKYSSSSDEESSDDEVDYSSLFKGLDRVKADEINELIDALNEKDRLLEKQEDILYEEHDKFVSVQKYLALETKKNEMLSSELSSCHESISSLKNLNDELNAKLEEVSKTSSCVEHVSICNRCKDYDVDACDEHLISITRLNDEVSSLNAQLKTCKIDFDKLKFARDAYTIALLLFMVEVGLGEIMLCLMCLGECAMNLLLFFILATLLLYFHVYASVGSSWIIGSVCTNHMAGEKKMFTSYVKNKDS

SEQ ID NO: 9981 - protein, 1436 aa, Zea mays
  unsure (1)..(1436): unsure at all Xaa locations
  Clone ID: TF_ZmC24260_9.pep
MMMMMTPHPNLMPEWPSMKPLHFSHPLIVSWQREMLRMLGEADDYMHKEKEKFKTLKELYKNLQVSFEELKTSHNDLKENCEKLVDAQKSSIVHEVMVVTKDVGVTCDLLDSLTSEPLPTNSICDKCKISLNDNIALDESKIVVENKVLVDRVNTLTHDLEKAYGGKAKLDFILGSQRCSLNREGLGYVPKKGNNAFIKQNTLFVKECDKVCHKCHKKGHVKKNCPKLKNVSSTCFEHCYVLSHNAKGVHAKFIGTSIVGNKKKAIWVPKTLVTNIQGPKQVWVNYKAGGNHWVLDSGCTQHMTRDMKMFTQMSEEDCSNYDSITFGDNRKGKVKGLGKIAISNDHSISNVLLVESLNFNLLSVAQLCDLGFNCNFTVEDVIISSVDGSNLKFKGFRHENLYLVDFSSNEAKLTTCLFSKASLDKSNVFETFKSFAILAQNQFDFDIKNVRSDNGSEFXNARIDEYCDDKGIKHEFSSKYTPEQNGIVERKNRTLIXMARSMLAEYNISDSYWAEAINTACHSSNRLYYHKLLKKTPYELLIGRKPNISYFRVFGCKCYILRKGSRLSKFEKKCDEGFLLEYSSNSKAYRVFNKTHGIIEEAYDVEFDKTNGSQDESDNLDDVGGTQLINAMKTMAIGEIKPKEDDDENSVVVIPSSSTLNEEDHQSQQHDETMDTHDQGTSRHSVPPNASTSNYQTVSRIHHSIVKDRPVDQIVGDISKGVQTRSRIASFCEHFSFVSCMEPNRVDEALLDVDWVNAMHEELTNFARNEVWELVERPKNHNVIGTKWVFHNKHNEDGVVVRNKARLVAQGYTQIEGLDFGETFAPVARLEAIRILLAYASAHNIKLYQMDVKSAFLNGKISELVYVEQPPGFEDPKRPNHVFKLSKALYGLKQAPRAWYERLRDFLLSKDFKIGKVDTTLFTKRIGKHLFVCQIYVDDIIFGSTNELFCEEFGKMMSKEFEMSMIGEFSFFLGLQIKQLKDGIFISQSKYLKDMLKKFGLENAKPTKTPMETNGHLDLDEGGRFKSKRPHGDDADYTPTTDSEAQSSAGGTESMDTEDFPHIHPDYPIDTTGWTYPKRRFSMAEYYSRRTVNQYTLPSDTNVQFFHTQLQFDVFWGTLVDTNFHKHQVIDWSFMLGQSVMEDLIPKFETCGLYQFMWQRTDFSEMAVKQFLATSEIDIEEESITWMTGFKRYSASFADFATANSLDYGTISAELDLYTEDNFEDFVQFYEPARLGIPRRFGETAGLRHHPAVINKIVRVTILPKSGVKSKIRDKFWNIIQHIMNGEVMNIVLFMMRQLNDLKMDKIQNLAYAPYIMALIKAKTRFEGPCEIVHTPFRPFKNEIGFLTRPLTPFPDDEEDPGYNAGAAPDVEAEQMPPPPPPPQPQQYWQPGPGYFDPYFHNMQQGLQTHIDTRFEGMMTHVDHRLDDMQSRFDSN

SEQ ID NO: 9982 - protein, 691 aa, Zea mays
  Clone ID: TF_ZmC4916_422.pep
MDPKGKGMVVNDKEKDSIFNEPRDDKPTDSGSSHKKKDRKKKRRIKKIIYYDSDASSSSPRDDDDDNDSSPKKKMVNQNYSFDYSCIPYNSNAHLLSIPLGKPPHFDGEDYSFWSHKMRSHLFSLHPSIWEIVENGMHFDSTDNLIFINEQIHKNAQATTVLLASLCRNEYNKVSGLDNTKQIWDTLKISHEGNDATMITKMELVEGELWRFAMIRGEEPTQTYNRLKTLVNKIRSYGSTRWTDRDVVRLMLRSFTVIDPHLVNLIHENPRYTKMTPEEILRKFVSGRMMVKEARYVDDALNGPLPVYEPQPIALKATSSKEALPSKVAQLEAAGLNENEMALIIKRFKTALKGRKEYPNKNKTRGKRSCFKCGKTGHFIANCPDNESDQGQEKSGKEKKKNYRKAKGEAHLGKEWDLDCSSSDSDDEGLTSSAFNKSSLFPNERHTCLMAKEKKVHVRDTPKYTTSSDDDSSDDDVDYSSLFKGLDRAKVEKINELIDALNEKDRLLERQEDILYEEHDKFVSVQKSLALETKRNEMLSSELSICHESVSSLNSLNDELNARLEEVNKTSSCVEHVVICNRCKNFDVDACDEHLASITKLNNEVASLNAQLKTCKVDYDKLKFARDAYTVGRHPSIKDGLGFRKETKNLTSQRTPVLNKEKGKAPMASSPQRNHAFIMIGKLLVVLITIR

SEQ ID NO: 9983 - protein, 606 aa, Zea mays
  Clone ID: TF_ZM4132.C6.o2.fg.pep
MDPKGKGMVVNDKTKESIVNEPRDDKPSDSGSSHKKRDGNKKRRIKKIVYYDSDESSSSPRDDDDEKKKPVNSNFSFDYSRIPVNSNAHLLSIPLGKPPNFDGEDYSFWSHKMRSHLFSLHPSIWEIVENGMLFDSTDNPVLINEQIHKNAQATTVLLASLCMDEYHKVSGLDNAKQIWDTLKISHEGNDATMITKMELVEGELGRFAMIRGEEPTQTYNRLKTLVNKIRSYGSTRWMDHDVIRLMLRSFSVLDPHLVNSIRENPKYTKMTPEEILGKFVSGRMMIKEARYVDEALNGPMPIYEPQTVALKATSSREALPSKVAQVEAVGLNEDEMTLIIKRFKTTLKGRKEHPNKSKAKGKRSCFKCGKTGHFIANCPDNTNDQEQERNGKREKKKTYKKMKGEAHLGKEWDSDCSSSDSDDEGLAASAFNKSLLFPNERHTCLMAKEKKVNARETPKYSTSSDEDSSDDEVDYTSLFKGLDRAKVEKINELIDALNEKDRLLERQEDILYEEHNKFISVQKSLALEIKRNELLSSKLSICNESISSLKILSDDLNANLEVVNKSSPCVEHVVICNRCKDFNIDACVEHLTEREMCPWAISNIFW

SEQ ID NO: 9984 - protein, 407 aa, Zea mays
  Clone ID: TF_ZM4133.C5.o1.fg.pep
MTLIIKRFKTALKGHREYPNKNKTRGKRSCFKCGKTGHFIANCPDNDSDQGQEKSRKKEKKKNYRKAKGEAHLGKEWDSDCSSSDSDDEGLAASAFNKSSLFPNERHTCLMAKEKKVYASGGSSWIIDSGCTNHMTEEKKMFTSYVKNKDSQDTIIFGDGNQGKVKGLGKIAITNEHSISNVFLVESLGYNLLSDKSETQGTLKRFLRRAQNEFELKVKKIRSDNGSEFKNLQVEEYLEEEGVKHEFSAPYTPQQNGVVERKNRMLIDMARTMLGEFNTPERFWSEVVNTACHAINRLYLHRLLKKTSYKLLTGNKPNVSYFRVFGSKYYILVKKGRHSKFAPKVVEGFLLGVEEALQDLDWVLAMQEELNNFKRNEVWSLVPRPKQNVVGTKWVFRNKQDKHGVVT

SEQ ID NO: 9985 - protein, 1429 aa, Zea mays
  unsure (1)..(1429): unsure at all Xaa locations
  Clone ID: TF_ZM4325.C1.o25.fg.pep
MDPKGMGMVVNDKTKESIVNEPRDDKPSDSGSSHKKKDRKKKRRIKKIVYYDSDESSSSPRDDKYEEKKKTVNSNFSFDYSRIPFNSNAHLLSIPLGKPLHFDGEDYPFWSHKMRSHLFSLHPSILEIVENGMLFDSTDNPVFINEQIHKNAQATSILLASLCRDEYNKVSGLDNAKQIWDTLKISHEGNDATMITKIELVEGELGRFAMIRGEEPTQTYNWLKTLVNKIRSYGSTRWTDHDVVRLMLRFFTVLNPHLMNSICENPWYTRITPEEILGKFVSGHMMIKEARYVDEALNGPMPIYEPQPVALKATSSREALPSKVAQVEAAGLNEDEMALIIKRFKTALKGRKEHPNKSKTKGKRSCFKCGKTGHFIANCPDNDSNQGQEKSGKREKKKSYKKAKGEAHLGKEWDSDCSSSNSNDEGLTASAFNKSSLFPSECHTCLMAKERKVSARNNSMYDSSSDEESSDDEVDYSSLFKGLDRAKVEKINELIDALNEKNKLLEKQEDLLYEEHDKFIRVQKSLVLATKRNEILSSEISACHESISSLRSVNDDLIAKLEVANKSSSSVERVVICNRCKNFDVNACNEHLASITKLNGEVASLNAQLKTSKNDFDKLKFARDAYTVGRHPSIKDGLGFRREAKNLTSQRAPISAKEKGKAPMTSNAQRNHAFIYSDRKFSRNAHRSYAYDSHAMIASSSSFVHGRNRPRKNVVHVPRKVYASGGSSWIIDSGCTNHMTGEKKMFTSYVKNKDSQDTIIFGDGNQGKVKGLGKIAITNEHFISNVFLVESLGYNLLSISQLCHMGYNCLFTNVDVSVFRRSDGSLAFKGVLDDKLYLVDFSKEEADLDACLIAKTSMGWLWHHRLAHVGMKNLHRLLKGEHVLGLTNVFFEKDRPCAACQVGKQVGSAHHSKNVMTTSRPLELLHMDLFGPVAYLSLGGSKYDLVVVDDFSHFTWVFFLQDKSETQGTLKRFLRRAQNEFELKVKKIRSDNRSEFKNLQVEEFFEEEGIKHKFSAPYTPQQNGVVERKNRTLIDMARTILGEFKMPERFRSEAVNTACHAINQAYLHRLLKKTSYELLTGNKPNVSCFRVFGSKCYILVKKGRNSKFAPKAVEGFLLGYDSNTKAYRVFNKSSGLVEVSSDVVFDETNGSPREQVDLDNIDEYDVPTDAIRTMAIGDVSQKKACDQGGAQEDQVMEEEAPRPPPTQVRATIQRNHPVDQILCDISKGVTTRSRLANFCEHYSFVSSIEPFRVEEALLDPDWVLAMQEELNNFKRNEVWTLVPCPKQNIVGTKWVFRNKQDEHGVVTRNKARLVAKGYAQVTGLDFEETFAPVARLESIRILLAYAAQHSFRLFQMDVKSAFLNGPIKEEVYVEQPXGFEDERYPDHVXGKADPTLFTKTCDGDLFVCQIYVDDIIFALPFITCKSIWS

SEQ ID NO: 9986 - protein, 1230 aa, Zea mays
  unsure (1)..(1230): unsure at all Xaa locations
  Clone ID: TF_ZM4335.C2.o1.fg.pep
MVVNDKEESLFNEARDGKPNDSGSSHKKRDGKKKRRIKKIIYYDSDASSSSPRDDNDDDSSSKKRTVNQNYSFDYSRMPYNSNAHLLSIPLGKPPHFDGEDYSFWSHKMRSHLFSLHPSIWEIIENGMDEYNKVSGLDNAKQIWDTLKISHEGNDATMITKMELVEGEMGRFTMIRGEEPTQTYNRLKTLNPRYTKMTPEEILGKFVSGRMMVKEARYVDNALNGPLPVYEPKPVALKATSSREALPSKDEMTLIIKRFKTALKGHREYPNKNKTRGKRSCFKCGKTGHFIANCPDNDSDQGQEKSRKKEKKKNYRKAKGEAHLGKEWDSDCSSSDSDDEGLAASAFNKSSLFPNERHTCLMAKEKKVRVRDTPKYTSSSDEESSDNEVDYSSLFKGLDRAKVEKINELIDALNEKDTLLEKQEDILYEEHDKFISVQKSLALEIKRNEMLSSELSACHESVSSLRSLNDDLNAKLEEVNKSTSCVEHVVICNRCKDFDVDASNEHIVSITKLSNEVYASGGSSWIIDSGCTNHMTEEKKMFTSYVKNKDSQDTIIFGDGNQGKVKGLGKIAITNEHSISNVFLVESLGYNLLSVSQLCHMGYNCLFTNVDVSVFRRSDGSLAFKGVLDGKLYLVDFSKEEADLDACLIAKTSMGWLWHRRLAHVGMKNLHKLLKGEHVLGLTNVCFEKDRPCAACQAGKQVGSTHHSKNVMTTSRPLELLHMDLFGPVAYLSIGGSKYGLVIVDDFSCFTWVFFLQDKSETQGTLKRFLRRAQNEFELKVKKIRSDNGSEFKNLQVEEYLEEEGVKHEFSAPYTPQQNGVVERKNRMLIDMARTMLGEFNTPERFWSEVVNTACHAINRLYLHRLLKKTSYKLLTGNKPNVSYFRVFGSKYYILVKKGRHSKFAPKVVEGFLLGYDLNTKAYRVFNKSSGLVEVSSDVVFDDTNGSPREQVDLDDIDEDDVPTAAMRTMAIGDVRPQEQQEQDQPSSSTMVSPPTQDDGQVPQEEARLVAKGYAQVAGLDFEETFAPVARLESIRILLAYAAHHSFRLFQMDVKSAFLNGPIKEEVYVEQPPGFEDVRVMTQKFEMSMMGELTYFLGFQYTQDLLKRFGMKDAKPAKTPMGTDGHVDLNKGVSTPCFGIWYLKGSTFDLIGYSDSDYAGCMVDRKSTSGTCQFLGRSLVSWSSKNQTSVALSTAEAEYVAXGQCCAQLLWMRQTLXDFGYNLSKVPLLC

SEQ ID NO: 9987 - protein, 426 aa, Zea mays
  Clone ID: TF_ZM4509.C2.o1.fg.pep
MDIKGNGMVVNDKEKESIFNEPRDNKPTDSGLSHKKKDGKKKRRIKKIVYYDSDESSSSPRDNDEKRKPEIVENGMQFDSTDNPVFINEQIHKNAQATTVLLASLCRDEYNKVSGLDNAKQIWDTLKISHEGNDATMITKMELVEGELGRFAMIRGEKPTQTYNRLKTLVNKIRSYGSTRWTDHNVVRLMLRSFTVIDPHLVNLIHENPRYTKMTPEEILGKFVSGRMMVKEARYVDDALNGPMPIYEPQPVALKATSSKEALPSKVAQVEALGLNESEMVLIIKCFKTALKGRKEYPNKNKTRGKRSCFKCGKTGHFIANCPDNDSDQGQENSGKREKKAYKKAKGEAHLGKEWDSDCSSSDSDDEGLAASAFNKSSLFPNERHTCLMAKEKKDRLLEKQEDILYEEHDKFVSVQKSLALELKEY

SEQ ID NO: 9988 - protein, 589 aa, Zea mays
  unsure (1)..(589): unsure at all Xaa locations
  Clone ID: TF_ZM4576.C1.o19.fg.pep
MDPKGKGMVVNDKEKESIFNEPRDDKPTDSGSSHKKKDGKKKRRIKKIVYYDSDESSSSPRDDDYDEKKKSVNSNFSFDYSCIPYNSNAHLLSIPLGKPPHFDGEDYAFWSHKMCSHLFSLHPSIWEIVENGIQFDSTDNPVFINEQIHKNAQATTILLASLCRDEYNKVSGLDNTKQIWDTLKISHEGNDATMITKMELVEGELGRFAMIRGEEPTQTYNRLKTLVNKIRSYGSTRWTDHDIIRLMLRSFTVIDPHLVNLIRENPRYTKMTPEEILGKFVSGRMMVKEARYVDDALNGPMPVYEPQPVALKATSSREALPSKVAQVEAAGLNEDEMALIIKRFKTALKGRKEHPNKSKAKGKRSCFKCGKTGHFIANCPDNANDQEQEKNEKREKKKAYKKAKGEAHLGKEWDSDCSSSDSDDEGLTASAFNKSSLFPNERHTCLMAKEKKNRLLEXQEDILYEEHDKXCKDFDVDACVEHLTSITKLNGEVTSLNAQLKTCKNDFDKLKFARDAYTVGRHPSIKDGHGFRKEVKNLTSQRAPIPNKEKGKAPMASSNQKNHAFMYNDRKFLEVLIIIGVIMLLIHMP

SEQ ID NO: 9989 - protein, 651 aa, Zea mays
  Clone ID: TF_ZM4582.C2.o1.fg.pep
MDIKGNGMVVNDKEKESIFNEPRDNKPTDSGLSHKKKDGKKKRRIKKIVYYDSDESSSSPRDNDEKRKPQIHKNAQATTVLLASLCRDEYNKVSGLDNAKQIWDTLKISHEGNDATMITKMELVEGELGRFAMIRGEKPTQTYNRLKTLVNKIRSYGSTRWTDHNVVRLMLRSFTVIDPHLVNLIHENPRYTKMTPEEILGKFVSGRMMVKEARYVDDALNGPMPIYEPQPVALKATSSKEALPSKVAQVEALGLNESEMVLIIKCFKTALKGRKEYPNKNKTRGKRSCFKCGKTGHFIANCPDNDSDQGQENSGKREKKAYKKAKGEAHLGKEWDSDCSSSDSDDEGLAASAFNKSSLFPNERHTCLMAKEKKDKSETQGTLKRFLRRAQNEFELKVKKIRSDNGSEFKNLQVEEYLEEEGIKHEFSAPYTPQQNGVVERKNMTLIDMARTMLGEFKTPERFWSEAVNTTCHAINRLYLHRLLKKTSVEEALQDPDWVLAMQEKLNNFKRNEVWSLVPRPKQNVVGTKWVFHNKQDEHGVVTRNKARLVAKGYAQVAGLDFEETFAPVARLESIRILLAYAAHHSFSLFQMDVKSVFLNGPIKEEVYVEQPPGFEDDRYPDHVFKLSKALHGLKQAPRAWYECLRDFEST

SEQ ID NO: 9990 - protein, 1279 aa, Zea mays
  unsure (1)..(1279): unsure at all Xaa locations
  Clone ID: TF_ZM4622.C5.o2.fg.pep
MDPKRKGMVVNDKEKESIFNEPRDDKPTDSGSSHKKKDGKKKRRIKKIIYYDSDASSSSPRDDDDSSSKKKTINQNYSFDYSRMSYNSNVHLLSIPLGKPPHFDGEDCSFWSHKMCSHLFSLHPSIWEIVENGMHFDSTDTPVMINEQIHKNAQATAVLLASLCRDXVQQNDARGDPWKIXSGRMMVKKARYVDDALNGPLPIYELQLVALKATSSKEALPSRDERSTPNKNKTRGKRSCFKCGKTGHFIANCPDNDSDQGQENSGKEKKKNYRKAKGEAHLGKEWDSVCSSSDSDDEGLAASAFNKSSLFPNERHTCLMAKEKKDRAKVEKNNELIDALNEKDRLLEKQEDILYEEHDKFISIQKSLALEIKRNEMLSSELSACHESVSNLKSLNDDLNAKLEEVNKSSSCVEHVVICNRCKDFDVDACNEHIVSITKLSNEVASLNAQLKTCKDDFNKLKFARDAYTIGRHPSIKDGLGFRKETKNLTSQKAPVLNKEKGKAPMASSSQKCHAYIYDRKFSRNAYRDYDHAMIASSSTYDCSRNRPRRNHAVSHAPRRNNVVSHVPRKMCNEPTTVFHTCNTSFILSCKNAKVVARKLGSKCKGDKTCIWVPKTIVTNLAGPNKSWVYASGGSSWIIDSGCTNHMTGEKKMFTSYVKNKDSQDMIIFGDGNQRKVKGLGKIAITNEHSISNVFLVESLGYNLLSAGKQVGSTHHSKNVMTTSRPLELLHMDLFGPVAYLSIGGRTLKRFLRRAQNEFELKVKKIRSDNGSEFKNLHVEEYLEEEGVKHEFSAPYTPQQNGVVERKNRTLIDMARTMLGEFKTPERFWSEAVNTACHAINQLYLHRLLKKTSYELLTGNKPNVSYFRVFGSKCYILVKKVSSDVVFDETNGSPREQVDLDDIDEDDVPTAPMRTMAIGYVRPQEQHEQDQPSCSTMVHPPTQDDEHVPQEEGPDQGGAQEEQVMEEEAPQVPPTQVRATIQRNHPIDQILGDISKGVTTRSRLAIFCEHYSFVSSIEPFGVEETLQDPYWVLAMQEELNNFKRNEVWSLVPRPKQNVVETKWVFHNKQDEHRVVTRNKARLVAKDYAAHHSFRLFQMDVKSAFLNGPIKEEVYVEQPPGFEDDRYPDHVFKLSKALYGLKQAPRAWYECLRDFLIANAFKVGKADPTLFTNTCDGDLFVCQIYVDDIIFGSTNQKSCEEFSRVMIQKFEMSMMGELTYFLGFQVKKLKDDTFISQTKYTQDLIKRFGMKDAKPTKTPMGTDGHVDLNKGGTSVDQKAY

SEQ ID NO: 9991 - protein, 601 aa, Zea mays
  unsure (1)..(601): unsure at all Xaa locations
  Clone ID: TF_ZM4679.C2.o5.fg.pep
MEKIREVMAGLFQYRFRVSVARVGQSYQKPYDHLFETVPYPQGARIPEFSKFSDVYIAEFVWPAKAKSSACSSLQPVQKNRQEEIKFTFNVAKCDRIFDELLKNDNIKLTHTIPPMDKLKRCAYSDQGGAVSPNHRWRFDYLHGCRRIRFLEVLRARSLGFLSNTRGNHLVGGIIAKLPPTWRIFFMALKHKKEAMIVKSIISTLDVEEVRSKDVPRSGPMDSGTSNANVVEGKSGGKNKNKTNRKPKAKQNSDFKKKNIVDLTCFVCGESGHIARKCRNRKGKKGDGQKTVNVAIADAGNSGGGLFRLSVADDCNNVANSVSYSELNLYLVKTKDEALNCFEIYKAKVENQLAKKIKRVRSDRGGEYLSNKFGEYCVEHGIIHETTAPYSPQSNGVAERKNQTLIDLVNAMLDSSGLPKSWCGEAILATCFVLNRVPSAKGDKTPYEGWKGDTLKTLEEAYASPDAEHWKEAVHNEMESILTNGTWEICDLPVGCKXYGIKWIFKKKLKPDGIVDKYKXGLWPRDLPKIKAAFLNGELDEEIYMKQSDGFVTHGQENMDLGEADVILNIKLIKGENGIILKQSHYVENIPKLLQHLLILV

SEQ ID NO: 9992 - protein, 1228 aa, Zea mays
  Clone ID: TF_ZM4823.C5.o4.fg.pep
MDPKGKGMVVNDKEKESIFNEPRDDKPTDSGSSHKKRDGKKKRRIKKIIYYDSDASSSSPREDDDDDDSSKRKTHLCARDEYNKVSGLDNAKQIWDTLKISHEGNDATMITKIELVEGELRRFAMIRGEEPTQTYNRLKTLVNKIRSYGSTRWTDHDVVRLMLRSFTVIDPHLVNLIRENPRYTKMTSEEILGKFVSGHMMVKEARYVDDALNGPLPVYEPQPIALKATSSREALPSRVAQVEATGLNEDEMALIIKRFKTALKGRKEYPNKNKIRGKRSCFKCGKTGHFISQCPDNDNDQAQERHGKKEKKKNYRKAKGEAHLGKEWDSDCSSSDSDDEGLAASTFDKSSLFPNERHTCLMAKEKKVHIRDTPKYSSSSDEESSDDEVDYSELFKGLDRAKVYASGGSSWIINSGCTNHMTEEKKMFTSYVKNKDSQDTIIFRDGNQGKVKGLGKIAITNEQSISNVFLVESLGRSDGSLAFKSVLDGKLCLVDFSKENAGLDACLIANTNMGWLWHHHLAHVGMKNLHKLLKGDRVLGLTDVCFEKNRPCATYKSETQGTLKRFLRKAQNEFELKVKKIRSDNGSEFKNLQVEEFLEEEGIKHEFSAPYTSQQNGVVERKNRTLIDMARTMLGEFRTPERFWSEVVNTACHAINRLYLHRLLKKTSYKLLTGNKPNVSYFRVFGSKCYILVKKGRHSKFAPKAVEGFLLGYDLNTKAYRVFNKSSGLVEVSSDVVFDETNGSQREQVDLDDIDEDEVPTAAMRMMAIGDVRPQELQEQDQPSSSTLVHPPTQDDGQVPQEQERDQGGAQEEHVMEEEAPQAPPTQVRASIQGHHPVDQILGEISKGVTTRSRLATFCEHYSFVSSIEPFRVEEVLHDPDWMLAMQEELNNFKRNEVWSLVPRPKQNVVGTKWVFRNKQDEHGVVTRNKARLVAKAYAGHHSFRLFQMDVKSAFLNGPIKEEVYVEQPPGFEDDWYPDHVYKLSKALYGLKQAPRGCYPSLLQKPCDGDLFVCQIYVDDIIFGSTNQKSCEEFSRVMMQKFEMSMMGELTYFLGFQVKQLKDGTFISQTKYTQDLLKRFGMKDAKPAKTLMGTDGHLDLNKGGKSVDQKAYRSMIGSLLYLCASRPDIMLSVCMCARFQSDPKECHLVAVKRILRYLVSTHCFGIWYPKGSTFDLIGYADSDYAGCKVDKKSTSGTCQFLGRSLVSRSSKKQTSVALSTIEAEYIAA

SEQ ID NO: 9993 - protein, 477 aa, Zea mays
  Clone ID: TF_ZM4904.C1.o13.fg.pep
MDPMGKGMVINDKEKESFLNEPKDDKPTDSGSSHKKKDRKKKRHIKKIVYYDIDESSSSQRDDDDKKKKTVNSNFSFDYSRIPQNSNAHLLSIPLGKPPHFDGEDYGFWSHKMRSHLFSLHPSIWEIVENGMQFDSTDNPMEEYHKVGGLDNAKQIWDTLKISHEGNDATMITKMELVEGELGRFAMIKGEEPTQTYNRLKTLVNKIRSYGSTRWTDHDAVRLMLRSFTVLDPHLVNSIRENPRYTKMTPEEILRKFVSGRMMIKEARYVDEALNGPMPIHEPQTVALKATSSKEGLPSKRFKTALKGRKEHPNKSKTKGKRSCFKCGKTGHFIANCPDNDRDQGQEKSGKRENKKVYKKAKVEAHLGKEWDSDCSSSDSDDEGLAASAFNKSSLFPNEHHTCLMAKEKKVYASGGSSWIIDSGCTNHMTGEKKMFTSYVKNKDSQDSIIFGDGNQGKVKGLGKIAISSEHSYLMCF

SEQ ID NO: 9994 - protein, 204 aa, Zea mays
  Clone ID: TF_ZM4909.C3.o1.fg.pep
MDPKGKGMVVNDKEKESIFNEPRDDKPTDSGSSHKKKDGKKKRRIKKIVYYDSDESSSSPKDGDDDSHEYNKVSSLDNAKQIWDTLKISHEGNDATMITKMEFVEGELGRYTKMTPEEILGKLVSGRMMVKEARRFKTALKGRKEYPNKNKAKGKRSCFKCGKTGHFIANCPDNDSDQGQEKSGKKEKKKSYRKAKGEAHLGKE

SEQ ID NO: 9995 - protein, 668 aa, Zea mays
  unsure (1)..(668): unsure at all Xaa locations
  Clone ID: TF_ZM5004.C1.o6.fg.pep
MTREKKMFTSYIKNKDXQDTIIFGDGNQGKVRGLGKIAITNEHSISNVFLVESLGYNLLSVSQLCHMGYNCLFTNVDVSVFRRSDGSLAFKGVLDDKLYLVDFLKEEAVLDACLIAKTGLGWLWHHRLSHVGMKNLHKLLKGEHVLGLTNICFEKDRPCAACQAGKQVGRTHHSKNVMTTSRPLELLHMDLFGPVAYLSIGGSKYGLVIIDDFFRFTWVFFLQDKSETQGTLKRFLRRAQNEFELKVKKIRSDNGSEFKNLQVEEYLEEEGVKHEFSAPYTPQQNGVVERKNMMLIDMERTMLGEFKTLERFWSEAVNTACHAINRPYLHRLLKKTSYELLTGNKPNVSYFHVFGSKCYILVKKGRHSKFAPKAVEGFLLGYDSNTKAYRVFNKSSGLVEVSSDVVFDETNGSPREQVDLDDIDEDDVPTAAMHTMAIGDVRPQEQQEQDQPSSSTMVQPPTQDGEQPGATSKAKCCGNQVGVPQQARRARVVTRNKARLVAKGYAQVAGLDFEETFAPVARIESIRILLAYAAHHSFRLFQMDVKSAFLNGPIKEEVYVEQPPGFEDDRYPDHVFKLSKALYGLKQAPRAWYECLRDFLIANAFKVGKADPTLFIKTCDGDLFVCQIYVDDIIFGSTNQKSCEEFSRVMTQKFKMSMMGKLTYFLGF

SEQ ID NO: 9996 - protein, 1460 aa, Zea mays
  Clone ID: TF_ZM5105.C4.o2.fg.pep
MDPKGKGMVVNDKEKESFLNEPRDDKPTDSGSSHKKKDGKKKRDEYNKVSGLDNAKQIWDTLKISHEGNDATMITKMELVEGELGRFAMIRGEEPTQTYNRLKTLVNKIRSYGSTRWTDHDVVRLMLRSFTVIDPHLVNFICENPRYTKMTPEEILGKFVSGRMMVKEARYVDDALNGPMAIYEPQPVALKATSSNREALPSKVAQVEAAGLNEDEMALIIKRFKIALKGRKEHPNKSKAKGKRSCFKCGKTGHFIANCPDNANDKEQENSGKREKKKAYKKAKGEPHLDKKWDSDCSSSDSDDEGLAASNFNKSYLFPNECHTCLMAKEKKVSTRDTPKYTTSSDDDSSDDEVDYTSLFKGLERTKVDKINELIDALNENNRLLEKQEDILYEEHDKFVSVQKSLALDIKRNEMLSSELSACHETVSSLKSINDDLNAKLEVVNKSSSFTEHVVICNRCKDFDVDACVEHLTSITKLNGEVASLNAQLKTCKNDFDKLKFARDAYTVGRHPSIKDGLGFRKEAKNLTSQRAPIPNKEKGKAPMASSNQKNHAFMYNDRNFSRSSHYNRSYNAFDSHAMIASSSNFNVVARKMGSKCKGDKTCIWVPKTIVTNLVGPNKSWVHASGGSSWIIDSGCTNHMTGEKKMFTSYVKNKDSQDTIIFGDGNQGKVKGLGRIAITNEHSISNVFLVESLGYNLLSVSQLCHMGYNCLFTNVDVSVFRRSDGSLVFKGVLDGKLYLVDFSKEEADLDACLIAKTSMGWLWHRRLAHVGMKNLHKLLKGEHVLGLTNDKSETQGTLKRFLRRAQNEFELKVKRIRSDNGSEFKNLQVEYLEEEGIKHEFSAPYTPQQNGVVERKNRMLINMARTMLGEFKTPERFWSEAVNTACHAINRLYLYRLLKKTSYELLISNKPNVSYFRVFGSKCYILVKKGLVEVSSDVVFDETNDSPREQVDLDDIDEDDVPTAAIHTMAIGDVRPQEQQQQDQPSSSTMVHPPTQDDEQVHQEGACDQGGAQEEQVIEEEVPLAPPTQVRAIIQRNHHVDQILGDISKGVTTRSRLANFCEHYSFVSSIEPFRVEEALQDPDWVLAMQEELNNFKRNEVWSLVPRPKQNVVGTKWVFRNKQDEHGVLDLWQKETFAPVARLESIRILLAYAAHHSFRLFQMDVKSAFLNGPIKEEVYVEQPPGFEDDKYPDHVFKLSKALYRLKQAPRAWYECLRDFLIANAFKVGKVDPTLFTKTCDGDLFVCQIYVDDIIFGSTNQKSCEEFSMVMTQKFEMSMMGELNYFLRFQVKQLKDGTFISQTKYTQDLLKRFGMKDAKPAKTPMGTNGHVDLNKGGRSVDQKAYRSMIGSLLYLCASRPDIMLSVCMCARFQSDPRECHFVAVKRILRYLVATPCFGIWYPKGSTFDLVGYSDSDYAGCKVDRKSTSGTCQFLGRSLVSWSSKKQTSVALSTVEAEYVAAG

SEQ ID NO: 9997 - protein, 447 aa, Zea mays
  Clone ID: TF_ZmC4916_440.pep
MDPKGKGMVVNDKEKESIFNEPRDDKPTDSGSSHKKRDGKKKRRIKKIIYYDSDASSYSPRDDDDDSSSKKKTVNQNYSFDYSRIPYNSNAHLLSIPLRKPPHFDGEDYSFWSHKMRSHLFSLHPSIWEIVENGMHFDSTDNPMIINEQIHKNAQATTVLLASLYRNEYNKVSGLDNAKQIWDTLKISHEGNDATMITKMELVEGKLGRFTMIRGEEPTQTYNRLKTLVNKIRSYGSTRWTDHDVVRLMLRSFTVIDPHLFNLIRENPRYTKMTPEEILEKFVSGRMMVKEARYVDDALNGPLPIYEPQPVALKAMSGRETLPSKVAQVEATGLNENEMALIIKRFKTALKGRKEYPNKNKTRGKRSCFKCGKTGHFIAQCPVNDNDQGQEKHGKREKKKVYKKVKGEAHLGKEWDSDCSSSDSDDEGLSALAFDKSSLLLGFSLPF

SEQ ID NO: 9998 - protein, 864 aa, Zea mays
  Clone ID: TF_ZM4989.C10.o1.fg.pep
MDPKGKGMVINDKEKESFVNEPNDDKPTDSGSGHKRKDGRKKKARRIKEIVYYDSDESSSSQKDNDDYDRRKTVNSNFSFDYSRIPHSSNAQLLPIPLGKPPHFDGEDYGFWSHKMCTHLFSLHPSIWEIVESGMKFDSSDSPMFINEQIHRNAQATTVLLASLCRDEYHKVSGLDNAKQIWDTLKISHEGNDVTLLTKMELVEGELGRFAMIRGEEPTQTYNRLKTLINKIRSYGSTRWTDHDVVRLMLRSFTVLDPHLVNNIRENPRYTKMSPEEVLGKFVSGRMMIKEARYVDDALNGSINEPQPLALKATRSKEALPSKVAQIEAAGLNDEEMALIIKRFKTVLKGRKGQLSKTKAKGKRSCFKCGKLGHFIANCPNNDSDQDQGNKREKKKNYKKAKGEAHLGKEWDSDCSSSDSDNEGLAATAFNKSSLFPNERHTCLMAREKKVSTHNTSTYASSSEDESSDDDEIDYSCLFKGLDRTKVDKINELIDALNDRNILLEKQEDLLYEEHDKFVEAQKSLALEIKRNEMLSSELSSCHETIAKLKSFNDDLNAKLEVATSLNAQLKTSKNEFDKLKFARDAYTIGRHPSIKDGLGYKREAKNLTSHKAPISAKEKGKAPMATSTKKNHAFLYHDRRQSRSAYRGYNAYDDFDSHHMIASSSSYMHGRNMSRRNAIHHVPRKNVSHASRKVVNEPSTIYCALNASFAIRRKDKKIVARKLGAKCKGDKTCIWVPKDICTNLVGPNMSWVYASGGSSWIIDSGCTNHMTGEKKMFTSYVKNKDSQDSIIFGDGNQGKDKSETQGTLKRFLRRAQNEFELKVKKIRSDNGSEFKNLQVEEFLEEEGIKHEFSAPYTPQQNGV

SEQ ID NO: 9999 - protein, 2127 aa, Zea mays
  unsure (1)..(2127): unsure at all Xaa locations
  Clone ID: TF_ZmC24260_2.pep
MASNNNVHIGKPPHFDGNNYDYWKIRMSMHLRAMGGKIWPIVRDGFVVLKEDEPSVSDNENILTNDQAMNVFYDALDINEFNRIKNLTTAHEIWVKLMEIHEGTTIVKSAKLYVCKGKFEQFIMKEDESVSDMFNRLNEIVNELKGLGFNVPDVDFTHKFLRSLPEKYETIVTMLVRSDLSTTSPTEVLGEILTQDIFKKSQADALSLAKKVKNESIALKAKASKAIEKEDSNDEENESESDGDMALFVRKFNKFMKMKRGQPRRGQTSRRNAFNDRKCFECGEPGHIAMNCPSKKKKGKDESDKKKKKYYNKKKDGKAYLVEWDSDDSSDDDDDDTSSKLNAGIAIKEAPSLFSSPHCLMAKGDAKALKELYKNLQVSFEELKTSHNDLKENCEKLADAQKSSIVHEVEVVTKDVGVTCDLLDSLTSEPLPTNSICDKCKISLNDNIALDESKIIVENEVLVDRISTLTHDLEKAYGGKKNLDFILGSQRCSLNREGLGYVPKKGKNAFVKQKTLFVKECDKVNYKAGGNHWVLDSGCTQHMTGDMKMFTQMSDEDCSNYDSITFGDNRKGKVKGLGKIAISNDHSISNVLLVESLNFNLLSVAQLCDLGFCCNFTVEDVIISSVDGSNLKFKGFRHENLYLVDFSSNEAKLTTCLFSKASLGWLWHRRLGHVGMKQLNRLTKHDLVRGLKDVKFEKNKLCSSCQAGKQVANTHPNKSQMSTHRPLELLHMDLFGPTSFVSIGGNSYCLVIVDDYSRFTWVYFLRDKSNVFETFKSFAILAQNQFDFDIKKVRSDNGSEFKNARIDQYCDDKGIKHEFSSKYTPXQNGIVERKNRTLIDMARSMLAEYNISDSYWAEAINTACHSSNRLYCHKLLKKTPYELLIGRKPNISYFRVFGCKCYILRKGSRLSKFEKKCDEGFLLGYSSNSKAYRVFNKTHGIIEEAYDVEFDETNGSQDESENLDDVGGTQLINAMKTMAIGEIKPKEDDDENSVVVIPSSSTINEEDHQSQQLNETIDTHDQGTSRPPIPPNASTSNYQTVSRIHHSIVKDHPVDQIVGDISKGVQTRSRIASFCEHFSFVSCVEPNRVDEALLDVDWVNAMHEELNNFARNEVWELVERPKNHNVIGTKWVFRNKHNEDGVVVRNKARLVAQGYTQIEGLDFGETFAPVARLEAIRILLAYACAHNIKLYQMDVKSAFLNGKISELVYVEQPPGFEDPKRPNHVFKLSKALYGLKQAPRAWYERLRDFLFSKDFKIGKVDTTLFTKRIGKDLFVCQIYVDDIIFGSTNELFCEEFGKMMSKEFEMSMIGELSFFLGLQIKQLKDGIFISQSKYLKDMLKKFGLENAKPIKTPMATNGHLDLDEGGTMVDQKLYRSIIGSLLYITASRPDVMFSVCMCARFQASPREIHLKAAKRILRYLKYTPNIGLWYPKGAQFELIGYSDSDYAGCKVDRKSTSGCCQFLGRSIVSWSSKKQNSVALSTAEAEYISAGNCCAQLLWMKQTLLDYGIIFKNVPLMCDNESAKVDRSWKNECQAADRPPMDRGPSAESGNGQSEQPRRPSEILRARTVRRPSADRPRQGRKRDKDADLPVVLPRSISLALHSPYTLLCRVGFGGLRKKLAGRFKSKRPRGNDDDYTPTTDSEAQSSAGGTESMDAEDFLHVHPDYPIDIQGWTYPKRRFSMAEYCSRRTVNQYALPSDTNIQFFHTQLQFDVFWGTLVDTNFHKHQVIDWSFLLSQSVMEGLIPKFETCGLYQFMGQRTDFNEMAVKQFLATSEIDIAEESITWMTGFKRYSASFADFAAANSLNYGTISAGVDLYTEDNFEDFVQFYEPARLGIPRRFGETAGLRHHPAVINKIARVTILPKSGDKSKIRDKFWNIIQHIMNGEVMNIVLFMMRQLNDLKMDKNQNLAYAPYIMALIKSKTRFEGPCEIVHTPFRPFKNEIGFLTRPLTPFPDDEEDPGYAGGAAPNVEEQQMPPPPPPPQPQHYWEPAPGYFDPYFHNMQQGLETHIDARFDGLMSHVDHRLDDMQSRFDSNWDALNSEFSDFRDQIHTNVTDPIMSRLNNMQQSFQDNMSALSSQFDNLSTTDNMHDISQRQQQLQQDFGQFSSLFDTFSTHYYNMHPPPSDQ

SEQ ID NO: 10000 - protein, 1560 aa, Zea mays
  Clone ID: TF_ZM4182.C3.o1.fg.pep
MASNNNVHIGKPPHFDGNNYDYWKIRMSMHLRAMGGKIWPIVRDGFVVLKEDEPSVSDNENILTNDQAMNVFYDALDINEFNRIKNLTTAHEIWVKLMEIHEGTTIVKSAKLYVCKGKFEQFIMKEDESVSDMFNRLNEIVNELKGLGFNVPDVDFTHKFLRSLPEKYETIVTMLVRSDLSTTSPTEVLGEILTQDIFKKSQADALSLAKKVKNESIALKAKASKAIEKEDSNDEENESESDGDMALFVRKFNKFMKMKRGQPRRGQTSRRNAFNDRKCFECGEPGHIAMNCPSKKKKGKDESDKKKKKYYNKKKDGKAYLVEWDSDDSSDDDDDDTSSKLNAGIAIKEAPSLFSSPHCLMAKGDAKALKELYKNLQVSFEELKTSHNDLKENCEKLADAQKSSIVHEVEVVTKDVGVTCDLLDSLTSEPLPTNSICDKCKISLNDNIALDESKIIVENEVLVDRISTLTHDLEKAYGGKKNLDFILGSQRCSLNREGLGYVPKKGKNAFVKQKTLFVKECDKVNYKAGGNHWVLDSGCTQYMTGDMKMFTQMSDEDCSNYDSITFGDNRKGKVKGFCCNFTVEDVIISSVDGSNLKFKGFRHENLYLVDFSSNEAKLTTCLFSKASLGWLWHRRLGHVGMKQLNRLTKHDLVRGLKDVKFEKNKLCSSCQAGKQVANTHPNKSQMSTHRPLELLHMDLFGPTSFVSIGGNSYCLVIVDDYSRFTWVYFLRDKSNVFETFKSFAILAQNQFDFDIKKVRSDNGSEFKNARIDQYCDDKGIKHEFSSKYTPKQNGIVERKNRTLIDMTRSMLAEYNISDSYWAEAINTACHSSNRLYCHKLLKKTPYELLIGRKPNISYFRVFGCKCYILRKGSRLSKFEKKCDEGFLLGYSSNSKAYRVFNKTHGIIEEAYDVEFDETNGSQDESENLDDVGGTQLINAMKTMAIGEIKPKEDDDENSVVVIPSSSTINEEDHQSQQLNETIDTHDQGTSRPPIPPNASTSNYQTVSRIHHSIVKDHPVDQIVGDISKGVQTRSRIASFCEHFSFVSCVEPNRVDEALLDVDWVNAMHEELNNFARNEVWELVERPKNHNVIGTKWVFRNKHNEDGVVVRNKARLVAQGYTQIEGLDFGETFAPVARLEAIRILLAYACAHNIKLYQMDVKSAFLNGKISELVYVEQPPGFEDPKRPNHVFKLSKALYGLKQAPRAWYERLRDFLFSKDFKIGKVDTTLFTKRIGKDLFVCQIYVDDIIFGSTNELFCEEFGKMMSKEFEMSMIGELSFFLGLQIKQLKDGIFISQSKYLKDMLKKFGLENAKPIKTPMATNGHLDLDEGGTMVDQKLYRSIIGSLLYITASRPDVMFSVCMCARFQASPREIHLKAAKRILRYLKYTPNIGLWYPKGAQFELIGYSDSDYAGCKVDRKSTSGCCQFLGRSIVSWSSKKQNSVALSTAEAEYISAGNCCAQLLWMKQTLLDYGIIFKNVPLMCDNESAVKLATNPVQHSRTKHIDIRHHFLRDHVGKGDISIYSIGTDDQLADIFTKPLDETRFCSLRSEMNVIDISNVA

SEQ ID NO: 10001 - protein, 1759 aa, Zea mays
  Clone ID: TF_ZM5061.C1.o1.fg.pep
MASNNNVHIGKPPHFDGNNYDYWKIRMSMHLRAMGGKIWPIVRDGFVVLKEDEPSVSDNENILTNDQAMNVFYDALDINEFNRIKNLTTAHEIWVKLMEIHEGTTIVKSAKLYVCKGKFEQFIMKEDESVSDMFNRLNEIVNELKGLGFNVPDVDFTHKFLRSLPEKYETIVTMLVRSDLSTTSPTEVLGEILTQDIFKKSQADALSLAKKVKNESIALKAKASKAIEKEDSNDEENGSESDGDMALFVRKFNKFMKMKRGQPRRGQTSRRNAFNDRKCFECGEPGHIAMNCPSKKKKGKDESDKKKKKYYNKKKDGKAYLVEWDSDDSSDDDDDDTSSKLNAGIAIKEAPSLFSSPHCLMAKGDAKVKIITDLNDVNDDDDIDDVDDDGYSYDDLVRMLGEADDYMHKEKEKFKALKELYKNLQVSFEELKTSHNDLKENCEKLGNAQKSSIVHEVEVVTKDVGVTCDLLDSLTSEPLPTNSICDKCKISLNDNIALDESKIIVENEVLVDRISTLTHDLEKAYGGLGYVPKKGKNAFVKQKTLFVKECDKVNYKAGGNHWVLDSGCTQHMTGDMKMFTQMSDEDCSNYDSITFGDNRKGKVKGLGKIAISNDHSISNVLLVESLNFNLLSVAQLCDLGFCCNFTVEDVIISSVDGSNLKFKGFRHENLYLVDFSSNEAKLTTCLFSKASLGWLWHRRLGHVGMKQLNRLTKHDLVRGLKDVKFEKNKLCSSCQAGKQVANTHPNKSQMSTHRPLELLHMDLFGPTSFVSIGGNSYCLVIVDDYSRFTWVYFLRDKSNVFETFKSFAILAQNQFDFDIKKVRSDNGSEFKNARIDQYCDDKGIKHEFSSKYTPEQNGIVERKNRTLIDMARSMLAEYNISDSYWAEAINTACHSSNRLYCHKLLKKTPYELLIGRKPNISYFRVFGCKCYILRKGSRLSKFEKKCDEGFLLGYSSNSKAYRVFNKTHGIIEEAYDVEFDETNGSQDESENLDDVGGTQLINAMKTMAIGEIKPKEDDDENSVVVIPSSSTINEEDHQSQQLNETIDTHDQGTSRPPIPPNASTSNYQTVSRIHHSIVKDHPVDQIVGDISKGVQTRSRIASFCEHFSFVSCVEPNRVDEALLDVDWVNAMHEELNNFARNEVWELVERPKNHNVIGTKWVFRNKHNEDGVVVRNKARLVAQGYTQIEGLDFGETFAPVARLEAIRILLAYACAHNIKLYQMDVKSAFLNGKISELVYVEQPPGFEDPKRPNHVFKLSKALYGLKQAPRAWYERLRDFLLSKDFKIGKVDTTLFTKRIGKDLFVCQIYVDDIIFGSTNELFCEEFGKMMSKEFEMSMIGELSFFLGLQIKQLKDGIFISQSKYLKDMLKKFGLENAKPIKTPMATNGHLDLDEGGTIVDQKLYRSIIGSLLYITASRPDVMFSVCMCARFQASPREIHLKAAKRILRYLKYTPNIGLWYPKGAQFELIGYSDSDYAGCKVDRKSTSGCCQFLGRSLVSWSSKKQNSVALSTAEAEYISAGNCCAQLLWMKQTLLDYGIIFKNVPLMCDNESAVKLATNPVQHSRTKHIDIRHHFLRDHVGKGDISIYSIGTDDQLADIFTKPLDETRFCSLRSEMNVIDISNKVGRDWQNEYQAADRPPMDRGPSAASGNGQSEQPRRLSESRFDSNWDALNSEFSDFRDQIHTNVTDPIMSRLNNMQQSFQDNMGALSSQFDNLSTTDNLHDISQRQQQLQQDFGQFSSLFDTFSTHYYNMHPPPSDQ

SEQ ID NO: 10002 - protein, 289 aa, Zea mays
  Clone ID: TF_ZmC5918_2.pep
MARVFVGNLDPRVTAREIEDEFRTFGVLKSVWVARKPPGFAFIDFDDRRDAQDAIRDLDGKNGWRVELSTKDGGGRGRDRNGSDMKCYECGEVGHFARECRLRIGSGGLGSGRRRSRSPRYRSRSRSRSRSPRHRRSPSYGRRSYSPRDRSPRRRSYSRSPPRSRARSLSRSPPLPPPPPRNNSMSPRGAREMSRSSPPPPKNNSSSPREAREMSRSPPPPAKNNRSSPREAREMSRSPPPPPPRNNSRSPPGARDVSRSPPPPPDARRSYSRSPEQQPQHESPYANDA

SEQ ID NO: 10003 - protein, 248 aa, Zea mays
  Clone ID: TF_ZmC5918_5.pep
MARVFVGNLDPRVTAREIEDEFRTFGVLKSVWVARKPPGFAFIDFDDRRDAQDAIRDLDGKNGWRVELSTKDGGGRGRDRNGSDMKCYECGEVGHFARECRLRIGSGGLGSGRRRSRSPRYRSRSRSRSRSPRHRRSPSYGRRSYSPRDRSPRRRSYSRSPPLPPPPPRNNSMSPRGAREMSRSSPPPPKNNSSSPREAREMSRSPPPPAKNNRSSPREAREMSRSPPPPPPRNNSRSPPGARDVSRS

SEQ ID NO: 10004 - protein, 609 aa, Zea mays
  Clone ID: TF_ZM4269.C1.o9.fg.pep
MSHKPPTFASSPDPLDTDDWLKSVEKMLNIAQCTDREKVLYASGRLTGPAADWWDSYTAAHDVADTTTRAEFTTQFKNHHIPAGLMKIKKKEFLSLKQGSMSVSKYRDKFIQLSRYVPDEVAEDERKQEHFIEGLNGPLYTPTKFSGQSAGTTCYKCGKIGHYANVCPQRIATTPVQNKQQTPGSGKGYSIARVNQVSVDATPDGADIVLGMFYVNAIPATILFDSGATHSFMSARYANTNEIPLLNMRKPMIVITPKGPVEANQMTRRLTLTIMAREFGATAIILEATSIDLILGMSWLRKAKAIIACGRGTVELTSPKGEIFQVQITVTTSSKRAMFFIPEEFVGDNIRVVRDFLDVFPEELPGMPPDREVEFVRDLLPGTAPISKRPYMMSVEELKELKKQLTELQEAGYIRSSSSPWRAPVLFVQKKDGSQRMCVDYRSLNDVTMKNKYLLPRIEDLFDQMRGARVFSKIDLRSGYHQMRIRPSDIPKTTFSTRYGLYEFIVMSFGLTNAQTYFMDLMNKFSKCEFWIGEVPFLGHIISNGGISVDPAKVKEIMAWGVPTIVTEIRSFLELAGYYWRFIEGFSKIAKPMTSLLEKGREFKWDEKC

SEQ ID NO: 10005 - protein, 1234 aa, Zea mays
  unsure (1)..(1234): unsure at all Xaa locations
  Clone ID: TF_ZM4411.C1.o3.fg.pep
MSGEHAKKEMVIGEKPAISHGKAPSGESRNKKKEESPPHKSHRSGDKKKKMKKVVYYETDSSSPSTSGSDASSVTSKCHERKKFSKIPLRYPCISKRTPLLSVPLGKPPVFYGEDYNMWSDKMRHHLTSLHTSIWDVVEFGVQVPSVGDEDYDSDEVAQIRHFNSQATTILLASLSREEYNKVQGLKSAKEIWDVLKTVHEGDEVTKITKRETIKGELGRFMLNQGEDPQAMYNRLKTLVNQVRNLGSTKWDDHEMVKVILRSLVFLNPTQVQLIRGDPRYKLMSPEEVIGKFVSFELMIKGSKKIIEQGATSTSKVQPVAFKATEEEKKDSTPSRVPIDASKLDNEEMALIIKSFHQILKQRRGKDYKPRSKKVCYNCGKPGHFIAKCPLYSDSDRDNDKRGKKEKKRYYKKKGGDAHVCQEWDSDESSTDSSSDEDAANIAINKGLLFPNVGHKCLMAKDGKKKKVKSRSSTKYATSSDEDNSSDDEDNLLTLFANLNIQQKEKLNELISAIHEKYELLDSQEDFLIKENKKHVKTKNAYAQEIDMLNESLASLKFENDKLIAKAKELDVCNVSISNLRNENAILHAKIVELNDCKPSTSTVEHVSICTRCRDINIDAIHDHLAMIKQQNDHIAKLDAKIAEHELENEKFKFPRGMLYSGRRPGIKDGIGFQQGDNVKLNAPPKRLSNFVKGKAPMPQDNEGYILYPAGKVVAKYVGGKYKGSKTXFGYPRPLELLHMDLFGSIAYISIGMKFLVANALFXVKRGRKSKFAPKAVEGFLLGCDSNTRVYRVFNKSTGLVEVSCDIVFDESNGSQVEQVDLDELDDEEAPCIALRNMSIGDVCPKESEEPPQAQDHQPSSSMKASPPTQDEDQAQEDENEDQEDEPPQEEDIDQGGDANDQDKEDDEDPRPPHPRVHQAIQRNHPMNTILGDIHKGPHRVEEALQDSDWVLAMQEELNNFTRNEVWHLVPCPNQNVVATKWVFRNKQDEHGVVTRNKARLVPKGYSQVEGLDFGETYAPVARLESIRILLAYATYHGFKLYQMDVKIAFLNGPIKEEVYVEQPPGFEDSEYPNHVYKLSKALYGLKQAPRAWYECLRDFLITNGFKVGKADPTLFTKTNENDLFFSRIMIQKFEMSMMGELKYFLGFQVKQLQQGTFISQTKYIQDILTKFGMKDAKPIKTPMRTNGHLDLDMGGKSVDQKEEHIRDLSVSGEIPGVLGFKETKLSSSFYRRS

SEQ ID NO: 10006 - protein, 991 aa, Zea mays
  unsure (1)..(991): unsure at all Xaa locations
  Clone ID: TF_ZmC4916_354.pep
MDPKGKGIVINDKEKESFVNEPKDDKTTDLGSGHKRKDGKKKKTRRIKDIVYYDDSDESTSSQKDNDDNDYERRKPVNSNFSFDYSRIPQSTNAHSLSIPLGKPPHFDGEDYGFWSHKMRSHLFSLHPSIWEIVESGMKFDSSDSPMFINEQIHRNAQATTVLLASLCRDEYHKVSGLDNAKQIWDTLRISHEGNDVTLLTKMELVEGELGRFTMIRGEEPTQTYNRLKTLINKIRSYRSTQWTDHDVVRLMLRSFTVLDPHLVNNICENPRYTKMSPEEVLGKFVSGRMMIKEARYVDDALNGPIHEPQPIALKATRSKEALPSKVAQVEAAGLNDEEMALIIKRFKTALKGRKGQPSKTKTKGKRSCFKCGKVGHFIANCPDNDSDQEEGNKREKKKNYKKAKGEEHLGKEWDSDCSSSDSDNEGLAATAFNKSSLFPNEHHTCLMAREKKGLDRAKVDKINELIDALNDKNRLLEKQEDLLYDEHDKFVEAKKSLALEIKRNEMLSCELSTCHDSISSLKSINDDLTAKLEIANKSTSCVEHVVVCTRCKDFNIDACSEHLVSISKLNDEVASLNAQLKTSKSEFDKLKFARDAYTIGRHPSIKDGLGFKREAKNLTSHKAPIPAKEKGKAPMASSTKRNHAFMYHDRRQSNKSCNAYDAFDSHAMFASSSSYMHGKDMSRRHFVHMPRRNVVNVPRNVNEPSTIYHALNASFAICRKDRKIVARNIGAKCKGDKTCIWVPKTIVTNLVGPNKSWVYASGGSSWIIDSGCTNHMTGEKKMFTSYVKNKDSQDSIIFGDGNQGKDKSETQGTLKRFLRRAQNEFELKVKKIRSDNGSEFKNLQVEEFLEEEGIKHEFSAPYTPQQNGVVERKNRTLIDMARTMLGEFKTPECFWSEAVNTACHAINRVYLHRLLKKTSYELLTGNKPNXEEDVPTAAIRTMAIGEVRPQEQDERDQPSSSTTVHPPPQDDEXVHQKETCDQGGAQDVHV

SEQ ID NO: 10007 - protein, 1636 aa, Zea mays
  Clone ID: TF_ZmC4916_357.pep
MDPKGKGMVVNDNEKESIFNEPRDDKVNDSGSSQKKKDGKKKRHIRKVVYYDSDESSSSQKDDEYEEKKKTVNSNFSFDCSRIPHNSNAHLLSIPLGKPPHFDGEDYGFWSHKMRSHLFSLHPSIWEIVENGMQFDSSDNSMFINEQIHKNAQATTILLASLCREEYNKVSGLDNAKQIWDTLKISHEGNDVTMLTKMELVEGELGRFAMIRGEEPTQTYNRLKTLVNKIRSYGSTRWTDHDVVRHMLRSFTVLDPHLVNSIRENPRYIKMTPEEILEKFVSGRMMIKEARYVDESLNGPIHEPQTIALKATSSREALPSKVAQVEAAGLNEDEMALIIKRFKTALKGHKEHPNKSKTKGKRSCFKCGKVGHFIANCPDNDGDQDKEKKREKKKTYKKAKGEAHLGKEWDSDCSSSDDKGLAASAFNKSSLFPNEHHTCLMAKEKKVYTRDTITYASSSDDESSDDEIDYASLFKGLDRTKIDKINELIDALNDKNRLLEKQEDLLYEEHDKFVDVQKSLALEVKRNEMLSCELSTCHETISSLKSVNDDLNAKLEVANRSNSCEEHVVICNRFLMPNLRLAKIIDKLKFASDAYTVGRHPSIKDGLGFKREAKNLTSYKAPISAKDKGKAPMANSVQKNHAFIYSDRKFSRNAYRNYSYDSYAMPASSSSIVHDMPRKNIIHHMPRRNVAHVPRKPSNEPSTIYHACNASFAICRKDKKVVARKLGAKCKGDKACIWVPKAIVTNLVGPNKSWVYASGGSSWFIDSGCTNHMSGEKKMFTSYVKNKDSQDSIIFGDENQGKIDLVQLVKQDKIETQGTVKRFLRRAQNEFELKVKKIRSDNGSEFKNLQVEEYLEEEGIKHEFSAPYTPQQNGVVERRNKTLIDMSRTMLGEFKIPERFWSEAVNTACHTINRVYLHRLLKKTSYELLTGNKPNVSYFRVFGSKCYILVKKGRNSKFAPKAVEGFLLGYDSNTKAYRVFNKSSGLVEVSSDVVFDETNGSPREKVVNPNDVDEYDVPTDAIRTMAIGDVRPQEHQEQDQPSSSTLVHPPTQDDEQVHQEEACDQGGAQDDHVMDEEAPQAPPTQVRATIQRNHPVDQILGDISKGVTTRSRLVNFCEHCSFVSSIEPFRVEDALLDPDWVLAMQEELNNFKRNEFWTLVPRPKQNVVGTKWVFRNKQDEHGVVTRNKARLVAKGYAQVTGLDFEETFDPVARLESIRILLAYAAHHSFRLFQMDVKSAFLNGPIKEEVYVEQPPSFKDERYPNHVCKLSKALYGLKQALRAWYECLRDFLIANAFKVGKADPTLFTKTCDGDLFVCQIYVDDIIFGSTNQKSCEEFSRVMTQKFEMSMMGELNYFLGFQVKQLKDGTFISQTKYTQDLIKRFGMKDAKPAKTPMGTDGHVALNKGGKSVDQKAYRSMIGSLLYLCASRPDIMLSVCMCARFQSDPRECHLVVVKRILRYLVATPCFGIWYPKGSTFDLIGYSDSDYAGCKVDRKSTSGTCQFLGRSLVSWSSKKQTSVALSTAEAEYVAAGQCCAQLLWMRQTLRDFGYNLSKVLLLCDNESAIRMADNPVEHSRTKHIDIWHHFLRDHQQKGDIEVFYVSTENQLADIFTKPLDESTFCRLRSELNVLDSRNSD

SEQ ID NO: 10008 - protein, 424 aa, Zea mays
  Clone ID: TF_ZmC4916_412.pep
MDPKGKGMVIDDKEKESFINEPKDDKPTDSGSSQKKKDGKKKRRIKKIVYYDSDESSSSQKDDGYKEKKKTVNSNFSFDYSRIPHNSNAHLLSIPHGKPPHFDGEDYGFWSHKMRSHLFSLHPSIWEIVENGMRFDSSDNSMFINEQIHKNAQATTVLLASLCREEYNKVSGLDNAKQIWDTLKISHEGNDVTMLTKMELVEGELGRFAMIRGEEPTQTYNRLKTLVNKIRSYGSTRWTDHDVVRLMLRSFTVLDPHLVNSIRENPRYIKMTPKEILRKFVSGRMMIKEARYVDEALNGPIYEPQTVALKATSNRETLPSKRFKTALKGRKEHPNKSKTKGKRSCFKCGKVGHFIANCPDNDSDQDQEKKREKKKTYKKAKGEAHLGKEWDSDCSSNDNEGLATSAFNKSSLFPNEHHTCLMAK

SEQ ID NO: 10009 - protein, 1215 aa, Zea mays
  Clone ID: TF_ZM3638.C2.o1.fg.pep
MALGSGHKRKDGKKKKTRRIKKIVYYDDSDESTSSQKDNDDNDYERRKPVNSNFSFDYSRIPQSTNAHLLSIPLGKPPHFDGEDYGFWSHKMRSHLFSLHPSIWEIVESGMKFDSSDSPMFINEQIHGNAQATTVLLASLCRDEYHKVSGLDNAKQIWDTLRISHEGNDVTLLTKMELVEGELGRFAMIRGEEPTQTYNRLKTLINKIRSYGSTRWTDHDVVRLMLRSFTVLDPHLVNNIRENPRYTKMSPEEVLGKFVSGRMMIKEARYVDDALNGPIHEPQPIALKATRSKEALPSKRFKTALKGRKGQPSKTKTKGKRSCFKCGKVGHFIANCPDNDSDQEEGNKREKKKKNYKKAKGEAHLGKEWDSNCSSSDSDNEGLAVTAFNKSSLFRNEHHTCLMAREKKGLDRTKVDKINELIDALNDKNRLLEKQEDLLYDEHDKFVEAQKSLALEIKRNEMLSCELSTCHDSISSLKSINDELNAKLEIANKSTSCVEHVVVCTRCKDFNVEACSEHLVSISKLNDEVASLHAQLKTSKSEFDKLKFARDAYTIGRHPSIKDGLGFKREVKDLTSHKAPISAKEKGKAPMASSARKNHAFMYHDRRQSNKSCNAYDAFDSHAMFASSSSYMHGKDMSRRYFVHMPRRNVVNVPRKVNEPSTIYHTLNASFAICRKDRKIVARKLGAKCKGDKTCIWVPKTIVTNLVGPNKSWVYASGGSSWIIDSGCTNHMTGEKKMFTSYVKNKDSQDSIIFGDGNQGKVKGLDVSVFRRSDGSLAFKGVLDDKLYLVDFAKEEAGLDACLIAKTSMGWLWHRRLAHVGMKNLHKLLKGEHVIGLTNVQFEKDRPCAACQAGKQVGSSHHTKNVMTTSRPLEMLHMDLFGPVAYLSIGGSKYGLVIVDDFSRFTWVFFLQDKSETQGTLKRFLRRAQNEFELKVKKIRSDNGSEFKNLQVEEYLEEEGIKHEFSAPYTPQQNGVVERKNRTLIDMARTMLGEFKTPERFWSEAVNTACHAINRVYLHRLLKKTSYELLTGNKPNVLYFRVFGSKCYILVKKGRNSKFAPKAVEAFLLGYDSNTKAYRVFNKSLGLVEVSSDVVFDETNGSPREQVVDFDDVDEEEVPTAAIRTMAIGDVRPHEQNERDQPSSSTMVQPPTQDDEQEACDQGGAQDDHVMEEEAQPAPLTQVRAMIQRDHPVDQILGDISKGVTTRSRLVNFCE

SEQ ID NO: 10010 - protein, 387 aa, Zea mays
  Clone ID: TF_ZM4321.C3.o5.fg.pep
MDPKGKGMVVNDNEKESIFNEPRDDKVNDSGSSQKKKDGKKKRRIRKVVYYDSDESSSSQKDDEYEEKKKTVNSNFSFDYSRFPHNSNAHLLSIPLGKNTIRWASLCREEYNAKQIWDTLKISNEGNDVTMLTKMELVEGELGRFTMIRGEEPTQTYNRLKTLVNKIRRYGSTRWTDHDVVRLMLRSFTVIDPHLVNSIRENPRYTKMTPEEILGKFVSGRMMIKEARIVDDALNGPIHEPQPIALKATRSREMLPSKVAQVETAGLNEEEMALIIKRFKTALKGRKEHPNKSKTKGKRSCFKCGKVGHFIANCPDNDSDQDQEKKREKKKTYKKAKGEAHLGKEWNSNCSSSDSDDEGFAASAFNKSSLFPNEHHTCLMAKEKKNM

SEQ ID NO: 10011 - protein, 464 aa, Zea mays
  Clone ID: TF_ZM4355.C1.o9.fg.pep
MDPKGKGIVINDKEESFVNEPKDDKPTDSGSGHKRKDGKKKKTRRIKEIVYYDYSDESTSSQKDNDDNDYRKPIWDTLRISHEGNDVTLLTKMELVEGELGRFAMIRGEEPTQTYNRLKTLINKIRSYGSTRWTNHDVVRLMLRSFTVLDPHLVNNIRENPRYTKMSPEEVLGKFVSGRMMIKEARYVDDALNGPIHEPQPIALKATRSKEALPSKVAQVEAAGLNDEEMTLIIKRFKTALKGRKGQPSKTKTKGKRSCFKCGKVGHFIANCPDNDSDQEQGNKREKKNYKKAKGEAHLGKEWDSDCSLSDSDNEGLAATAFNKSSLFPNEHHTCLMAREKKGLDRTKVDKINELIDALNDKNRLLEKQEDLLYDEHDKFVEAQKSLALEIKRNEMLSCELSTCHDSISSLKSINDDLNAKLEIANKSTSCVEHVVVCTRCKDFNVDACSEHLVSISKLNDKVV

SEQ ID NO: 10012 - protein, 1465 aa, Zea mays
  Clone ID: TF_ZM4543.C1.o1.fg.pep
MTPEEILGKFVSGRMMIKEARYVDEALNGPIHEPQTIALKATSSREALPSKVAQVEAAGLNEDEMTLIIKRFKTALKGRKEHPNRSKTKGKRSCFKCGKVGHFIANCPDNDSDQDQEKKRENKKTYKKAKGEAHLGKEWDSDCSSSDDEGLAASAFNKSSLFPNEHHTCLIATEKKNRLLEKQEDLLYEEHDKFVDVQKSLALEVKMNEMLSCELSTCHETISSLKSVNDDLNAKLEVANKSSSCVEHVVICNKCKDFNVDACVEHLTSIAKLNGEVASLNAQLKTSKNEFDKLKFARDAYTVGRHPSIKDGLGFKREAKNLTSHKAPISAKEKGKAPMANSVQKNHAFIYSDRKFSRNAYRNYSYDSYAMPASSFSIVHDMPRKNVIHHMPRKNVVHVPRKASNEPSTIYHACNASFAICRKDKKVIARKLGAKCKGDKTCIWVPKAIVTNLAGPNKSWVYASGGSSWIIDSGCTNHMTGEKKMFTSYVKNKDSQDSIIFGDGNQGKVKGLGKIAISSEHSISNVFLVESLGYNLLFVSQLCNMGYNCLFTNVDVSVFRRSDGSLAFKGVLDDKLYLVDFAKEEAGLDACLIAKTSMGWLWHRRLAHVGMKNLHKLLKGEHVLGLTNVTFEKDRPCAACQAGKQVGSAHHSKNVMTTSRPLELLHMDLFGPVAYLSIGGKTQGTLKRFLRRAQNEFELKQNGVVERKNRTLIDMARTMLGEFKTAEWFWSEAVNMACHAINRVYLHRLLKKTSYKLLTSKKPNVSYFRVFGSNCYILVKKGRNSKFAPKAVEGFLLGYDSNTKAYRVFNKSSGLVEVSSDVVFDETNGSPREQVVDLDDVDEEDAPTTAIRTMAIGDVRPQEQKEQDQPSSSTMVQPPTQDDEQVHQEEACDQGGAQDDHVMEEEAQHAPPTQVRATIQRNHPVDQILGDISKGVTTRSRLVNFCEHYSFVSSIEPFRVEEALLDPDWVLAMQEELNNFKRNEVWTLVPRPKQNVVGTKWVFRNKQDEHGVVTRNKARLVAKGYAQVAGLDFEETFAPVARLESIRILLAYAAHHSFRLFQMDVKSAVLNGPIKEEVYVEQPPGFEDERYPDHVCKLSKALYGLKQAPRAWYECLRDFLIDNAFKVGKADPTLFTKTCNGDLFVCQIYVDDIIFGSTNQKSCKEFSRVMTQKFEMSMMGELNYFLGFQVKQLKDITFISQTKYTQDLIKRFGMKDAKPAKTPMGTDGHIDLNKGGKSVDQKAYRSMIGSLLYLCASRPDIMLSVYMCARFQSDPRECHLVAVKRSLRYLVATPCFRIWYPKGSTFDLIGYSDSDYAGCKVDRKSTSGTCQFLGRSLVSWSSKKQTFVALSTVEAEYVAAGQCCTQLLWMRQILRDFGYNLSKVSLLCDNESAIRMADNPIEPSRTKHIDIRHHFLRDHQQKGDIEVFYVSTENQLADIFTKPLDEKTFCKLRSELNVLDSRNLD

SEQ ID NO: 10013 - protein, 436 aa, Zea mays
  unsure (1)..(436): unsure at all Xaa locations
  Clone ID: TF_ZM4626.C1.o6.fg.pep
MDPKGKGXVNDNEKESIFNEPRDDKVNDSGLSQKQKDGKKKRRIRKVVYYDSDESSSSQKDDEYEEKKKTVNSNFSFDYSRIPHNSNAHLLSILLGKPPHFDGEDYGFWSHKMRSHLFSLHPSIWEIVENGMQFDSSDNSMFINEQIHKNAQATTVLLASLCREEYNKVSGLDNAKQIWDTLKISHEGNDVTMLTKMELVEGELGRLKTLVNKIRSYGSTRWTDHDVVRLMLRSFTVLDPHLVNSIRENPWYIKMTPEQILGKFVSGRMMIKEARYVDEALNGPIHEPQAIALKATSSRETLPSKVAQIEAAGLNEDEMALIIKRFKTALKGRKEHPNKSKMKGKRSCFKCGKVGHFIANCPDNDSDQDQEKRREKKKTYKKAKGEAHLSKEWDSDCSSSDSDDEGLAASAFNKSALFPNEHHTCLMAKEKKLKEY

SEQ ID NO: 10014 - protein, 522 aa, Zea mays
  Clone ID: TF_ZM4884.C12.o1.fg.pep
GLRLFPEYLSFAFGLPSKTGCDTGSGHKRKDGKKKKKTRRIKEIVYYDDSDESTSSQKDNDDNDYERRKPVNSNFSFDYSRIPQSTNAHLLSIPLGKPPHFDGEDYRFWSHKMRSHLFSLHPSIWEIVESGMKFDSLDSPMFINEQIHRNAQATIVLLASLCRDEYHKVSGLDNAKQIWDTLRISHEGNDVTLLTKMELVEGELGRFAMIRGDEPTQTYNRLKTLINKIRSYGSTRWTDHNVVRLMLRSFTVLDPHLVNNIRENPRYTKMSPEEVLGKFVSGRMMIKEARYVNDALNGPIHEPQPIALKATRSKEALPSKRFKTALKGRKGQPSKTKTKGKRSCFKCGKVGHFIANCPDNDSDQEQGNKREKKKNYKKAKGEAHLGKEWDSNCSSFDSDNEGLAATAFNKSSLFPNEHHTCLMAREKKGLDRTKVDKINELIDALNDKNRLLEKQEDLLYDEHDKFVEAQKSLALEIKRNEMLSCELSTCHDSISSLKSINDDLNAKLEIANKSTSCVEHVV

SEQ ID NO: 10015 - protein, 685 aa, Zea mays
  unsure (1)..(685): unsure at all Xaa locations
  Clone ID: TF_ZM4322.C3.o2.fg.pep
MDTHRPPHFDGTNFPYYSARMACYLEAVDLGVWRVTRDGMKPLKNPEKPTTSEEKEIHLNARAKNCLYESLSMDIFNQVFTLKTANEIWLKLHELHDGTSNVREQKHCLVLNEYNSFAMKDDELVRDMYSRLNLIINELNSIGINKLGDADIVRKIISLLPQQRYGSIITILHNMEDLSNMTPTIVIGKIAAFEMSRKMSRGEEPTSSRPYAFACDERKGKKKAPTPSSSSEEEEEEXVMMMKIINHAHHPPRTKKRSDASERSRIFSLTLTXKKQRKRGCFACGEKGHFRDNCPNMAKPKKERSKGKALTSVRTWDDSSSEDEPPRTRSHRSSSRSSRSSHKCLMARGNKSIPSSSDESSSNDEGEGKPSLDELAEAVEFFQDVCTKQKAQLKTLKNKLVSSQNDYKGLLEKFETFANLNSELSTKIELLESSAPSTATDDSLIKKNEKLKAKLASSQEAIENLLEKMEILSIHNNELTTKLENIGSTPAASLVEIPEIIKKDASTSCFDLIDDSNPCNQVVVENIVVKTCSDEVAKENEQLKQEVARLGKALYDKKGKAKQIRPSQDNTTAGVNKPMEGETVICRLCHMEGHKSFQCKAMIGDKQRRKLKQKPSSKISNTYIKKVNKKDATPYLIKKKKNGKVIAIKANKQANKGKGAKRIWVPKEIISTMKSTKKVWIPKGK

SEQ ID NO: 10016 - protein, 1649 aa, Zea mays
  Clone ID: TF_ZmC951_403.pep
MSGDPAKKEMETGEKPTTSHGSTSSEESRTKRKEKKKSSSHKGKEKKSSSHHKEKKERSSSHKPHRRGDKHKRMRKVVYYETDTSSTSTSDSDAPSVTSKHQERKKFSKIPLHYPRISKNAPLLSVPLGKPPTFDGEDYARWSDLMRFHLTSLHKSIWDVVEFGAQVPSVGDKDYDEDEVAQIEHFNSQATTILLASLSREEYNKVQGLKSAKEVWDVLKTAHEGDELTKITKRETIEGELGRFRLRKGEEPQHMYNRLKTLVNQVRNLGSIKWDDHEMVKVILRSLIFLNPTQVQLIRGNPRYTKMTPEEVIGNFVSFECMIEGSRKINELDDPSTSEAQPVAFKATEDKKEESTPSRQPIDASKLDNEEMSLVIKSFRQILKQRRGKDYKSRSKKVCYKCGKPGHFIAKCPVSSDGDRGDDKKGRRKEKKRYYKKKGGDAHVCREWDSDESSSDSSDDEDAANIAVTKGLLFPNVGHKCLMAKDGKRKKVKSNSSTKYESSSDDNASDEEDNLRVLFANLNMEQKEKLNELISAIHEKDDLLDSQEDCLIKENKKHVKVKKAYALEVEKCEKLSSELSTCREMIDNLRNENASLNTKVDSHVCIVSTFNPKNNNDLLARIEELNMSLASLRVENENLIAKAKEIDACNVTISDLRDNNDILRAKIVELNSCKPSTSSIEHVSICTRCRDVDINAIHDHMTLIKQQNDHIAILDAKIAEHNLENEKFKFARSMLYSGRRPGIKDGIGFQRGDNVKLSAPPKRLSNFVKGKAPMPQDNEGYILYPAGYPESKIRRIHSRRSHSGPNHAFMYKGETSSSRQPTHAKLPKKKIPNASNEHSISFKTFDASYVLTNKSGKVVAKFVGGKHKGSKTCVWVPKVLVSNAKGPKTVWVYASGGSSWILDSGCTNHMTGEKKMFSSYEKNQDPQRAVTFGDGNQGVTVFRRSDDSIAFKGVLEGQLYLVDFDRAELDTCLIAKTNMGWLWHRRLAHVGMKNLHKLLKGEHILGLTNVHFEKDREKSQTQETLKRFLRRAQNEFALRIKKIRSDNGTEFKNSQIEGFLEEEGIKHEFSSPYTPQQNGVVERKNRTLLDMARTMLDEYKTSDRFWAEAVNTACYAINRLYLHRILKKTSYELLTGKKPNISYFRVFGSKCFILVKRGRKSKFAPKTVEGFLLGYDSNTRAYRVFNKSTGLVEVSCDVVFDETNGSQIEQVDLDEIGEEEAPCIALRNMSIGDVCPKESEEPPIAQDQPSSSMQASPPTQIEDQAQVDKVEDQANEPPQDDGIDQGGDANEENKEDEEQRPLHPRVHQAIQRDHPVDTILGDIHKGVTTRSRVAHFCEHYSFVSSIEPHRVEEALQDSDWVVAMQEELNNFTRNKVWHLVPRPNQNVVGTKWVFRNKQDEHGVVTRNKARLVAKGYSQVEGLDFGETYAPVARLESIRILLAYATYHGFKLYQMDVKSAFLNGPIKEEVYVEQPPGFEDSKYPNHVYKLSKALYGLKQAPRAWYECLRDFLIANGFKVGKADPTLFTKTLENDLFVCQIYVDDIIFGSTNESTCEEFSRIMTQKFEMSMMGELKYFLGFQVKQLQEGTFISQTKYTQDILTKFGMKDAKPIKTPMGTNGHLDLDTGGEETTSRALTVPFLAIHAKKGEK

SEQ ID NO: 10017 - protein, 390 aa, Zea mays
  Clone ID: TF_ZM4325.C1.o21.fg.pep
MEDLSNMTLTIVIGKNVAFEMSQKMCRGVEPTSSRPYAFTCDERKGKKKAPTPSSSSEEEEEEESDDDEDNQPCTSSSEDVKTIRHVGKVMRMIRKINLMGVPLQVEDLLFNIDRKKQRKRGCFACGEKAHFRDNCPNMAKPKKERSKGKTLTSVRTWDDSSSEDEPPSTRSHRSSSRSSRSSHKCLMARGNKSIPSSSDESSSDDEGEGKPSVDELAEAVEFFQDVCTKQKAQLKTLKNKLISSQNDYKEVARLGKALYDKKGKAKQIRPPQDNTTAGVNKPMEGETVICRLCHKEGHKSFQCKAMTGDKQRQKLKQKPSSKISNTYIKKVDKKTATPYLIKKKKDGKVIASKANKQANKGKGAKRIWVPKEIISTMKSTKKVWIPKGK

SEQ ID NO: 10018 - protein, 1087 aa, Zea mays
  Clone ID: TF_ZM4409.C1.o5.fg.pep
MSPKEILGKFVSGRMMIKEARYIDEALNGPIHEPQAIALKATSSREALPSKVAQIEAVGLNEDEMALIIKRFKTALKGRKEHPKKNKTKGKRSCFKCGKVGHFVANCPDNDSDQEQGKNGKRENKKVYKKAKGEAHLGKEWDSDCSSSDSDDEGLAATAFNKYEHLVSISRLKDEVASLNAQLKTSKSEFDKLKFARDAYTIGRHPSIKDGLGFKREAKNLTSHKAPISAKKKGKAPMANSAKKNHAFMYHDRRYSRNVHRSYDTFDSHAMIASSSYIMHDRNLARKMLLMYLGKKDKKVVARKLGAKCKGDKTCIWVPKTIVTNLVGPNKSWVYVSGGSSWIIDSGCTNHMTGEKKMFTSYVKNKDSQDSFIFGDENQGKVKGLGKIAISNEHSISNVFLVESLGYNLLSVSQLCNMGYNCVFTNVDVSVFRRSDGSLAFKGVLDDKLYLVDFAKEELWHHRLAHVGMKNLHKLLKGEHVLGLTNVHFEKDRPCAACQAGKQVGSAHHIKNVMTTSRPLELLHMDLFGPVAYLSIGGRTLKRFLRRAQNEFELKVKKIRSDNGSEFKNLQVEEYLEEEGIKHEFSALYTPQQNGVEERKNRTLIDMARTMLGEFKTPEQFWSEAVNTACHAINWVYLHRLLKKTSYELLTGNKPNVSYFRVFGSKCYILVKKGRNSKFAPKFVEGFLLGYDSNTKAYRVFNKSSGLVEVSSDVVFDETNGSPREQVELDDVDEEDVPTDAIRTMAIGDVRPQEHKEQEQPSSSTTVHPQPKMMNRVEEALLDPDWVLAMQEELNNFKRNEVWTVVPRPKQNVVGTKWVFRNKQDEHGVVTRNKARLVAKGYAQVAGLDFEETFAPVARLESIRILLAYAAHHSFRLYQMDVKSAFLNGPIKEEVYVEQPPGFEDERYPDHVCKLSKALYGLKQAPRAWYECLRDFLIANAFKVGKADPTLFTKTCDGDLFVCQIYVDDIIFGSTNQKSYEEFSRVMTQKFEMSMMGELNYFLGFQVKQLKDCTDTRTNATWSAWSTPRPSPNPRPSSPTWRASKGAPDAKRHTGNFEPAETVKYVPLDPSNDASKQIRIGSKLDPK

SEQ ID NO: 10019 - protein, 87 aa, Zea mays
  Clone ID: TF_LIB4767-015-R1-K1-C4.pep
RPPRSLSRCDDCVEYRPRPLTLTPRRRRPRRLRQVPRDGPFIFVSLFAGRRAPARFRNDLCNNCKRPGHFARECPSVAVCHTCGLPG

SEQ ID NO: 10020 - protein, 207 aa, Zea mays
  unsure (1)..(207): unsure at all Xaa locations
  Clone ID: TF_LIB3991-009-Q6-K6-E11.pep
LIRGNPRYPLMTPEEVIGNFVSFECMIKGSKKINELDEPSTSEAQPVAFKATEEKKEESTPSRQPIDASKLDNEEMALIIKSFRQILKQRKGKDYKPRSKKVCYKCGKPGHFIAKCPMSSDSDRGDDKKGRRKEKKKYYKKKGGDAHVCREWDSDESSSDSSSDEDAANIAVTEGLLFPNVGHKCLMAKDGKKKXKSRSSTKYETSS

SEQ ID NO: 10021 - protein, 1666 aa, Zea mays
  Clone ID: TF_ZmC951_288.pep
MSGDHAKKEMETGEKPTTSHKSTSSEESRTKRREKKKSSSNKGKEKKSSSHHKEKKEKSSSHKPHRKGDKHKRMRKVVYYETDTSSTSTSDSDAPSVTSKRQERKKYSKIPLRYPRISKHTPLLSVPLGKPPTFDGEDYARWSDLMRFHLISLHKSIWDVVEFGAQVPSVGDENYDEDEVAQIEHFNSQATTILLASLSKEEYNKVQGLKNAKEVWDVLKTAHEGDELTKITKQETIEGELGRFRLHKGEEPQHMYNRLKTLVNQVRNLRSKKWDDHEVVNVILRSLIFLNPTQVQLIRGNPRYTKMTPEEVIGHFVSFECMIEGSRKINELGDPSEAQPVAFKATEEKKEESTPSRQPIDASKLDNEEMALVIKSFRQILKQRRGKDYKSRSKKVCYKCGKPGHFIAKCPMSSDSDRGDDKKGRRKEKKRYYRKKGGDAHVCREWDSDESSSDSSDDEDAANIAVTKGLLFPNVGHKCLMAKDGKKKKVKSNSSTKYESSSDDNASDEEDNLRILFANLNMEQKEKLNELISAIHEKDDLLDSQEDCLIKENKKHVKVKKAYALEVEKCEKLSSELSTCREMIDNLRNENAILNAKVDSHVCNVSIPNLRDDNIDLLAKIDELNVSLASLRLENENLIAKARDFDVCNTTISDLRTKNEMLHAKVVELKSCKPSTSNVEHVSICTRCRDVDVNAILDHMALIKQQNDHIAKLDAKIAEHNLENEKFKFARSMLYNGRRPGIKDGIGFQRGDNVKLNAPPKNLSNFVKGKAPMPQDNEGYILYPVGYPESKIRRIHSRKSHSGSNHAFMYRGETSSSRQPTRAKLPRKKTPNASNDHAISFKTFDASYVLTNKSGKVVAKYVGSKHKGSRTCVWVPKVLVSNAKGPKTIWVYASGGSSWILDSGCTNHMTGEKRMFSSYEKNQDPQRAITFGDGNQGVTVFRRSDDSIAFKGVLEGQLYLEKSQTQETLKGFLRRAQNEFGLRIKKIRSDNGTEFKNSQIESFLEEEGIKHEFSSPYTPQQNGVVERKNRTLLDMARTILDEYKTPDRFWAEAVNTACYAINRLYLHRILKKTSYELLTGKKPNISYFRVFGSKCFILVKRGRKSKFAPKTVEGFLLGYDSNTRAYRVFNKSTGLVEVSCDVVFDETNGSQVEQVDLDEIGEEQAPCIALRNMSIGDVCPRESKEPPNAQDQPSSSMQASPPTQNEDEAQVDEGQNKEDEPPQDDGNDQGGDAIDQEKEDEEEPRPPHPRVHQAIQRDHPVDTILGDIHKGVTTRSRVAHFCEHYSFVSSIEPHRIEEALQDLDWVVAMQEELNNFTRNEVWHLVPRPNQNVVGTKWVFRNKQNEHGVVTRNKARLVAKGYSQVEGLDFGETYAPVARLESIRILLAYATYHGFKLYQMDVKSAFLNGPIKEEVYVEQPPGFEDSEYPNHVYRLSKALYGLKQAPRAWYECLRDFLISNGFKVGKADPTLFTKTLENDLFVCQIYVDDIIFGSTNESTCEEFSRIMTQKFEMSMMGELKYFLGFQVKQLQEGTFICQTKYTQDILTKFGMKDAKPIKTPMGTNGHLDLDTGGKSVDQKSISNQVIGILKGNWSLRRRQRLPLRNSYFTITPSNSLFFGGEMSIKEKDFILGGESKSSKAKGPDFVFGIILTHSFMTKEKEKYQRGL

SEQ ID NO: 10022 - protein, 1527 aa, Zea mays
  unsure (1)..(1527): unsure at all Xaa locations
  Clone ID: TF_ZM3612.C9.o1.fg.pep
MRKVVYYETDTSSTSISDSDAPSVTSKRQERKKFSKIPLHYSRTPRHTPLLSVPLGKPPTFDGEDYARWSDLMKFHLTSLHKSIWNVVEFGAQVPSIGDEDYDTDEVAQIEHFNSQATTILLASLSKEEYNKVQGLKNAKEIWDLLKTAHEGDELTKITKRETIEGELGRFRLRQGEEPQDMYNRLKTLVNQVRNLESKKWDDHEVVKVILRALIFLNPTQVQLIRGNPRYPLMTPEEVIGNFVSFECMIKGSKKINELDEPSTSEAQPVAFKATEEKKEESTPSRQPIDASKLDNEEMALIIKSFRQILKQRRGKDYKPRSKKVCYKCGKPGHFIAKCPMSSDSDRGDDKKGKRKEKKKYYKKKGGDAHVCREWDSDESSTDSSSDDEDAANIAITKGLLFPNVGHKCLMAKDGKKKKVKSNSSTKYESSSDDNASGEEDNLRTLFAELNMEQKEKLNELISAIHEKDDLLDSQEDFLIKENKKHVKVKNAYALEVEKCEKLSSELSTCHETINNLRNENAKLIAKIDSHVCIDSHPRNDNVELLARIDELNDSLTSLRIENENLIAKAKDFDICNTTISDLRTKNDMLHAKVVELKSCKPSTSNVEHVSICTRCRDIDVNAIHDHMSLIKQQNDHIAKLDAKIAEHNLKNEKFKFARSMLYNGRRPGIKDGIGFQRRDNVKLNAPSKNLSNFVKGKAPMPQDNEGYILYPASYPENKIRRTHSRKSHSGPNHAFMYKGETSSSRQPTRAKLPRKKTPNASNDHAISFKTFDASYVLTNKSGKVYASGGSSWILDSGCTNHMTGEKKMFSSYEKNQDPQRAITFGDGNQGVTVFRRSDDSIAFRGVLEGQLYLDKSHTQETLKGFLRRAQNEFGLRIKKIRSDNGTEFKNSQIEGFLEEEGIKHEFSSPYTPQQNGVVERKNRTLLDMARTMLDEYKTPDQFWAEAVNTACYAINQLYLHRILKKTSYELLTGKKPNISYFRVFGSKCFILVKRGRKSKFAPKSVEGFLLGYDSNTRAYRVFNKSSGLVEVSCDVVFDETNGSQVEQVDLDEIGEEQAPCIALRNMSIRDVCPKELEEPPHTQDQPSSSMQASPPTQNEDEAQVDEGEDQRDEPPQDDGNDQGGDANDQDKEDEQPRPPHPRVHQAIQRDHPIDTILGDIHKGXVEEALQDSDWVMAMQEELNNFTRNXGTKWVFRNKQDEHGVVTRNKARLVAMGYSQVEGLDFGETYAPVARLESIRILLAYATYHGFKLYQMDVKSAFLNGPIKEEVYVEQPPGFEDSEYPNHVYRLSKALYGLKQAPRAWYECLRDFLIANGFKVGKADPTLFTKTLDNDLFVCQIYVDDIIFGSTNESTCEEFSRIMTQKFEMSMMGELKYFLGFQVKQLQEGTFICQTKYTQDILTKFGMKNAKPIMTPMGTNGHLDLDTGGAKGSHLANKRPSIEFNKRAKEQPKAPLVWRTGLSGVPPDSVRCTRGLQLKLFALGNIQSQRASVHRTVSGAPKKDAAQELASLGFSLQPLRYNSPNYP

SEQ ID NO: 10023 - protein, 1802 aa, Zea mays
  Clone ID: TF_ZM3649.C7.o1.fg.pep
MSGDHAKKEMETGEKPTTSHESTSSEESRTKRREKKKSSSNKGKEKKSSSHHKEKKEKSSSHKPHRKGDKHKRMRKVVYYETDTSSTSTSDSDAPSVTSKRQERKKYSKIPLRYPRISKHTPLLSVPLGKPPTFDGEDYARWSDLMQFHLISLHKGIWDVVEFGVQVPSIGDENYDEDEVAQIEHFNSQATTILLASLSKEEYNKVQGLKNAKEIWDVLKTAHEGDELTKITKRETIEGELGRFRLHKGEEPQHMYNRLKTLVNQVRNLGSKKWDDHEVVNVILRSLIFLNPTQVQLIRGNPRYTKMTPEEVIGHFVSFECMIEGSRKINELGEPSEAQPVAFKATEEKKEESTPSRQPIDASKLDNEEMALVIKSFRQILKQRRGKDYKSRSKKVCYKCGKPGHFIAKCPMSSDSDRGDDKKGRRKEKKRYYRKKGGDAHVCREWDSDESSSDSSDDEDAANIAVTKGLLFPNVGHKCLMAKDGKKKKVKSISSTKYESSSDDNASDEEDNLRILFANLNMEQKEKLNELISAIHEKDDLLDSQEDCLIKENKKHVKVKKAYALEVEKCEKLSSELSTCREMIDNLRNENAILNAKVDSHVCNVSIPNLRDDNIDLLAKIDELNVSLASLRLENENLIAKAKDFDVCKVTIADLRDKNDILHAKIVELNSCKPSTSTIEHVTICARCRDIDINAIHDHMSLIKQQNDHIAKLDAKIAEHNLENEKFKFARSMLYNGRRPGIKDGIGFQRGDNVKLNAPPKNLSNFVKGKAPMPQDNEGYILYPAGYPESKIRKIHSRKSHSGPNYAYMYKGETSSSRQPTHAKLPKKKIPNASNEHSISFKTFDASYVLTNKSGKVVAKFVGNKHKGSKTCVWVPKVLVSNAKGPKTVWVYASGGSSWILDSGCTNHMTGEKRMFSSYEKNQDPQRAITFGDGNQGVTVFRRSDDSIAFKGVLEGQLYLEKSQTQETLKGFLRWAQNEFGLRIKKIRSDNGTEFKNSQIEGFLEEEGIKHEFSSPYTPQQNGVVERKNRTLLDMARTMLDEYKTPDRFWAEAVNTACYAINRLYLHRILKKTSYELLIGKKPNISYFRVFGSKCFILVKRGRKSKFAPKTVEGFLLGYDSNTRAYRVFNKSTGLVEVSCDVVFDETNGSQVEQVDLDEIGNEEAPRIALRNMSIGDVCPKESEEPPNAQDQPSSSMQASPPTQNEDEAQVDEGQNQEDEPPQDDSNDQGGDEIDQEKEDEEEPRPPHPRVHQAIQRDHPVDTILGDIHKGVTTRSRVAHFCEHYSFVSSIEPHRIEEALKDSDWVVAMQEELNNFTRNEVWHLVPRPNQNVVGTKWVFRNKQDEHGVVTRNKARLVAKGYSQVEGLDFGETYAPVARLESIRILLAYATYHGFKLYQMDVKSAFLNGPIKEEVYVEQPPGFEDSEYPNHVYRLSKALYGLKQAPRAWYECLRDFLIANGFKVGKADPTFFTKTLENDLFVCQIYVDDIIFGSTNESTCEEFSRIMTQKFEMSMMGELKYFLGFQVKQLQEGTFISQTKYTQDILAKFGMKDAKPIKTPMGTNGHLDLDTGGKSVDQKVYRSMIGSLLYLCASRPDIMLSVCMCARFQSDPKESHLTAVKRILRYLAYTPKFGLWYPRGSTFDLIGYSDADWAGCKINRKSTSGTCQFLGRSLVSWASKKQNSVALSTAEAEYIAAGHCCAQLLWMRQTLRDYGYKLTKVPLLCDNESAIKMADNPVEHSRTKHIAIRYHFLRDHQQKGDIEISYINTKDQLADIFTKPLDEQSFTRLRHELNILDSRNFFC

SEQ ID NO: 10024 - protein, 1923 aa, Zea mays
  Clone ID: TF_ZM4633.C8.o1.fg.pep
MSGDHAKKEMETGEKPTTSHGSTSSEESRTKRREKKKSSSNKGKEKKSSSHHKEKKEKSSSHKPHRKGDKHKRMRKVVYYETDTSSTSTSDSDAPSVTSKRQERKKYSKIPLRYPRISKHTPLLSVPLGKPPTFDGEDYARWSDLMRFHLTSLHKSIWDVVEFGAQVPSVGDEDYDEDEVAQIEHFNSQATTILLASLSREEYNKVQGLKSAKEIWDVLKTAHEGDELTKITKRETIEGELDRFRLNKGEEPQHMYNRLKTLVNQVRNLGSKKWDDHEVVNVILRSLIFLNPTQVQLIRGNPRYTKMTPEEVIGHFVSFECMIEGSRKINELGEPSEAQPVAFKATEEKKEESTPSRQPIDASKLDNEEMALVIKSFRQILKQRRGKDYKSRSKKVCYKCGKPGHFIAKCPMSSDSDRGDDKKGRRKEKKRYYKRKGGDAHVCREWDSDESSSDSSDDEDAANIAVTKGLLFPNVGHKCLMAKDGKRKKVKSNSSTKYESSSDENASDEEDNLRILFANLNMEQKEKLNELISAIHEKDDLLDSQEDCLIKENKKHVKVKKAYALEVEKCEKLSSELSTCREIIDNLRNENAILNAKVDSHVCDVSISTPRDNNDDLLARIEELNISLASLRVENEKLITKAKELDVCNVTISDLRTKNDMLHTKVVELKSCKPSTSIVEHVSICTRCRNVDIDAIHDHMILIKQQNDHIAKLDAKIAEHNLENEKFKFARSMLYNGRRPGIKDGIGFQRGDNVKLNAPPKNLSNFVKGKAPMPQDNEGYILYPAGYPESKIRRIHSRKSHSGPNHAFMYKGETSSSRQPTHAKLPRKKTPSASNDHTISFKTFDASYVLTNKSGKVVAKFVGGKHKGSKTCVWVPKVLVSNAKGPKTVWVYASGGSSWILDSGCTNHMTGEKRMFSSYEKNQDPQRAITFGDGNQGVTVFRRSDDSIAFKGVLEGQLYLVDFDRAELDTCLIAKTNMGWLWHRRLAHVGMKNLHKLLKGEHILGLTNVHFEKDRICSACQAGKQVGVHHPHKNIMTTDRPLELLHMDLFGPIAYISIGGSKYCLVIVDDYSRFTWVFFLQEKSQTQETLKGFLRRAQNEFGLRIKKIRSDNGTEFKNSQIEGFLEEEGIKHEFSSPYTPQQNGVVERKNRTLLDMARTMLDEYKTPDRFWAEAVNTACYAINRLYLHRILKKTSYELLTGKKPNISYFRVFGSKCFILVKRGRKSKFAPKTVEGFLLGYNSNTRAYRVFNKSTGLVEVSCDVVFDETNGSQVEQVDLNEIGEEQAPCIALRNMSIGDVCPKESEEPPSTQDQPSSSMQASPPTQNEDEAQNDEEQNQEDEPPQDDSNDQGGDTNDQEKEDEEEPRPPHPRVHQAIQRDHPVDTILGDIHKGVTTRSRVAHFCEHYSFVSSIEPHRVEEALQDSDWVVAMQEELNNFTRNEVWHLVPRPNQNVVGTKWVFRNKQDEHGVVTRNKARLVAKGYSQVEGLDFGETYAPVARLESIRILLAYATYHGFKLYQMDVKSAFLNGPIKEEVYVEQPPGFEDSEYPNHVYRLSKALYGLKQAPRAWYECLRDFLIANGFKVGKVDPTLFTKTLENDLFVCQIYVDDIIFGSTNESTCEEFSRIMTQKFEMSMMGELKYFLGFQVKQLQEGTFICQTKYTQDILTKFGMKDAKPIKTPMGTNGHLDLDTGGKSVDQKVYRSMIGSLLYLCASRPDIMLSVCMCARFQSDPKESHLTAVKRILRYLAYTPKFGLWYPRGSTFDLIGYSDADWAGCKINRKSTSGTCQFLGRSLVSWASKKQNSVALSTAEAEYIAAGHCCAQLLWMRQTLRDYGYKLTKVPLLCDNESAIKMADNPVEHSRTKHIAIRYHFLRDHQQKGDIEISYINTKDQLADIFTKPLDEQSFTRLRHELNILDSRNFFC

SEQ ID NO: 10025 - protein, 346 aa, Zea mays
  Clone ID: TF_ZM4643.C4.o1.fg.pep
MDPKGKGMVVNDKEKESFFNEPRDDKPTNSGSSHKKKDGKKKRRIKKIVYYDSDESSSSPRDDDDEKKKPQIHKNAQATTVLLASLCRDEYNKVSGLDNAKQIWDTLKISHEGNDATMITKMELVEGELGRFAMIRGEEPTQTYNRLKTLVNKIRSYGSTRWMDHDVVRLMLRYTKMTLEEILGKFVSGRMMVKEARYVDDALNGPLPVHEPQTIALKATSSREMLPSKVAQVEATGLNEDEMALIIKRFKTALKGRNEYPNKNKEKGKRSCFKCGKIGHFIAQCPDNENDQGEERHGKKEKKKSYRKAKGEAHLGKEWDSDCSSSDSDDEGLAASAFNKSSLFPN

SEQ ID NO: 10026 - protein, 1889 aa, Zea mays
  Clone ID: TF_ZM4672.C3.o1.fg.pep
MSGDHAKKEMETGEKPTTSHGSTSSEESRTKRREKKKSSSNKGKEKKSSSHHKEKKEKSSSHKPHRKGDKHKRMRKVVYYETDTSSTSTSDSDAPSVTSKRQERKKYSKIPLRYPRISKHTPLLSVPLGKPPTFDGEDYARWSDLMRFHLISLHKSIWDVVEFGAQVPSVGDENYDEDELAQIEHFNSQATTILLASLSKEEYNKVQGLKNAKEVWDVLKTAHEGDELTKITKRETIEGELGRFRLNKGEEPQHMYNRLKTLVNQVRNLGSKKWDDHEVVNVILRSLIFLNLTQVQLIRGNPRYTKMTPEEVIGHFVSFECMIEGSRKINELGDPSEAQPVAFKATEEKKEESTPIRQPIDASKLDNEEMALVIKSFRQILKQRRGKDYKSRSKKVCYKCGKPGHFIAKCPMSSDSDRGDDKKGRRKEKKRYYRKKGGDAHVCREWDSNESSSDSSDDEDAANIAVTKGLLFPNVGHKCLMAKDGKKKKVKSNSSTKYESSSDDNASDEEDNLRILFANLNMEQKEKLNELISAIHEKDDLLDSQEDCLIKENKKHVKVKKAYALEVEKCEKLSSELSTCREMIDNLRNENAILNAKVDSHVCNVSIPNLRDDNIDLLAKIDELNASLARLRLENENLIAKAKDFDVCNATISDLRTKNEMLHAKVVELKSCKPSTSNVEHVSICTRCRDIDVNAILDHMALIKQQNDHIAKLDAKIAEHNLENEKFKFARSMLYNGRRPGIKDGIGFQRGDNVKLNAPPKNLSNFVKGKAPMPQDNEGYILYPAGYPESKIRKIHSRKSHSGPNHAYMYKGETSSSRQPTHAKLPKKKIPNASNDHAISFKTFDASYVLTSKSGKVYASGGSSWILDSGCTNHMTGEKRMFSSYEKNQDPQRAITFGDGNQGVTVFRRSDDSIAFKGVLEGQLYLVDFDRAELDTCLIAKTNMGWFWHRRLAHVGMKNLHKLLKGEHILGLTNVHFEKDRICSACQAGKQVGVHHPHKNIMTTDRPLELLHMDLFGPIAYISIGESKYCLVIVDDYSRFTWVFFLQEKSQTQETLKGFLRRAQNEFGLRIKKIRSDNGTKFKNSQIEGFLEEEGIKHEFSSPYTPQQNGVVERKNRTLLDMARTMLDEYKTPDRFWVEAVNTACYAINRLYLHRILKKTSYELLTGKKPNISYFRVFGSKCFILVKRGRKSKFAPKTVEGFLLGYDSNTRAYRVFNKSTGLVEVSCDVVFDETNGSQVEQVDLDEIGNEEAPCIALRNMSIGDVCPKESEEPPNAQDQPSSSMQASPPTQNEEEAQVDEGQNQEDEPPQDDSNDQGGDAIDQEKEDEDEPRPPHPRVHQAIQRDHPVDTILGDIHKGVTTRSRVAHFCEHYSFVSSIEPHRVEEALQDSDWVVAMQEELNNFTRNEVWHLVPRPNQNVVGTKWVFRNKQDEHGVVTRNKARLVAKGYSQVEGLDFGETYAPVARLESIRILLAYATYHGFKLYQMDVKSAFLNGPIKEEVYVEQPPGFEDSKYPNHVYRLSKALYGLKQAPRAWYECLRDFLIANDFKVGKADPTLFTKTLENDLFVCQIYVDDIIFGSTNESTCEEFSRIMTQKFEMSMMGELKYFLGFQVKQLQEGTFISQTKYTQDILTKFGMKDAKPIKTPMGTNGHLDLDTGGKSVDQKVYRSMIGSLLYLCASRPDIMLSVCMCARFQSDPKESHLTTVKRILRYLAYTPKFGLWYPRGSTFDLIGYSDADWAGCKINRKSTSGTCQFLGRSLVSWASKKQNSVALSTAEAEYIAAGHCCAQLLWMRQTLRDYGYKLTKVPLLCDNESAIKMADNPVEHSRTKHIAIRYHFLRDHQQKGDIEISYINTKDQLADIFTKPLDEQSFTRLRHELNILDSRNFFC

SEQ ID NO: 10027 - protein, 604 aa, Zea mays
  Clone ID: TF_ZM4685.C2.o1.fg.pep
MSGGSAKREMETDTSRGKAPSRESGAKGREDSPPHVKSHRSGDKKKKMKKVVYYKTDSSSPSTSGSNAPSVTSKRHEHKKFRDEVTKITKQETIEGELGRFVLNQGEEPQAMYNRLKTLVNQVRNLGSTKWDDHEMVKEVIGKFVSFELMIKGSKQIIEQGGTSTTEVQPVAFKATEEKKEESTSSRLPIDASKLDNEEMAPIIKSFRQILKQRRGKDYIPRSKKVCYKCGKPGHFIAKCPMSSDSDRDNDKRGNKKRYYKKKGGDAHICREWDFDESTTGSSSNEDAANIAVNKGLLFPNDGHKCLMAKDDKKKKVKTRASTKYTTSSDEGSSSEDEDDLLSLFANLNMQQKEKLNELIGAIHEKDELLDSQEEFLIKENKKYVKIKDACAQEVEKNENLTKELSICHDTISNLRNENAKLDAKIAEHELENENFKFARSMLYNGRRPSIKDGIGFQQGSNVKLNAPKKLSNFVKGKAPMARDNEGYILYPAGYPEHKIRRIHSRKSHSGSHHAFMYKNETSSSKHSTHVKMPKKKTHAASNEPIISFQTFDASYVLTNKSGKVVAKYVGAKHKGSKTCVWVPKVLVSNIKGPKTIWVPKNKV

SEQ ID NO: 10028 - protein, 630 aa, Zea mays
  Clone ID: TF_ZM4878.C9.o1.fg.pep
MTPEEVIGHFVSFECMIEGSRKINELGDPSEAQPVAFKATEEKKEESTPSRQPIDASKLDNEEMALVIKSFRQILKQRRGKDYKSRSKKVCYKCGKPGHFIAKCPMSSDSDRGDDKKGRRKEKKRYYRKKGGDAHVCREWDSDESSSDSSDDEDAANIAVTKGLLFPNVGHKCLMAKDGKKKKVKSNSSTKYESSSDDNASDEEDNLRILFANLNMEQKEKLNELISAIHEKDDLLDSQEDCLIKENKKHVKVKKAYALEVEKCEKLSSELSTCREMIDNLRNENAILNAKVDSHVCNVSIPNLRDDNIDLLAKIDELNVSLASLRLENENLIAKARDFDVCNTTISDLRTKNEMLHAKVVELKSCKPSTSNVEHVSICTRCRDVDVNAILDHMALIKQQNDHIAKLDAKIAEHNLENEKFKFARSMLYNGRRPGIKDGIGFQRGDNVKLNAPPKNLSNFVKGKAPMPQDNEGYILYPVGYPESKIRRIHSRKSHSGSNHAFMYRGETSSSRQPTRAKLPRKKTPNASNDHAISFKTFDASYVLTNKSGKVVAKYVGSKHKGSRTCVWVPKVLVSNAKGPKTIWVYASGGSSWILDSGCTNHMTGEKRMFSSYEKNQDPQRAITFGDGNQ

SEQ ID NO: 10029 - protein, 1929 aa, Zea mays
  Clone ID: TF_ZM4944.C2.o1.fg.pep
MSGDHAKKEMETGEKPTTSYGSTSSEESRTKRREKKKSSSNKGKEKKSSSHHKEKKEKSSSHKPHRKGDKHKRMRKVVYYETDTSSTSTSDSDAPSVTSKRQERKKYSKIPLRYPRIPKHTPLLSVPLGKPPTFNGEDYAMWSNLMRFHLTSLHKRIWDVVEYGVQVPSIGDEDYDTDEVAQIEHFNSQAATILLASLSKEEYNKVQGLKNAKEIWDLLKTAHEGDELTKITKRETIEGELGRFRLRQGEEPQDMYNRLKTLVNQVRNLGSTKWDDHEVVKVILRALIFLNPTQVQLIRGNPRYPLMTPEEVIGNFVSFECMIKGSKKINELDEPSTSEAQPVAFKATEEKKEESTPSRQPIDASKLDNEEMALIIKSFRQILKQRKGKDYKPRSKKVCYKCGKPGHFIAKCPMSSDSDRGDDKKGRRKEKKKYYKKKGGDAHVCREWDSDESSSDSSDDEDAANIAVTKGLLFPNVGHKCLMAKDGKKKVKSRSSTKYETSSDEDDDKNEEDNLRILFANLNMEQKEKLNELISAIHEKDDLLDSQEDFLIKENKKHVKVKNAYALQVEKCEKLSSELSTCREMIDNLRNENAILNAKVDSHVCNVSIPNLKNDNVDLLAKIDELNASLASLRLENENLIAKAKNFDVCNATISDLRTKNEMLHAKVVELKSCKPSTSNVEHVSICTRCRDINIEAIHDHLALIKKQNDHIAKLDAKIAEHNLENEKFKFARSMLYNGRRPGIKDGIGFQRGDNVKLNAPPKNLSNFVKGKAPMPQDNEGYILYPAGYPESKIRKIHSRKSHSGPNHAFMYKGETSSPRQPTRAKLPKKKIPNASNDHAISFKTFDASYVLTSKSGKVVAKFVGGKHKGSKTCVWVPKVLVSNAKGPKTVWVYASGGSSWILDSGCTNHMTGEKRMFSSYEKNKDPQRAITFGDGNQGLVKGVTVFRRSDDSIAFKGVLEGQLYLVDFDRAELDTCLIAKTNMGWLWHRRLAHVGMKNLHKLLKGEHILGLTNVHFEKDRICSACQAGKQVGTHHPHKNIMTTDRPLELLHMDLFGPIAYISIGGSKYCLVIVDDYSRFTWVFFLQEKSQTQETLKGFLRRAQNEFGLRIKKIRSDNGTEFKNSQIESFLEEEGIKHEFSSPYTPQQNGVVERKNRTLLDMARTMLDEYKTPDRFWAEAVNTACYAINRLYLHRILKKTPYELLTGKKPNISYFRVFGSKCFILIKRGRKSKFAPKTVEGFLLGYDSNTRAYRVFNKSTGLVEVSCDVVFDETNGSQVEQVDLDEIGEEQAPCIALRNMSIGDVCPKESEEPPSTQDQPSSSMQASPPTQNEDEAQNDEEQNQEDEPPQDDSNDQGGDTNDQEKEDEEEPRPPHPRVHQAIQRDHPVDTILGDIHKGVTTRSRVAHFCEHYSFVSSIEPHRIEEALQDSDWVVAMQEELNNFTRNEVWHLVPRPNQNVVGTKWVFRNKQDEHGVVTRNKARLVAKGYSQVEGLDFGETYAPVARLESIRILLAYATYHGFKLYQMDVKSAFLNGPIKEEVYVEQPPGFEDSEYPNHVYRLSKALYGLKQAPRAWYECLRDFLIANGFKVGKADPTLFTKTLENDLFVCQIYVDDIIFGSTNESTCEEFSRIMTQKFEMSMMGELKYFLGFQVKQLQEGTFISQTKYTQDILAKFGMKDAKPIKTPMGTNGHLDLDTGGKSVDQKVYRSMIGSLLYLCASRPDIMLSVCMCARFQADPKESHLTAVKRILRYLAYTPKFGLWYPRGSTFDLIGYSDADWAGCKINRKSTSGTCQFLGRSLVSWASKKQNSVALSTAEAEYIAAGHCCAQLLWMRQTLRDYGYKLTKVPLLCDNESAIKMADNPVEHSRTKHIAIRYHFLRDHQQKGDIEISYINTKDQLADIFTKPLDEQSFTRLRHELNILDSRNFFC

SEQ ID NO: 10030 - protein, 1940 aa, Zea mays
  Clone ID: TF_ZM4954.C4.o1.fg.pep
MSGDHAKKEMETGDKPTTSQGSTSSEESRTKKREKKKNSSKRKEKRSSSSHHKEKKEKSSSHKPHRSGDKHKRMRKVVYYETDTSSTSTSGSDAASVTSKRQERKKYSKIPLRYPRVPKHTPLLSVPLGKPPTFNGEDYAMWSNLMRFHLTSLHKSIWDVVEYGVQVPSIGDEDYDTDEVSQIEHFNSQAATILLASLSKEEYNKVQGLKNAKEIWDLLKTAHEGDELTKITKRETIEGELGRFRLRQGEEPQDMYNRLKTLVNQVRNLGSTKWDDHEVVKVILRALIFLNPTQVQLIRGNPRYPLMTPEEVIGNFVSFECMIKGSKKINELDEPSTSEAQPVAFKATEEKKEESTPSRQPIDASKLDNEEMALIIKSFRQILKQRKGKDYKPRSKKVCYKCGKPGHFIAKCPMSSDSDRGDDKKGRRKEKKKYYKKKGGDAHVCREWDSDESSSDSSDDEDAANIAVTKGLLFPNVGHKCLMAKDGKKKVKSRSSTKYETSSDEDDDKNEEDNLRILFANLNMEQKEKLNELISAIHEKDDLLDSQEDFLIKENKKHVKVKNAYALQVEKCEKLSSELSTCREMIDNLRNENAILNAKVDSHVCNVSIPNLRNDNVDLLAKIDELNASLASLRLENENLIAKAKNFDVCNATISDLRTKNEMLHAKVVELKSCKTSTSNVEHVSICTRCRDINIDAIHDHLALIKKQNDHIAKLDAKIAEHNLENEKFKFARSMLYNGRRPGIKDGIGFQRGDNVKLNAPPKNLSNFVKGKAPMPQDNEGYILYPAGYPESKIRKIHSRKSHSGPNHAFMYKGETSSSRQPTRAKLPKKEIPNASNDHAISFKTFDASYVLTSKSGKVVAKFVGGKHKHSKTCVWVPKVLVSNAKGPKTVWVYASGGSSWILDSGCTNHMTGEKRMFSSYEKNKDPQRAITFGDGNQGLVKGLGKIAISPDHSISNVFLVDSLDYNLLSVSQLCQMGYNCLFTDICVTVFRRSDDSIAFKGVLEGQLYLVDFDRAELDTCLIAKTNMGWLWHRRLAHVGMKNLHKLLKGEHILGLTNVHFEKDRICSACQAGKQVGTHHPHKNIMTTDRPLELLHMDLFGPIAYISIGGSKYCLVIVDDYSRFTWVFFLQEKSQTQETLKGFLRRAQNEFGLRIKKIRSDNGTEFKNSQIESFLEEEGIKHEFSSPYTPQQNGVVERKNRTLLDMARTMLDEYKTPDRFWAEAVNTACYAINRLYLHRILKKTSYELITEGFLLGYDSNTRAYRVFNKSTGLVEVSCDVVFDETNDSQVEQVDLDEIGEEQAPCIALRNMSIGDVCPKESEEPPSTQDQPSSSMQASPPTQNEDEAQNDEEQNQEDEPPQDDSNDQGGDTNDEEKEDEEEPRPPHPRVHQAIQRDHPVDTILGDIHKGVTTRSRVAHFCEHYSFVSSIEPHRVEEALQDSDWVVAMQEELNNFTRNEVWHLVPRPNQNVVGTKWVFRNKQDEHGVVTRNKARLVAKGYSQVEGLDFGETYAPVARLESIRILLAYATHHGFKLYQMDVKSAFLNGPIKEEVYVEQPPGFEDSEYPNHVYRLSKALYGLKQAPRAWYECLRDFLIANGFKVGKADPTLFTKTLENDLFVCQIYVDDIIFGSTNESTCEEFSRIMTQKFEMSMMGELKYFLGFQVKQLREGTFISQTKYTQDILAKFGMKDAKPIKTPMGTNGHLDLDTGGKSVDQKVYRSMIGSLLYLCASRPDIMLSVCMCARFQADPKESHLTAVKRILRYLAYTPKFGLWYPRGSTFDLIGYSDADWAGCKINRKSTSGTCQFLGRSLVSWASKKQNSVALSTAEAEYIAAGHCCAQLLWMRQTLRDYGYKLTKVPLLCDNESAIKMADNPVEHSRTKHIAIRYHFLRDHQQKGDIEISYINTKDQLADIFTKPLDEQSFTRLRHELNILDSRNFFC

SEQ ID NO: 10031 - protein, 1217 aa, Zea mays
  Clone ID: TF_ZmC119_1758.pep
MDPKGKGMVVNDKEKESFVNDPKDDKPTDSGSGHKRKDGRKKKTRRIKEIVYYDSDESSSSQKDDDNDYEKKKTVNSKFSFDYSHIPQSSNAHLLSIPLGKPPHFDGEDYRFWSHKMRSHLFSLHPSIWEIVENGMHFDSTDSPMFINEQIHKNAQATTVLLASLCRDEYHKVSGLDNAKQIWDTLKISHEGNDVTMLTKMELVEGELGRFAMIRGEEPTQTYNRLKTLVNKIRSYGSTRWTDHDVVRLMLRSFTVLDPHLVNNICENPRYTKMTPKEILGKFISGRMMIKEARYVDDALNGPIQEPQTIALKATRSKEALPSKTALRGRKEHPNKTKTKGKRSCFKCGKIGHFIANCPDNDSDQEQGNKREKKKAYKKAKGEGHLGKEWDSDCSSSDSDNEGLTATAFNKSALFPNEHHTCLMAREKKVSTHNTSTYASSSDEESSDDEIDYSCLFKGLDRTKVDKINELIDALNDKNRLLEKQEDLLYEEHDKFVEAQKSLALEIKRNEMLSCELSTCHDSISSLKSINDDLSAKLEIANKSTSCVEHVVVCNRCKDFNVDACSEHLVSISKLNDEVASLNAQLKTSKSEFDKLKFARDAYTIGRHPSVKDGLGFKREVKNLTSHKASISAKEKGKAPMASSAQKNHAFMYHDKKHSRNIYRSYDAFDSHAMIASSSSIMHDRNLARKNVVHHMPRRNIVHRKVMNEPSTIYYACNASFAICRKDKKVYASGGSSWIIDSGCTNHMTGEKKMFSSYVKNKDPQGSIIFGDGNQGKVKGLGKIVISSEHSISNVFLVESLGYTLLSVSQLCNMGYNYLFTNVDVSVFRRSDGSLAFKGVLDGKLYLVDFAKEEAGLDACLIAKTSMGWLWHRRLAHVGMKNLHKLLKGEHVIGLTNLTFEKDRPCAACQAGKQVGSSHHAKNVMTTSRPLELLHMDLFGPVTYLSIGGRTLKCFLRRAQNEFELKVKKIRSDNGSEFKNLQVEEYLEEEGIKHEFSAPYTPQQNGVVERKNMTLLDMARTMLGEFKTPERFWTEAVSTACHAINRVYLHRLLKKTSYELLTGNKPNVSYFRVFGSKCYILVKKGRNSKFAPKAVEGFLLGYDSNTKAYRVFNKSSGLVEVSSNVVFDETNGSPREQVVDLDDVDEEDVPTAAIRTMAIGEVRPQEQGERDQSSSSTMVQPPTQDDEQVVPNGCEERFPQRANQGGGVRGATPWLRG

SEQ ID NO: 10032 - protein, 1354 aa, Zea mays
  Clone ID: TF_ZmC119_990.pep
MELVEGELGRFAMIRGEEPTQTYNRLKTLVNKIRSYGSTRWTDHDFVRLMLRSFTVLDPHLVNNIRENPRYTKMSPEEILGKFVSGRMMIKEARYVDDALNGPIHEPQTVALKATRSKEALPSKVAQVESAVLNDEEMALIIKRFKTALKGRKEHPNRNKTKGKRSCFKCGKIGHFIANCPDNDSDQEKKSGKWEKKKNYKKAKGEAHLGKEWNSDCSSSDSDNEGLAATAFNKSSLFPNEHHTCLMAKEKKGLDRTKVDKINELIDALNDKNRLLEKQEDLLYEEHDKFVSAQNSLALEVKRNEMLSYELSTCHETISTLKSANNDLNAKLEVSSKPNSCVEHIMICNRCKDFNVDACSEHLVCISKLNDEVASLNAQLKTSKSEFDKLKFARDAYTIGRHPSIKDGLGFKREVKNLTSHKASISAKEKGKASMASSAQKNHAFMYHDRRHSRNGYRSYDTFSHAMVASSSSIIHDRNLARRNVINHMPRRNVAHVPRKTNSEPSTIYHALNASFAIYRKDRKIVARKLGAKCKGDKTCIWVPKDIVTNLVGPNKSWVYASGGSSWIIDSGCTNHMTGEKQMFTSYVKNKDSQDSIIFGDGNQGKVKGLGKIAISNEHSISNVFLVESLGYNLLSDKSETQGTLKRFLRRAQNEFELKVKKIRSDNGSEFKNLQVEEYLEEEGIKHKFSAPYTPQENGVVERKNRTLIDMARMMLGEFKTPERFWSEVVNTACHAINRVYLHRLLKKTSYELLTGNKLNVSYFRVFGSKCYIQVKKGRNSKFAPKAVEGFLLGYDSNTKAYRVFNKSSGLVEVSSDVVFDETNGSPREQVLDLDDVDEEDIPTAAIRTMAIGDVRPLEQKEQDQPSSSTMVHPPTQEDKQVHQEEACDQGGAQDDHLMEEEAQPAPPTQVRATIQRNHPVDQILGDISKGVTTRSRLVNFCEHYSFVSSIEPFRVEEALLDPDWLLAMQEELNNFKRNEVWTLVPRPKKNVVGTKWVFRNKQDEHGVVTRNKARLGKRLCPSRRLFQMDVKSAFLNGPIKEEVYVEQPPGFEDERYPDHVCKLSKALYGLKQAPRAWYECLRDFLIANAFKVGKADPTLFTKTCDGDLFVCQIYVDDIIFGSTNQKSCEEFSRVMTQKFEMSMMGELSYFLGFQVKQLKDGTFISLTKYTQDLIKRFGMKDAKPAKTPMGTDGHTDLNKGDSDYAGCKVDRKSTSGTCQFLGRSLVSWSSKKQTSVALSTAEAEYVAAGQCCAQLLWMRQTLRDFGYNLSKVPLLCDNESAIRIADNPVEHSRTKHIDIRHHFLRDHRQKGDIEVFHVSTENQLADIFTKPLDEKTFCRLRSELNVLDSRNLD

SEQ ID NO: 10033 - protein, 622 aa, Zea mays
  unsure (1)..(622): unsure at all Xaa locations
  Clone ID: TF_ZmC13103_7.pep
MDPKGKGIVINDKEKEFFVNEPRDDKSNDSGSGHSRKDGKKKKTRRIKEIVYYDSDESTSSQKDDDHNEYERKKPATRSKEALPSKVAQVEAAGLNNEEMALIIKRFKTVLKGRKGQPSKTKTKEKRSCFKCGKIGHFIANCPDNESDQEKGNKREKKKHYKKAKGEAHIGKEWDSDCSSSDSDNEGLAATAFNKSSLFPNERHTCLMAREKKVYASGGSSWIIDSGCTNHMTGEKKMFTSYVKNKDSQDSIIFGDGNQGKDKSETQGTLKRFLRRAQNEFELKVKKIRSDNGSEFKNLQVEEFLEEERIKHEFSAPYTPQQNGVVERKNRTLIDMARTMLGEFKTPERFWSEAVNTACHAINRVYLHRLLKKTSYELLTDNKPNXEEDVPTAAIRTMAIGEVRPQEQDERDQPSSSTTVHPPTQDDEQVHQKEACDQGGAQDDHVMGEEAQPAPPTQVRAMIQRDHPVDQILGDISKGVTTRSRLVNFCEHYSFASSIEPFRVEEALLDPDWVLAMQEELNNFKRNEVWTPVPRPKQNVVGTKWVFRNKQDEHGVVTRNKARLVAKGYAQVAGLDFEETFAPVARLESIRILLAYAAHHSFRLFQMDVKSAFLNGPIKEEV

SEQ ID NO: 10034 - protein, 2723 aa, Zea mays
  unsure (1)..(2723): unsure at all Xaa locations
  Clone ID: TF_ZmC29741_1.pep
MQEELNNFTRNEVWSLVQRPKQNVIETKWVFRNKQDENGVVTRNKARLVAQGYTQVEGLDFGETYAPVARLESIRILIAYATNHDFKLYQMDVKSAFLNGPLQERVYVEQPPGFEDPKKPNHVYLLHKALYGLKQAPRAWYDCLKDFLIKNGFTIGKADSTLFTRKVDNELFVCQIYVDDIIFGSTNEKFCEEFSKVMTNRFEMSMMGELKYFLGFQVKQLKEGTFLCQTKYTQDMLKKFGMEKAKHAKTPMSSNGHLDLNEEDYTDCKVDRKSTTGTCQFLGRSLVSWSSKKQNCVALSTAEAEYIAAGACCAQLLWMKQTLRDFGSAAAISFSPLSTPNSLEPSPFWKCGWRSVLPGVFPPSSSISLGDLDPIFGSRFYFLFLRMVRRRNPSVVESDSSDDQEIHGDTPPRSRSKRGRGSGNVMPGAEASGSQSARGRTSRTPSGRSRPATNPQAWEPASDDDGGKDDEVDLPPAQAPVIRGLVLHRAEAQCTGNEPVTDFTASGGSALLQDLRFQNPVLRIRDVRIDGNRFWTLHHVDFYNSVILPKKHQPILHQRYINWEGCEAIGDPEMSQALRACGRKQMKNIMTFQYDWNDEVIAQFYSTLWIKLAGVESHYNYPYLNFFIEGSWYKVSYRRFAHILGFSDNDISGDKIKIHDFRQPTRDEAKDLHLSESGKYWESTNIHKYYHYINSLCRMTLIPKGGNQMNILGESKVLLSFMKPNSSERVNVFDMIWQEIIHAACFPLKGCLHAPFIMKMIEVVTQFRFEKGTRHQSYTPFWIDPNNPAGRLRKAPSSSRGHTSAGPSAGAGAAAAAGGASRPSPGRGSPTPRGRGRGRGRGRGMGVRLAHGFAAFFSMCRNIAADVHEVARRQRETDDNLRRQASALGTPFAPRSPDVPLHPLLQMSTSGTSRRMGYLFHQPMTSKKKKLILMIRSSLTLPHITGIRANRPLTLRPRTRLAVLLLRPSLERNTLPPTWRNTSSLLIILLPTGDPWIGVSLSLFLVLGAKKGENVYYSVLYFCNEHLFVLASITKKGEIDDKSNDSGSGHRRKDGKKKKTRRIKEIVYYDDSDESTFSQKDDNHNDYERRKPVNSNFSFDYSCIPQSANAHLLSIPLGKPPHFDGEDYGFWSHKMRSHLFSLHPSIWEIVESGMHFDSSDSPLFINEQIHKNAQTTTVLLASLCRDEYHKVSGLDNTKQIWDTLKISHEGNDVTLLTKMELVEGELGRFAMIRGEEPTQTYNRLKTLINKIRSYGSTRWTDHDVVRLMLRSFTVLDPHLVNNIRENPRYTKMSPEEVLGKFVSGRMMIKEARYVDDALNGPINEPQPVALKATRSKEALPSKVAQIEAARLNDEEMALIIKRFKMALKGRKGQPSKIKAKGKRSCFKCGKIGHFIANCPDNESDQEHGSKREKKKNYKKAKGEAHLGKEWDSDCSSSDSDNEGLAATAFNKSSLFPNERHTCLMAREKKGLDRIKVDKINELIDALNDKNRLLEKQEDLLYEEHDKFVEAQKSHALEVKRNEMLFCELSSCHETISSLRSINDDLNAKIEIASKSTTCVENVVICNRCKDFDIDACSEHIASIAKLNDEMASLNAQLKASKSDFDKLKFARDAYTIGRHTSIKDGLGFKREAKNSTSHNDVISTNENGKALVASSTNMNHVFMYNDRRQSHKRCNTFDSLDCALYTSIATYIKDREILRKNGIHVPRKNVVHAARKVMNGPSTIYHALNASFAICRKDRKIVARKLGAKCKDVSVFRRSDGSLAFKGVLDDKLYLVDFAKEEAGLDACLIAKTSMGWLWHRRLAHVGMKNLHKLLKGEHVIGLTNVQFEKDRPCAACQAGKQVGGAHHSKNVMTTSRPLELLHMDLFGPVAYLSIGGSKYGLVIVDDFSRFTWVFFLQDKSETQGTLKRFLRRAQNEFELKVKKIRSDNGSEFKNLQVEEFLEEEGIKHEFSAPYTPQQNGVVERKNMTLIDMARTMLGEFKTPECFWSEAVNTACHAINRVYLHRLLKKTSYELLTGNKPNVSYFRVFGSKCYILVKKGRNSKFAPKAIEGFLLGYDSNTKAYRVFNKSSGLVEVSSDVVFDETNGSPREQVVDLDDVDEEDVPTAATRTMAIGDVRPQEQKEQDQPSSSTMVHPPTQDDEQVHQQEACDRGGAQDDHVMEEETQPAPPTQVRAMIQRDHPVDQILGDISKGVTTRSRLVNFCEHYSFVSSIEPFRVEEALLDPDWVLAMQEELNNFKRNEVWTLVPHPKQNVVGTKWVFRNKQDEHGVVTRNKARLVAKGYAQVAGLDFEETFAPVARLESIRILLAYAAHHSFRLFQMDVKSAFLNGPIKEEVYVEQPPGFEDERYPDHVCKLSKALYGLKQAPRAWYECLRDFLIGNAFKVGKADPTLFTKTCDGDLFVCQIYVDDIIFGSTNKKSCEEFSRVMTQKFEMSMMGELNYFLGFQVKQLKDGTFISQTKYTQDLLKRFGMKDAKPAKTPMGTDGHTDLNKGGNRVERXAYRSMIGSLLYLCASRPDIMLSVCMCARFQSDPKECHLVAVKRILRYLVATPCFGLWYPKGSTFDLIGYSDSDYAGCKVDRKSTSGTCQFLGRSLVSWNSKKQTFVALSTAEAEYVAVGQCCAQLLWMRQTLRDFGYNLSKVPLLCDKESVIRMTDTTNEQSHTKHIDIRHNFMGDHKQKGNMKVFHVSPDKKLTDISTKPLNDNTFCRLRSELNVLDSRNLD

SEQ ID NO: 10035 - protein, 2101 aa, Zea mays
  unsure (1)..(2101): unsure at all Xaa locations
  Clone ID: TF_ZmC29741_2.pep
MAPLYTSAVLGYASVRWLKAFSDEQCAGINHFVALYAVPVLIFHMVSTNDPYHMNERLIAADTLQKAVVLLALTAWAFWSHLSRRRGGRGKRQVVQGAESPIKWVVTNFSVASLPNTIIMGVPLLDGMYGPVSGGLMKQIVVMQFCIWYNVVIFLYEFMAARDGSARISPAVPATAGERVVDDENGGSSSVHRHAAADRSHHHHQVVVNIEITEVAPAPAAEAVVASSLMPAAATKEMSPEDDGDANKQVVVAVDVQPPVMHVVWMATKKLLQIPNTYASFLGLIWSLMAFKIGFSMPKIVSDSLFIIYTTAVGLSMFASGTFIARQSRFVPCGYTVASLSMLLKFLIGPVIMLIASLAIGMHGTLLHIAVVQASRPTAPNNVYIYAALPLAVTSFVYAEEYKVHADIMSTGSVPFKFISFSSVKRLSQKPYMCLDQRRQQSLIEVPFHTAYINKRTGRHVNRCSSYTISSYIDTWYPIYHYTVSEEKDTIVILVVTDTKESNSNHPNGLIPKSLRHNNVTLKGKCALGPFLSILVIECQHKCFCVNLCKVVDKVQTKSKGKIELEKRWLCTAKVCSVWVHRTVRCARLALANSLLSGLRRRCTEKESFVNELKDDKPTDSGSGHKWKDGKKKKTRRIKEIVYYDDIDESTSSQKDDYDYEKRKTVNSNFSFDYSRIPQSTNAHLLSIPLGKPPHFDGEDYGFWSHKMRSHLFSLHPSIWEIVESRMKFDSTDSPMFINEQIHKNAQATTVLLASLCRDEYNKVSGLDNAKQIWDTLKISYEGNDVTMLTKMELVEGELGRFAMIRGEEPTQTYNRLKTLVNKIRSYGSTRWTDHDVVRLMLRSFTVLDPHLVNNIRENPRYTKMSPEEVLGKFVSGRMMIKEARYVDDALNGPINEPQPVALKATRSKEALPSKVAQVEAAGLNDEEMTLIIKCFKTALKGRKGQPNKTKTKAKRSCFKCGKIGHFIANCPDNDSDQEKGNKREKKKNYKKAKGEAHLGKEWDSDCSYSDSDNEGLAATAFNKSSLFPNEHHTCLMAKEKKVYTRDTTYASSSDDDSSDDDEIDYSSLFKGLDRIKIGKINELIDALNDKNRLLEKQEDLLYEEHDKFVEAQKSHALEVKRNEMLSCELSTCHETISSLKSINDDLNAKLEKSSKLTSCVEHVVICTRCKDFNVDACSEHLVSIAKLNDEVASLNAQLKTSKSEFDKLKFARDAYTIGRHLSIKDGLGFKREAKNLTSHKAPISAKEKGKAPMASSAKKNHAFMYHDRRHSRNAYRSYDAFDSHDMFASSSSYMHGRNVVHHMPRRNVVNVPRKINEPSTIYYACNASFAICRKGKKVYASGGTSWIIDSGCTNHMTGEKRMFSSYIKNKDPQDSIIFGDGNQGKVKGLDVSVFRRCDGSLAFKGVLDGKLYLVDFAKEEAGLDACLIAKTSMGWLWHRRLAHVGMKNLRKLLKGEHVIGLTNVHFEKDRPCVACQAGKQVGSSHHTKNVMTTSRPLEMLHMDLFGPVAYLSIGGSKYGLVIVNDFSRFTWVFLLQDKSETQGTLKRFLRRAQNEFELKMKKIRSDNGSEFKNLQVEEFLEEEGIKHEFSAPYTPQQNGAVERKNRTLIDMARTMLGEFKTPERFWSEAVNTACHAINRVYLHRLLKRTSYELLTGNKPNVSYFRVFGSKCYILVKKGTTSKFAPKAVEGFLLGYDSNTKAYRVFNKSLGLVEVSSDVVFDETNGSPREQVVDLDDVDEEDVPTAAMRTMAIGDVRPQEQLEQDQPSSSTMVHPPTQDDEQVHQEEACDQGGAQDDHVMEEEAQPAPPXQVRATIQRKHPIDQILGDISKGXVEEALLDPDWVLAMQEELNNFKRNEVWTLVPRPNQNVVETKWVFRNKQDEHGVVTRNKARLVAKGYAQVAGLDFEETFAPVARLESIRILLAYAAHHSFKLFQMDVKSAFLNGPIKEEVYVEQPPGFEDEWYPDHVCKLSKALYGLKQAPRAWYECLRDFLIANAFKVGKANPTLFTKTCDGDLFVCQIYVDDIIFGSTNQKSCEEFSWVMTQKFEMSMMGELNYFLGFQVKQLKDGTFISQTKYTQDLLKRFGMKDAKPAKNLRLGS

SEQ ID NO: 10036 - protein, 957 aa, Zea mays
  Clone ID: TF_ZmC29741_31.pep
MDPKGKGIVINDKEKESFVNEPKDDKSNDSGPGHRRKDGKKKKTRRIKEIVYYDSDESSSSQKDDDNDYRKTVNSNFSFDYSRIPHNSNSHLLSIPLGKPPHFDGEDYGFWSHKMRSHLFSLHPSIWEIVENGMKFDSSDSPMLINEQIHRNAQATTVLLASLCREEYNKVSGLDNAKQIWDTLKISHEGNDVTMLTKMELVEGELGRFAMIRGEEPTQTYNRLKTLVNKIRSYGSTRWTDHDVVRLMLRSFTVLDPHLVNNIRENPRYTKMSPEEVLGKFVSGRMMIKEARYVDDALNGPIHEPQPIALKATRSKEALPSKVAQVEAAGLNNEEMALIIKRFKTALKGRKGQPSKTKTKEKRSCFKCGKIGHFIANCPDNDSDQEHGSKREKKKHYKKAKGEAHIGKEWDSDCSSSDSDNEGLAATAFNKSSLFPNERHTCLMAREKKVCNQNNVTYDSSSDDESSDDEIDYSSLFKGLDRTKVDKINELIDALNEKDRLLEKQEDLLYEEHDKFVEAQKSYALEVKRNEMLSCELSSCHETIFKLRSINDDLNAKLEIASKSTSCVENVVACTRCKDINIDAYSEHLACISKLNEEVASLNAQLKTSKSDFEKLKFARDAYTVGRHPSINDGLGFKREVKNLTSHKAPISAKEKGKAPMANSTKRNYAFLYHDRRQSRNAYRSYNAYDAFDSHAMVASSSSYVHDRNVSRKNVVHNMPRRNMINVPRKVNEPSTKYHALNASFAICRKDRKIIARKLGARCKGDKTCIWVPKDICANLVGPNMSWVYASGGSSWIIDSGCTNHMTGEKKMFTSYVKNKDSQDSIIFGDGNQGKVKGLGKIAISSEHSISNVFLVESLRYNLSSVSQLCNMGYNCLFINVDVSVFRRSYGSLAFKGVLDDKLYLVDFSKEEADLDACLIAKTSMGWLWHCRLAHVGIKNIHKLLKGEHVESRLEGG

SEQ ID NO: 10037 - protein, 666 aa, Zea mays
  Clone ID: TF_ZmC29741_45.pep
MDPKGKGIVINDKEKESFVNEPNDDKPTDSGSGHKRKDGKKKKTIRIKEIVYYDDSDESTSSQKNNDDNDYDKRKMVNTNFSFDYSRIPHSSNAHLLSIPLGKPPHFDGEDYGFWSHKMRSHMFSLHPSIWEIVENGMKFDSSDSPIFINEQIHKNAQATTVLLASLCRDDYHKVSGLDNAKQIWDTLKISHEGNNVTLQTKMELVEGELGRFAMIRGEEPTQTYNRLKTHINKIRSYGSTRWTDHDVVRLMLRSFTVLDPHLVNNIHENPRYTKMSPEEVLGKFVSGRMMINEARYVDDALNGPINEPQPFALKATRSKEALPSKVAQVEAAGLNDEEMALIIKRSKTTLKGHKGQPSKTKTKGKRSCFKCGKIGHFIANCPDNDSDQEQGNKREKKKTYKKAKGEAHLGKEWDSDCSSSDSDNEGLAATAFNKSSLFPNERHTCLMAKEKKLCTRNNATYDSSSDDESSDEEMDYSSLFKGLDRTKIDKINELIDALNEKDRLLEKQEDLLYEEHDKFVEAQKSHALEVKRNEMLSCELSSCHETISSLRSINDDLNAKLEIASKSNSCVEHVMICNRCKDFDIDACSEHLVSISKLNDELASLNAQLKTSKNEFDKLKFARDAYTIGRHPSIKDGLGFKREAKDLTSHKAPISAKEKGKAPMA

SEQ ID NO: 10038 - protein, 452 aa, Zea mays
  Clone ID: TF_ZmC29741_65.pep
MDPKGKGIVINDKEKESFVNEPRGDKSNDSGSGHRRKDGKKKKTRRIKEIVYYDSDESTSSQKDDDHNEYERKKPVNSNFSFDYSRIPQSTHAHLLSIPLGKPPHFDGEDYGFWSHKMRSHLFSLHPSIWEIVESGMHFDSADSPMFINEQIHKNAQATTVLLASLCRDEYHKVSGLDNAKQIWDTLKISHEGNDVTLLTKMELVEGELGRFAMIRGEEPTQTYNRLKTLINKIRSYGSTRWTDHDVVRLMLRSFTVLDPHLVNNIRENPRYTKMSPEEVLGKFVSGRMMIKEARYVDDALNGPIHEPQPLALKATRSKEALPSKVAQVEAAGLNNEEMALIIKRFKTALKGRKGQPSKTKAKGKRSCFKCGKIGHFIANCPDNESDQEQGSKREKKKHYRKAKGEAHIGKEWDSDCSSSDSDNEGLAATAFNKSSLFPNERHTCLMAREKK

SEQ ID NO: 10039 - protein, 1812 aa, Zea mays
  Clone ID: TF_ZmC4916_370.pep
MDPKGKGMVVDNNEKESIFNELKNDKSTDLGSSHKRKDGKKKKTRRIKEIVYYDSDESSSSQKDDDHNDYERRKPVNSNFSFDYSRIPQSSNSHLLPIPLGKPPHFDGEDYGFWSHKMRTHLFSLHPSIWEIVESGMQFDSSDSPMFINEQIHKNAQATTVLLASLCRDEYNKVSGLDNAKQIWDTLKISHEGNDITMLTKMELVEGELGRFAMIRGEEPTQTYNRLKTLINKIRSYGSTIWTDHDVVRLLLRSFTILDPHLVNNIRENPRYTKMSPEEVLGKFVSGRMMIKEARYVDDALNGPINEPQPFALKATRSKEALPSKVAQIEAAGLNDEEMALIIKCFKTVLKGHKGQPSKTKTKGKRSCFKCGKIGHFIANCPDNDSDQEQGNKREKKKNYKKAKGEAHLGKEWDSDCSSSDSDNEGLAATAFNKSTLFPNERHTCLMAREKKVCTRNSTYASSSEDESSDEDEVDYSCLFKGLDRTKVDKINELIDALNEKNILLEKQEDLLYEEHDKFVEAQKSLALEIKRNEMLACELSTCHDSISKLKSINDDLNAKLVEAHKSNSCVEHVEICTRCKDVDINACSEHLVSISKLNDELASLNAQLKTSKSEFEKLKFARDAYTIGRHPSIKDGLGFKREAKSLTSHKTPISTKEKGKAPMANSVKKNHAFMYYDRRYSRNAFRGHNVFDSHAYDSYAMTASSSHVMHGRNVLRKNVVHQMPRRNVVHNAPRKVVNEPSTIYCALNASFAICRKDKKIVARKLGAKCKGDKACIWVPKDICTNLVGPNMSWVYASGGSSWIIDSGCTNHMTGEKKMFTSYVKNKDSQDSIVFGDGNQGKVKGLVESLGYNLLSVSQLCNMGYNCLFTNVDVSVFRRSDGSLAFKGVLDGKLYLVDFAKEEAGLDACLIAKTSMGWLWHRRLAHVGMKNLHKLLKGEHVIGLTNVQFEKDRPCAACQAGKQVGGAHHSKNVMTTSRPLELLHMDLFGPVAYLSIGGSKYGLVIVDDFSRFTWVFFLQDKSETQGTLKRFLKRAQNEFELKVKKIRSDNGSEFKNLQVEEFLEEEGIKHEFSAPYTPQQNGVVERKNRTLIDMARTMLGEFKTPERFWSEAVNTACHAINRVYLHRLLKKTSYELLTGNKPNVSYFRVFGSKCYILVKKGRNSKFAPKAVEGFLLGYDSNTKAYRVFNKSSGLVEVSSDVVFDETNGSPREQVVDCDDVDEEDVPTAAIRTMAIGEVRPQEQDERDQPSSSTTVHPPTQDNEQVHQKEACVQGGAQDDHVMEEEAQPAPPTQVRAVIQRDHPVDQILGDISKGVTTRSRLVNFCEHYSFVSSIEPFRVEEALLDPDWVLAMQEELNNFKRNEVWTLVPRPKQNVVGTKWVFRNKQDEHGVVTRNKARLVAKGYAQVTGLDFQETFAPVARLESIRILLAYAAHHSFRLYQMDVKSAFLNGPIKEEVYVEQPPGFEDERYPDHVGKADPTLFTKTCDGDLFVCQIYVDDIIFGSTNQKSCEEFSRVMTQKFEMSMMGELNYFLGFQVKQLKDGTFISQTKYTQDLLKRFGMKDAKPAKTPMGTDGHTDLNKGGKSVDQKAYRSMIGSLLYLCASRPDIMFSVCMCARFQSDPKECHLVAVKRILRYLVATPCFGIWYPKGSNFDLIGYSDSDYAGCKVDRKSTSGTCQFLGRSLVSWNSKKQTSVALSTAEAEYVAAGQCCAQLLWMRQTLRDFGYNLSKVPLLCDNESAIRMAENPVEHSRTKHIDIRHHFLRDHQQKGDIEVFHVSTENQLADIFTKPLDEKTFCRLRSELNVLDSRNLD

SEQ ID NO: 10040 - protein, 1179 aa, Zea mays
  Clone ID: TF_ZmC4916_384.pep
MDPKGKGIVIKATRSKEALPSKVAQVETAGLNEEEMALIIKRFKTALKGRKEHPNKNKTKGKRSCFKCGKIGHFIANCPDNDSDQEKKSGKWENKKNYKKAKGEAHLGKEWDSDCSSSDSDNEGLAATAFNKSSLFPNEHHTCLMAREKKGLDRTKVDKINELIDALNDKNRLLEKQEDLLYEEHDKFVEAQKSLALEIKRNEMLSCELSTCHETISTLKGANDDLNAKLEVAIKSNSCVEHVMICNRDAYMIGRHPSIKDGLGFKREVKNLTSHKASISAKEKGKAPMGSSAQKNHAFMYHDRRHSRNGYRSYDTFDSHAMIASSSSIMHDRNLARRNVVHVPRKTNSEPSTIYHALNASFAIYRNDRKIVARKLGAKCKGDKTCIWVPKDIVTNLVGPNKSWVYASGGSSWIIDSGCTNHMTGEKRMFSSYVKNRDSQDSIIFGDGNQGKVKGLGKIAISNEHSISNVFLVESLGYNLLSISQLCNMGYNCLFTNIDVSVFRRSDGSLAFKGVLDDKLYLVDFAKEEDKSETQGTLKRFLRRAQNEFELKVKKIRSDNGSEFKNLQVEEYLEEEGIKHEFSAPYTPQLNGVVERKNRTLIDMARTVLGEFKTPERFWSEAVNTACHAINRVYLHRLLKKTSYELLTGNKPNVSYFRVFGSKCYILVKKGRNSKFAPKAVEGFLLGYDSNTKAYRVFNKSSGLVEVSSDVVFDETNGSPREQVVDLDDVDEEDVPTAAIRTMAIGDPFRVEEALLDPDWVLAMQEELNNFKRNEVCTLVPRPKQNVVGTKWVFRNKQDEHGVVTRNKARLVAKGYAQVAGLDFEETFAPMARLESIRILLAYAAHHSFRSFQMDVKSAFLNGPIKEEVYVEQPPGFEDERYPDHVCKLSKALYGLKQAPRAWYECLRDFLIANAFKVGKADPTLFTKTCDGDLFVCQIYVDDIIFGSTNQKSCEEFSRVMTQKFDMSMMGELSYFLGFQVKQLKDGTFISQTKYTQDLIKRFGMKDAKPAKTPMGTDRHTDLNKGDSDYAGCKVDRKSTSGTCQFLGRSLVSWSSKKQTSVALSTAEAEYVAAGQCCAQLLWMRQTLRDFGYNLSKVPLLCDNESAIRIADNPVEHSRTKHIDIRHHFLRDHQQKGDIEVFHVSTENQLADIFTKPLDEKTFCRLRSELNVLDSRNLD

SEQ ID NO: 10041 - protein, 1647 aa, Zea mays
  Clone ID: TF_ZmC4916_395.pep
MDPKGKGIVINDKEKESFVNEPKDDKSNDSGSGHRRKDGKKKKTRRIKEIVYYDSDESTSSDKDDDYDKQKTVNSNFSFDYSRIPHSSNSHLLSIPLGKPPHFDGEDYGFWSHKMRSHLFSLHPSIWEIVENGMKFDSSDSPMFINEQIHKNAQATTVLLASLCRDEYNKVSGLDNAKQIWDTLKISHEGNDITMLTKMELVEGELGRFAMIRGEEPTQTYNRLKTLINKIRSYGSTRWTDHDVVRLMLRSFTVLDPHLVNNIRENPRYTKMTPEEVLGKFVSGRMMIKEARYVDDALNGPINEHQPLALKATRSKEALPSKVAQIEAAGLNDEEMALIIKRFKTVLKGHKGQPSKTKTKGKRSCFKCGKIGHFIANCPDNDSDQEQGNKREKKKNYKKAKGEAHIGKEWDSDCSSDSDNEGLAATAFNKSSLFPNERHTCLMAREKKVSTRDSTYASSSDNESSDDDIDYSCLFKGLDRSKIDKINELIDALNDKNVLLEKQEDLLYEEHDKFVEAQKSLALEIKRNEILSCELSTCHDSIASLKSKNDDLNAKLEKSSKSTSCVEHVEICTRCKDFDVDACSDHLVSISKLTEELASLNAQLKTSKNEFDKLKFARDAYTIGRHPSIKDGLGFKREAKNLTSHKTPIPAKEKGKAPMATSVKKNHAFMYHDKKNSRNAYDSYAMTASSSHVVHDRNIGRRNVVHNMPRRNVPRKVNEPSTIYHALNASFAIYRKDRKVYASGGSSWIIDSGCTNHMTGEKKMFTSYVKNKDSQDSIIFGDGNQGKVKGLDVSVFRRSDGSLAFKGVLDGKLYLVDFAKEEDKSETQGTLKRFLRRAQNEFELKVKNIRSDNGSEFKNLQVEEFLEEEGIKHEFSAPYTPQQNGVVERKNRTLIDMARTMLGEFKTPERFWSEAVNTACHAINRVYLHRLLKKTSYELLTGNKPNVSYFRVFGSKCYILVKKGRNSKFAPKAVEGFLLGYDSNTKAYRVFNKSSGLVEVSSDVVFDETNGSPREQVVDCDDVDEEDVPTAAIRTMAIGEVRPQEQDERDQPSSSTMVLPPTQDDEQVHQQEADDQGGAQDDHVMEEDAQPAPPAQVRAMIQRDHPVDQILGDISKGVTTRSRLVNFCEHYSFVSSIEPFRVEEALLDPDWVLAMQEELNNFKRNEVWTLVPRPKQNVVGTKWVFRNKQDEHGVVTRNKARLVAKGYAQVAGLDFEETFAPVARLESIRILLAYAAHHSFRLYQMDVKSAFLNGPIKEEVYVEQPPGFEDERYPNHVCKLSKALYGLKQAPRAWYECLRDFLIANAFKVGKADPTLFTKTCNGDLFVCQIYVDDIIFGSTNQKSCEEFSRVMTQKFEMSMMGELNYFLGFQVKQLKDGTFISQTKYTQDLLKRFGMKDAKPAKTPMGTDGHTDLNKGGKSVDQKAYRSMIGSLLYLCASRPDIMLSVCMCARFQSDPKECHLVAVKRILRYLVATPCFGLWYPKGSTFDLVGYSDSDYAGCKVDRKSTSGTCQFLGRSLVSWNSKKQTSVALSTAEAEYVAAGQCCAQLLWMRQTLWDFGYNLSKVPLLCDNESAIRMAENPVEHSRTKHIDIRHHFLRDHQQKGDIEVFHVSTENQLADIFTKPLDEKTFCRLRSELNVLDSRNLD

SEQ ID NO: 10042 - protein, 1708 aa, Zea mays
  Clone ID: TF_ZmC4916_397.pep
MDPKGKGMVVNDKEKETIFNEPRDNKATDSGSSQKKKEGKKKRCIKKIVYYDDNDESSSSQKYNDDNDYEKKKTINSNFSFDYSRIPKSTNGHLLSIPLGKPPHFDGEDYGFWSHKMRSHLFSLHPSIWEIVESGMQFYSTDSPIFINEQIHKNAQATTVLLASLCRDEYHKVSGLDNTKQIWDTLKISHEGNDVTMLTKMELVEGELGRFTMIRGEEPTQTYNRIKTLVNKIRSYGSMRWTDHDVVRLMLRSFTVLDPHLVNNIRENPRYTKITPEEILGKFVSERMMIKEARYVDDALNGPIHEPQTVALKATRSKEVLPSKVAQVEAAGLNEEEMALIFKRFKTALRGRKEHPNKNKTKGKRSCFKCGKIGHFIANCPDNDSDQEQEKKREKKKAYKKAKGEAHLGKEWDSDCSSSDSDNEGLAASAFNKSSLFPNEHHTCLMAKEKKVNTRKTTYASSSDDESSDDEIDYASLFKGLERTKIDKINELIDALNDKNRLLEKQEDLLYEEHDKVVEAQKSLALEVKRNEMLSCELSTCHETISSLKSVNDDLNAKIEVANRSNSCVEHVVICNRCKDFDVDACSEHLVSIAKLNDEVASLNAQLKTSKNEFDKLKFARDAYTIGRHPSIKDGLGFKREAKNLTSHKAPISAKEKGKAPMANSAQKNHAFMYHDRRYSRNVHYDRSYNDVVSHAMIASSSSIMHDRSLARKNVIYHVPRRNVHVPRKINEPSTIYHACNASFAICRKDKKVYASGGSSWIIDIGCTNHMTGEKKMFTSYVKNKDSQDSIIFGDGNQGKVKGLGKIAISSEHSISNVFLVESLGYNLLSVSQLCNMGYNCLFTNVDVSVFRRSDGSLAFKGVLDDKLYLVDFAKEEAGLDACLIAKTSMGWLWHRRLAHVGMKNLHKLLKGEHVIGLTNDKSETQGTLKRFLRRAQNEFELKQNGVVERKNRTLIDMARTMLGEFKTPERFWSEAVNTACHAINRVYLHRLLKKTSYELLTGNKPNVSYFRVFGSKCYILVKKGRNSKFSPKAIEGFLLGYDSNTKAYRVFNKSSGLVEVSSDVVFDETNGSPREQVVDLDDVDEEDVPTAAIRTMAIGDVRPQEQTEQDQPSSSTMVQPPTQDDEQVHQEEACDQGGAQDDHVIEEEAPQAPPTQVRATIQRNYPVDQILGDISKGVTTRSRIVNFCEHYSFVSSIEPFRVEEALLVPDWVLAMQEELNNFKRNEVWTLVPRPKQNVVGTKWVFHNKQDKHRVVTRNKARLVAKGYAQVAGLDFEETFAPVARLESIRILLAYAAHHSFRLFQMDVKSAFLNGPIKEEVYVEQPPGFEDERYPDHVCKLSKALYGLKQAPRAWYECLRDFLIANSFKVGKADPTLFTKTCDGDLFVCQIYVDDIIFGSTNQKYCEEFSRVMTQKFEMSMMDELDYFLGFQVKQLKDDTFISQTKYTQDLLKRFGMKDAKPAKTPMGTDGHVDLNKGGKSVDQKAYRSMIGSLLYLCASRPDIMLSVCMCARFQSDPRECHLVAVNRILRYLVATPCFGIWYPKVSTFDLIGYSDSDYAGCKVDRKSTSGTCQFLGRSLVSWSSKKQTFVALSTAETEYVAAGQCCAQLLWMRQTLRDFGYNLSKVPLLCDNESAIRMADNPVEHSRTKHIDIRHHFLRDHQQKGDIEVFYVSTENQLDDIFTKPLDEKTFCRLRSELNVLDSRNLD

SEQ ID NO: 10043 - protein, 1657 aa, Zea mays
  Clone ID: TF_ZmC4916_405.pep
MDPKGKGMVINDKEKESFVNEPNDDKPTDSGSGRKRKDGRKKKARRIKEIVYYDSDESSSSQKDDDDYDRRKTVNSNFSFDYSRIPHSSNAQLLPIRLGKPPHFDGEDYGFWSHKMRTHLFSLHPSIWEIVESGMKFDSSDSPMFINEQIHKNAQATTVLLASLCRDEYHKVSGLDNAKQIWDTLKISHEGNDVTLLTKMELVEGELGRFAMIRGEEPTQTYNRLKTLINKIRSYGSTRWTDHDVVRLMLRSFTVLDPHLVNNIRENPRYTKMSPEEVLGKFVSGRMMIKEARYVDDALNGSINEPQPLALKATRSKEALPSKVAQVEAAGLNNEEMALIIKRFKTALKGRKGQPSKTKAKGKRSCFKCGKIGHFIANCPDNDSDQEHGSKREKKKHYKKAKGEAHIGKEWDSDCSSSDSDNEGLAATAFNKSSLFPNECHTCLMAREKKVSNQNNVTYDSSSDDESSDEEIDYSSLFKGMDRTKVDKINELIDALNEKDRLLEKQEDLLYEEHDKFVEAQKSYALEVKRNEVLSSELSSCHETIATLKGVNNDLNAKLEVASKSNSCVEHVMVCTRCKDFNVDACSEHLVSISKLNDEVASLNAQLKTSKSEFDKLKFARDAYTIGRHPSIKDGLGYKREAKNLTSHKAPISAKEKGKASMASSVQKNHAFMYYDRRQPRNAYRSCNAYNAFDSHAMFASSSSYVHDRNVGRRNVVHNMPRRNVVNVPRKVNEPSTIYHALNASFAICRKDRKVIARKLGAKCKGDKTCIWVPKTIVTNLVGPNKSWVYASGGSSWIIDSGCTNHMTGEKKMFTSYVKNKDSQDSIIFGDGNQGKVKGLDVSVFRRSDDSLAFKGVLDDKLYLVDFAKEEAGLDACLIAKTSMGWLWHRRLAHVGMKNLHKLLKGEHVIGLTNVQFEKIDLVQLVKQDKSETQGTLKRFLRRAQNEFELKVKKIRSDNGSEFKNLQVEEFLEEEGIKHEFSAPYTPQQNGVVERKNRTLIDMARTMLGEFKTPEVYLHRLLKKTSYELLTGNKPNVSYFRVFGSKCYILVKKGRNSKFAPKAVEGFLLGYDSNIKAYRVFNKSSGLVEVSSNVVFDETNGSPREQVVDCDDVDEEDVPTAAIRTMAIGVVRPQEQDERDQPSSSTTVHPPTQDDEQVHQKEACDQGGAQDDQVMEEEAQPAPPTQVRTEELNNFKRNEVWTLVPRPKQNVVGTKWVFRNKQDEHGVVTRNKARLVAKGYAQVAGLDFEETLYQMDVKSAFLNGPIKEEVYVEQPPGFEDERYPDHVCKLSKALYGLKQAPRAWYECLRDFLIVNAFKVGKADPTLFTKTCDGDLFVCQIYVDDIIFGSTNQKSCEEFSRVMTQKFEMSMMGELNYFLGFQVKQLKDGIFISQTKYTQDLLKRFGMKDAKPAKTPMGTDGHTDLNKGGKSVDQKVYRSMIGSLLYLCASRPDIMLSVCMCARFQSDPKECHLVAVKRILRYLVATPCFGLWYPKGSTFDLVGYSDSDYAGCKVDRKSTSGTCQFLGRSLVSWNSKKQTSVALSTAEAEYVAAGQCCAQLLWMRQTLRDFGYNLSKVPLLCDNESAIRMAENPVEHSRTKHIDIRHHFLRDHQQKGDIKVFHVSTENQLADIFTKPLDEKTFCRLRSELNILDSRNLD

SEQ ID NO: 10044 - protein, 1673 aa, Zea mays
  unsure (1)..(1673): unsure at all Xaa locations
  Clone ID: TF_ZmC4916_407.pep
MDPKEKGMVVNDNEKESIFNEPKDDKANDSGSSQKKKDGKKKRCIKKIVYYDSDESSSSQKDDEYEEKNKTVNSNFSFDYSRIPHNSNAHMLSIPLGKPPHFDGEDYGFWSHKMRSHLFSLHPSMWEIVENGMQFDSSDNSMFINEQIHKNAQATTVLLASLCREEYNKVSGLDNAKQIWDTLKISHEGNNATMLTKMELVEGELGRFAMIRGEEPTQTYNRLKTLVNKIRSYGSTRWTDHDVIRLMLRSFTVLDPHLVNSIRENPRYIKMTPEEILGKFVSGRMMIKEARYVDEALNGPMPIYEPQKVALKATSSRETLPSKVAQVEVAGLNEDEMALIIKRFKTALKGRKEHPNKSKTKGKRSCFKCGKIGHFIANCPDNDSDQEQGKNGKRENKKVYKKAKGEAHLGKEWDSPPRPSTNRLSSQTSITPASWQRRKRCKNFNVDACSEHLISISKLNDEVASLNAQLKTSKDDFDKLKFARDAYTIGRHPSIKDGLGFKREAKNLTSQGAPIFNKEKGKAPMTSNSQNNYAFIYNRKFSRNAYHNRSCNAYDSNAMIASSSSFVHGRDMPKKNVIHHMPRRNVVHVPRIASNCNTQIVRAVNNLPFEARLMRSCSNPPPRSAPMTETNQGIKTPIDPAATLEPPSSKPGRVSGCPIGISGTSREIRCMGSDQLRGKWVTRLVGKDAQPLQSVKLVYASGGSSWIIDSGCTNHMTGEKKMFTSYVKNKDSQDSIIFGDGNQGKVKGLGKIAISSEHSISNVFLVESLGYNLLSVSQLCNMGYNCLFTNVDVSVFRRSDGSLAFKGVLDNKLYLVDFAKEEAGLDACLIAKTSMGWLWHRRLAHVGMKNLHKLLKGEHVLGLTNVTFEKDRPCAACQAGKQVGSAHHNKNVMTTSRPLELLHMDLFGPVAYLSIGGSKYGLVIVDDFSRFTWVFFLQDKSEIQGTLKRFLRRAQNGFELKVKKIRSDXERKNRTLIDMARTMLGEFKTPERFWSKAVNTXCHAINRVYLHRLLKKTSYELLTGNKPNVSYFRVFGSKCYILVKKGRNSKFAPKVVEGFLLGYDSNTKAYRVFNKSSGLVEVSSDVVFDETNGSPREQVDLDDVDEEDVPTTAIRTMAIGDVRPQEQKEQDQPSSSTMVHPPTQDDEQVHQEEACDQGGAQDDHVMEEEAPQAPPTQVRATIQRNHPANQILGDISKGVTTRSRLANFCEHYSFVSSIEPFKVEEALLDPDWVLAMQEELNNFKRNEVWTLVPHPKQNVVGTKWVFRNKQDEHGVVTRNKARLVAKGYAQVAGLDFEETFAPVARLESIRILLAYAAHHSFRLFQMDVKSAFLNGPIKEEVYVEQPPGFADERYPDHVCKLSKALYGLNQAPRAWYECLRDFLIANAFKVGKADPTLFTKTCDGDLFVCQIYVDDIIFGSTNQKSCEEFSRVMTQKFEMSMMGELNYFLGFQVKQLKDGTFISQTKYTQDLIKRFGMKDAKPAKTPMGTDRHVDLNKGVATPCFGIWYPKGSTFDLIGYSDSDYAGCKVDRKSTSGTCQFLGRSLVSWSSKKQTSVALSTAEAEYVAAGQCCAQLLWMRQTLRDFGYNLSKVPLLCDNESAIRMTDNPVEHSRTKHIDIRHHFLRDHQQKGDIEVFYVSTENQLADIFTKPLDESTFCRLRSELNVLDSRNLD

SEQ ID NO: 10045 - protein, 1660 aa, Zea mays
  Clone ID: TF_ZmC4916_410.pep
MDPKGKGIVINDKEKESFVNEPRDDKSNDSGSGHRRKDGKKKKTRRIKEIVYYDSDESTSSQKDDDHNEYERKKPVNSNFSFDYSRIPQSTNAHLLSIPLGKPPHFDGEDYGFWSHKMRSHLFSLHPSIWEIVESGMHFDSTDSPMFINEQIHKNAQATTVLLASLCRDEYHKVSGLDNAKQIWDTLKISHEGNDVTLLTKMELVEGELGRFAMIRGEEPTQTYNRLKTLINKIRSYGSTRWTDHDVVRLMLRSFTVLDPHLVNNIRENPRYTKMSPEEVLGKFVSGRMMIKEARYVDDALNGPIHEPQPIALKATRSKEALPSKVAQVEAAGLNNEEMALIIKRFKTALKGRKGQPSKTKTKEKRSCFKCGKIGHFIANCPDNESDQEKGNKREKKKHYKKAKGEAHIGKEWDSDCSSSDSDNEGLAATAFNKSSLFPNERHTCLMAREKKVSTHDTSTYASSSEDESSDDDEIDYSCLFKGLDRSKINKINELIDALNDKNRLLEKQEDLLYEEHDKFVSAQNSLALEIKRNEMLSSELSTCHESISKLKSVNDDLNAKLEIASKSTSCVEIVETCNRCKDFDIDACSEHLVSISKLNDELASLNAQLKTSKSNFDKLKFARDAYTIGRHPSIKDGLGYKKEAKNLTSHKAPISAKEKGKAPMASSVQKNHAFMYHDRRQSRNAYRRCNAYDAFDSHDMFASSSSYVHDRNVERFMHPGGSSWIIDSGCTNHMTGEKKMFTSYVKNKDSQDSIIFGDGNQGKVKGLGKIAISNEHSISNVFLVESLGYNLLSVSQLCNMGYNCLFTNVDVSVFRRSDGSLAFKGVLDDKLYLVDFAKEEAGLDACLIAKTSMGWLWHRCLAHVGMKNLHKLLKGEHVIGLTNVQFEKDRPCAACQAGKQVGGAHHSKNVMTTSRPLELLHMDLFGPVAYLSIGGSKYGLVIVDDFSRFTWVFFLQDKSETQGTLKRFLRRAQNEFELKVKKIRSDNGSEFKNLQVEEFLEEEGIKHEFSAPYTPQQNGVVERKNRTLIDMARTMLGEFKTPVRFWSEAVNTACHAVNRVYLHRLLKKTSYELLTGNKPNVSYFRVFGSRCYILVKKGRTSKFAPKAVEGFLLGYDSNTKAYRVFNKSSGLVEVSSDVVFDETNGSPREQVVDCDDVDEEDVPTTAIRTMVIGEVRPQEQDERDQPSSSTTVHPPTQDDEQDEHGVVTGNKARLVAKGYAQVTGLDFEETFAPVARLESIRILLAYAAHHSFRLFQMDVKSAFLNGPIKEEVYVEQPPGFEDERYPDHVCKLSKALYGLKQAPRAWYECLRDFLIANDFKVGKVDPTLFTKTCDGDLFVCQIYVDDIIFGSTNQKSCEEFSRVMTQKFEMSMMGELNYFLGFQVKQLKDGTFISQTKYTQDLLKRFGMKDAKPAKTPMGTDGHTDLNKGGKSVDQKAYRSMIGSLLYLCASRPDIMLSVCMCARFQSDPKECHLVAVKRILRYLVATPCFELWYPKGSTFDLVGYSDSDYAGCKVDRKSTSGTCQFLGRSLVSWNSKKQTSVALSTAEAEYVAAGQCCAQLLWMRQTLRDFGYNLSKVPLLCDNESAIRMAENPVEHSRTKHIDIRHHFLRDHQQKGDIKVFHVSTENQLADIFTKPLDEKTFCRLRSELNVLDSRNLD

SEQ ID NO: 10046 - protein, 1515 aa, Zea mays
  Clone ID: TF_ZmC4916_413.pep
MDPKGKGMVINDKEKESFVNEPKDNKPTDSGSSHKKKDGKKKRHIKKIVYYDDSDESSSSQKDDYEKKKTVNSNFSFDYSRIPQSSNAHFLSIPLGKPPHFDGEDYGFWSHKMRSHLFSLHPSIWEIVENGMQFDTSLCRDEYHKVSGLDNAKQIWDTLKISHEGNDVTMLTKMELVEGELGRFAMIRGEEPTQTYNRLKTLINKIRSYGSTRWTDHDVVRLMLRSFTILDPHLVNNIRENPRYTKMSPEEILGKFVSGRMMIKEARYVDDALNDPIHEPQTVALKATRSKEALPSKVAQVEAAGLNEEEMALIIKRFKTTLKGRKEHPNKNKTKGKRSCFKCGKIGHFIANCPDNDSDQEQEKKREKKKSYKKAKGEAHLGKEWDSDCSSSDSDNEGLAASAFNKTSLFPNEHHTCLMAKEKKGCLHGWYPSIKDGLGFKREAKNLTSHKAPIPAKEKGKAPMTNSVQKNHAFMYHDRRHSRDVHYNRSYNSLASHAMIASSSSNVYGRNMPRKNVAHAPRKVIAKKVGAKCKGDKTCIWVPKAIVTNLVGPNKSWVYASGGSSWIIDSGCTNHMTGEKKMFSSYVKNKDSQDSIIFGDGNQGKVKGLGKIAISSEHSISNVFLVESLGYNLLSVSQLCNMGYNRLFTNVDVSVFRRSDGSLAFKGVLDDKLYLVDFAKEEAGLDACLIAKTSMGWLWHRRLAHVGMKNLHKLLKGEHVIGLTNVTFEKDRPCAACQAGKQVGSSHHTKNVMTTSRPLELLHMDLFGPVAYLSIGGSKYGLVIVDDFSRFTWVFFLQDKSETQGTLKRFLRRAQNEFELKKNGVVERKNRTLIDMARTMLGEFKTPERFWSEAVNTACHAINRVYLHRLLKKTSYELLTGNKPNVSYFRVFGSKCYILVKKGRNSKFAPKAVEGFLLGYDSNIKAYRVFNKSSGLVEVSSDVVFDETNGSPREQVVDLDDVDEEDVPTAAIRTMAIGDVRPQEQKEQDQPSSSTMVHPPTQDDEQPFRVEEALLDPDWVLAMQEELNNFKRNEVWTLVPRPKQNVVGTKWVFRNKQDEHGVVTRNKARLVAKGYAQVAGLDFEETFAPMARLESIRILLAYAAHHSFRLFQMDVKSAFLNGPIKEEVYVEQPPGFEDEWYPDHVCKLSKALYGLKQAPRAWYECLRDFLIANAFKVGKADPTLFTKTCEGDLFVCQIYVDDIIFGSTNQKSCEEFSKVMAQKFEMSMMGELNYFLGFQVKQLKDGTFISQMKYMQDLLKRFGMKDAKPAKTPMGTDGHVDLNKGGKSVDQKAYRSMIGSLLYLCASRPDIMLSVCMCARFQSDPRECHLVAVKRILRYLVATLCLGIWYPKGSTFDLIGYSDSNYAGCKVNRKSTSGTCQFLGRSLVSWSSKKQTSVALSTAEAEYVAAGQCCAQLLWMRQTLRDFGYNLSKVPLLCDNESAIRMADNLVEHNRTKHIDIRHHFLRDHQQKGDIEVFYVSTENQLADIFTKPLDESTFCRLRSELNVLDSRNLD

SEQ ID NO: 10047 - protein, 1750 aa, Zea mays
  Clone ID: TF_ZmC4916_416.pep
MDPKGKGIVINDKEKESFVNEPKDDKSNDSGSGHRRKDGKKKTRRIKEIVYYDSDESSSSQKDDDNDYRKTIVENGMKFDSSDSPMLINEQIHRNAQATTVLLASLCREEYNKESGLDNAKQIWDTLKISHEGNDVTMLTKMELVEGELGRFAMIRGEEPTQTYNRLKTLVNKIRSYGSTRWMDHDIVRLMLRSFTVLDPHLVNNIRENPRYTKMSPEEILGKFVSGRMMIKEARYVDDALNGPIHEPQPIALKASRSKEALPSKVAQIEAAGLNDEEMALIIKRFKTALRGRKEHPNKTKTKGKRSCFKCGKIGHFIANCPDNDSDQEKKSGKWEKKKNYKKAKGEAHIGKEWDSDCSSSDSDNEGLAATAFNKSSLFPNEHHTCLMAKEKKVSTRNSTYASSSEDESSDDEIDYSCLFKGLDRSKIDKINELIDALNDKNRLLEKQEDLLYEEHDKFVEAQKTLALEIKRNEMLACELSTCHDSISKLKSINDDLNAKLVEAQKSNSCVEHVEICTRCKDVDINACSEHLVSISKLNDELASLNAQLKTSKSEFEKLKFTRDAYTIGRHPSIKDGLGFKREAKNLTSHKTPISTKEKGKAPMANSVKKNHAFMYYDRRYSRNAFRSNDVFDSHAYDSYAMTASSSSYMHGRSMTRRNAIHHVPRKNTIHAPRKVVNEPSTIYCALNASFAICRKDRKIVARKLGAKCKGDKTCIWVPKDICTNLVYASGGSSWIIDSGCTNHMTGEKKMFTSYVKNKDSQDSIIFGDGNQGKVKGLDVFVFRRSDGSLAFKGVLDGKLYLVDFAREEAGLDACLIAKTSMGWLWHRRLAHVGMKNLHKLLKGEHVIGLTNVQFEKDRPCAACQAGKQVGGAHHSKNVMTTSRPLELLHMDLFGPVAYLSIGGSKYGLVIVDDFSRFTWVFFLQDKSETQGTLKRFLRRAQNEFELKVKKIRSDNGSEFKNLQVEEFLEEEGIKHEFSAPYTPQQNGVVERKNRTLIDMARTMLGEFKTPEHFWSEAVNTACHTINRVYLHRLLKKTSYELLTGNKPNVSYFRVFGSKCYILVKKGRNSKFAPKAVEGFLLGYDSNTKAYRVFNKSSGLVEVSSDVVFDETNGSPREQVVDLDDVDEEDVPTATIRTMTIGDVRPREQLEQDQPSSSTMVNPPTQDDEQVPQVEAHDQGGAQDVQVEEEEAPQAPPTQVRAVIQRDHPVDQILGDISKGVTTRSRLVNFCEHYSFVSSIEPFRVEEALLDPDWVLAMQEELNNFKRNEVWTLVPRPKQNVVGTKWVFRNKQDEHGVVTRNKARLVAKGYAQVAGLDFEETFAPVARLESIRILLAYAAHHSFRLFQMDVKSAFLNGPIKEEVYVEQPPGFEDERYPDHVCKLSKALYGLKQAPRAWYECLRDFLIANAFKVGKADPTLFTKTCDGDLFVCQIYVDDIIFGSTNKKSCEEFSRVMTQKFEMSMMGELNYFLGFQVKQLKDGTFISQTKYTQDLLKRFGMKDAKPAKTPMGTDGHTDLNKGGKSVDQKAYRSMIGSLLYLCASRPDIMLSVCMCARFQSDPKECHLVAVKRILRYLVATPCFGIWYPKGSTFDLIGYSDSDYAGCKVDRKSTSGTCQFLGRSLVSWNSKKQTSVALSTAEAEYVAAGQCCAQLLWMRQTLRDFGYNLSKVPLLCDNESAIRMAENPVEHSRTKHIDIRHHFLRDHQQKGDIEVFHVSTENQLADILTKPLDEKTFCRLRSELNVLDSRNLD

SEQ ID NO: 10048 - protein, 1808 aa, Zea mays
  Clone ID: TF_ZmC4916_417.pep
MDPKGKGIVINDKEKESFVNEPKDDKSNDSGSGHRRKDGKKKKTRRIKEIVYYDSDESSSSQKDDDNDYRKTINSNFSFDYSRIPHSSNSHLLSIPLGKPPHFDGEDYGFWSHKMRSHLFSLHPSIWEIVENGMKFDSSDSPMLINEQIHRNAQATTVLLASLCREEYNKVSGLDNAKQIWDTLKISHEGNDVTMLTKMELVEGELGRFAMIRGEEPTQTYNRLKTLVNKIRSYGSTRWTDHDVVRLMLRSFTVLDPHLVNNIRENPRYTKMSPEEILGKFVSGRMMIKEARYVDDALNGPIHEPQPIALKASRSKEALPSKVAQIEAAGLNDEEMALIIKRFKTALRGRKEHPNKTKTKGKRSCFKCGKIGHFIANCPDNDSDQEKKSGKWEKKKNYKKAKGEAHIGKEWDSDCSSSDSDNEGLAATAFNKSTLFPNERHTCLMAKEKKVCTRNSTYASSSEDESSDEDEVDYSCLFKGLDRSKIDKINELIDALNEKNILLEKQEDSLYEEHDKFVEAQKSLALEIKRNEMLACEVSTCHDSISNLKSINDDLNAKLVEANKSNSCVKHVEICTRCKDVDINACSEHLVYISKLSDEVASLNAQLKTSKSDFEKLKFARDAYTVGRHPSIKDGLGFKREAKNLTSHKAPIPAKEKGKAPMATSAKRNHAFLYHDKRQTRSYDAFDSYVCDSHAMFAPSSSYVYDRNVTRRNVVPKRNVANVHRKVVNEPSTIYCALNASFAICRKDRKVIARKLGAKCKGDKTCIWVPKEIVTNLVGPNKSWVYASGGSSWIIDSGCTNHMTGEKKMFTSYVKNKDSQDSIIFGDGNQGKVKGLDVFVFRRSDGSLAFKGVLDGKLYLVDFAKEEAGLDACLIAKTSMGWLWHRRLAHVGMKNLHKLLKGEHVIGLTNVQFEKDRPCAACQAGKQVGGAHHSKNVMTTSRPLELLHMDLFGPIAYLSIGGSKYGLVIVDDFSRFTWVFFLQDKSETQGTLKRFLRRAQNEFELKVKKIRSDNGSEFKNLQVEEFLEEEGIKHEFSAPYTPQQNGVVERKNRTLIDMARTMLGEFKTSECFWSEAVNTACHAINRVYLHRLLKKTSYELLTGNKPNVSYFRVFGSKCYILVKKGRTSKFAPKAVEGFLLGYDSNTKAYRVFNKSSGLVEVSSDVVFDETNGSPREQVVDLDDVDEEDVPTAAIRTMAIGEVWPQEQNERDQPSSSTMVHPPTQDDEQVHQQEACDQGGAQDDHVMEEEAQPAPPTQVRAVIQRDHPVDQILGDISKGVTTRSRLVNFCEHYSFVSSIEPFRVEEALLDPDWVLAMQEELNNFKRNEVWTLVPRPKQNVVGTKWVFRNKQDEHGVVTRNKARLVAKGYAQVAGLDFEETFAPVARLESIRILLAYVAHHSFRLFQMDVKSAFLNGPIKEEVYVEQPPGFEDERYPDHVCKLSKALYGLKQAPRAWYECLRDFLITNAFKVGKADPTLFTKTCDGDLFVCQIYVDDIIFGSTNKKSCEEFSRVMTQKFEMSMMGELNYFLGFQVKQLKEGTFISQTKYTQDLLKRFGMKDAKPAKTPMGTDGHTDLNKGGKSVDQKAYRSMIGSLLYLCASRPDIMLSVCMCARFQSDPKECHLVAVKRILRYLVATPCFGLWYPKGSTFDLIGYSDSDYAGCKVDRKSTSGTCQFLGRSLVSWNSKKQTSVALSTAEAEYVAAGQCCAQLLWMRQTLRDFGYNLSKVPLLCDNESAIRMAENPVEHSRTKHIDIRHHFLRDHQQKGDIEVFHVSTENQLADIFTKPLDEKTFCRLRSELNVLDSQNLD

SEQ ID NO: 10049 - protein, 1656 aa, Zea mays
  Clone ID: TF_ZmC4916_438.pep
MDPKGKGIVINDKDKESFVNEPKDDKPTDSGSGHKRRDGKKKKTRRIKEIVYYDDSDESSSSQKDNDDNDYDKRKTVNSNFSFDYSCIPHSSNAHLLSIPIGKPPHFDGEDYGFWSQKMRSHLFSLHPSIWEIVESGMKFDSSDSPMFINEQIHKNAQTTTVLLASLCREEYNKVSGLDNAKQIWDTLGISHEGNDVTMLTKMELVEGELGRFAMIRGEDPTQTYNRLKTLINKIRSYGSTRWTDHDIVRLMLRSFTVLDPHLVNNIRENPRYTKMSPEEVLGKFVSGRMMIKEARYMDDAMNGPIHEPQPIALKASRSKEALPSKVAQVEAAGLNDEEMALIIKRFKTVLKGRKEHPKKTKTKGKRSCFKCGKIGHFIANCPDNDSDQEQGNKREKKNYKKAKGEAHLGKEWDSDCSSSDSDNEGLAATAFNKSSLFPNKHHTCLMAKEKKGLDRTKVDKINELIDALNDKNRCKDFDVDACSKHLASISKLNDEVASLNAQLKTSKSDFDKLKFARDAYTIGRHPSIKDGLGFKREAKNLTSHKAPISAKEKGKAPMASSTKKNHAFMYHDRRYSRNAYRSYDTYDSYAMTASSSHVVHDRDMPRRNVVPRKINEPSTIYHACNASFAICRKDKKVYASGGSSWIIDSGCTNHMTGEKKMFTSYVKNKDPQDSIIFGDGNQGKVKGFGKIAISNEHSISNVFLVESLGYNLLSVSQLCNMGYNCLFTNIDVSVFRRCDGSLAFKGVLDDKLYLVDFAKEEAGLDACLIAKTCMGWLWHRRLAHVGMKNLHKLLKGEHVIGLTNVHFEKDRPYAACQAGKQVGGAHHSKNVMTTSRPLELLHMDLFGTVAYLSIGGSKYGLVIVDDFSRFTWVFFLQDKSKTQGTLKRFLRRAQNEFELKRKNRMLIDMARTMLGEFKTPEHFWSEAGNTACHAINRVYLHRLLKKTSYELLTGNKPNVSYFRVFGSKCYILVKKGRNSKFAPKAVEGFLLGYDSNTKAYRVFNKSSGLVEVSSDVVFDETNGSPTEQVVDFDDVDEEEVPTAAIRTMAIGDVRPQEQDERDQPSSSTMVHPPTQDDEQEACDQGGAQDDHVMEEEAQLAPPTQVRAMIQRDHLVDQILGDISKGVTTRSRLVNFCEHYSFVSFIEPFRVEEALLDPDWVLAMQEELNNFKRNEVWTLVPRPKQNVVGTKWVFRNKQDEHGVVTRNKARLVAKGYAQVAGLDFEETFAPVARLESIRILLAYAAHHSFRLFQMDVKSAFLNEPIKEEVYVEQPPGFEDERYPDHVCKLSKALYGLKQAPRAWYECLRDFLIANAFKVGKADPTLFTKTCDGDLFVCQIYVDDIIFGSTNQKSCEEFSRVMTQKFEMSMMGELNYFLGFQVKQLKDGTFISQTKYMQDLLKRFEMKDAKPAKTLMRTDRHTDLNKGGKSVDQKAYRSMIGSLLYLCASRPDIMLSVCMCARFQSDPKECHLVAVKRIFRYLVATPCFGIRYPKGSTFDLIGYSDSDYVGCKVDRKSTLGTCQFLGRSLVSWNSKKQTFVALSTAEAEYVAAGQCCAQLLWMRQTLRDFRYNLSKVPLLCDNESAIRMAENPVEHSRTKHIDIRHHFLRDHQQKGDIEVFHVSTENQLADIFTKPLDEKTFCRLRSELNVLDSRNLD

SEQ ID NO: 10050 - protein, 1838 aa, Zea mays
  Clone ID: TF_ZmC4916_444.pep
MDPKGKGIVINDKEKESFVNEPKDDKSNDSGSGHRRKDGKKKKTRRIKEIVYYDSDESSSSQKDDDNDYRKTVNSNFSFDYSCIPHSSNSHLLSIPLGKPPHFDGEDYGFWSHKMRSHLFSLHPSIWEIVENGMKFDSSDSPMFINEQIHKNAQATTVLLASLCRDEYNKVSGLDNAKQIWDTLKISHEGNDITMLTKMELVEGELGRFAMIRGEEPTQTYNRLKTLINKIRSYGSTRWTDHDVGRLMLRSFTVLDPHLVNNIRENPRYTKMTPEEVLGKFVSGRMMIKEARYVDDALNGPINEPQPIALKATRSKEALPSKVAQVEAAGLNNEEMALIIKRFKTALKGRKGQPNKTKTKEKRSCFKCGKIGHFIANCPDNESDQEKEDKREKKKHYKKAKGEAHIGKEWDSDCSSSDSDNEGLAATAFNKSTLFPNERHTCLMAREKKVCTQNPTYASFSEDESSDDDEIDYSCLFKGLDRSKIDKINELIDALNDKNRLLEKQEDLLYEEHDKFVEAQKSHALEVKRNEMLSCELSSCHETISSLKSINDDLNAKLEKSSKLTSCVEHVVICTRCKDFNVDACSEHLECISKLNDEVASLNAQLKTSKSDLDKLKFARDAYTIGRHPSIKDGLGFKREVKNLTSHKAPISAKEKGKAPMASSVQKNHAFMYHDRRQTRNAYRSFNAYDDFDSHVMFASSSSYVHDRNVDRRNVVHNMPRRNVVNVPRKVMNGPSTIYHALNASFAICRKDRKIVARKLGAKCKGDKTCIWVPKEICANLVGPNMSWVYASGGSSWIIDSGCTNHMTGEKKMFTSYVRNKDSQDSIIFGDGNQGKVKGLVESLGYNLLSVSQLCNMGYNCLFTNVDVSVFRRSDGSLAFKGVLDGKLYLVDFAKEEAGLDACLIAKTSMGWLWHRRLAHVGMKNLHKLLKGEHVIGLTNVHFEKDRPCAACQAGKQVGGAHHSKNVMTTSRPLELLHMDLFGPVAYLSIGGSKYGLVIVDDFSRFTWVFFLQDKSETQGTLKRFLRRAQNEFELKVKKIRSDNGSEFKNLQVEEFLEEEGIKHEFSAPYTPQQNGVVERKNRTLIDMARTMLGEFKTPERFWSEAVNTACHAINRVYLHRLLKKTSYELLTGNKPNVSYFRVFGSKCYILVKKGRNSKFAPKAVEGFLLGYDSNTKAYRVFNKSSGLVEVSSDVVFDETNGSPREQVVDCDDVDEEDVPTAAIRTMAIGEVRPQEQDERDQPSSSTMVHPPTQDDEQVHHQEACDQGGAQDDHVMEEEAELAPPTQVRAMIQRDHPVDQILGDISKGVTTRSRLVNFCEHYSFVSSIEPFRVEEALLDPDWVLAMQEELNNFKRNEVWTLVPRPKQNVVGTKWVFRNKQDEHGVVTRNKARLVAKGYAQVAGLDFEETFAPVARLESIRILLAYAAHHSFRLYQMDVKSAFLNGPIKEEVYVEQPPGFEDERYPDHVCKLSKALYGLKQAPRAWYECLRDFLIVNAFKVGKADPTLFTKTCDGDLFVCQIYVDDIIFGSTNQKSCEEFSRVMTQKFEMSMMGELNYFLGFQVKQLKDGTFISQTKYTQDLLKRFGMKDAKPAKTPMGTDGHTDLNKGGKSVDQKAYRSMIGSLLYLCASRPDIMLSVCMCARLQSDPKECHLVAVKRILRYLVATPCLGLWYPKGSTFDLVGYSDSDYAGCKVDRKSTSGMCQFLGRSLVSWNSKKQTSVALSTAEAEYVAAGQCCTQLLWMRQTLRDFGYNLSKVPLLCDNESAIRMAENPVEHSRTKHIDIRHHFLRDHQQKGDIEVFHVSTENQLADIFTKPLDEKTFCRLRSELNVLDSRNLD

SEQ ID NO: 10051 - protein, 1616 aa, Zea mays
  Clone ID: TF_ZmC4916_448.pep
MSPEEVLGKFVSGRMMIKEARYVDDALNGPIHEPQPIALKATRSKEALPSKVAQIEAVGLNDEEMALIIKRFKTVLKGHKGQPSKTKAKGKRSCFKCGKIGHFIANCPDNDSDQEQGNKREKKKNYKKAKGEAHLGKEWDSDCSSSDSDNEGLAATAFNKSTLFPNECHTCLMAREKKVCTRNSTYASSSEDESSDEDEVDYSCLFKGLDRTKVDKINELIDALNDKNILLEKQEDLLYEEHDKFVEAQRSHALEVKRNEILSCELSSCHDTISKLRSINDDLNAKLEIASKSTSCVENVVACSRCKDINIDVYSEHLACISKLNEEVASLNAQLKTSKSDFEKLKFARDAYTVGRHPSIKDGLGFKKEAKNLTSHKAPISAKEKGKAPMASSTKRNHAFIYNDRRQTRNACRSYNAYDDFNSHAMFASSSSFMHGRNMPRKNIIHAPKKVVNEPSTIYCALNASFAICRKDKKIVARKLGAKCKGDKTCIWVPKDICTNLVGPNMSWVYASRGSSWIIDSGCTNHMTGEKKMFTSYVKNKDSQDSIIFGDGNQGKGDVGVPPKPRLSLPSVAVAEPEPRGRARRKSFGRGQGGVRALGSGEAEFRRLPGVSPSPSPGVGRSGVRRLPGLSPSPSPGVGRSGVRRLPGLSPSPSPGVGRSGVRRLPGLSPSPSPGVGRSGVRRLPGLSPSLSPGVGRSGVRRLPVGVAQAALSFCQTGQWSGGVTAVTSALPRARVRIEVSGHLCVKCPCNLVSRCGDLVKVASERSQGLGRAGDVSAIKRGPRARRKSLEDKSETQGTLKRFLRRAQNEFELKVKKIRSDNGSEFKNLQVEEFLEEEGIKHEFSAPYTPQQNGVVERKNRTLIDMARTMLGEFKTPECFWTEAVNTACHAINRVYLHRLLKKTSYELLTGNKPNVSYFRVFGSKCYILVKKGRNSKFAPKAVEGFLLGYDSNTKAYRVFNKSSGLVEVSSDVVFDETNGSPREQVVDLDDVDEEDVPTAAMRTMAIGDVRPQEHLERDQPSSSTMVHPPTQDDEQVHQQEACDQGGAQVDHVMEEEAQPAPPTQVRAMIQRDHPVDQILGDISKGVTTRSRLVNFCEHYSFVSSIEPFRVEEALLDPDWVLAMHEELNNFKRNEVWTLVPRPKQNVVGTKWVFRNKQDEHGVVTRNKARLVAKGYAQVAGLDFEETFAPVARLESIRILLAYAAHHSFRLYQMDVKSAFLNGPIKEEVYVEQPPGFEDERYPDHVCKLSKALYGLKQAPRAWYECLRDFLIVNAFKVGKADPTLFTKTCDGDLFVCQIYVDDIIFGSTNQKSCEEFSRVMTQKFEMSMMGELNYFLGFQVKQLKDDTFISQTKYTQDLLKRFGMKDAKPAKTPMGTDGHTDLNKGGKSVDQKAYRSMIGSLLYLCASRPDIMLSVCMCARFQSDPKECHLVAVKRILRYLVATPCFGLWYPKGSTFDLVGYSDSDYAGCKVDRKSTSGTCQFLGRSLVSWNSKKQTSVALSTAEAEYVAAGQCCAQLLWMRQTLRDFGYNLSKVPLLCDNESAIRMAENPVEHSRTKHIDIRHHFLRDHQQKGDIEVFHVSTENQLADIFTKPLDEKTFCRLRSELNVLDSRNLD

SEQ ID NO: 10052 - protein, 693 aa, Zea mays
  Clone ID: TF_ZmC4916_451.pep
MDPKGKGIVINDKEKESFVNEPRDDKSNNSGSGHKRKDGKKKKTRRIKEIVYYDSDESSSSQKDDDNDYRKTVNSNFSFDYSRIPHSSNSHLLSIPLGKPPHFDGEDYGFWSHKMRSHLFSLHPSIWEIVENGMKFDSSDSPMFINEQIHKNAQATTVLLASLCREEYNKVSGLDNAKQIWDTLKISHEGNDITMLTKMELVEGELGRFAMIRGEEPTQTYNRLKTLINKIRSYGSTRWTDHDVVRLMLRSFTVLDPHLVNNIRENPRYTMMTPEEVLGKFVSGRMMIKEARYVDDALNGPLHESQPIALKATRSKEALPSKVAQIEAAGLNDEEMALIIKRFKTVLKGHKGQPSKTKTKGKRSCFKCGKIGHFIANCPDNDSDQEQGNKREKKKNYKKAKGEAHLGKEWDSDCSSSDSDNEGLAATAFNKSALFPNEHHTCLMAREKKVITHNANTYDSSSDDESSEDEIDYSSLFKGLDRTKIAKINELIDALNEKDRILEKQEDLLYEEHDKFVSAQNSLALEVKRNGILSGELSTCNETISSLKGEIDVLTAKLEVASNSCVENITICTRCKDFDVNACSEHLVSISKLNDEVASLNAQLKTSKSEVDKIKFARDAYTVGRHPSIKDGLGFKREAKNLTSHKAPILVKEKGKAPMASSAKRNHAFLYHDKRHARNAYNNFDSHAYDSHA

SEQ ID NO: 10053 - protein, 1360 aa, Zea mays
  unsure (1)..(1360): unsure at all Xaa locations
  Clone ID: TF_ZmC4916_456.pep
MDPKGKGIVINDKEESFVNEPREDMSNDSGSGHIRKDGKKKKTRRIKEIVYYDSDESTSSQKDDDHNEYERKKPVNSNFSFDYSRIPQSTNAHLLSIPLGKPPHFDGEDYGFWSHKMRSHLFSLHPSIWEIVESGMHFDSTDSPMFINEQIHKNAQATTVLLASLCRDEYHKVSGLDNAKQIWDTLKISHEGNDVTLLTKMELVEGELGRFAMIRGEEPTQTYNWLKTLINKIRSYGSTRWTDHDVVRLMLRSFTVLDPHLVNNIRENPRYTKMSPEEVLGKFVSGRMMIKEARYVDDALNGPIHEPQPTALKATRSKEALPSKVAQVEAAGLNNEEMALIIKRFKTALKGRKGQPSKTKTKEKRSCFKCGKIGHFIANCPDNESDQEKGNKREKKKHYKKAKGEAHIGKEWDSDCSSSDSDNEGLATTAFNKSSLFPNERHTCLMAREKKVSTHDTSTYASSSEDESSDDDEIDYSCLFKGLDRSKINKINELIDALNDKNRLLEKQEDLLYEEHDKFVSAQNSLALEIKRNEILSSELSTCHESISKLKSVNDDLNAKLEIASKSTSCVEIVETCNRCKDFDIDACSEHLVLISKLNDELSSLNAQLKTSKSNFDKLKFARDAYTIGRHPSIKDGLGYKKEAKNLTSHKAPISAKEKGKAPYGYSSYVHDRNVGRRNVVHNMPRRNVVNRKVYASGGSSWIIDSGCTNHMTGEKKMFTSYVKNKDSQDSIIFGDGNQGKDKSENQGTLKRFLRRAQDEFELKVKKIRSDNGSEFKNLQVEEFLEEEGIKHEFSAPYTPQQNGVVERKNRTLIDMARTMLGEFKTPERFWSEAVNTACHAINRVYLHRILKKTSYELLTGNKPNVSYFRIFGSKCYILVKKGRNSKFAPKAVEGFLLGYDSNTKAYRVFNKSSGLVEVSSDVVFDETNGSPREQVVDLDDVDEEDVPTAAIHTMAIGDVRPQEHLEQDQPSSSTMVHPPTQGDEQVPQVEAHDPGGAQDVQVEEEEAPQAPLTQVRATIQRDHPVDQILGDISKGVTTRSRLVNFCEHYSFVSSIEPFRVEEALLDPDWVLAMQEELNNFKRNEVWTLVPRPKXNVVGTKWVFRNKQDDHGVVTRNKARLVAKGYAQVAGLDFEETFAPVARLESICILLAYAAHHSFRLYQMDVKSAFLNGPIKEEVYVEQPPGFEDERYPDHVCKLSKALYGLKQAPRAWYECLRDFLIANAFKVGKADPTLFTKTCDGDLFVCQIYVDDIIFGSTNQKSCEEFSRVMTQKFEMSMMGELNYFLGFQVKQLKDGTFISQTKYTQDLLKRFGMKDAKPAKTPMGTDGHTDLNKGXRPDIMLSVCMCARFQSDPKECHL

SEQ ID NO: 10054 - protein, 1843 aa, Zea mays
  Clone ID: TF_ZmC4916_458.pep
MDPKGKGMVVDNNEKESIFNEPKNDKSTDLGSSHKRKDGKKKKTRRIKEIVYYDSDESSSSQKDDDHNDYEQRKPVNSNFSFDYSRIPQSSNSHLLSIPLGKPPHFDGEDYGFWSHKMRSHLFSLHPSIWEIVDSGMHFNSSDSPIFINEQIHKNAQATTVLLASLCRDEYNKVSGLDNAKQIWDTLKISHEGNDATLLTKMELVEGELGRFAMIRGEEPTQTYNRLKTLINKIRSYGSTRWTDHDVVRLMLRSFTVLDPHLVNNIRENPRYTKMSPEEVLGKFVSGRMMIKEARYVDDALNGPINEPQPFALKATRSKEVLPSKVAQIEAAGLNDEEMALIIKRFKTVLKGHKGQPSKTKTKGKRSCFKCGKIGHFIANCPDNDSDQEQGNKREKKKNYKKAKGEAHLGKEWDSDCSSSDSDNEGLAATAFNKSTLFPNERHTCLMAREKKVCTRNSTYASSSEDESSDEDEVDYSCLFKGLDRSKIDKINELIDALNEKNILLEKQEDLLYEEHDKFVEAQKSLALEIKRNEMLACELSTCHDSISKLKSINDDLNAKLVEAHKSNSCVEHVEICTRCKDVDINACSEHLVSISKLNDELASLNAQLKTSKSDFDKLKFARDAYMVGRHPSIKDGLGFKREAKNLTSHKTPISTKEKGKAPMANSVKKNHAFMYYDRRYSRNAFRGHDVFDSHAYDSYAMTASSSHVMHGRNMLRRNVVHQMPIKNITHAPRKVVNELSTIYCALNASFAICRKDKKIVARKLGARCKGDKTCIWVPKDICANLVGPNMSWVYASGGSSWIIDSGCTNHMTGEKKMFTSYVKSKDSQDSIVFGDGNQGKVKGLVESLGYNLLSVSQLCNMGYNCLFTNVDVSVFRRSDDSLAFKGVLDGKLYLVDFAKEEAGLDACLIAKTCMGWLWHRRLAHVGMKNLHKLLKGEHVIGLTNVKFEKDRPCAACQAGKQVGGAHHSKNVMTTSRPLELLHMDLFGPVAYLSIGGSKYGLVIVDDFSRFTWVFFLQDKSETQGTLKRFLRRAQNEFELKVKKIRSDNGSEFKNLQVEEFLEEEGIKHEFSAPYTPQQNGVVERKNRTLIDMARTMLGEFKTPERFWSEAVNTACHAINRVYLHRLLKKTSYELLTGNKPNVSYFRVFGSKCYILVKKVRNSKFAPKAVEGFLLGYDSNTKAYRVFNKSSGLVEVSSDVVFDETNGSPREQVVDLDDVDEEDVPTAAIRTMAIGDVRPQEQEEQDQPSSSTMVNPPTQDDEQVHQQEACDQGGAQDDHVMEEEAQLAPPTQVRTMIQRDHPVDQILGDISKGVTTRSRLVNFCEHYSFVSSIEPFRVEEALLDPDWVLAMQEELNNFKRNEVWTLVPRPKQNVVGTKWVFRNKQDEHGVVTRNKARLVAKGYAQVAGLDFEETFAPVARLESIRILLAYAAHHSFRLYQMDVKSAFLNGPIKEEVYVEQPPGFEDERYPDHVCKLSKALYGLKQAPRAWYECLRDFLIVNAFKVGKADPTLFTKTCDGDLFVCQIYVDDIIFGSTNQKSCEEFSRVMTQKFEMSMMGELNYFLGFQVKQLKDGTFISQTKYTQDLLKRFGMKDAKPAKTPMGTDGHTDLNKGGKSVDQKAYRSMIGSLLYLCASRPDIMLSVCMCARFQSDPKECHLVAVKRILRYLVATPCLGLWYPKGSTFDLVGYSDSDYAGCKVDRKSTSGTCQFLGRSLVSWNSKKQTSVALSTAEAEYVAAGQCCAQLLWMRQTLRDFGYNLSKVPLLCDNESAIRMAENPVEHSRTKHIDIRHHFLRDHQQKGDIEVFHVSTENQLADIFTKPLDEKTFCRLRSELNVLDSRNLD

SEQ ID NO: 10055 - protein, 1696 aa, Zea mays
  Clone ID: TF_ZmC4916_459.pep
MDPKGKGIVINDKEKESFVNELKDDKPTDSGSGHRRKEGKKKKTRRIKEIVYYDDSDESTSSQKDDDHNDYEQRKPVNSNFSFDYSRIPQSSNSHLLSIPLGKPPHFDGEDYGFWSHKMRSHLFSLHPSIWEIVDSGMHFNSSDSPIFINEQIHKNAQATTVLLASLCRDEYNKVSGLDNAKQIWDTLKISHEGNDATLLTKMELVEGELGRFAMIRGEEPTQTYNRLKTLINKIRSYGSTRWTDHDVVRLMLRSFTVLDPHLVNNIRENPRYTKMSPEEILGKFVSGRMMIKEARYVDDALNGPIHEPQPIALKASRSKEALPSKVAQIEAAGLNDEEMALIIKRFKTALRGRKEHPNKTKTKGKRSCFKCGKIGHFIANCPDNDSDQEKKSGKWEKKKNYKKTKGEAHIGKEWDSDCSSSDSDNEGLAATAFNKSTLFPNERHTCLMAKEKKVCTRNSTYASSSEDESSDEDEVDYSCLFKGLDRSKIDKINELIDALNEKNILLEKQEDLLYEEHDKFVEAQKSLALEIKRNEMLACEVSTCHDSISNLKSINDDLNAKLVEANKSNSCVKHVEICTRCKDVDINACSEHLVYISKLSDEVASLNAQLKTSKSDFEKLKFARDAYTVGRHPSIKDGLGFKREAKNLTSHKAPIPAKEKGKAPMATSAKRNHAFLYHDKRQTRSYDAFDSYVYDSHAMFAPSSSYVYDRNVTRRNVVPKRNVANVHRKVVNEPSTIYCALNASFAICRKDRKVIARKLGAKCKGDKTCIWVPKEIVTNLVGPNKSWVYASGGSSWIIDSGCTNHMTGEKKMFTSYVKNKDSQDSIIFGDGNQGKVKGLDVSVFRRSDGSLAFKGVLDGKLYLVDFAKEEEKSETQGTLKRFLRRAQNEFELKVKKIRSDNGSEFKNLQVEEFLEEEGIKHEFSAPYTPQQNGVVERKNRTLIDMARTMLGEFKTPECFWTEAVNTACHAINRVYLHRLLKKTSYELLTGNKPNVSYFRVFGSKCYILVKKGRNSKFAPKAVEGFLLGYDSNTKAYRVFNKSSGLVEVSSDVVFDETNGSPREQVVDCDDVDEEDVPTAAIRTMAIGEVRPQEQDKRDQPSSSTMVHPPTKDDEQVPQVEALDQGGAQDDQVMEEEAQPAPPTQVRAMIQRDHPVDQILGDISKGVTTRSRLVNFCEHYSFVSSIEPFRVEEALLDPDWVLAMQEELNNFKRNEVWTLVPRPKQNVVGTKWVFRNKQDEHGVVTRNKARLVAKGYAQVAGLDFEETFAPVARLESIRILLAYAAHHSFRLYQMDVKSAFLNGPIKEEVYVEQPPGFEDERYPDHVCKLSKALYGLKQAPRAWYECLRDFLLANAFKVGKADPTLFTKTCDGDLFVCQIYVDDIIFGSTNQKSCEEFSRVMTQKFEMSMMGELNYFLGFQVKQLKDGTFISQTKYTQDLLKRFGMKDAKPAKTPMGTDGHTDLNKGGKSVDQKAYRSMIGSLLYLCASRPDIMLSVCMCARFQSDPKECHLVAVKRILRYLVATPCFGLWYPKGSTFDLVGYSDSDYAGCKVDRKSTSGTCQFLGRSLVSWNSKKQTSVALSTAEAEYVAAGQCCAQLLWMRQTLRDFGYNLSKVPLLCDNESAIRMAENPVEHSRTKHIDIRHHFLRDHQQKGDLEVFHVSTENQLADIFTKPLDEKTFCRLRSELNVIDSRNLD

SEQ ID NO: 10056 - protein, 900 aa, Zea mays
  unsure (1)..(900): unsure at all Xaa locations
  Clone ID: TF_ZmC5924_1.pep
MDPKGKGMVINDKEKESFINEPKDDKPTDSGSSHKKKDGKKKRRIKKIVYYDSDESSSSQRDDDDEKKKTVNSNFSFDYSRISQTSNAHLLSIPLASLCRDEYHKVSGLDNAKQIWDTLKISHEGNDVTMLTKMELVEGELGRFAMIRGEEPTQTYNRLKTLVNKIRSYGSTRWTDHDVVHQNDARGNTRKVXSGRMMIKEARYVDEALNGPIHEPQTVALKATSSSEALPSKVAQVEAARLNEDEMALIIKRFKTALKGRKEHPNKSKTKGKRSCFKCGKIGHFIANCPDNDSDQEQGKSRKWEKKKAYKKVKGEAHLGKEWDSDCSSSDSDNEGLAASAFNKSALFPNEHHTCLMAKEKKVNTRSLDRTKIDKINELIDALNEKNRLLEKQEDLLYEEHDKFVSVQKSLALEVKRNEMLSCELSTCHESISSLKSVNDDLNAKLEVANKSSSCIEHVVICNRCKEFNVDACVEHLTSIAKLNGEVASLNAQLKTSKNDFDKLKFARDAYTIGRHPSIKDGLGFKREAKNLTSQGAPIFNKEKGKAPMTSNSQKNHAFMYHDRKYSRNSHYNRSYNVFDSHAMIASSSSFVHDRDMPKKNIIHRRRNFVSHAPSKVCNGSTTVFHACNAKFVLSCINEKSWVYASGGSSWIIDSGCTNHMTGEKKMFTSYVKNKDSQDSIIFGDGNQGKVKGLGKIAISSEHSISNVFLVESLGYNLLSVSQLCNMGYNCLFTNVDVSIFRRCDGSLAFKGVLDDKLYLVDFSKEEAGLDACLIAKTSMGWLWHRRLAHVGMKNLHKLLKGEHVLGLTNVSFDKDRPFSASHDSPWISLTCTMHSCFPTRSIQCQRGVAKTAANHTCKCKRVSEVNQYNMNPLVLLNLVTTSLMASTVKRRTPQKNNSN

SEQ ID NO: 10057 - protein, 239 aa, Zea mays
  unsure (1)..(239): unsure at all Xaa locations
  Clone ID: TF_ZmC5924_19.pep
MTPEEILGKFVSGRMMIKEARCVDDALNGPIHEPQTVALKATRSKEMLPSKVAQVEAAGLNEEEMALIIKRFKTALRGRKEHPNKTKTKGKRSCFKCGKIGHFIANCPDNDSDQEQGNKRKKKKAYKKAKGEAHLGKEWDSDCSSSDSDNXGLAATAFNKSALFPNEHHTCLMAREKKVSTRDTSTYTSSSDEESSDDEIDYSCLFKGLDRTNIDKINELIDALNGKNRLLEKQEISCI

SEQ ID NO: 10058 - protein, 410 aa, Zea mays
  Clone ID: TF_ZmC5924_5.pep
MELVEGELGRFAMIRGEEPTQTYNRLKTLVNKIRSYGSTRWTDHDVVRLMLRYTKMTPEEILGKFVSGRMMIKEARYVDEALNGPMSIHEPQTVALKATSSREALPSKVAQVEAAGLNEDEMALIIKRFKTTLKGCKEHPNKSKTKGKRSCFKCGKIGHFIANCPDNDSDQEQVKNGKRENKKVYKKAKGEAHIGKEWDSDCSSSDSDDEELAATAFNKSSLFPNEHHTCLMAKEKKVYASGGSSWIIDSGCTNHMTGEKKMFTSYAKNKDSQDSIIFGDGNQGKDKSETQGTLKRFLRRAQNEFELKVKKIRSDNGSEFKNLQVEEYLEEEGVKHEFSAPYTPQQNGVEELNNFKRNEVWTLVPRPKQNVVGTKWVFRNKQDEHGVVTRNKARLVAKGYAQVAGCFKWM

SEQ ID NO: 10059 - protein, 419 aa, Zea mays
  Clone ID: TF_ZmC951_381.pep
MDPKGKGIVINDKEKESFVNEPKDDKSNDSGSGHRRKDGKKKKTRRIKEIVYYDSDESSSSQKDDDNDYRKTTVLRGHKGQPSKTKTKGKRSCFKCGKIGHFIANCPDNDSDQEKGNKREKKKHYKKAKGEAHLGKEWDSDCSSSDSDNEGLAATAFNKSTLFPNERHTCLMAREKKSKSDRQSGLAKGATANSAPPDPRARTRAKTRKTANSAPPDPRARTRAKTRKTANSAPPDPRARTRAKTRKTANSAPPDPRARTRAKTRKTANSAPPDPRARTRAKTRKTANSAPPDPRARTRAKTRKTANSAPPGPRARTRAKTRKTTKLRLARPQGSDSALASAERLPTRPTPGLGLRPGLGRTTSASPDPLARARPRQQKADSTSASEETPRRRKQDNVSRDSTAPTAVPPSGSAAPPTA

SEQ ID NO: 10060 - protein, 1114 aa, Zea mays
  Clone ID: TF_ZM3613.C2.o2.fg.pep
MDPKGKRMVINDKEKECFINEPKDDKPTDSGSSHKKKDGKKKRRIKKIVYYDSDESSSSQRDDDDEKKKTDTLKISHEGNDATMITKMELVECELGRFAMIRGEEPTQTYNRLKTLVNKIRSYGSTRWTDHDVVRLMLRSFTVLDPHLVNSIRENPRYTKMMLEEILGKFVSGRMMIKETRYVDEALNGPMPIHEPQTVALKETSSREGLPSKAAQVEAAGLNEDEMALIIKRFKTALKGRKEHPNKSNTKGKRSCFKCGKIGHFIANCPDNDSDQEQGKNGKRENKKIYKKAKGEAHLGKEWDSDCSSSDSDDEGLAATAFNKSSLFPNEHHTCLMAKEKKVSTQNTIAYASSSDDESSDDEVDYASLFKGLDRTKIDKINELIDALNEKNRLLEKQEDLLYEEHDKFVSVQKSLALEVKRNEMLSCELSTCHESISSLKSVNDDLNAKLEVANKSSSCIEHVVICNRCKDFNVDACVEHLTSIAKLNGEVASLNAQLNTSKNNFDKLKFARGAYTIGRHPSIKDGLGFKREAKNLTSQRAPIFNKEKGKAPMANSSQKNHAFIYDRKFSRNAYHNRSCNAYDSHAMIASSSSVVHDVSVFRRCDGLLAFKGVLDGKLYLVDFSKEEAGLNACLIAKTSMGCLWHRRLAHVGMKNLHKLLKGEHVLGLTNVTFEKDRPCAACQAGKQVGSSHHSKNVMTTSRPLELLHMDLFGPVAYLSIGGSKYGLVIVDDFSCFTWVFFLQDKTETQGTLKCFLRRAQNEFELKVKKIRSDNGSEFKNLQVEEYLEEEGIKHEFSAPYTPQQNGVVERKNRTLIDMARTMLGEFKTPERFWSEAVNTACHAINRVYLHRLLKKTSYELLTGNKPNVSYFCVFGSKCYILVKKGRNSKFAPKAVEGFLLGYDSNTKAYRVFNKSSGLVEFSSDVVFDETNGSPREQVDLDDVDEEYVPTAAIRTMAIGDVRPQEQKEQDQPYSSTMVHPPTQTDDQVQEEACDQGGAQDDHVMEEEAPQAPPTQVRETIQRNHPVDQILGDISKGVTTRSRLANFCEHYSFISSIEPFRVEEALVDPDWVLAMQEELNSFKRNEVWTLGVGHAGRAQPLDFIVLTLNQVLWL

SEQ ID NO: 10061 - protein, 643 aa, Zea mays
  Clone ID: TF_ZM3613.C7.o2.fg.pep
MDPKGKGIVINDKEKESFVNEPKDDKPTDSGSGHRRKEGKKKKTRRIKEIVYYDDSDESSSSQKDNDDNDYRKTVNSNFSFDYSRIPHSSNSHLLSIPLGKPPHFDGEDYGFWSHKMRSHLFSLHPSIWEIVENGMKFDSSDSPMFINEQIHKNAQATTVLLASLCRDEYNKVSGLDNAKQIWDTLKISHEGNDVTLLTKTELVEGELGRFAMIRGEEPTQTYNRLKTLINKIRSYGSTRWTDHDVVRLMLRSFTVLDPHLVNNIRENPRYTKMSPEEVLGKFVSGRMMIKEARYVDDALNGPINEPQPLALKATRSKEALPSKVAQIEAAGLNDEEMALIIKRFKTVLKGHKGQPSKTKTKGKRSCFKCGKIGHFIANCPDNDSDQEQGNKREKKKNYKKAKGEAHIGKEWDSDCSSSDSDNEGLAATAFNKSSLFPNEHHTCLMAREKKVITRNASTYDSSSDESSDDDDIDYSSLFKGLDRTKIDKINELIDALNEKDRLLEKQEDLLYEEHDKFVEAQKSYALEVKRNEMLSFELSTCHETISTLKGVNNDLNAKLEVANKSNSCVEHVEICTRCKDFDIDACSEHLVSISKLNDELASLNAQLKTSKNDFDKLKFARDAYTIGRHPSIKDGLGFKRGS

SEQ ID NO: 10062 - protein, 707 aa, Zea mays
  Clone ID: TF_ZM3615.C2.o1.fg.pep
MDPKGKGIVINDKEKESFVNEPRDDKSNDSGSGHRRKDGKKKKTRHIKEIDYYDSDESTSSQKDDDHNDYEKKKPINSNFSFDYSRIPHSSSSHLLSIPLGKPPHFDGEDYEFWSHKMRSHLFSLHPSIWEIVESGMHFDSSDSPMFINEQIHKNAQATTVLLASLCRDEYNKVSGLDNAKQIWDTLKISHEGNDVTLLTKMELVEGELGRFAMIRGEEPTQTYNRLKTLINKIRSYGSTRWTDHDVVRLMLRSFTVLDPHLVNNIRENPRYTKMSPEEVLGKFVSGRMMIKEARYVDDALNGSINEPQPLALKATRSKEALPNKVAQIEAAGLNDEEMALIIKRFKTALKGRKGQPSKTKAKGKRSCFKCGKIGHFIANCPDNESDQELESKREKKKHYKKAKGEAHIGKEWDSDCSSSDSDNEGLAATAFNKSSLFPNEHHTCLMAKEKKVCTRESTTYSSSDDDSSDDNEIDYSSLFKGLDRIKIGKINELIDALNEKDRLLEKQEDLLYDEHDKFVEAQKSHALEVKRNEMLSCELSSCHETISSLRSINDDLNAKIASKSNSCVENVITCTRCKDINIDAYSEHLACISKLNEEVASLNTQLETSKSDFDKLKFARDAYTVGRHPSIKDELGFKREAKNLTSHKAPISAKEKGKAPMAKSTKRNHAFMYHDRRQTRNAYRSYNAYDDFNSHAMVASSSSYMH

SEQ ID NO: 10063 - protein, 1660 aa, Zea mays
  Clone ID: TF_ZM3619.C10.o1.fg.pep
MDPKGKGIVINDKEKESFVNEPKDDKPTDSGSGHRRKEGKKKKTRRIKEIIYYDDSDESTSSQKDDDNDYKKTVNSNFSFDYSRIQHSSNSHLLSIPLGKPPHFDGEDYGFWSHKMRSHLFSLHPSIWEIVENGMKFDSSDSPMFINEQIHKNAQATTVLLASLCREEYNKVSGLDNAKQIWDTLKISHEGNDITMLTKMELVEGELGRFAMIRGEEPTQTYNRLKTLINKIRSYGSTRWTDHDVVRLMLRSFTVLDPHLVNNIRENPRYTMMTPEEVLGKFVSGRMMIKEARYVDDALNGPLHESQPIALKATRSKESLPSKVAQVEAAGLNDEEMALIIKRFKTVLKGHKGQPSKTKTKGKRSCFKCGKIGHFIANCPDNDSDQEQGNKREKKKNYKKAKGEAHLGKEWDSDCSSSDSDNEGLAATAFNKSSLFPNEHHTCLMAREKKVITRNASTNDSSSDESSDDDDIDYSSLFKGLDRNKIDKINELIDALNEKDKLLEKQEDLLYEEHDKFVEAQRSHALEVKRNEMLSCELSSCHETISKLKSINDDLNAKLVEANRSNSCVEHVEICTRCKDVDINACSEHLVSISKLNDELASLNTQLKTSKSEFEKLKFARDAYTIGRHPSIKDGLGFKREAKNLTSHKTPISTKEKGKAPMANSVKKNHAFMYYDRRYSRNTFRGHDVFDSHAYDSYAMTASSSHVMHGRNVLRRNVVHQMPRRNVVRKVVNEPSTIYCALNASFAICRKDKKIVARKLGAKCKGDKTCIWVPKNICANLAGPNMSWVYASGGSSWIIDSGCTNHMTGEKKMFTSYVKNKDSQDSIIFGDGNQGKDKSETQGTLKRFLRRAQNEFELKVKKIRSDNGSEFKNLQVEEFLEEEGIKHEFSAPYTPQQNGVVKRKNRTLIDMARTMLGEFKTPECFWTEAVNTACHAINMVYLHRLLKKTSYELLTGNKPNVSYFRVFGSKCYILLKKGRNSKFAPKAVEGFLLGYDSNTKAYRVFNKSSGLVEVSSDVVFDETNGSPREQVIDCDVDEEDVPTTAIRTMAIGDVRPQEQYERDQPSSSTKVHPPTQDDEQVHQQEACDQGGAQVDNVMEEEAQPAPPTQVRAMIQRDHPVDQILGDISKGVTTRSRLVNFCEHYSFVSSIEPFRVEEALLDPDWVLAMQEELNNFKRNEVWTLVPRPKQNVVGTKWVFRNKQDEHGVVTRNKARLVAKGYAQVAGLDFEETFAPVARLESIRILLAYAAHHSFRLYQMDVKSAFLNGPIKEEVYVEQPPGFEDERYPDHVCKLSKALYGLKQAPRAWYECLRDFLIANAFKVGKADPTLFTKTCDGDLFVCQIYVDDIIFGSTNQKSCEEFSRVMTQKFEMSMMGELNYFLGFQVKQLKDGTFISQTKYTQDLLKRFGMKDAKPAKTPMGTDGHTDLNKGGKSVDQKAYRSMIGSLLYLCASRPDIMLSVCMCARFQSDPKECHLVAVKRILRYLVATPCFGLWYPKGSTFDLVGYSDSDYAGCKVDRKSTSGTCQFLGRSLVSWNSKKQTSVALSTAEAEYVAAGQCCAQLLWMRQTLRDFGYNLSKVPLLCDNESAIRMAENPVEHSRTKHIDIRHHFLRDHQQKGDIEVFHVSTENQLADIFTKPLDEKTFCRLRSELNVLDSRNLD

SEQ ID NO: 10064 - protein, 522 aa, Zea mays
  Clone ID: TF_ZM3639.C3.o2.fg.pep
MDSKGKGIVINDKEKESFVNEPRDDKSNDSGSGHRRKDGKKKKTRRIKEIVYYDSDESTSSQKDDDHNEYERKKPVNSNFSFDYSRIPQSTNAHLLSIPLGKPPHFDGEDYGFWSHKMRSHLFSLHPSIWEIVENGMHFDSTDSPMFINEQIHKNAQATTVLLASLCRDEYHKVSGLDNAKQIWDTLKISHEGNDVTLLTKMELVEGELGRFAMIRGEEPTQTYNRLKTLINKIRSYGSTRWTDHDIVRLMLRSFTVLDPHLVNNIRENPRYTKMSPEEVLGKFVSGRMMIKEARYVDDALNGPINEPQPLALKATRSKEALPSKVAQVEAAGLNNEEMALIIKRFKTALKGRKGQPSKTKAKGKRSCFKCGKIGHFIANCPDNDSDQEHGSKKERKKHYKKAKGEAHIGKEWDSDCSSSDSDNEGLAATAFNKSSFFPNERHTCLMAREKKVSNQNNVTYDSSSDDESSDEEIDYSSLFKGMDRTKVDKINELIDALNEKDRLLEKQEDLLYEEHDKFVEA

SEQ ID NO: 10065 - protein, 634 aa, Zea mays
  Clone ID: TF_ZM3639.C5.o5.fg.pep
MDPKGKGIVINDKEKESFVNEPRDDKSNDSGSGHRRKDGKKKKTRHIKEIVYYDSDESTSSQKDDDHNEYERKKPVNSNFSFDYSRIPQSTNAHLLSIPLGKPPHFDGEDYGFWSHKMRSHLFSLHPSIWEIVESGMHFDSTDNPMVINEQIHKNAQATTVLLASLCRDEYHKVSGLDNAKQIWDTLKISHEGNDVTLLTKMELVEGELGRFAMIRGEEPTQTYNRLKTLINKIRSYGSTRWTDHDVVRLMLRSFTVLDPHLVNNIRENPRYTKMSPEEVLGKFVSGRMMIKEARYVDDALNGPIHEPQPIALKATRSKEALPSKVAQVEAAGLNNEEMALIIKRFKTALKGRKGQPSKTKTKEKRSCFKCGKIGHFIANCPDNESDQEKGNKREKKKHYKKAKGEAHIGKEWDSDCSSSDSDNEGLAATAFNKSSLFPNERHTCLMAREKKVSNQNNVTYDSSSDDESSDEEIDYSSLFKGLDRTKVDKINELIDALNEKDRLLEKQEDLLYEEHDKFAEAQKSYALEVKRNEVLSSELSSCHETIAKLKSFNDDLNARLEVASKSNSCVEIVGTCNRCKDFDIDACSEHLVSISKLNDELASLNAQLKTSKSNFDKLKFARDAYTIGRHPLN

SEQ ID NO: 10066 - protein, 325 aa, Zea mays
  Clone ID: TF_ZM3642.C4.o6.fg.pep
MDPKGKRMVINDKEKECFINEPKDDKPTDSGSSHKKKDGKKKRRIKKIVYYDSDESSSSQRDDDDEKKKTDTLKISHEGNDATMITKMELVECELGRFAMIRGEEPTQTYNRLKTLVNKIRSYGSTRWTDHDVVRLMLRYTKMMLEEILGKFVSGRMMIKETRYVDEALNGPMPIHEPQTVALKETSSREGLPSKAAQVEAAGLNEDEMALIIKRFKTALKGRKEHPNKSNTKGKRSCFKCGKIGHFIANCPDNDSDQEQGKNGKRENKKIYKKAKGEAHLGKEWDSDCSSSDSDDEGLAATAFNKSSLFPNEHHTCLMAKEKKV

SEQ ID NO: 10067 - protein, 668 aa, Zea mays
  Clone ID: TF_ZM3650.C1.o1.fg.pep
MDPKGKGIVINDKEKESFVNEPKDDKPTDSGSGHRRKEGKKKKTRRIKEIVYYDDSDGSSSSQKDDDNDYRKTIHKNAQATTVLLASLCRDEYNKLVEGELGRFAMIRGEEPTQTYNRLKTLINKIRSYGSTRWTDHDVVRLLLRSFTILDPHLVNNIRENPRYTKMSPEEVLGKFVSGRMMIKEARYVDDALNGPIHEPQPIALKATRSKEALPSKVAQVEAAGLNNEEMALIIKRFKTALKGRKGQPSKTKTKEKRSCFKCGKIGHFIANCPDNESDQEKGDKREKKKHYKKAKGEAHIGKEWDSDCSSSDSDNEGLAATAFNKSTLFPNERHTCLMAREKKVSTRDTTYVSSSDDESSDEEIDYSSLFKGLDRNKIDKINELIDALNEKDRLLEKQEDLLYEEHDKFIEAQKSYALEVKRNEMLSFELSTCHETISTLKGVNNDLNAKLEVANKSNSCVEHVVICTRCKDFDIDACSEHLVSISKLNDELASLNAQLKTSKNDLDKLKFARDAYTIGRHPSIKDGLGFKREAKNLTSHKAPIPAKEKGKAPMASSVQKNHAFMYHDKRQTRNAYRSYNAYDDFDSHDMFVSSSSHMHGRNMSRRNAIHHCDTPVSPRVSLKQPNQKPSFYVNQSKHEHQNNLSEKEFTKYILKSVMIKTIETFER

SEQ ID NO: 10068 - protein, 860 aa, Zea mays
  Clone ID: TF_ZM3660.C5.o2.fg.pep
MDPKGKGIVINDKEKESFVNEPRDDKSNDSGSGHRRKDGKKKKTRRIKEIVYYDSDESTSSQKDDDHNDYEKKKPVNSNFSFDYSRIPHSSSSHLLSIPLGKPPHFDGEDYGFWSHKMRSHLFSLHPSIWEIVESGMHFDSSDSPMFINEQIHKNAQATTVLLASLCRDEYNKVSGLDNAKQIWDTLKISHEGNDVTLLTKMELVEGELGRFAMIRGEEPTQTYNRLKTLINKIRSYGSTRWTDHDVVRLMLRSFTVLDPHLVNNIRENPRYTKMSPEEVLGKFVSGRMMIKEARYVDDALNGPINEPQPLALKATRSKEALPNKVAQIEAAGLNDEEMALIIKRFKTALKGRKGQPSKTKAKGKRSCFKCGKIGHFIANCPDNESDQELGSKREKKKHYKKAKGEAHIGKEWDSDCSSSDSDNEGLTATAFNKSSLFPNEHHTCLMAKEKKVCTRESTTYSSSDDDSSDDNEIDYSSLFKGLDRIKIGKINELIDALNEKDRLLEKQEDLLYDEHDKFVEAQKSHALEVKRNEMLSCELSSCHETISSLRSINDDLNAKIASKSNSCVENVITCTRCKDINIDAYNEHLACISKLNEEVASLNTQLETSKSDFEKLKFARDAYTVGRHPSIKDGLGFKREAKNLTSHKAPISAKEKGKAPMAKSTKRNHAFMYHDRRQTRNAYRSYNAYDDFNSHAMVASSSSYMHGRNMSRRNTIYHVPRKNIIHAPRKVVNESSTIYCALNASFAICRKDRKIVARKLGAKCKGDKTCIWVPKDICTNLVGPNMSWVYASGGSSWIIDSGCTNHMTGEKKMFTSYVKNKDSQDSIIFGDGNQGKDKSETQGTLKRFLRRAQNEFELK

SEQ ID NO: 10069 - protein, 213 aa, Zea mays
  Clone ID: TF_ZM3970.C3.o1.fg.pep
MDPKGKGIVINDKEKEFFVNEPRDDKSNDSGSGHSRKDGKKKKTRRIKEIVYYDSDESTSSQKDDDHNEYERKKPATRSKEALPSKVAQVEAAGLNNEEMALIIKRFKTVLKGRKGQPSKTKTKEKRSCFKCGKIGHFIANCPDNESDQEKGNKREKKKHYKKAKGEAHIGKEWDSDCSSSDSDNEGLAATAFNKSSLFPNERHTCLMAREKK

SEQ ID NO: 10070 - protein, 711 aa, Zea mays
  Clone ID: TF_ZM4163.C9.o2.fg.pep
MIQVSQDHLFTLPLGALIVNEPKDDKPTDLGSGHKRKDGKKKKTRRIKEIVYYDDNDEFTSSQKDNGDNDYDKRKMVNSNFSFDYSRIPQSTNAHLLSIPLGKPPHFDGEDYRFWSHKMCSHLFSLHPSIWEIVENGMKFDSSDSPIFINEQIHKNAQATTVLLASLCRDEYHKVSGLDNAKQIWDTLKISHEGNDVTLLTKMELVEGELGRFAMIRGEEPTQTYNRLKTLINKIRSYGSTRWTDHDVVRLMLRSFTVLDPHLVNNICENPRYTKMSPEEVLGKFVSGRMMIKEARYVDDALNGPIHEPQPIALKATRSKEALPSKVAQVEAAGLNDEEMALIIKRFKTALKGHKGQPSKTKTKGKRSCFKCGKIGHFIANCPDNDSDQEQGNKREKKKAYKKAKGEAHLGKEWDSHCSSSDSDDERLAATAFNKSSLFPNERHTCLMAKEKKVCNRNNAAYESSSDDESSDEEINYSSLFKGLDRNKVDKINELIDALNEKDRLLEKQEDLLYEEHDKFVEAQKSHALEVKRNEMLSCELSSCHETISSLRSINDSLNAKLEIASKSNSCVEHVMICNRCKDFDTDACSEHLVSISKLNDELASLNAQLKTSKSDFDKLKFARDAYTIGRHPSIKDGLGFKREAKNLTSHKAPISIKEKGKAPMAKSAKKNHAFMYHYRRQSYRSCNAYDAFDSHAMCASSSSYMHGRDM

SEQ ID NO: 10071 - protein, 834 aa, Zea mays
  Clone ID: TF_ZM4290.C9.o7.fg.pep
MDPKGKGIVINDKEKESFVNEPKDDKSNDSGSGHRRKDGKKKKTRRIKEIVYYDSDESSSSQRDDDHNDYEQRKPVNSNFSFDYSRIPQSSNSHLLSIPLGKPPHFDGEDYGFWSHKMRSHLFSLHPSIWEIVDSGMHFNSSDSPIFINEQIHKNAQATTVLLASLCRDEYNKVSGLDNAKQIWDTLKISHEGNDATLLTKMELVEGELGRFAMIRGEEPTQTYNRLKTLINKIRSYGSTRWTDHDVVRLMLRSFTVLDPHLVNNIRENPRYTKMTPEEVLGKFVSGRMMIKEARYVDDALNGPINEHQPLALKATRSKEALPSKVAQIEAAGLNDEEMALIIKRFKTVLKGHKGQPSKTKTKGKRSCFKCGKIGHFIANCPDNDSDQEQGNKREKKKNYKKAKGEAHIGKEWDSDCSSDSDNEGLAATAFNKSSLFPNERHTCLMAREKKVITRNDVTYDSSSDDESSDDEIDYSSLFKGLDRNKIDKINELIDALNEKDRLLEKQEDLLYEEHDKFVEAQKSLALEIKRNEMLSCELSTCHDSISSLKSINDDLNAKLEKSSKSTSCVEHVVICTRCKDFDIDACSEHLVSISKLNDEVASLNAQLKASKSEFDKLKFARDAYTVGRHPSIKDGLGFKREAKNLTSHKAPIYVKEKGKAPMASSAKKNHAFLYYDRRHARNAYNDFDSHAYDSYAMTASSSHVVHDRKVYASGGSSWIIDSGCTNHMTGEKKMFTSYVKNKDSQDSIIFGDGNQGKMCLSLEEVMVLGAFVLRRYFRIQNYEYGARPGRSLNQTKVECSRSCAQGSFGAMAEGGTDLKMKRLRGPRQISISR

SEQ ID NO: 10072 - protein, 1544 aa, Zea mays
  Clone ID: TF_ZM4318.C3.o5.fg.pep
MDPKGKGIVINDKEKESFVNEPKDDKSNDSGSGHRQKDGKKKKTRRIKEIVYYDSDESSSSQKDDDNDYRKTVNSNFSFDYSRIPHNSNSHLLSIPLGKPPHFDGEDYRFWSHKMRSHLFSLHPSIWEIVENGMKFDSSDSPMLINEQIHRNAQATTVLLASLCREEYNKVSGLDNAKQIWDTLKISHEGNDVTMLTKMELVEGELGRFAMIRGEEPTQTYNRLKTLVNKIRSYGSTRWTDHDVVRLMLRSFTVLDPHLVNNIRENPRYTKMSPEEVLGKFVSGRMMIKEARYVDDALNGPIHEPQPIALKATRSKEALPSKVAQVEAAGLNNEEMALIIKRFKTALKGRKGQPSKTKTKEKRSCFKCGKIGHFIANCPDNESDQEKGDKREKKKHYKKAKGEAHLGKEWDSDCSSSDSDNEGLAATAFNKSSLFPNERHTCLMAREKKVCTQNSTYASSSEDESSDEDEVDYSCLFKGLDRTKVDKINELIDALNEKNILLEKQEDLLYEEHDKFVEAQRSHALEVKRNEMLSCELSSCHDAISKLRSINDDFNAKLEIASKSTSCVENVVACTKCKDINIDACSEHLACISKLNEEVASLNAQLNTSKSDFEKLKFARDAYTVGRHPSIKDGLGFKREAKNLTSHKAPISAKEKGKAPMASSTKRNHAFIYHDRRQTRNAYRSYNPYDDFNSHAMFASSSSCMHGRNMPRKNAMPRKNIIHALGKKDRKAYASGGSSWIIDSGCTNHMTGEKKMFTSYVKNKDSQDSIIFGDGNQGKDKSETQGTLKRFLRRAQNEFELKVKKIRSDNGSEFKNLQVEEFLEEEGIKHEFSAPYTPQQNGVVERKNRTLIDMARTMLGEVYLHRLLKKTSYELLTGNKPNVSYFRVFGSKCYILVKKGRNSKFAPKAVEGFLLGYDSNTKAYRVFNKSSGLVEVSRDVVFDETNGSPREQVVDCDDVDEEDVPTAAIRTMAIGEVRPQEQDEQDQPSSSTMVLPPTQDDEQVHQQEACDQGGAQVDHVMEEEAQPAPQTQVRAMIQRDHPVDQILGDISKGEELNNFKRNEVWTLVPRPKQNVVGTKWVFRNKQDEHGVVTRNKARLVAKGYAQVAGLDFEETFAPVARLESIRILLAYVAHHSFRLFQMDVKSAFLNGPIKEEVYVEQPPGFEDERYPDHVCKLSKALYGLKQAPRAWYECLRDFLIVNAFKVGKADPTLFTKTCDGDLFVCQIYVDDIIFGSTNQKSCEEFSRVMTQKFEMSMMGELNYFLGFQVKQLKDGTFISQTKYTQDLLKRFGMKDAKPAKTPMGTDGHTDLNKGGKSVDQKAYRSMIGSLLYLCASRPDIMLSVCMCARFQSDPKECHLVAVKRILRYLVATPCFGLWYPKGSTFDLVGYSDSDYAGCKVDRKSTSGTCQFLGRSLVSWNSKKQTSVALSTAEAEYVAAGQCCAQLLWMRQTLRDFGYNLSKVPLLCDNESAIRMAENPVEHNRTKHIDIRHHFLRDHQQKGDIEVFHVSTENQLADIFTKPLDEKTFCRLRSELNVLDSRNLD

SEQ ID NO: 10073 - protein, 1576 aa, Zea mays
  Clone ID: TF_ZM4325.C1.o23.fg.pep
MDPKGNGIVINDKEKESFVNEPKDDKPIDSGSGHKRKDGKKKKTRRIKEIIYYDDSDESSSSQKDDYDYEKRKTVNSNFSFDYSRIPQSTNAHLLSIPLGKPPHFDGEDYGFWSHKMRSHLFSLHPSIWEIVESGMKFDSTDSPMFINEQIHKNAQATTVLLASLCRDEYHKVSGLDNAKQIWDTLKISHEGNNITMLTKMELVEGELGRFAMIRGDEPTQTYNRLKTLVNKIRSYGSTRWTDHDIVRLMLRSFTVLDPHLVNNIRENPRYTKMSPEEILGKFVSGRMMIKEARYVDDELNGPIQEPQTIALKATRSKEALPSKVAQVEAAGLNDEEMALIIKRFKTTLKGRKGQPSKTKTKGKRSCFKCGKIGHFIANCPDNDSDQEQGNKREKKKAYKKAKGETHLGNEWDSDCSSSDSDNEGLAATAFTKSSLFPNERHTCLMAKDKKVCTRDNTTYASSSEDESSDDDEIDYSCLFKGLDRTKVDKINELIDALNDKNRLLEKQEDLLYEEHDKFVEAQKSLALEIKRNEMLSCELSTCHETISSLKDVNNDLNAKLEVANRSNSCVEHVVICTRCKDFNVDACSEHLVSIAKLNDELASLNAQLKTSKSEFDKLKFARDAYTIGRHPSIKDGLGFKREAKNLTSHKAPISAKEKGKTPMASSAKKTMLSCIMIGDILGMPIEVMMLLILMPCLLLVLPICMVYASGGSSWIIDSGCTNHMTGEKRMFSSYVKNKDPQDSIIFGDGNQGKVKGLDVSVFRRCDGSLAFKGVLDDKLYLVDFAKEEASLDACLIAKTCMGWLWHRRLAHVGMKNLHKLLKGEHIDLVQLVKQDKSETQGTLKRFLRRAQNEFELKVKKIRSDNGSEFKNLQVEEFLEEEGIKHEFSAPYTPQQNGVVERKNRTLIDMARTMLGEFKTPERFWSEAVNTACHAINRLYLHRLLKKTLYELLTGNKPNVSYFRVFGSKCYILVKKGRNSKFAPKAVEGFLLGYDSNTKAYRVFNKSSGLVEVSSDVVFDETNGSPREQVVDLDDVDEEDVPTAAIRTMAIGDVRPQEQTEQDQPSSSTMVHPPTQDDEQPFRVEEALLDLDWVLAMQEELNNFKRNEVWTLVPCPKQNVVGTKWVFRNKQDEHEVVIRNKARLVAKGYAQVTGLDFEETFAPVARLESIRILLAYAAHHSFRLFQMDVKSAFLNGPIKEEVYVEQPPGFEDERYPDHVCKLSKALYGLKQAPRAWYECIRDFLIANAFKVGKADPTLFTKTCDGDLFVCQIYVDDIIFGSTNQKSCEEFSRLNYFLGFQVKQLKDGTFISQTKYTQDLLKRFGMKDTKPAKTPMGTDGHTDLNKGGKSVDQKAYLSMIGSLLYLCASRPDIMLSVCMCARFQSDPRECHLVAVKRILRYLVATPCFGIWYPKGSTFDLIGYSDSDYAGCKVDRKSTSGTCQFLGRSLVSWNSKKQTSVALSTAEAEYVAAGQCCAQLLWMSQTLWDFGYNLSKVPLLCDNESAIRIADNPVEHSRTKHIDIRHHFLRDHQQKGDIEVFYINTENQLADIFTKPLDEKTFCRLRSELNVLDSRNLD

SEQ ID NO: 10074 - protein, 1318 aa, Zea mays
  Clone ID: TF_ZM4326.C1.o5.fg.pep
MEPKGKGIVINDKEKESFVNELKDDKPTDSGSGHRRKEGKKKKTRRIKEIVYYDDSDESTSSQKDDDHNDYEQRKPVNSNFSFDYSRIPQSSNSHLLSIPLGKPPHFDGEDHGFWSHKMRSHLFSLHPSIWEIVDSGMHFNSSDSPIFINEQIHKNAQATTVLLASLCRDEYNKVSGLDNAKQIWDTLKISHEGNDATLLTKIELVEGELGRFAMIRGEEPTQTYNRLKTLINKIRSYGSTRWTDHDVVRLMLRSFTVLDPHLVNNIRENPRYTKMSPEEVLGKFVSGRMMIKEARYVDDALNGPINEPQPFALKASRSKEALPSKVAQIEAVGLNDEEMALIIKRFKTVLKGHKGQPSKTKTKGKRSCFKCGKIGHFIANCPDNDSDQEMGNKREKKKHYKKAKGEAHLGKEWDSDCSSSDSDNEGLAATAFNKSTLFPNERHTCLMAREKKVCTRNSTYASSSEDESSDEDEVDYSCLFKGLDRSKIDKINELIDALNEKNILLEKQEDLLYEEHDKFVEAQKSLALEIKRNEMLACEVSTCHDSISNLKSINDDLNAKLVEANKSNSCVEYVEICTRCKDIDINACSEHLVSISKLNDELASLNAQLKTSKSNFDKLKFARDAYTVGRHPSIKDGLGFKREAKNLTSHKAPIPTKEKGKAPMATSAKKNHAFLYHDRRQTRNAYRSYNEYDDFSHAMFASSSSYVHDRNVGRRDVVHNMPRRNVVNIPRKVNEPSTIYHALNASFAICRKDRKVYASGGSSWIIDSGCTNHMTGEKKMFTSYVKNKDSQDSIIFGDGNQGKVKGLGKIAISNEHSISNVFLVESLGYNLLSVSQLCNMGYNCLFKNVVGTKWVFRNKQDEHGVVTRNKARLVAKGYAQVAGLDFEETFAPVARIESIRILLAYATHHSFRLYQMDVKSAFLNGPIKEEVYVEQPPGFEDERYPDHVCKLSKALYGLKQAPRAWYECLRDFLIANAFKVGKADPTLFTKTCDGDLFVCQIYVDDIIFGSTNQKSCEEFSRVMTHKFEMSMMGKLNYFLGFQVKQLKDGTFISQTKYTQDLLKRFGMKDAKPAKTPMGTDGHTDLNKGGKSVDQKAYRSMIGSLLYLCASRPDIMLSVCMCARFQSDPKECHLVAVKRILRYLVATPCFGLWYPKGSTFDLVGYSDSDYAGCKVDRKSTSGTCQFLGRSLVSWNSKKQTSVALSTAEAEYAAGQCCAQLLWMRQTLRDFGYNLSKVPLLCDNESAIRMAENPVEHSRTKHIDIRHHFLRDHQQKGDIEVFHVSTENQLADIFTKPLDEKTFCRLRSELNVLDSRNLD

SEQ ID NO: 10075 - protein, 1815 aa, Zea mays
  Clone ID: TF_ZM4333.C5.o2.fg.pep
MDPKGKGIVINDKEKESFVNEPRDDKSNDSGSGHRRKDGKKKKTRRIKEIVYYDSDESTSSQKDDDHNEYEKKKPVNSNFSFDYSRIPQSTNAHLLSIPLGKPPHFDGEDYGFWSHKMRSHLFSLHPSIWEIVESGMHFDSTDSPMFINEQIHKNAQATTVLLASLCRDEYHKVSGLDNAKQIWDTLKISHEGNDVTLLTKMELVEGELGWFAMIRGEEPTQTYNRLKTLINKIRSYGSTRWTDHDVVRLMLRSFTVLDPHLVNNIRENPRYTKMSPEEVLGKFVSGRMMIKEARYVDNALNGPINEPQPLALKAMRNKEALPSKVAQVEAAGLNNEEMALIIKRFKTALKGRKGQPSKTKTKEKRSCFKCGKIGHFIANCPDNESDQEKGNKREKKKHYKKAKGEAHIGKEWDSDCSSSDSDNEGLAATAFNKSSLFPNERHTCLMAREKKVSTRDSTYASSSDNESSDDDDIDYSCLFKGLDRSKIDKINELIDALNDKNRLLEKQEDLLYEEHDKFVNAQNSYALEVKRNEVLSSELSSCHETITTLKSVNDDLNAKLEGASKNSCVEHVEICTRCKDFDVDTCSKHLVSISNLNDEVASLNAQLKTSKSEFDKLKFARDAYTIGRHPSIKDGLGFKREAKNLTSHKAPIPAKEKGKAPMATSAKRNHAFLYHDRKNSRNAFRSYDAFDSHAYDSCTMTASSSHVMHDRKVGRRNVIHNMPRRNVVNIPRKVNEPSTIYHALNASFAICRKDRNVIARKLGAKCKGDKTCIWVPKTIVTNLVGPNKSWVYASGGSSWIIDSGCTNHMTGEKKMFTSYVKNKDSQDSIIFGDGNQGKVKGLDVSVFRRRDGSLAFKGVLDGKLYLVDFAKEEAGLDACLIAKTSMGWLWHRRLAHVGMKNLHKLLKGEHVIGLTNVQFEKDRPCAACQAGKQVGGAHHSKNVMTTSRPLELLHMDLFGPVAYLSIGGSKYGLVIVDDFSRFTWVFFLQDKSETQGTLKRFLRRAQNEFELKVKKIRSDNGSEFKNLQVEEFLEEEGIKHEFSAPYTPQQNGVVERKNKTLIDMARTMLGEFKTPERFWSEAVNTACHAINRVYLHRLLKKTSYELLTGNKPNVSYFRVFGSKCYILVKKGRNSKFAPKAVEGFLLGYDSNTKAYRVFNKSSGLVEVSSDVVFDETNGSPREQVVDCDDVDEEDVPTAAIRTMAIGEVRPQEQDERDQPSSSTKVHPPTQDDEQVHQKEACDQGGAQDNQEMEEETQPAPPIQVRAMIQRDHPVDQILGDISKGVTTRSRLVNFCEHYSFVSSIEPFRVEEALLDPDWVLAMQEELNNFKRNEVWTLVPHPKQNVVGTKWVFRNKQDEHGVVTRNKARLVAKGYAQVAGLDFEETFAPVARLESIRILLAYAAHHSFRLYQMDVKSAFLNGPIKEEVYVEQPPGFEDERYPDHVCKLSKALYGLKQAPRAWYECLRDFLIVNAFKVGKADPTLFTKTCDGDLFVCQIYVDDIIFGSTNQKSCEEFSRVMTQKFEMSMMGELNYFLGFQVKQLKDGTFISQTKYTQDLLKRFGMKDAKPAKTPMGTDGHTDLNKGGKSVDQKAYRSMIGSLLYLCASRPDIMLSVCMCARFQSDPKECHLVAVKRILRYLVATPCFGLWYPKGSTFDLVGYSDSDYAGCKVDRKSTSGTCQFLGRSLVSWNSKKQTSVALSTAETEYVAAGQCCAQLLWMRQTLRDFGYNLSKVPLLCDNESAIRMAENPVEHSRTKHIDIRHHFLRDHQQKGDIEVFHVSTENQLADIFTKPLDEKTFCRLRSELNVLDSRNLD

SEQ ID NO: 10076 - protein, 1754 aa, Zea mays
  Clone ID: TF_ZM4352.C4.o3.fg.pep
MDPKGKGIVINDKEKESFVNEPKDDKSNDSGSGHRRKDGKKKKTRRIKEIVYYDSDESSSSQNDDDNDYRKTVNSNFSFDYSRIPHSSNSHLLSIPLGKPPHFDGEDYGFWSHKMRSHLFSLHPSIWEIVENGMKFDSSDSPMFINEQIHKNAQATTVLLASLCRDEYNKVSGLDNAKQIWDTLKISHEGNDITMLTKMELVEGELGRFAMIRGEEPTQTYNRLKTLINKIRSYGSTRWTDHDVVRLMLRSFTVLDPHLVNNIRENPRYTKMTPEEVLGKFVSGRMMIKEARYVDDALNGPINEHQPLALKATSSKVAQIEAAGLNDEEMALIIKRFKTVLKGHKGQPSKTKTKRKRSCFKCGKIGHFIANCPDNDSDQEQGNKREKKKNYKKAKDEAHIGKEWDSDCSSDSDNEGLAATAFNKSSLFPNERHTCLMAREKKVSTRDSTYASSSDNESSDDDDIDYSCLFKGLDRSKIDKINELIDALNDKNVLLEKQEDLLYEEHDKFVEAQKSLALEIKRNEMLSCELSTCHDSIASLKSKNDDLNAKLEKSSKSTSCVEHVEICTRCKDFDVDACSDHLVSISKLTEELASLNAQLKTSKNEFDKLKFARDAYTIGRHPSIKDGLGFKREAKNLTSHKTPIPAKEKGKAPMATSVKKNHAFLYHDRKNSRNAFRSYDAYDSHAYDSYAMTASSSHVVHDRNVGRRNVVNIPRKVNEPSTIYHVLNASFAIYRKDRKVYASGGSSWIIDSGCTNHMTGEKKMFTSYVKNNDSQDSIIFGDGNQGKVKGLVESLGYNLLSVSQLCNMGYNCLFTNEDVSVFRRSDGSLAFKGVLDGKLYLVDFAKEEAGLDACLIAKTSMGWLWHRRLAHVGMKNLHKLLKGEHVIGLTNVQFEKDRPCAACQAGKQVGGAHHSKNVMTTSRPLELLHMDLFGPVAYLSIGGSKYGLVIVDDFSRFTWVFFLQDKSETQGTLKRFLRRAQNEFELKVKKIRSDNGSEFKNLQVEEFLEEEGIKHEFSAPYTPHQNGVVERKNRTLIDMARTMLGEFKTPERFWSEAVNTACHAINRVYLHRLLKKTSYELLTGNKPNVSYFRVFGSKCYILVKKGRNSKFAPKAVEGFLLGYDSNTKAYRVFNKSSGLVEVSSDVVFDETNGSPREQVVDCDDVDEEDVPTAPIRTMAIGEMRPQEQDERDEPSSSTMVLPPTQDDEQEACDQGGAQDDHVMEEDAQPAPPTQVRAMIQRDHPVDQILGDISKGVTTRSRLVNFCEHYSFVSSIEPFRVEEALLDPDWVLAMQEELNNFKRNEVWTLVPRPKQNVVGTKWVFRNKQDEHGVVTRNKARLVAKGYAQVAGLDFEETFAPVARLESIRILLAYAAHHSFRLYQMDVKSAFLNGPIKEEVYVEQPPGFEDERYPDHVCKLSKALYGLKQAPRAWYECLRDFLIVNAFKVGKADPTLFTKTCNGDLFVCQIYVDDIIFGSTNQESCEEFSRVMTQKFEMSMMGELNYFLGFQVKQLKDGTFISQTKYTQDLLKRFGMKDAKPAKTPMGTDRHTDLNKGGKSVDQKAYRSMIGSLLYLCASRPDIMLSVCMCARFQSNPKECHLVAVKRILRYLVATTCFGLWYPKGSTFDLVGYSDSDYAGCKVDRKSTSGTCQFLGRSLVSWNSKKQTSVALSTAEAEYVAAGQCCAQLLWMRQTLRDFGYNLSKVPLLCDNESAIRMAENPVEHSRTKHIDIRHHFLRDHQQKGDIEVFHVSTEN

SEQ ID NO: 10077 - protein, 357 aa, Zea mays
  Clone ID: TF_ZM4398.C1.o6.fg.pep
MTPEEILGKFVSGRMMIKEARYVDDALNGPIHEPQAIALKATSSREALPSKVVQIEAAGLNEDEMALIIKRFKTALKGRKEHPNKSKTKGKRSCFKCGKIGHFIANCPDNDSDQEQEKKREKKKAYKKAKGEAHLGKEWDSDCSSSDSGNEGLATSAFNKSSLFPNEHHTCLMAKEKKVYASGGSSWIIDRGCTNHMTGEKKMFSSYIKNKDSQDSIIFGDGNQDKDKSKTQGTLKRFLRRAQNEFELKVKKIRSDNGSEFKNLQVEEYLEEEGIKHEFSAPYTPQQNGVMKKTFQRSQYVPRRLAMCDHRNKRSKINLLPQQWCIPQLKMMNRFINKRRVIKGEHKMIMLWRKKHN

SEQ ID NO: 10078 - protein, 517 aa, Zea mays
  unsure (1)..(517): unsure at all Xaa locations
  Clone ID: TF_ZM4447.C1.o26.fg.pep
MDPKGKGIAINDKEKESFVNEPKDDKPTDSGSGHRRKEGKKKKTRRIKEIVYYDDSDESTSSQKDDDHNDYERRKSVNSNFSFDYSRIPQSANAHLLSIPLGKPPHFDGEDYGFWSHKMRSHLFSLHPSIWEIVESGMHFDSSDSPMFINEQIHKNAQATTVLLASLCRDEYHKXYTKMSPEEVLGKFVSGRMMIKEXKTTLKGRKGQPSKTKAKGKRSCFKCGKIGHFIANCPDNESDQEHGSKREKKKNYKKAKGEAHLGKEWDSDCSSSDSDNEGIAATAFNKSSLFRNERHTCLMAREKKVCSRNSTYASSSEDESSDEDEIDYSCLFKGLDRTKVDKINELIDALNDKNRLLEKQEDLLYEEHDKFVEAQKSHALEVKRNEMLSCELSSCHETISSLRSINDDLNAKIEIASKSTTCVENVVICNRCKDFDIDACSEHIASIAKLNDEMASLNAQLKASKSDFDKLKFARDAYTIGRHPSIKDGLGFKREAKNLTSHKAPISAKEKGKAPMT

SEQ ID NO: 10079 - protein, 1351 aa, Zea mays
  unsure (1)..(1351): unsure at all Xaa locations
  Clone ID: TF_ZM4449.C5.o10.fg.pep
MDPKGKGMVVDNNEKESIFNEPKNDKDEYNKVSGLDNAKQIWDTLKISHEGNDITMLTKMELVEGELGRFAMIRGEEPTQTYNRLKTLINKIRSYGSTRWTDHDVVRLLLRSFTILDPHLVNNIRENPRYTKMSPEEVLGKFVSGQMMIKEARYVDDALNGPINEPQPLALKATRSKEALPSKVAQIEAAGLNDEEMALIIKRFKTVLKGHKGQPSKTKTKGKRSCFKCGKIGHFIANCPDNNSDQEQENKREKKKNYKKAKGEAHLGKEWDSDCSSSDSDNEGLAATAFNKSSLFPNERHTCLMAREKKVSTRDSTYASSSNDESSDDDDIDYSCLFKGLDRNKIDKINELIDALNEKDKLLEKQEDLLYEEHDKFVEAQRSHALEVKRNEMLSCELSSCHETISKLRSINDDLNAKLEIASKSTSCVENVMTCTRCKDINLDAYGEHLACISKLNEEVASLNAQLKTSKSDFEKLKFARDAYTVGRHPSIKDGLGFKREVKNLTSHKASISAKEKGKAPMASSVQKNHAFIYHDRRQSRNAYRSYNAYDDFDSHAMFASSSSYMHGRNMSRKNAIHHMPRKNVIHAPRKVVNEPSTIYCALNASFAICRKDKKIVARKLGAKCKGDKTCIWVPKDICTNLVGPNMSWVYASGGSSWIIDSGCTNHMTGEKKMFTSYVKNKDSQDSIIFGDGNQGKDKSETQGTLKRFLRRAQNEFELKVKKIRSDNGSEFKNLQVEEFLEEEGIKHEFSAPYTPQQNGVVERKNMTLIDMARTMLGEFKTPECFWSEAVNTACHAINXDEEDVPTAAIRTMAIGEVRPQEQDERDQPSSSTMVHSPTQDDEQXVEEALLDPDWVLAMQEELNNFKRNEVWTLVPRPKQNVVGTKWVFRNKQDEHGVVTRNKARLVAKGYAQVAGLDFEETFAPVARLESIRILLAYAAHHSFRLYQMDVKSAFLNGPIKEEVYVEQPPGFEDERYPDDVCKLSKALYGLKQAPRAWYECLRDFLIANAFKVGKADPTLFTKTCDGDLFVCQIYVDDIIFGSTNKKSCEEFSWVMTQKFEMSMMGELNYFLGFQVKQLKDGTFISQTKYTQDLLKRFGMKDAKPAKTPMGTDGHTDLNKGGKSVDQKAYRSMIGSLLYLCASRPDIMLSVCMCARFQSDPKECHLVAVKRILRYLVATPCFGLWYPKGSTFDLIGYSDSDYAGCKVDRKSTSGTCQFLGRSLVSWNSKKQTSVALSTAEAEYVAAGQCCAQLLWMRQTLRDFGYNLSKVPLLCDNESAIRMAENPVEHSRTKHIDIRHHFLRDHQQKEDIEVFHVSTENQLADIFTKPLDEKTFCRLRSELNVLDSRNLD

SEQ ID NO: 10080 - protein, 572 aa, Zea mays
  Clone ID: TF_ZM4449.C5.o3.fg.pep
MDPKGKGIVINDKEKESFVNEPRDDKSNDSGSGHRRKDGKKKKTRRIKEIVYYDSDESTSSQKDDDHNEYERKKPVNSNFSFDYSRIPQSTNAHLLSIPLGKPPHFDGEDYGFWSHKMRSHLFSLHPSIWEIVESGMHFDSTDSPMFINEQIHKNAQATTVLLASLCRDEYHKVSGLDNAKQIWDTLKISHEGNDVTLLTKMELVEGELGRFAMIRGEEPTQTYNRLKTLINKIRSYGSTRWTDHDVVRLMLRSFTVLDPHLVNNIRENPRYTKMSPEEVLGKFVSGRMMIKEARYVDDALNGPIHEPQPIALKATRIKEALPSKVAQVEAAGLNNEMALIIKRFKTALKGRKGQPSKTKTKEKRSCFKCGKIGHFIANCPDNESDQEKGNKREKKKHYKKAKGEAHIGKEWDSDCSSSDSDNEGLAATAFNKSSLFPNERHTCLMAREKKVSTHDTSTYASSSEDESSDDDEIDYSCLFKGLDRSKINKINELIDALNDKNRLLEKQEDLLYEEHDKFVSAQNSLALEIKRNEMLSSELSTCHESISKLKSVNDDLNAKLEIASKSTSCVV

SEQ ID NO: 10081 - protein, 1842 aa, Zea mays
  Clone ID: TF_ZM4451.C1.o17.fg.pep
MDPKGKGIVINDKEKESFVNEPRDDKSNDSGSGHRRKDGKKKKTRHIKEIVYYDSDESTSSQKDDDHNEYERKKPVNSNFSFDYSRIPQSTNAHLLSIPLGKPPHFDGEDYRFWSHKMRSHLFSLHPSIWEIVESGMHFDSTDSPMFINEQIHKNAQATTVLLASLCRDEYHKVSGLDNAKQIWDTLKISHEGNDVTLLTKMELVEGELGRFAMIRGEEPTQTYNRLKTLINKIRSYGSTRWTDHDVVRLMLRSFTVLDPHLVNNIRENPRYTKMSPEEVLGKFVSGRMMIKEARYVDDALNGPIHEPQPNALKATRSKEALPSKVAQVEAAGLNNEEMALIIKRFKTALKGRKGQPSKTKTKEKRSCFKCGKIGHFIANCPDNESDQEKGNKREKKKHYKKAKGEAHIRKEWDSDCSSSDSDNEGLAATAFSKSSLFPNERHTCLMAREKKVSTHNTSTYASSSEDESSDDDEIDYSCLFKGLDRSKINKFNELIDALNDKNRLLEKQEDLLYEEHDKFVSAQNSLALEIKRNEMLSSELSTCHESISKLKSVNVDLNAKLEIASKSTSCVEIVETCNRCKDFDIDGCSDHLVSISKLNEELASLNAQLKTSKNEFDKLKFARDAYTIGRHPSIKDGLGYKREAKDLTSHKAPISAKEKGKAPMASSTKRNHAFMYHDRRQTRNAYRSYNAYDDFDSHAMFASSSSYMHGRNMSRRNAIHHVPRKNIIHAPRKIVNEPSTIYCALNASFAICRKDRKIVARKLGAKCKGDKTCIWVPKDICTNLVGPNMSWVYASGGSSWIIDSGCTNHMTGEKKMFTSYVKNKDSQDSIIFGDGNQGKVKGLVESLGYNLLSVSQLCNMGYNCLFTNVDVSVFRRSDGSLAFKGVLDGKLYLVDFAKEEAGLDACLIAKTSMGWLWHRRLAHVGMKNLHKLLKGEHVIGLTNVQFKKDRPCAACQAGKQVGGAHHSKNVMTTSRPLELLHMDLFGPVAYLSIGGSKYGLVIVDDFSRFTWVFFLQDKSETQGTLKRFLRRAQNEFELKVKKIRSDNRSEFKNLQVEEFLEEEGIKHEFSAPYTPQQNGVVERKNRTLIDMARTMLGEFKTPERFWSEAVNTACHAINRVYLHRLLKKTSYELLTGNKPNVSYFRVFGSRCYILVKKGRNSKFAPKAVEGFLLGYDSNTKAYRVFNKSSGLVEVSSDVVFDETNGSPREQVVDYDDVDEEDVPTAAIRTMAIGEVRPQEQDERDQPSSSTTVHPPTQDVEQVLQKEACDQGGAQDDHVMEEEVQPAPPTQVRAVIQRDHPVDQILGDISKGVTTRSRLVNFCEHYSFVSSIEPYRVEEALLDPDWILAMQEELNNFKRNEVWTLVPRPKQNVVGTKWVFRNKQDEHGVVTRNKARLVAKGYAQVAGLDFEETFAPVARLESIRILLAYATHHSFRLYQMDVKSAFLNGPIKEEVYVEQPPGFEDERYPDHVCKLSKALYGLKQAPRAWYECLRDFLIANAFKVGKADPTLFTKTCNGDLFVCQIYVDDIIFGSTNQKSCEEFSRLMTQKFEMSMMAELNYFLGFQVKQLKDGTFISQTKYTQDLLKRFGMKDAKPAKTPMGTDGHTDLNKGGKSVDQKAYRSMIGSLLYLCASRPDIMLSVCMCARFQSDPKECHLVAVKRILRYLVATPCFGLWYPKGSTFDLVGYSDSDYAGCKVDRKSTSGTCQFLGRSLVSWNSKKQTSVALSTAEAEYVAAGQCCAQLLWMRQTLRDFGYNLSKVPLLCDNESAIRMAENPVEHSRTKHIDIRHHFLRDHQQKGDIEVFHVSTENQLADIFTKPLDEKTFCRLRSELNVLDSRNLD

SEQ ID NO: 10082 - protein, 1239 aa, Zea mays
  Clone ID: TF_ZM4455.C2.o3.fg.pep
MDPKGKGMVVNDKEKESFVNDPKDDKPTDSGMSHKRKDGKKKKTRRIKEIVYYDDSDESSSSQKDDDNDYEKKKTVNSNFSFDYSRIPQSSNTHFLSIPLGKPPHFDGEDYEFWSHKMRSHLFSLHPSICEIVENGMHFDSTDSPMFINEQNHKNAQATTVLLASLCREEYNKVSGLDNAKQIWDTLKISHEGNDVTMLTKMELVEGELGRFAMIRGEEPNQTYNRLKTLINKIRSYGSTRWTDHDVVRLLLRSFTVLDPHLVNNIRENPRYTKMSPEEVLGKFVSGRMMIKEARYVDDALNGPIHEPQTVALKETRSKEALPSKVAQVDATGLNEEEMALIIKLFKTALKGRKEHPNKNKTKGKRSCFKCGKIGHFIANCPDNNSDQEQDKKREKKKAYRKAKGEAHLGKEWDSDCSSSDSDNEGLAASAFNKSSLFPNEHYSSLFKGLDRNKIDKINKLIDALNDKNRLLEKQEDLLYEEHDKFVEAQKSLALEVKRNEMLSCELSTCHESISNLKSINDDLNAKLEVANRSNSCVEHVVICNRCKDFNVDACSEHLVSIAKLNDEVASLNAQLKTSKDEFDKLKFARDAYTIGRHPSIKDGLGFKREAKNLTSHKAPIPAKEKGKAPMTNSCQKNHAFMYHDRKFSRNAHYDRSFNAYNSNAMIASSSSIMHNRNLTRKNVMPRRNVVHVPSKVNNEPSTIYHACNASFAICRKDRKVIARKLGAKCKGDKTCIWVPKDIVTNLVGPNKSWVYASGGSSWIIDSGCTNHMTGEKKMFTSYIKNKDSQDSIIFGDRNQGKVKGLGKIAISSEHSISNVFLVESLGYNLLSVSQLCNMGYNCLFTNVDVSVFRRSDGSLAFKGVLDDKLYLVDFAKEEAGLDACLIAKTSMGWLWHRRLAHVGMKNLHKLLKGEHVIGLTNVTFEKDRPRAACQAGKQVGSSHHTKNVMTTSRPLELLHMDLFGPVAYLSIGGSKYGLVIVDDFSCFTWVFFLQDKSETQGTLKRFLRRAQNEFELKVKKIRSDNGSEFKNLQVEEYLEEEGIKHEFSAPYTPQQNGVVERKNRTLIDMARTMLGEFKTPERFWSEAVNTTCHAMNRVYLHRLLKKTSYELLTGNKPNVSYFRVFGSKCYILVKKGRNSKFAPKAVEGFLLGYDSNTKAYRVFNKSLGLVEVSSDVVFDETNGSPREQVVDLDDVDEEDVPTAAIRTMAIGDVRPQEQKEQDQPSSSTMVHPPTQDDK

SEQ ID NO: 10083 - protein, 627 aa, Zea mays
  Clone ID: TF_ZM4548.C4.o1.fg.pep
MDPKGKGIVINNKEKESFVNEPKDDKSNDSGSGHKRKDGKKKKTRRIKEIVYYDSDESSSSQKDDDHNDYEQRKPVNSNFSFDYSRIPQSSNSHLLSIPLGKPPHFDGEDYGFWSHKMRSHLFSLHPSIWEIVDSGMHFNSSDSPIFINEQIHKNAQATTVLLASLCREEYNKVSGLDNAKQIWDTLKISHEGNDVTMLTKMELVEGELGRFAMIRGEEPTQTYNRLKTLVNKIRSYGSTRWTDHDVVRLMLRSFTILDPHLVNNIRENPRYTKMSPEEVLGKFVSGRMMIKEARYVDDALNGPIHEPQPIALKATRSKEALPSKVAQVEAAGLNNEEMALIIKRFKTALKGRKGQPSKTKTKEKRSCFKCGKIGHFIANCPDNESDQEKGDKREKKKHYKKAKGEAHLGKEWDSDCSSSDSDNEGLAATAFNKSTLFPNERHTCLMAREKKVCTRNSTYASSSEDESSDEDEVDYSCLFKGLDRSKIDKINELIDALNENNILLEKQEDLLYEEHDKFVEAQKSLALEIKRNEMLACEVSTCHDSISNLKSINDDLNAKLVEANKSNSCVEYVEICTRCKDIDINACSEHLVSISKLNDELASLNAQLKTSKSNFDKLKFARDAYT

SEQ ID NO: 10084 - protein, 1706 aa, Zea mays
  Clone ID: TF_ZM4580.C3.o9.fg.pep
MDPKGKGIVINDKEKESFVNEPRDDKSNDSGHRRKDGKKKKTRRIKEIVYYDSDESTSSQKDDDHNEYERKKPIHKNAQATTVLLASLCRDEYHKVSGLDNAKQIWDTLKISHEGNDVTLLTKMELVEGELGRFAMIRGEEPTQTYNRLKTLINKIRSYGSTRWTDHDVVRLMLRSFTVLDPHLVNNIRENPRYTKMSPEEVLGKFVSGRMMIKEARYVDDALNGPIHEPQPIALKATRSKEALPSKVAQVEAVGLNNEEMTLIIKRFKTALKGRKGQPSKTKTKEKRSCFKCGKIGHFIANCPDNESDQEKGNKREKKKHYKKAKDEAHIGKEWDSDCSSSDSDNEGLAATAFNKSSLFPNERHTCLMAREKKVSTHDTSTYASSSEDESSDDDEIDYSCLFKGLDRSKINKINELIDALNDKNRLLEKQEDLLYEEHDKFVSAQNSLALEIKRNEMLSSELSTCHESISKLKSVNDDLNAKLEIASKSTSCVEIVETCNRCKDFDIDACSEHLVSISKLNDELASLNAQLKTSKSNFDKLKFARDAYTIGRHPSIKDGLGYKKEAKNLTSHKAPISAKEKGKVPMDSSVQKNHAFMYHDRRQSRNAYRRCNAYGTFDSHDMFASSSSYVHDRNVGRRNVVHNMPRRNVVNVPRKVYASGGSSWIIDSGCTNHMTGEKKMFTSYVKNKDSQDSIIFGDRNQGKVKGLVESLGYNLLFVSQLCNMGYNCLFTNVDVSVFRRSDGSLAFKGVLDDKLYLVDFAKEEAGLDACLIAKTSMGWLWHRRLAHVGMKNLHKLLKGEHVIGLTNVQFEKDRPCAACQAGKQVGGAHHSKNVMTTSRPLELLHMDLFGPVAYLSIGGSKYGLVIVDDFSRFTWVFFLQDKSETQGTLKRFLRRAQNEFELKVKKIRSDNGSEFKNLQVEEFLEEEGIKHEFSAPYTPQQNGVVERKNRTLIDMARTMLGEFKTPECFWSEAVNTACHAINRVYLHRLLKKTSYELLTGNKPNVSYFRVFGSKCYILVKKGRNSKFAPKAVEGFLLGYDSNTKAYRFFNKSSGLVEVSSDVVFDETNGSPREQVVDLDDVDEEDVPTAAIRTMAIGDVRPQEQDEQDQPSSSTMVHPPTQDDEQVHQQEACDQGGAQDDHVMGEEAQPAPPTQVRAMIQRDHPVDQILCDISKGVTTRSRLVNFCEHYSFVSSIEPFRVEEALLDPDWVLAMQEELNNFKRNEVWTLVPRPKQNVVGTKWVFRNKQDEHGVVTRNKARLVAKGYAQVAGLDFEETFAPVARLESIRILLAYAAHHSFRLYQMDVKSAFLNGPIKEEVYVEQPPGFEDERYPDHVCKLSKALYGLKQAPRAWYECLRDFLITNAFKVGKADPTLFTKTCNGDLFVCQIYVDDIIFGSTNKKSCEEFNRVMTQKFEMSMMDELNYFLGFQVKQLKDGTFISQTKYTQDLLKRFGMKDAKPAKTPMGTDGHTDLNKGGKSVDQKAYRSMIGSLLYLCASRPDIMLSVCMCARFQSDPKECHLVAVQRILRYLVATPCFGLWYPKGSTFDLIGYSDSDYAGCKVDRKSTSGTCQFLGRSLVSWNSKKQTSVALSTAEAEYVAAGQCCAQLLWMRQTLRDFGYNLSKVPLLCDNESAIRMAENPVEHSRTKHIDIRHHFLRDHQQKGDIEVFHVSTENQLADIFTKPLDEKTFCRLRSELNVLDSRNLD

SEQ ID NO: 10085 - protein, 793 aa, Zea mays
  unsure (1)..(793): unsure at all Xaa locations
  Clone ID: TF_ZM4589.C1.o1.fg.pep
MDPKGKGTVVNNNEKESIFNEPKDDKPTDSGSSHKRRDGKKKTRRIKEIVYYDSDESSSSQKYDDDYEKKKTVNSNFSFDYSRIPQCAYAHLLSIPLGKPPHFDGEDYGFWSHKMRSHLFSLHPSIWEIVESGMKFDSSNSPLFINEQIHKNAQATNVLLASLCRDEYHKVSGLDNAKQIWDTLKISHEGNDVTMLTKMQLVEGELGRFAMIRGEEPTQTYNRLKTLVNKIRSYGSTRWTDHDVVRLMLRSFTVLDPHLVNNIRENPSGRMMIKEARYVDDALNGPIQEPQTIALKATRSKEALPSKVAQIEAAELNDEEMALIIKRFKTALRGRKEHPNKTKTKGKRSCFKCGKIGHFIANCPDNDSDLEKKSGKWEKKKNYKKAKGEAHIGKEWDSDCSTSDSDNEGLAATAFNKSSLFPNEHHTCLMAKEKKGLDRSKIDKINELIDALNDKNRLLEKQEDLLYEERDKFVSAQNSLALEIKRNEMLSCELSTCHESISNLRSVNDDLNAKLEIASKSNSCVENVVTCTRCKDINIDACSEHLARISKLNDEVASLNAQLKTSKSDFNKLKFARDAYTVGRHPSIKDGLGFKREAKNLTSHKAPIPAKEKGKAPMASSAKKNHAFMYXDRRHARNANRSYDAFDSYVYDSHAMFASSSSYKHDRDMSRRNVVXLRRRNVVNVPRKVNGPSTIYHALNASIAICRKDKKIVARKLGAKCKGDKTCFWVPKDICANLVGPNMSWVYASGGSSWIIDSGCTNHMTGEKKMFTSYVKNKDSQDSIIFGDGNQGK

SEQ ID NO: 10086 - protein, 1553 aa, Zea mays
  unsure (1)..(1553): unsure at all Xaa locations
  Clone ID: TF_ZM4611.C1.o2.fg.pep
MDPRGKGTVVNDKEKESFVNEPKDDKPTDSSSGHKQRDGKKKKKTRRIKEIVYYDDNDESSSSQKDDDNVYENKKTINSNFSFDYSRIPQSTNAHLLSIPLASLCRDEYHKVSGLDNAKQIWDTLKISHEGNDVTILTKMELVEGELGRFAMIRGEEPTQTYNRLKTLVNKIRSYGSTRWTDHDVVHEDDARGDPWKVRXGWMMIKEARYVDDALNGPIQEPQTIALKATRSKEALPSKVAQVEAAGLNEEEMTLIIKRFKTTLKGRKEHPNKNKTKGKRSCFKCGKIGHFIANCPDNDSDQEKKSGKWEKKKNYKKAKGEAHLGKEWDSDCSSSDSDNEGLAATAFNKSSLFPNEHHTCLMAREKKVSTRLDRTKVDKINELIDALNDKNMLLEKQENLLYEEHDKFVSAQSSLALEVKRNEMLSCELSTCHETISTLKGINDDLNAKLEVANKSNSCVEHVIICNRCKDFNVDACSEHLACISKLNDEVASLNAQLKTSKSEFDKLKFARDAYTIGRHPSIKDGLGFKREVKNLTSQKASISAKEKGKAPMASSAQKNHAFMYHDRRHSRNDYRSYNDFDSHAMVASSSSIMHDRNLARRNVINNMPRRNVVHVPRKTNSEPSTIYHALNASFAIXPNMSWVYASGGSSWIIDSGCTNHMTGEKMMFSSYVKNKDPQDSIIFGDGNQGKVKGLGKIAISNEHSISNVFLVESLGYNLLSTLCSLSSRETGGKLSSCQKCDDNIKTPGVTSYGPLRTRRLSKHXEEDKSETQGTLXRFLRRAQNEFELKVKKIRSDNGSEFKNLQVEEYLEEEGIKHEFSAPYAPQQNGVVERKNRTLIDMARTMLGAFKTLECFWSEAVNTACHAINRVYLHRLLKKTSYELLTGNKPNVSYFRVFGSKCYILVKKGRNFKFAPKAVEGFLLGYDSNTKAYRVFNKSSGLVEVSSDVVFDETNGSPREQVVDLDDVDEEDVPTTAMRTMAIGDVRPMEQKEQDQPSSSTMVHPPTQEDEQVHQEEACDQGGAQDDHVMEEETQPTPPTQVRAMIQRDHPVDQILGDISKGVTTRSHLVNFFCTLVPRPKQNVVGTKWVFRNKQDEHGVVTRNKARLVAKGYAQVAGLDFEETFAPVARLESIRILLAYAAHHSFRLFQMDVKSAFLNGPIKEEVYVEQPPGFEDERYPDHVCKLSKALYGLKKAPRAWYECLRDFLIANAFKVGKVDPTLFTKTCDGDLFVCQIYVDDIIFGSTNQKSCEDFSRVMTQKFEMSMMGELSYFLGFQVRQLKDGTFISQTKYTQDLIKRFGMKDAKPAKTPMGTDGYTDLNKGGKSVDQKAYRSMIGSLLYLCASRPDIMLSVCMCARFQSDPRECHLVAVKRILRYLVATPCFGIWYPKGSTFDLIGYSDSDYAGCKVDRKSTSGTCQFLGRSLVSWSFKKQTSVALSTTEAEYVATGQCCAQLLWMRQTLRDFGYNLSKVPLLCDNESAIRMADNPVEHSRTKHIDIRHHFLRDHQQKGDIEVFHVSTENQLADIFTKPLDEKTFCRLRSELNVLDSRNLD

SEQ ID NO: 10087 - protein, 1594 aa, Zea mays
  Clone ID: TF_ZM4612.C4.o3.fg.pep
MDPKGKGMVVDNNEKESIFNEPKNDKSTDLGSSHKRKDGKKKKTRRIKEIVYYDSDESSSSQKDDDNDYRKTVNSNFSFDYSRIPHNSNSHLLSIPLGKPPHFDGEDYGFWSHKMRSHLFSLHPSIWEIVENGMKFDSSDSPMFVNEQIHKNAQATTVLLASLCRDKYNKVSGLDNAKQIWDTLKISHEGNDITMLTKMELVEGELGRFATIRGEEPTQTYNRLKTLINKIMSYGSTRWTDHDVVRLLLRSFTILDPHLVNNIRENPRYTKMSPEEVLGNFVSGRMMIKEARYVDDALNGPINEPQPLALKATRSKEALPSKVAQIEAAGLNDEEMALIIKRFKTVLKGHKGQPSKTKTKGKRSCFKCGKIGHFIANCPDNDSNQEQENKREKKKNYKKAKGEAHLGKEWDSDCSSSDSDNEGLAATAFNKSSLFPNERHTCLMAREKKVSTRDSTYASSSDNESSDDDDIDYSCLFKGLDRSKIDKINELIDALNDKNRLLEKQEDLLYEEHDKFVEAQKSLALEIKRNEMLSCEVSTCHDSISSLKSINDDLNAKLERSSKSTSCVEHVVICTRCKDFDIDACSEHLVSISKLNDELASLNAQLKTSKSEFDKLKFARDAYTIGRHPSIKDGLGFKREAKNLTSHKTPISAKEKGKAPMASRDKLEMLIEVIINVARRNAIHHVPRKNVLYAPRKVVNEPSTVYCALNASFAICRKDRKVYASGGSSWIIDSGCTNHMTGEKKMFTSYVKNKDSQDSIIFGDGNQGKDKSETQGTLKRFLRRAQNEFELKVKKIRSDNGSEFKNLQVEEFLEEEGIKHEFSAPYTPQQNGVVERKNRTLIDMVRTMLGEFKTPECFWTEAVNTACHAINRVYLHRLLKKTSYELLTGNKPNVSYFRVFGSKCYILVKKGRNSKFAPKAVEGFLLGYDSNTKAYRVFNKSSGLVEVSSDVVFDETNGSPREQVVDLDDVDEEDVSTAAIRTMAIGDVRPQEQDEQDQPSSSTMVHPPTQDDEQVHQQEACDQGGAQDDHVMEEEAEPAPPTQVRAVIQRDHPVDQILGDISKGVTTRSRLVNFCEHYSFVSSIEPFRVEEALLDPDWVLAMQEELNNFKRNEVWTLVPRPKQNVVGTKWVFRNKQDEHGVVTRNKTRLVAKGYAQVAGLDFEETFAPVARLESIRILLAYAAHHSFRLFQMDVKSAFLNGPIKEEVYVEQPPGFEDERYPDHVCKLSKALYGLKQAPRAWYECLRDFLSANAFKVGKADPTLFTKTCDGDLFVCQIYVDDIIFGSTNKKSCEEFSRVMTQKFEMSMMGELNYFLGFQVKQLKDGTFISQTKYTQDLLKRFGMKDAKPAKTPMGTDGHTDLNKGGKSVDQKAYRSMIGSLLYLCASRPDIMLSVCMCARFQSDPKECHLVAVKRILRYLVATPCFGLWYPKGSTFDLIGYSDSDYAGCKVDRKSTSGTCQFLGRSLVSWNSKKQTSVALSTAEAEYVAAGQCCAQLLWMRQTLRDFGYNLSKVPLLCDNESAIRMAENPVEHSRTKHIDIRHHFLRDHQQKGDIEVFHVSTENQLADIFTKPLDEKTFCRLRSELNVLDSRNLD

SEQ ID NO: 10088 - protein, 1516 aa, Zea mays
  unsure (1)..(1516): unsure at all Xaa locations
  Clone ID: TF_ZM4613.C2.o1.fg.pep
MDPRGKGMVVNDKEKESFVNDPKDDKPTDSGSSHKRKDGKNKKTRRIKEIVYYDDSDESSSSQKDDDNYEKKKPVNSNFSFDYSRIPQNKNAHLLSIPLXVEGELGRFAMIRGEEPTQTYNRLKTLVNKIRSYGSXALNGPIHEPQTVALKATRSKEVLPSKVAQVEAAGLNEEEMALIIKCFKTALRGRKEHPNKTKTKGKRSCFKCGKIGHFIANCPDNDSDQEQGNKREKKKAYKKTKGEAHLGKEWDSDCSSSDSDNEGLAATAFNKSALFPNEHHTCLMAREKKIELRLIKINELIDALNDKNRLLEKQEDLLYEEHDKFVEAQKSLALEIKRNEMLSCELSICHDSISSLKSINDDLNAKLEIANKSTSCVEHVAICNRCKDFNVDACSEHLVSISNLNDEVASLNAQLKTSKSEFDKLKFARDAYTIGRHPSIKDGLGFKREVKNLTSHKASISAKEKGKAPMASSVQKNHAFMYHDRRHSRNVDRSYDAFDSHAMIASSSSIMHDRNLARKNVVHHMPRRNAHVPRKTSNEPSTIYHALNASFAICRKDKKVVARKLGAKCKGDKTCIWVPKTICLCIRGSSWIIDSGCTNHMTGEKRMFSSYVKNKDPQDSIIFGDGNQGKVKGLGKIAISSEHSISNVFLVESLGYNLLSVSQLCNMGYNGLFTNVDVSVFRRSDGSLAFKGVLDDKLYLVDFAKEEAGLDACLIAKTSMGWLWHRRLAHVGMKNLHKLLKGEHVIGLTNVTFEKDRPCAACQADKQVGSSHHAKNVMTTSRPLELLHMDLFGPVAYLSIGGSKYGLVIVDDFSRFTWVFFLQDKSETQGTLKRFLRRAQNEFELKVKKIRSDNGSEFKNLQVEEYLEEERIKHEFSAPYTPQQNGVVERKNRTLLDMARTMLSEFKTPERFWTEAVSTACHAINRVYLHRLLKKTSYELLTGNKPNVSYFRVFGSKCYILVKKGRNSKFAPKAVEGFLLGYDSNTKVYRVFNKSSGLVEVSSDVVFDETNGSPREQVVDLDDVDEEDVPTAAMRTMAIGDPFRVEEALLDPNWVLAMQEELNNFKRNEVWTLVPRPKQNVVGTKWVFRNKQDEXHGVVTRNKARLVAKGCXQMDVKSAFLNGPVKEEVYVEQPPGFEDERYPDHVCKLSKALYGLKQAPRAWYECLRDFLIANAFKVGKADPTMFTKTCDGDLFVCQIYVDDIIFGSTNQKSCEEFSRVMTQKFEMSMMGELSYFLGFQVKQLKDGTFISQTKYTQDLIKRFGMKDAKPAKTPMGTDGHTDLNKGGKSVDQKAYRSMIGSLLYLCASRPDIMLSVCMCARFQSDPRECHLVAVKRILRYLVATPCFGIWYPKGSTFDLIGYSDSDYAGCKVDRKSTSGTCQFLGRSLVSWSSKKQTSIALSTAEAGYVAAGQCCAQLLWMRQTLRDFGYNLSKVPLLCDNESAIRMADNPVEHSRTKHIDIRHHFLRDHQQKGDIEVFHVSTENQLADIFTKPLDESTFCKLRSELNVLDSRNLD

SEQ ID NO: 10089 - protein, 1431 aa, Zea mays
  Clone ID: TF_ZM4621.C2.o2.fg.pep
MDPKGKGMVVNDKEESFVNDPKDDKPTNSGSSHKRKDGTKKKTRRIKEIVYYDDSDESSSSQKDNDDNDYEKKKTVNSNFSFDYSRIPQSTIAHLLSIPLASLCRDEYHKVSGLGNAKQIWDTLKISHEGNDVTMLTKMELVEGELGRSFTVLDPHLVNNIRENPRYTKMTPEEILGKFVSGRMMIKEARYVDDALNGPIHEPQIVALKATRGKEVLPSKVAQVEAAGLNEEEMALIIKRFKTALRGRKEHPNKSKTKGKRSCFKCGKIGHFIANCPDNDSDQEQEKKREKKKNYKKAKGEAHLGKEWDSDCSSSDSDNEGLTASAFNKSSLFPNEHHTCLMAKEKKVCTRNNTTYASSSEDESSDDEIDYAYLFKGLDRTKIDKINELIDALNDKNRLLEKQEDLLYEEHDKVVEAQKSLALEVKRNEILSCELSTCHETISSLKSINDDLNAKLEIANKSTSCVDHVVICNRCKDFNVDACSEHLVCISKLSDEVASLNAQLKTSKSEFDKLKFARDAYTIGRHPSIKDGLGFKREAKSLTSHKAPISAKEKGKAPMTNSSQKNHAFIYGDKRYFRNVHRSCNDSNAMFASSSSYMHGRDMPRRNVHVPRKINEPSTIYHACNASFAICRKDKKVYASGGSSWIIDSGCTNHMTGEKKMFTSYVKNKDSQESIIFGDGNQGKVKGLGKIAISSEHSISNVFLVESLGYNLLSVSQLCNMGYNCLFTNVDVSVFRRSDGSLAFKGVLDGKLYLVDFAKEEAGLDACLIAKTSMGWLWHRRLAHVGMKNLHKLLKGEHVIGLTNVTFEKDRPCAACQAGKQVGSSHHTKNVMTTSRTLELLHMDLFGPVAYLSIGGSKYGLVIVDDFSRFTWVFFLQDKSKTQGTLKRFLKRAQNEFKLKKNGVVERKNRTLIDMARTMLGEFKTPERFWSEAMNTACHAINRVYLHRLLKKTSYELLTGNKPNVSYFRVFGSKCYILVKKGRNSKFAPKAVEGFLLGYDSNTKAYRVFNKSSGLVEVSSDVVFDETNGSPREQVVDLDDVDEEEVPTATIHTMAIVEVRPQEQKEQDQPSSSTMVHPPTQDDEQEELNNFKRNEVWTMVPRPKQNVVGTKWVFHNKQDEHGVVTRNKARLVAKGYAQVTGLDFEETFAPVAMLESIRMLLAYATHHSFRLFQMDVKSAFLNGPIKEEVYVEQPPGLEDERYPDHVCKLSKALYGLKQAPRAWYECLRDFLIANAFKVGKADPTLFTKTCDGDLFVCQIYVDDIIFGSTNQKSCEEFSRVMTQKFEMSMMGELNYFLRFQVKQLKDATFISQTKYTQDLLKRFGMKDAKPAKTPMGTDGHVDLNKGGKSVDQKAYRSMIGSLLYLCASRPDIMLSVCMCARFQSDPKECHLVAVKRILRYLVATPCFGIWYPKGSTFDLIGYSDSDYAGCK

SEQ ID NO: 10090 - protein, 677 aa, Zea mays
  Clone ID: TF_ZM4621.C6.o3.fg.pep
MDPKGKGMVVNDKEKESFVNDPKDDKPTDSGSSHKRKDGKKKKTRRIKEIVYYDDSDESSSSQKDNDDNDYEKKKTVNSNFSFDYSRIPQSTNAHLLSIPLGKPPHFDGEGYGFWSHKMHSHLFSLHPSIWEIVESGMKFDSTDSPIFINEQIHKNAQASTVLLASLCRDEYHKVSGLDNAKQIWDTLKISHEGNDVTMHTKMELVEGELGRFAMIRGEEPTQTYNRLKTLVNQIRSYGSTRWTDHDVVRLMLRSFTVLDPHLVNNIRENPRYTKMTPEEILGKFVSGRMMIKEARYVDDALNGPIHEPQTVALKATRGKEVLPSKVAQVEAMGLNEEEMALIIKCFKTALRGRKEHPNKSKTKGKRSCFKCGKIGHFIANCPDNDNDQEQEKKREKKNNYKKAKGEAHLGKEWDSDCSSSDSDNEGLTASAFNKSSLFPNEHHTCLMAKEKKVCTRNNTTYASSSEDESSDDEIDYAYLFKGLDRTKIDKINELIDALNDKNRLLEKQEDLLYEEHDKVVEAQKSLALEVKRNEMLSCELSTCHETISSLKSINDDLNAKLEIANKSTSCVNHVVICNRCKDFNVDACSEHLVCISKLSDEVASLNAQLKTSKSEFDKLKFARDAYTIGRHPSIKDGLGFKREAKSLTSHKAPISSKEKGKAPMTNSSQKNHAFIY

SEQ ID NO: 10091 - protein, 309 aa, Zea mays
  unsure (1)..(309): unsure at all Xaa locations
  Clone ID: TF_ZM4638.C8.o1.fg.pep
MMIKEARYVDDALNDPIHEPQTVALKATRSKEALPSKVAQVEAAGLNEEEMALIIKRFKTTLKGRKEHPNKNKTKGKRSCFKCGKIGHFIANCPDNDSDQEQEKKREKKKSYKKAKGEAHLGKEWDSDCSSSDSDNEGLAASAFNKTSLFPNEHHTCLMAKEKKDRLLEKQEDLLYEEHDKFVEAQNSLALEVKRNEMLSCELSTCHESISSLKGVNDDLNAKLEIASKSTSREEHVMICNRCKDFNVDACSEHLVCISKLNDEVASLNAQLKTSKNDFDKLKFARDAYTVGXPSIKDGLGFKREAKNL

SEQ ID NO: 10092 - protein, 1677 aa, Zea mays
  Clone ID: TF_ZM4679.C2.o9.fg.pep
MDPKGKGMMINDKEKESFLNEPKDDKPTDSSSSHKKKDGKKKRRIKKIVYYDSDESSSSQKDDDDEKKKTVNSNFSFGYSRIPQNSNAHLLSIPLGKPPHFDGEDYGFWSHKMRSHLFSLHPSIWEIVENGMQFDSMDNPMFINEQIHKNAQATTILLASLCREEYHKVGGLDNAKQIWDILKISHEGNDATMITKMELVEGELRRFTMIRGEEPTQTHNRLKTLVNKIRSYGSTRWRTTTSYTKMTPEEILGEFVSGRMMIKEARYVDEALNGPMPIHEPQTVALKATSSREGLPSKVAQVEAAELNKDEMALIIKRFKTALKGRKEHPNKSKTKGKRSCFKCGKIGHFIANCPDNDSDQEQGKNGKREKKKVSRRLRARHTLEKNGTRIVLRPTPTTKDSPPRPSSNRLSSPTSITLASWQRRRRCKDFNVDACVEHLTSITKLNGEVASLNAQLKTSKNDFDKLNIATDAYTVGRHPSIKDELGFKSGCTNHMTGENKMFTSYVKNKDSQDSIIFGDGSQGKVKGLGKIAISSEHSISNVFLVESLRRSDGSLAFKGVLDGKLYLVDFSKEEANLDACLIAKTSMGWLWHRRLAHVRMKNLHKLLKGEHVLGLTNVTFEKDRPCAACQAGKQVGSSHHSKNVMTTSRPLELLHMDLFGPVAYLSIEGSKYGLVIVDDFSRFTWVFFLQDKTETHGTLKRFLRRAQNEFELKVKKIRSDNGSEFKNLQVEEYLEEEGVKHEFSAPYTPQQNGVVERKNRTLLDMARTMLSEFKTPERFWTEAVNTACHAINRVYLHRLLKKTSYELLTVKKGRNSKFAPKAVEGFLLGYDSNTKAYRVFNKSSGLVEVSSNVVFDETNGSPREQIDLDDVDEEDVPTAAIRTMAIGDVRPQEQKEQDQPSSSTMVHPPTQDDEQVHQEEACDQGGAQDDHVMEEEAPQAPPTQVRATIQRNHPVDQILGDISKGVTTRSRLANFYEHYSFVSSIEPFRVEEALLDPDWVLAMQEELNNFKRNEVWTLVPRPKQNIVGTKWVFRNKQDEHGVETRNKARLVAKGYAQVAGLDFEETFAPVARVESIRILLAYAAHHSFKLFQMDVKSAFLNGPIKEDVYVEQPPGFEDERYPDHVCKLSKALYGLKQAPRAWYECLRDFLIANAFKVGKADPTLFTKTCDGDLFVCQIYVDDIIFGSTNQKSCEEFSRVMTQKFEMSMTGELNYFLGFQVKQLKDGTFISQTKYTHDLIKRFGMKDAKLAKTPMGTDRHVDLNKGGKSVDQKAYRSIIGSLLYLCASRPDIMLSVCMCARFQSDPRECHLVAVKRILRYLVATPCFGIWYPKGSTFELIGYSDSDYAGCKVDRKSTSGKCQFLGRSLVSWSYKKQTSVALSTAEAEYVAAGQCCVQLLCMRQTLRDFGYNLSKVPLLCYNESAIRMADNPVEHSRTKHIDIRHHFLRDHQQKGDIKVFYVSTENQLADIFTKPLDEKTFCRLRIRLGQEATVCKILLQQQLSSQSEDVTIRNALWEALQNSIALGPTRRRELSFEVGDYVYLKVSPIRGTKRFGVKGKLAPRYIGPYQIQARRGEVAYQLSLPENLSAVHDVFHVSQLKKCLRVPEEKLPTEDLEVQEDLTYIEKPTQILETANRVTRRNTIRMCKVKWGHHSEEATWEREDDLRAQYPELFASQP

SEQ ID NO: 10093 - protein, 991 aa, Zea mays
  Clone ID: TF_ZM4679.C4.o4.fg.pep
MHPKGKGMVINDKEKESFINEPKDDKPTDSGSSHKKKDGKKKRRIMKIVYYNSDESSSSQRDDDDEKKKMVNSNFSFYYSRIPQNSNAHLLSIPLGKPPHFDGEDYGFWSHKMCSHLFSLHPSIWEIVENGMQFDSTDNPMFINEHKNAQATTVLLASLCREEYHKVSGLDNAKKIWDTLKSSHEGNDVTMITKMEFVEGELGRFAMIRGEEPTQTYNRLKTLVNKIRSYGSTRWTDHDVVRLMLRSFTVLDPHLVNSIHENPRYTKMTPKEILRKFVSGRMMIKEARYVDEAFNGPMPIHEPQTIALKATSSREALPSKVAQVEAVRLNEEEMALIIKRFKTALKGRKEHPNKSKTKGKRSCFKCGKIGHFIANCPDNDSDQEQGKTGKRENKKVYKKAKGEAHLGKEWDSDCSSSDSDDEGLAATAFNKSSLFPNEHHTCLMAKEKKVSTRNTIAYASSSDGESSDDEVDYASLFKGLDRTKIDKINELIDALNEKNRLLEKQEDLLYEEHDKFVNVQKSLALEVKRNEMLSSELSTCHESISSLKSVNDDLNAKLEVANKSSSCIEHVVICNRCKDFNVDACVEHLTSIAKLNGEVASLNAQLKTSKNDFDKLKFARDAYTIGRHPSIKDGLGFKREAKNLTSQRAPIFNKEKGKAPMANSSQKNHAFIYDRKFSRNAYHNRSCNAYDSHAMIASSSSFVHGRDMPRRNVVNVPRKMHNENATDIHAYNSDFVLTCKNEKVVARKLGAKCKGDKACIWVPKAIVTNLVYASGGSSWIIDIGCTNHMTGEKKMFTSYVKNKDSQDSIIFGDGNQGKVKGLGKIAISSEHSISNVFLVESVGYNLLSVSQLCSMGYICLFNNVDVSVFRRCDGSLAFKGVLDGKLYLVDFSKEEAGLDACLIAKTSMGWLWHRRLAHVGMKNLHKLLKGEHVLGLKNVSFEKDRPCAACQAGKQVGSTHHSKNVMTTSRPLEMLHMDLFGPVAYLSIGGR

SEQ ID NO: 10094 - protein, 553 aa, Zea mays
  Clone ID: TF_ZM4681.C2.o6.fg.pep
MDPKGKGIVINDKEKESFINEPKDDKPTDSGSGHKRKDGKKKKTRRIKEIVYYDDNDESTSSQKDNDDNDYERRKPIHRNAQATTVLLASLCRDEYHKVSGLDNAKQIWDTLKISHEGNDVTLLTKMELVEGELGRFAMIRGEEPTQTYNRLKTLINKIRSYGSTRWTDHDIVRLMLRSFTVLDPHLVNNIRENPRYTKMSPEEVLGKFVSGRMMIKEARYVDDALNGPTHEPQPIALKATRSKETLPSKVAQVEAAGLNDEEMALIIKRFKTALKGRKGQPSKTKTKRKRSCFKCGKIGHFIANCPDNESDQEQGSKREKKKAYKKAKGEAHLGKEWDSDCSSSDSENEGLAATAFNKSSLFPNERHTCLMAKEKKVCTRDSTTYDSSSDDESSDEEIDYSSLFKGLDRTKVDKINELIDALNEKDRLLEKQEDLLYEEHDKFVEAQKSYALEVKRNEMLSYELSSYHETISSLRSMNDDLNAKLEIASKSNSCVEHVMICKRCKDFDIDACSEHLVSISKLNDEVASLSAQLKTSKNEFDKLKFARDAYTI

SEQ ID NO: 10095 - protein, 1650 aa, Zea mays
  Clone ID: TF_ZM4685.C2.o11.fg.pep
MDPKGKGMVVNDKEKESFVNDPKDDKPTDSGSGHKRKDGRKKKTRRIKEIVYYDSNESSSSQKDDDNDYKKKKTVNSNFSFDYSRIPQSSNAHLLSIPLGKPPHFDGEDYRFWSHKMRSHLFSLHPSIWEIVENGMHFDSTDSPMFINEQIHKNAQATTVLLASLCRDEYHKVSGLDNAKQIWDTLKISHEGNDVTMLTKMELVEGKLGRFAMIRGEEPTQMYNRLKTLVNKIRSYGSTRWTDHDVVRLMLRSFTVLDPHLVNNIRENPRYTKMTPEEILGKFVSGRMMIKEARYVDDALNGPIHEPQTVALKATRSKEALPSKVAQVEAAGLNDEEMTLIIKRFKTMLRGRKEHPNKTKTKAKRSCFKCGKIGHFIANCPDNDSDQEQGNKREKKKAYKKANGEAHLGKEWDSDCSSSDSDNEGLAATALQQVGPLPQRASHLPHGKGKEEHVVVCNRCKDFNVDACSKHLVSISKLNDEVASLNAQLKTSKSEFDKLKFARDAYTIGRHPSIKDGLGFKREVKNLTSHKASISAKEKGKAPMASSTQKNHAFMYHDRRHSRNAFRSYDAFDSHATIASSSSIMHDRNLARKNVVYHMPRRNIVHVPRKVMNEPSTIYYACNASFAICRKDKKIIDSGCTNHMTGEKRMFSSYVKNKDPQDSIIFGDGNQGKVKGLGKIAISSEHSISNVFLVESLGYNLLSVSQLCNMGYNYLFTNVDVSVFRRSDGSLAFKGVLDDKLYLVDFAKEEVGLDACLIAKTSMDWLWHRRLAHVGMKNLHKLLKGEHVIGLTNVTFEKVRPCAACQAGKQVGSSHHAKNVMTTSRPLELLHMDLFGPVAYLSIGGRTLKRFLSRAQNEFELKVKKIRSDNGSEFKNLQVEEYLEEEGIKHEFSAPYTPQQNGVVERKNRTLLDMARTMLGEFKTPERFWTEAVSTACHAINRVYLHRLLKKTSYELNCKCYILVKKGRNSKFAPKAVEGFLLGYDSNTKAYRVFNKSSGLVEVSRDIVFDETNGSPREQVVDLDDVDEEDVPMAAIRTMAIGDVRPQEQNEQDQPSSSTMVHPPTQDDEQVHQEEACDQGGAQDVHVIEEEAQPTPPTQVRATIQRNHPIDQILGDISKGVTTRSRLVNFCEHYSFVSSIEPFRVEEALLDPDWVLAMQEELYNFKRNEVWTLVPRPKQNVVGTKWVFRNKQDEHGMVTRNKARLVAKGYAQVAGLDFEETFAPVARLESIRILLAYAAHHSFRLFQMDVKSAFLNGPIKEEVYVEQPPGFKDERYPDHVCKLSKALYGLKQAPRAWYECLRDFLIANDFKVGKADPTLFTKTCNGDLFVCQIYVDVIIFGSTNQKSCEEFSRVMTQKFEMSMMGELSYFLGFQVKQLKDGTFISQTKYTQDLIKRFGMKDAKPAKTPMGTDGHTNLNKGGKSVDQKAYQSMIGSLLYLCASRLDIMLSVCMRARFQSDPRECHLVAVKRILRYLVATPCFGIWYPKGSTFNLIGYSDSDYAGCKVDRKSTSGTCQFLGRSLVSWSSKKQTSVALSTAEAEYVAAGQCCAQLLWIRQTLRDFGYNLSKVPLLCDNESVIHMADNPVEHSRTKHIDIRHHFLRDHQQKGDIEVFYVSTENQLADIFTKPLDESTFCRLRSELNVLDSRNLD

SEQ ID NO: 10096 - protein, 982 aa, Zea mays
  unsure (1)..(982): unsure at all Xaa locations
  Clone ID: TF_ZM4687.C1.o5.fg.pep
MDPKGMGMVVNDKEESFVNDPKDDKPTDSGSGHKRKDGRKKNIRRIKEIVYYDSDESSSSQKDDDNDYEKKKTVNSNFSFDYSRIPQSSNAHLLSIPLATTVLLASLCRDEYHKVSGLDNAKEIWDTLKISHEGNDVTMLTKMELVEGELGRFAMIRGEEPTQTYNRLKTLVNKIRSYGSTRWTDHDVVRLMLRYFTILDPHLVNNIRENPRYTKMTPEEILGKFVSERMMIKEARYVDDALNGPIHEPQTVALKAMRSKEVLPSKVAQVEAAGLNEEEKALIIKRFKTALRGRKEHPNKTKTKGKRSCFKCGKIGHFIANCPDNDSDQEQGNKREKKKAYKKAKGEAHLGKEWDSDCSSSDSDXNEGLAATAFNKSALFPNEHHTCLMAREKKXSRDDEIDYSCLFKGLDRTKVDKINELIDALNDKNRLLEKQEDLLYEEHDKFVEAQKSLALEIKRNEMLSYELSTCHDSISSLKSINDDLNAKLEIANKSTSCVEHVAICNRCKDFNIDACSEHLVSISNLNDEVASLNAQLKTSKSEFDKLKFARDAYTIGRHPSIKDGLGFKREVKNLTSHKASISIKEKGKAPMASSAQKNHAFMYHDKRHSRNVYRSYVAFDSHAMIASSSSIMHDRNLARKNAMPRRNVVHVPRKVNYESSTNFHTCNASFTICRKDKKVIARKLWERCKGDKTCIWVPKTIVTNLVGPNKSWLCNMGYNCLFTNVDVSVFRRSDGSLAFKGVLDGKLYLVDFAKEEAGLDACLIAKTSMGWLWHRRLAHVGMKNLHKLLKGEHVIGLTNVTFEKDRPCAACQAGKQVGSSHHTKNVMTTSRPLELLHMDLFGPVTYLSLGGSKYGLVIVDDFSHFTWVFFLQDKSETQGTLKRFLRRAQNEFELKVKKIRSDNGSEFKNLQVEEYLEEEGIKHEFSAPYTPQQNGVVERKNRTLIDMARTMLGAVTPQVLPWLEHTLVLRTVITCGRNLRRT

SEQ ID NO: 10097 - protein, 1661 aa, Zea mays
  Clone ID: TF_ZM4707.C2.o4.fg.pep
MDPKGKGMVVDNNEKESIFNEPKNDKSTDLGSSHKRKDGKKKKTRRIKEIVYYDSDESSSSQKDDDHNDYEKRKPVNSNFSFDYSRIPQSSNSHLLPIPLGKPPHFDGEDYGFWSHKMRTHLFSLHPSIWEIVESGMQFDSSDSPMFINEQIHKNAQATTVLLASLCRDEYNKVSGLDNAKQIWDTLKISHEGNDITMLTKMELVEGELGRFAMIRGEEPTQTYNRLKTLINKIRSYGSTRWTDHDVVRLLLRSFTILDPHLVNNIRENPRYTKMSPEEVLGKFVSGRMMIKEARYVDDALNGPINEPQPFALKATRSKEALPSKVAQIEAAGLNDEEMALIIKRFKTVLKGHKGQPSKTKTKGKRSCFKCGKIGHFIANCPDNDSDQEQGNKREKKKNYKKAKGEAHLGKEWDSDCSSSDSDNEGLAATAFNKSTLFPNERHTCLMAREKKVCTRNSTYASSSEDESSDEDEVDYSCLFKGLDRTKVDKINELIDALNEKNILLEKQEDLLYEEHDKFVEAQRSHALEVKRNEMLSCELSSCHDTIFKLRSINDDLNAKLEIASKSTSCIENVVTCTRCKDINIDAYSEHLACISKLNEEVASLNAQLKTSKSDFEKLKFARDAYTVGRHPSIKDGLGFKREAKNLTSHKAPISAKEKGKAPMASSIKRNHAFIYHDRRQTRNAYRSYNAYDDFNSHAMFASSSSFMHGRNMSKKNAMPRKNVTHAPRKVVNEPSTIYCALNASFAICRKDKKIVARKLGAKCKEDKTCIWVPKDICTNLVGPNMSWVYASGGSSWIIDSGCTNHMTGEKKMFTSYVKNKDSQDSIVFDDGNQGKDKSETQGTLKRFLRRAQNEFELKVKKIRSDNGSEFKNLQVEEFLEEEGIKHEFSAPYTPQQNGVVERKNRSLIDMARTMLGEFKTPECFWTEAVNTACHAINRVYLHRLLKKTSYELLTGNKPNVSYFRVFGSKCYILVKKGRNSKFAPKAVEGFLLGYDSNTKAYRVFNKSSGLVEVSSDVVFDETNGSPREQVVDCDDVDEEDVPTAAIRTMAIGDVRPQEHLEQAQPSSSTMVHPPTQDDEQVPQVEACDQGGAQDDHVMEEEAQPAPPTQVRAMIQRDHPVDQILGDISKGVTTRSRLVNFCEHYSFVSSIEPFRVEEALLDPDWVLAMQEELNNFKRNEVWTLVPRPKQNVVGTKWVFRNKQDEHGVVTRNKARLVAKGYAQVAGLDFEETFAPVARLESIRILLAYAAHHSFRLYQMDVKSAFLNGPIKEEVYVEQPPGFEDERYPDHVCKLSKALYGLKQAPRAWYECLRDFLIVNAFKVGKADPTLFTKTCDGDLFVCQIYVDDIIFGSTNQKSCEEFSRVMTQKFEMSMMGELKYFLGFQVKQLKDGTFISQMKYTQDLLKRFGMKDAKPAKTPMGTDGHTDLNKGGKSVDQKAYRSMIGSLLYLCASRPDIMLSVCMCARFQSDPKECHLVAVKRILRYLVATPCFGLWYPKGSTFDLVGYSDSDYAGCKVDRKSTSGTCQFLGRSLVSWNSKKQTSVALSTAEAEYVAAGQCCAQLLWMRQTLRDFGYNLSKVPLLCDNESAIRMAENPVEHSRTKHIDIRHHFLRDHQQKGDIEVFHVSTENQLADIFTKPLDEKTFCRLRSELNVLDSRNLD

SEQ ID NO: 10098 - protein, 284 aa, Zea mays
  unsure (1)..(284): unsure at all Xaa locations
  Clone ID: TF_ZM4711.C1.o5.fg.pep
MDPKGKGMVINDKEKESFINEPKDDKPTDSGSSHKKKDGKKKRHIKKIVYYDSDEEEYHKVGGLDNAKQIWDTLKISHEGNDATMITKMELVEGELGRXHQDDARGNTRKVXSERMMIKEARYVDEALNDPMPIHEPQTVALKATSSREGLPSKVAQVEAARLNEDEMALIIKRFKMALKGRKEHPNKSKTKGKRSCFKCGKIGHFIANCPDNDSDQEQGKNGKRENKKVYKKAKGEAHLGKEWDSDCSSSDSDDEGLAATAFNKSSLFPNEHHTCLMAKEKKI

SEQ ID NO: 10099 - protein, 1607 aa, Zea mays
  Clone ID: TF_ZM4714.C5.o4.fg.pep
MDPKGKGIVINDKEKEFFVNEPRDDKSNDSGSGHSRKDGKKKKTRRIKEIVYYDSDESTSSQKDDDHNEYERKKPVNSNFSFDYSRIPQSTNAHLLSIPLGKPPHFDGEDYGFWSHKMRSHLFSLHPSIWEIVESGMHFDSTDSPMFINEQIHKNAQATTVLLASLCRDEYHKVSGLDNAKQIWDTLKISHEGNDVTLLTKMELVEGELGRFAMIRGEEPTQTYNRLKTLINKIRSYGSTRWTDHDVVRLMLRSFTVLDPHLVNNIRENPRYTKMSPEEVLGKFVSGRMMIKEARYVDDALNDPIHESQPIALKATRSKEALPSKVAQVEAAGLNNEEMALIIKRFKTVLKGRKGQPSKTKTKEKRSCFKCGKIGHFIANCPDNESDQEKGNKREKKKHYKKAKGEAHIGKEWDSDCSSSDSDNEGLAATAFNKSSLFPNERHTCLMAREKKVSTHDTSTYASSSEDESSDDDEIDYSCLFKGLDRSKINKINELIDALNYKNRLLEEQEDLLYEEHDKFVSAQNSLALEIKRNEMLSSELSTCHESISKLKSVNDDLNAKLEIASKSTSCVEIVETCNRCKDFDIDACSEHLVSISKLNDELASLNAQLKTSKSNFDKLKFARDAYTIGRHPSIKDGLGYKKEAKNLTRHKAPISAKEKGKAPMASSVQKNHAFMYHDRRESRNAYRRCNAYDAFDSHDMFASSSSYVHDRNVGRRNVVHNMPRRNVVNVPRKVYASGGSSWIIDSGCTNHMTGEKKMFTSYVKNKDSQDSIIFGDGNQGKDKSETQGTLKRFLRRAQNEFELKVKKIRSDNGSEFKNLQVEEFLEEERIKHEFSAPYTPQQNGVVERKNRTLIDMARTMLGEFKTPERFWSEAVNTACHAINRVYLHRLLKKTSYELLTDNKPNVSYFRVFGSRCYILVKKGRNSKFAPKAVEGFLLGYDSNTKAYRVFNKSSGFVEVSSDVVFDETNGSPREQVVDCDDVDEEDVPTAAIRTMAIGEVRPQEQDERDQPSSSTTVHPPTQDDEQVHQKEACDQGGAQDDHVMEEEAQPAPPTQVRAVIQRDHPVDQILGDISKGVTTRSRLVNFCEHYSFVSSIEPFRVEEALLDPDWVLAMQEELNNFKRNEVWTLVPRPKQNVVGTKWVFRNKQDEHGVVTRNKARLVAKGYAQVAGLDFEETFAPVARLESIRILLAYAAHHSFRLYQMDVKSAFLNGPIKEEVYVEQPPGFEDERYPDHVCKLSKALYGLKQAPRAWYECLRDFLIANAFKVGKADPTLFTKTCDCDLFVCQIYADDIIFGSTNQKSCEEFSRVMMQKFEMSMMGELNYFLGFQVKQLKDGTFISQTKYTQDLLKRFGMKDAKPAKTPMGTDGHTDLNKGGKSVDQKAYRSMIGSLLYLCASRPDIMLSVCMCARFQSDPKECHLVAVKRILRYLVATPCFGLWYPKGSTFDLVGYSDSDYAGCKVDRKSTSRMCQFLGRSLVSWNSKKQTSVALSTAEAEYVAAGQCCAQLLWMRQTLRDFGYNLSKVPLLCDNESAIRMAENPVEHSRTKHIDIRHHFLRDHQQKGDIEVFHVSTENQLADIFTKPLDEKTFCRLRSELNVLDSRNLD

SEQ ID NO: 10100 - protein, 1658 aa, Zea mays
  unsure (1)..(1658): unsure at all Xaa locations
  Clone ID: TF_ZM4715.C2.o2.fg.pep
MDPKGKGMVVNDKEKESFVNDPKENKPTDSGSSRKRKDGRKKKTRRIKEIVYYDSDGSSSSQKDDDNDYEKKKTVNSNFSFDYSRIPQSTNAHLLSIPLDGVGGRRTREIRDDKRGGATQTYNRLKTLVNKIRSYGSTRWTDHDVVRLMLRSFIVLDPHLVNNIRENPRYTKMSPEEILGKFVSGRMMIKEARYVDDALNGPIHEPQTVALKATRSKEALPSKVAQIEAVGLNEEEMTLIIKRFKTALKGRKEHPNKNKTKGKRSCFKCGKIGHFIANCPDNDSDQEKKSGKWEKKNYKKAKGEAHLGKDEDESSDDDEIEYSCLFKGLDRTKIDKINELIDALNDKNRLLEKQENLLYEEHDKFVSAQNSLALEVKRNEMLSCELSTCHETISTLKGVNDDLNAKVEVANKSNSCVEHVMICNKCKDFNVDACSEHLVCISKLNDEVASLNAQLKTSKSEFDKLKFARDAYTIGRHPSIKDGIGFKREVKNLTSHKASISAKEKGKALMASSAQKNHAFMYHDRRHSRNVYRSYDAFDSHAMVASSSSIMHDRNLARKNAMPRKNIVHVPRKLMNEPSTIYYALNASFAICRKDKKVVARKLGAKCKGDKTCIWVPKAICTNLVGPNMSWVYASGGSSWIIDSGCTNHMTGEKRMFSSYVKNKDPQDSTIFGDGNQGKVKGLGKIAISSEHSISNVFLVESLGYNLLSVSQSCNMGYNCLFTNVDVSVFKRSDGSLAFKGVLDDKLYLVDFAKEEADLDACLIAKTSMGWLWHRRLAHVGMKNLHKLLKGEHVIGLTNVTFEKDRPCAACQAGKQVGSSHHAKNVMTTSRPLELLHMDLFGPVAYLSIGGSKYGLVIIDDLSRFTWVFFLQDKSETQATLKRFLRRAQNEFELKVKKIRSDNGSEFKNIQVEEYLEEEGIKHEFSAPYTPQQNGVVERKNRTLIDMARMMLGEFKTPERFWSEAVNTACHAINRVYLHRLLKKTSYELLTIFGSKCYILVKKGRNSKFAPKAVEGFLLGYDSNTKAYRVFNKSSGLVEVSSDVVFDETNGSPREQVVDLDDVDEEDVPTAAIRTMAIGDVRPQEQNARDQPSSSTMVHPPTQDDEQVHQEETCDQGGAQNDHVMEEEAQQAPPTQVRAVIQRDHPVDQILGDISKGVTTRSRLVNICEHYSFVSSIEPFRVEEALLDPDWVLAMQEELNNFKRNEVWTLVPRPKQNVVGTKWVFRNKQDEHGVVTRNKARLVAKGYAQVAGLDFEETFAPVARLESIRILLAYAAHHSFRLFQMDVKSAFLNGPIKEEVYVEQPPGFEDERYPGHECKLSKALYGLKQAPRAWYECLRDFLIANAFKVGKVDPTLFTKTCDGDLFACQIYVDDIIFGSTNQKSCEEFSRVMTQKFEMSMMGELSYFLGFQVKQLKDGTFISQMKYTQDLIKRFGMKDAKPAKTPMGTDGHTDLNKGGKSVDQKAYRSMIGSLLYLCASRPDIMLSVCMCARFQSDPRECHLVAVKRILRYLVATPCFGIWYPKGSTFDLIGYSDSDYVGCKVDRKSTSGTCQYLGRSLVSWSSKKQTSVALSTAETEYVAAGQCCAQLLWMRQTLRDFGYNLSKVPLLCDNESAIRIADNPVEHSRTKHIDIRHHFLRDHQQXGDIEVFHVSTENQL

SEQ ID NO: 10101 - protein, 1683 aa, Zea mays
  Clone ID: TF_ZM4783.C4.o4.fg.pep
MDPKGKGMVVNDNEKESIFNEPRDDKANDSGSSQNKKDGKKKRRIKKIVYYDSDESSSSQKDDEYEEKKKMVNSNFSFDYSRIPHNSNAHLLSIPLGKPPHFDGEDYGFWSHKMRSHLFSLHPSIWEIVENGMRFDSSDNSMFINEQIHKNAQATTVLLASLCREEYNKVSGLDNAKQIWDTLKISHEGNDATMLTKMELVEGELGRFAMMKGEEPTQTYNRLKTLVNKIRSYGSMRWTDHDVVRLMLRSFTVLDPHLVNYIRENPRYIKMTPEKILRKFVSGRMMIKEARYVDDALNGPMPIYEPQTVALKATSSRETLPSKVAQVEAAGLNEDEMALIIKRFKTALKGHREHPNKSKTKGKRSCFKCGKIGHFIANCPDNDSDQEQGKTGKWEKKKTYKKAKGEAHLGKEWDLDCSSSDSDNEGLTATAFNKSSLFPNEHHTYLMAKEKKVSTRSTHTYASSSDDEVDYASLFKGLDRTKIDKINELIDASNEKNRLLEKQEDLLYEEHDKFVSAQNSLALEVKRNEMLSCELSTCHESISSLKSINDDLNTKLEIANKSSSLVEHVVICNRCKDFNVDACSEHLISIFKLNDEVASLNAQLKTSKNDFDKLKFARDAYTIGRHPSIKDGLGFQRETKNLTGQRAPIFNKEKGKAPMASSNQKNHAFIYDRKFSRNVHHDRSCNAYNSNVMIASSSSFMHSRDMPRKNVIHHMPRRKVVNHMPRKVYNGVTTVFHACNTKFILSCKNEKVIAKKVGAKCKGDKTCIWVPKAIVTNLVGPNKSWIIDSGCTNHMTGEKKMFTSYVKNKDSQDSIIFGDGKQGKVKGLGKIAISSEHSISNVFLVESLGYNLLSISQLCNMGYNCLFTNVDVSVFRRSDGSLAFKGVLDDKLYLVDFAKEEAGLDACLIANTSMGWLWHRSLAHVGMKNLHKLLKGEHVLGLTNVTFEKDRPCAACQAGKQVGNAHHNKNVMTTSRPLELLHMDLFGPVAYLSIGGSKYGLVIVDDFSRFTWVFFLQDKSETQGTLKRFLRRAQNEFELKVKKIRSDNGSEFKNLQVEEYLEEEGIKHEFSAPYTPQQNGVVERKNRTLIDMARTMLGEFKTVERFWSEAVNTACHAINRVYLHLLLKKTSYELLTSNKPNVSYFRVFGSKCYILVKKGRNSKFAPKAVEGFLLGYDSNTKAYRVFNKSSSLVEVSSNIVFDEINGSPREQVDIDDVDEEDVPTAAIRTMAIGDVRPQEQKEQDQPSSSTMVHPPTQDDEQVHHEETVEEALLDPDWVLAMQEELNNFKRNEVWTLVPRPKQNVVGTKWVFRNKQDEHGVVTRNKARLVAKGYAQVAGLDFQETFAPVARLESICILLAYATHHSFRLFQMDVKSAFLNGPIKEEVYVEQPPGFEDERYPDHVCKLSKALYGLKQAPRAWYECLRDFLIANAFKVGKADPTLFTKTCDGDLFVCQIYVDDIIFGSTNQKSCEEFSRVMTQKFEMSMMGELNYFLGFQVKQLKDDTFISQTKYTQDLIKRFGMKDAKPAKTPMGTDGHVDLNKGGSTFDLIGYSDSDYAGCKVDRKSTSGTCQFLGRSLDSVARQLLWMRQTLRDFGYNLSKVPLLCDNESAIRMADNPVEHSRTKHIDIRHHFLRDHQQKGDIEVFYVSTENQLADIFTKPLDEKTFCRLRSELNVLDSQNLD

SEQ ID NO: 10102 - protein, 1662 aa, Zea mays
  Clone ID: TF_ZM4840.C3.o2.fg.pep
MDPKGKGIVINDKEKESFVNEPKEDKPTDSGSGHRRREGKKKKTRRIKEIVYYDDSDESSSSQKDDDHNDYEQRKPVNSNFSFDYSRIPQSSNSHLLSIPLGKPPHFDGEDYGFWSHKMRSHLFSLHPSIWEIVDSGMHFNSSDSPIFINEQIHKNAQATTVLLASLCRDEYNKVSGLDNAKQIWDTLKISHEGNDATLLTKMELVEGELGRFAMIRGEEPTQTYNRLKTLINKIRSYGSTRWTDHDVVRLMLRSFTVLDPHLVNNIRENPRYTKMSPEEVLGKFVSGRMMIKEARYVDDALNGPINEPQPFALKATRSKEALPSKVAQIEAVGLNDEEMALIIKRFKTVLKGHKGQPSKTKTKGKRSCFKCGKIGHFIANCPDNDSDQEKGNKREKKKHYKKAKGEAHLGKEWDSDCSSSDSDNEGLAATAFNKSTLFPNERHTCLMAREKKVCTRNSTYASSSEDESSDDDEVDYSCLFKGLDRSKIDKINELIDALNEKNILLEKQEDLLYEEHDKFVEAQKSLALEIKRNEMLACEVSTCHDSISNLKSINDDLNAKLVEANKSNSCVEYVEICTRCKDIDINACSEHLVSISKLNDELASLNAQLKTSKSNFDKLKFARDAYTVGRHPSIKDGLGFKREVKNLTSHKAPISAKEKGKAPMASSTKKNHAFLYHDRSAYRGYNAYDDCDAHSSSFMHGRNMSRKNAMPRKNVIHAPRKVVNEPSTIYCALNASFVICRKDKKIVARKLGAKCKGDKTCIWVPKDICTNLVGPNMSWVYASGGSSWIIDSGCTNHMTGEKKMFTSYVKNKDSQDSIIFGDGNQGKIDLVQLVKQDKSETQGTLKRFLRRAQNEFELKVKKIRSDNGSEFKNLQVEEFLEEEGIKHEFSAPYTPQQNGVVERKNRTLIDMARTMLGEFKTPEYFWTEAVNTACHAINRVYLHRLLKKTSYELLTGNKPNVSYFRVFGSKCYILVKKGRNSKFAPKAVEGFLLGYDSNTKAYRVFNKSSGLVEVSSDVVFDETNGSPREQVVDCDDVDEEDVPTAAIRTMAIGDVRPQEQDERDQPSSSTMVHPPTQYIEQVHQQEACDQGGAQDDHMMEEEAQPAPPTQVRAVIQRDHPVDQILGDISKGVTTRSRLVNFCEHYSFVSSIEPFRVEEALLDPDWVLAMQEELNNFKRNEVWTLVPRPKQNVVGTKWVFRNKQDEHGVVTRNKARLVAKGYAQVAGLDFEETFAPVARLESIRILLAYAAHHSFRLYQMDVKSAFLNGPIKEEVYVEQPPGFEDERYPDHVCKLSKALYGLKQAPRAWYECLRDFLIANAFKVGKADPTLFTKTCDGDLFVCQIYVDDIIFGSTNQKSCEEFSRVMTQKFEMSMMGELNYFLGFQVKQLKDGTFISQTKYTQDLLKRFGMKDAKPAKTPMGTDGHTDLNKGGKSVDQKAYRSMIGSLLYLCASRPDIMLSVCMCARFQSDPKECHLVAVKRILRYLVATPCFGLWYPKGSTFDLVGYSDSDYAGCKVDRKSTSGTCQFLGRSLVSWNSKKQTSVALSTAEAEYVAAGQCCAQLLWMRQTLRDFGYNLSKVPLLCDNESAIRMAENPVEHSRTKHIDIRHHFLRDHQQKGDIEVFHVSTENQLADIFTKPLDEKTFCKLRSELNVLDSRNLD

SEQ ID NO: 10103 - protein, 1624 aa, Zea mays
  unsure (1)..(1624): unsure at all Xaa locations
  Clone ID: TF_ZM4869.C1.o9.fg.pep
MDPKGKGIVINDKEKESFVNEPRDDKSNDSGSGHRRKDGKKKKTRRIKEIVYYDSDESTSSQKDDDHNEYEKKKPVNSNFSFDYSRIPQSTNAHLLSIPLGKPPHFDGEDYGFWSHKMRSHLFSLHPSIWEIVESGMHFDSTDSPMFINEQIHKNAQATTVLLASLCRDEYHKVSGLDNAKQIWDTLKISHEGNDVTLLTKMELVEGELGRFAMIRGEEPTQTYNRLKTLINKIRIYGSTRWTDHDVVRLMLRSFTVLDPHLVNNIRENPRYTKMSPEEVLGKFVSGRMMIKEARYVDDALNGPIHEPQPIALKATRSKEALPSKVAQVEAAGLNNEEMALIIKRFKTALKGRKGQPSKTKTKEKRSCFKCGKIGHFIANCPDNESDQEKGNKREKKKHYKKAKGEAHIGKEWDSDCSSSDSDNEGLAATAFNKSSLFPNERHTCLMAREKKEIDYSSLFKGLDRTKVEKINELIDALNEKDRLLEKQEDLLYEEHDKFVEAQKSYALEVKRNEVLSSELSSCHETIATLKGVNNDLNAKLEVASKSNSCVEHVMVCTRCKDFNVDACSEHLVSISKLNDEVASLNAQLKTSKSEFNKLKFARDAYTIGRHPSIKDGLGFKREAKNLTSHKAPIPAKEKGKAPMAGSAKKNHAFMYHDRRHTRNANRSYNVFDSYVYDSHDMFASSSFYVHDRNVGRRNVVHNMPRRNVVNVPRKVNEPSTIYHALNASFAICRKDRKVIARKLGAKCKGDKTCIWIPKEIVTNLVGPNKSWVYASGGSSWIIDSGCTNHMTGEKKMFTSYVKNKDSQDSIIFGDGNQGKVKGLDVSVFRRSDDSLAFKGVLDGKLYLVDFEKEEDKSETQGTLKRFLRRAQNEFELKVKKIRSDNGSEFKNLQVEEFLEEEGIKHEFSAPYTPQQNGVVERKNRTLIDMARTMLGEFKTPERFWSEAVNTACHTINRVYLHRLLKKTSYELLTGNKPNVSYFRVFGSKCYILVKKGRNSKFAPKAVEGFLLGYDSNTKAYRVFNKSSGLVEVSSDVVFDETNGSPREQVVDCDDVDEEDVPTAAIRTMAIGEVRPQEQDKRDHPSSSTTVPPPTQDDEQVHQQEACDQGGAQDDHVMEEEAQPAPPTQVRAMIQRNHPVDQILGDISKGVTTRSRLVNFCEHYSFVSSIEPFRVEEALLDPDWVVAMQEELNNFKRNEVWTLVPHPKQNVVGTKWVFRNKQDEHGVVTRNKARLVAKGYAQVTGLDFEETFAPVARLESIRILLAYAAHHSFRLYQMDVKSAFLNGPIKEEVYVEQPPGFEDERYPDHVCKLSKALYGLKQAPRAWYECLRDFLIVNAFKVGKADPTLFTKTCDGDLFVCQIYVDDIIFGSTNQKSCEEFSRVMTQKFEMSMMGELNYFLGFQVKQLKDGTFISQTKYTQDLLKRFGMKDAKPAKTPMGTDGHTDLNKGGKSVDQKAYRSMIGSLLYLCASRPDIMLSVCMCARFHSDPKECHLVAVKRILRYLVATPCFGIWYPKGSNFDLIGYSDSDYAGCKVDRKSTSGTCQLLGRSLVSWNSKKQTSVALSTAEAEYVAVGQCCAQLLWMRQTLRDFGYNLSKVPLLCDNESXIRMAENPVEHSRTKHI

SEQ ID NO: 10104 - protein, 1023 aa, Zea mays
  Clone ID: TF_ZM4878.C20.o2.fg.pep
MDPKGKGIVVNNEKESIFNEPKDDKPTDSGSSHKRKDGKKKKTRRIKEIVYYDSDESSSSQKDDDDYEKKKTVNSNFSFDYSRIPQSTNAHLLSVPLGKPPHFDGEDYGFWNHKMRSHLFSLHPSIWEIVESGMHFDSTESPMFINEQIHKNAQATTVLLASLCRDEYHKVSGLDNAKQIWDTLKISHEGNDVTLLTKMELVEGELGRFAMIRGEEPTQTYNRLKTLINKIRSYGSTRWTDHDVVRLMLRSFTVLDPHLVNNIRENPRYTKMSPEEVLGKFVSGRMMIKEARYVDDALNGPINEPQPVALKATRSKEALPSKVAQIEAARLNDEEMALIIKRFKTALKGRKGQPSKTKAKGKRSCFKCGKIGHFIANCPDNESDQEHGSKREKKKNYKKAKGETHLGKEWDSDCSSSDSDNEGLAATAFNKSSLFPNERHTCLMAREKKVCSRNSTYASSSEDESSDEDEIDYSCLFKGLDRTKVDKINELIDALNDKNRLLEKQEDLLYEEHDKCVEAQKSHALEVKRNEMLSCELSSCHETISSLRSINDDLNAKIEIASKSTTCVENVVICNRCKDFDIDACNEHIASIAKLNDEMASLNAQLKASKSDFDKLKFARDAYTIGRHPSIKDGLGFKREAKNLTSHKAPIFAKEKGKAPMASSTKKNHAFMYNDRRQSHRSCNTFDSHAYDSYAIKDRKIVARKLGAKCKGDKACIWVPKEIVTNLVGPNKSWVYASGGSSWIIDSGCTNHMTGEKEMFTSYVKNKDSQDSIIFGDGNQGKVKGLGKIAISNEHSISNVFLVESLGYNLLSVSQLCNMGYNCLFTNVDVSVFRRSDGSLAFKGVLDGKLYLVDFAKEEAGLDACLIAKTSMGWLWHRRLAHVGMKNLHKLLKGEHVIGLTNVQFEKDRPCAACQAGKQVGGAHHSKSVMTTSRPLELLHMDLFGPVTYLSIGGSKYGLVIVDDFSRFTWVFFLQDKSETQGTLKRFLKRAQNEFELKVKKIRSDNGSEFKNLQVEEFLEEEG

SEQ ID NO: 10105 - protein, 1602 aa, Zea mays
  Clone ID: TF_ZM4879.C3.o2.fg.pep
MDPKGKGMVVDNNEKESIFNEPKNDKSTDLGSSHKRKDGKKKKTRRIKEIVYYDSDESSSSQKDDDNDYRKTVNSNFSFDYSRMPHSSNSHLLSIPLGKPPHFDGEDYGFWSHKMRSHLFSLHPSIWEIVENGMKFDSSDSPMFINEQIHKNAQATTVLLASLCREEYNKVSGLDNAKQIWDTLKISHEGNDITMLTKMELVEGELGRFAMIRGEEPTQTYNRLKTLINKIRSYGSTRWTDQTYTKMSPEEVLGKFVSGRMMIKEARYVDDALNGPINEPQPLALKATRSKEALPSKVAQIEAAGLNDEEMALIIKRFKMVLKGHKGQPSKTKTKGKRSCFKCGKIGHFIANCPDNDSDQEQGNKREKKKNYKKTKGEAHLGKEWDSDCSSSDSDNEGLAATAFNKSTLFPNERHTCLMAREKKVCTRNSTYASSSEDESSDEDEVDYSCLFKGLDRTKVDKINELIDALNDKNMLLEKQEDLLYEEHDKFVEAQRSHALEVKRNEMLSCEISSCHETISKLRSINDDLNAKLEIASKSTTCVENVIMCTRCKDINLDAYSEHLACISKLNEEVASLNAQLKTSKSDFEKLKFARDAYTVGRHPSIKDGLGFKREAKNLTSHKAPIPAKEKGKAPMASSVQNNHAFIYHDRRQSRNAYRNCNAYDAINSHAMFASSSSYVHDRNVCRRNVVHNMPRRNGVNVPRKANEPSTIYHALNASFAICRKDRKIVARKLGARCKGDKTCIWVPKDICANLVGPNMSWVYASGGSSWIIDSGCTNHMTGEKKMFTSYVKNKDSQDSIIFGDGNQGKDKSETQGTLKRFLRRAQNEFELKVKKIRSDNGSEFKNLQVEEFLEEEGIKHEFSAPYTPQQNGVVERKNKTLIDMARTMLGEFKTPECFWTEAVNTACHAINRVYLHRLLKKTSYELLTGNKPNVSYFRVFGSKCYILVKKGRNSKFAPKAVEGFLLGYDSNTKAYRVFNKSSGLVEVSCDVVFDETNGSPREQVVDLDDVDEEDVPTAAIRTMTIGDVRPREQLEQDQPSSSTMVHPPTQDDEQVHQQEACDQGGAQDDHVMEEEAEPAPPTQVRAMIQRDHPVDLILGDISKGVTTRSRLVNFCEHYSFVSSIEPFRVEEALLDPDWVLAMQEELNNFKRNEWVFRNKQDEHGVVTRNKARLVAKGYAQVAGLDFEETFAPVARLESIRILLAYAAHHSFRLFQMDVKSAFLNGPIKEEVYVEQPPGFEDERYPDHVCKLSKALYGLKQAPRAWYECLRDFLIANAFKVGKVDPTLFTKTCDGDLFVCQIYVDDIIFGSTNKKSCEEFSRVMTQKFEMSMMGELNYFLGFQVKQLKDDTFISQTKYTQDLLKRFGMKDAKPAKTPMGTDGHTDLNKGGKSVDQKAYRSMIGSLLYLCASRPDIMLSVCMCARFQSDPKECHLVAVKRILRYLVATPCFGLWYPKGSTFDLIGYSDSDYAGCKVDRKSTSGTCQFLGRSLVSWNSKKQTSVALSTAEAEYVAAGQCCAQLLWMRQTLRDFGYNLSKVPLLCDNESAIRMAENPVEHSRTKHIDIRHHFLRDHQQKGDIEVFHVSTENQLADIFTKPLDEKM

SEQ ID NO: 10106 - protein, 1555 aa, Zea mays
  Clone ID: TF_ZM4879.C4.o2.fg.pep
MDPKGKGIVINDKEKESFVNEPKDDKPTDSGSGHRRKEGKKKKTRRIKEIVYYDDSDESTSSQKDDDNDYRKTVNSNFSFDYSRIPHSSNSHLLSIPLGKPPHFDGEDYGFWSHKMRSHLFSLHPSIWEIIENGMKFDSSDSPMLINEQIHRNAQATTVLLASLCREEYNKVSGLDNAKQIWDTLKISHEGNDVTMLTKMELVEGELGRFAMIRGEEPTQTYNRLKTLVNKIRSYGSTRWTDHDVVRLMLRSFTVLDPHLVNNIRENPRYTTMTPEEVLGKFVSRRMMIKEARYVDDALNGPIHEPQPIALKATRSKEALPSKVAQVEVAGLNNEEMALIIKRFKTALKGRKGQPSKTKTKEKRSCFKCGKIGHFIANCPDNESDQEKGNKREKKKHYKKAKGEAHIGKEWDSDCSSSDSDNEGLAATAFNKSSLFPNERHTCLMAREKKVSTHDTSTYASSKHVTICRRCKDFDVDACSDHLVSISKLNEELASLNAQLKTSKNEFDKLKFARDAYTIGRHPSIKDGLGYKREAKDLTSHKAPISAKEKGKAPMASSTKRNHAFMYHDKRQTRNAYRSYNAYDDFDSHAMFASSSSYMHGRNMSRRNAIHHVPRKNIIHAPRKVVNEPSTIYCALNASFAICRKDRKIVARKLGAKCKGDKTCIWVPKDICTNLVGPNKSWVYASGGSSWIIDSGCTNHMTGEKKMFTSYVKNKDSQDSIIFGDGNQGKDKSETQGTLKRFLRRAQNEFELKVKKIRSDNGSEFKNLQVEEFLEEEGIKHEFSAPYTPQQNGVVERKNRALIDMARTMLGEFKTPERFWSEAVNTACHAINRVYLHRLLKKTSYELLTGNKPNVSYFCVFGSKCYILVKKGRNSKFAPKAVEGFLLGYDSNTKAYRVFNKSSGLVEVSSDVVFDETNGSPREQVVDLDDVDEEDVPTAAIRTMAIGEVRPQEQDERDQPSSSTMVHPPTQDDEHVHQQEACDQGGAQDDHVMEEEAQPAPPTQVRAVIQRDHPVDQILGDISKGVTTRSRLVNFCEHYSFVSSIEPFRVEEALLDPDWVLAMQEELNNFKRNEVWTLVPRPKQNVVGTKWVFRNKQDEHGVVTRNKARLVAKGYAQVARLDFEEMFAPVARLESIRILLAYAAHHSFRLYQMDVKSAFLNGPIKEEVYVEQPPGFEDERYPDHVCKLSKALYGLKQAPRAWYECLRDFLIANAFKVGKADPTLFTKTCDGDLFVCQIYVDDIIFGSTNKKSCEEFSRVMTQKFEMSMMGELNYFLGFQVKQLKDGTFISQTKYTQDLLKWFGMKDTKPAKTPMGTDGHTDLNKGGKSVDQKAYRSMIGSLLYLCASRPDIMLSVCMCARFQSDPKECHSVAVKRILRYLVATPCFGLWYPKGSTFDLIGYSDSDYAGCKVDRKSTSGTCQFLGRSLVSWNSKKQTSVALSTAEAEYVVAGQCCAQLLWMRQTLRDFGYNLSKVPLLCDNESAIRMAENPVEHSRTKHIDIRHHFLRDHQQKGDIEVFHVSTENQLADIFTKPLDEKTFCRLRSELNVLDSRNLD

SEQ ID NO: 10107 - protein, 624 aa, Zea mays
  Clone ID: TF_ZM4884.C14.o1.fg.pep
MDPKGKGIVINDKEKESFVNEPKDDKSNDSGSGHKHKDGKKKKTRRIKEIVYYDSDESSSSQKDDDNDYRKTVNSNFSFDYSRIPHSSNSHLLSIPLGKPPHFDGEDYGFWSHKMRSHLFSLHPSIWEIVENGMKFDSSDSPMFINEQIHKNAQATTVLLASLCRDEYNKVSCLDNAKQIWDTLKISHEGNDITMLTKMELVEGELGRFAMIRGEEPTQTYNRLKTLINKIRSYGSTRWTDHDGVRLMLRSFTVLDPYLVNNIRENPRYTKMTPEEVLGKFVSGRMMIKEARYVDDALNGPINEHQPLALKATRSKEALPSKVAQIEAAGLNDEEMALIIKRFKTVLKGHKGQPSKTKTKGKRSCFKCGKIGHFIANCPDNDSDQEQGNKREKKKNYKKAKGEAHIGKEWDSDCSSDSDNEGLAATAFNKSSLFPNERHTCLMAREKKVSTRDSTYASSSDNESSDDDDIDYSCLFKGLDRSKIDKINELIDALNDKNVLLERQEDLLYEEHDKFVEAQKSLALEIKRNEMLSCELSTCHDSIASLKSINDDLNTKLEKSSKSTSCVEHVEICTRCKDFDVDACSDHLVSISKLTEELASLNAQLKTSKNEFDKLKFARDAYTI

SEQ ID NO: 10108 - protein, 1642 aa, Zea mays
  Clone ID: TF_ZM4892.C2.o7.fg.pep
MDPKGKGIVINDKEKESFVNEPRDDKSNNSGSGHKRKDGKKKKTRRIKEIVYYDSDESSSSQKDDDNDYRKTVNSNFSFDYSRIPHSSNSHLLSIPLGKPPHFDGEDYGFWSHKMRSHLFSLHPSIWEIVENGMKFDSSDSPMLINEQIHRNAQATTVLLASLCREEYNKVSGLDNAKQIWDTLKISHEGNDITMLTKMELVEGELGRFAMIRGEEPTQTYNRLKTLINKIRSYGSTRWTDHDVVRLMLRSFTVLDPHLVNNIRENPRYTMMTPEEVLGKFVSGRMMIKEARYVDDALNGPLHEPQPIALKATRNKESLPSKVAQVEAAGLNDEEMALIIKRFKTVLKGHKGQPSKNKTKGKRSCFKCGKIGHFIANCPDNDSDQEQGNKREKKKNYKKAKGEAHLGKEWDSDCSSSDSDNEGLAATAFNKSALFPNEHHTCLMAREKKTSKSDFEKLKFARDAYTVGRHPSIKDGLGFKREAKNLTSHKAPIPAKEKGKAPMASSAKRNHAFMYHDRRHARNACNDFDSYVYDSHAMFAPSSSYVYDRNVTRRNVVPKKNVIHAPRKVANEPSTIYYTCNAPFAICRKDKKVYASGGSSWIIDSGCTNHMTGEKKMFTSYVKNKDSQDSIIFGDGNQGKVKGLVESLGYNLLSVSQLCNMGYNCLFTNIDVSVFRRCDGSLAFKGVLDGKLYLVDFAKEEAGLDACLIAKTSMGWLWHRRLAHVGMKNLHKLLKGEHVIGLTNVQFEKDRPCAACQAGKQVGGSHHTKNVMTTSRPLEMLHMDLFGPVAYLSIGGSKYGLVIVDDFSRFTWVFFLQEKSETQGTLKRFLRRAQNEFELKVKKIRSDNGSEFKNLQVEEFLEEEGIKHEFSAPYTPQQNGVVERKNRTLIDMARTMLGEFKTPECFWTEAVNTACHAINRVYLHRILKNTSYELLTGNKPNVSYFRVFGSKCYILVKKGRNSKFAPKAVEGFLLGYDSNTKAYRVFNKSSGLVEVSGDVVFDETNGSPREQVVDCDDVDEEDIPTAAIRTMAIGEVRPQEQDEREQPSPSTMVHPPTQDDEQVHQQEVCDQGGAQDDHVLEEEAQPAPPTQVRAMIQRDHPVDQILGDISKGVTTRSRLVNFCEHYSFVSSIEPFRVEEALLDPDWVLAMQEELNNFKRNEVWTLVPRPKQNVVGTKWVFRNKQDERGVVTRNKARLVAKGYAQVAGLDFEETFAPVARLESIRILLAYAAHHSFRLYQMDVKSAFLNGPIKEEVYVEQPPGFEDERYPDHVCKLSKALYGLKQAPRAWYECLRDFLIANAFKVGKADPTLFTKTCDGDLFVCQIYVDDIIFGSTNQKSCEEFSRVMTQKFEMSMMGELNYFLGFQVKQLKDGTFISQTKYTQDLLKRFGMKDAKPAKTPMGTDGHTDLNKGGKSVDQKAYRSMIGSLLYLCASRPDIMLSVCMCARFQSDPKECHLVAVKRILRYLVATPCFGLWYPKGSTFDLVGYSDSDYAGCKVDRKSTSGTCQFLGRSLVSWNSKKQTSVALSTAEAEYVAAGQCCAQLLWMRQTLRDFGYNLSKVPLLCDNESAIRMAENPVEHSRTKHIDIRHHFLRDHQQKGDIEVFHVSTENQLADIFTKPLDEKTFCRLRSELNVLDSRNLD

SEQ ID NO: 10109 - protein, 666 aa, Zea mays
  Clone ID: TF_ZM4893.C6.o7.fg.pep
MDPKGKGIVINDKEKESFVNEPRDDKSNDSGSGHRRKDGKKKKTRRIKEIVYYDSDESTSSQKDDDHNEYERKKPVNSNFSFDYSRIPQSTNAHLLSIPLGKPPHFDGEDYGFWSHKMCSHLFSLHPSIWEIVESGMHFDSTDSPMFINEQIHKNAQATTVLLASLCRDEYHKVSGLDNAKQIWDTLKISHEGNDVTLLTKMELVEGELGRFAMIRGEEPTQTYNRLKTLINKIRSYGSTRWTDHDVVRLMLRSFTVLDPHLVNNIRENPRYTKMTPEEVLGKFVSGRMMIKEARYVDDALNGPIHEPQPIALKATRSKEALPSKVVQVEAAGLNNEEMALIIKRFKMALKGHKGQPSKTKTKGKRSCFKCGKIGHFIANCPDNDSDQEQGNKREKKKNYKKAKGEAHIGKEWDSDCSSSDSDNEGLAATAFNKSSLFPNERHTCLMAREKKVSTHDTSTYASSSEDESSAEDEVDYSCLFKGLDRTKVDKINELIDALNDKNMLLEKQEDLLYEEHDKFVEAQKSHALEVKRNEMLSCELSSCHETISKLRSINDDLNAKLEIASKSTSCVENVVTCTRCKDINIDAYSEHLACISKLNEEVASLSAQLETSKSDFEKLKFARDAYTVGRHPSIKDGLGFKREVKNLTSHKAPISAKEKGKAPMA

SEQ ID NO: 10110 - protein, 1656 aa, Zea mays
  unsure (1)..(1656): unsure at all Xaa locations
  Clone ID: TF_ZM4904.C1.o5.fg.pep
MDPKGKGIVINDKEESFINEPKDDKPTDSGSSHKKKDGKKKRRIKKIVYYDDSDKSSSSQKDNDDNDYEKKKTVNSNFSFDYSCIPHSSNAHLLSIPLGKPPHFDGEDYRFWSHKMRSHLFSLHPSIWEIVENGMQFDSTDSPLFINEQIHKNAQATTVLLASLCKDEYHKVSGLDNAKQIWDTLRISHEGNDVTMLTKMELVEGKLGRFAMIRGEEPTQTYNRLKTLVNKIRSYGSTRWTDHDVVRLMLRSFTVLDPHLVNNIRENPRYTKMSPEEILGKFVSGRMMIKEARYVDEALNGPIHEPQAIALKATNSKEALPSKVAQVEAAGLNEEEMALIIKRLKTTLKGRKEHPKKTKTKGKRSCFKCGKIGHFIANCPDNDSDQEQGKNGKRENKKVYKKAKGEAHLGKEWDSDCSSSDSDDEGLAATAFNKSSLFPNEHHTCLMAKEKKVSTRNAITYASSSDDESSDDEIDYASLFKGLDRTKIDKINELIDALNDKNRLLEKQEDLLYEEHDKFVEAQKSLALEVKRNEMLSCELSTCHETISSLKSVNDDLNAKLEVANRSNSCVEHVVICNRDAYTIGRHPSIKDGLGFKREAKNLTSHKAPISAKEKGKAPMTNSSQKNHAFIYGDKRYSRNAHRSCNAYDSNVMFASSSSIMHDRNFARKNVVHHMPRRNVVHVPRKVYASGGSSWIIESGCTNHMTGEKKMFTSYVKNKDSQDSIIFGDENQGKVKGLGKIAISSEHSISNVFLVESLGYNLLSISQLCNMGYNCLFTNVDVSVFRRSDGSLAFKGALDDKLYLVDFAKEEAGLDACLIAKTSMGWLWHRRLAHVGMKNLHKLLKGEHVIGLTNVTFEKDRPCAACQAGKQVGSSHHTKNVMTTSRPLELFHMDLFGPVAYLSIRGSKYGLVIVDDFSRFTWVFFLQDKTETQGTLKRFLRRAQNEFELKVKKIRSDNGSEFKNLQVEEYLEEEGIKHEFSAPYTPQQNGVVERKNRMLIDMARTMLGEFKTPERFWSEAVNTACHAINRVYLHHLLKKTSYELLTGNKPNVSYFRVFGSKCYTLVKKGRNSKFAPKAVEGFLLGYDSNTKAYRVFNKSSGLVEVSSDVVFDETNGSPREQVELDDVDEDDVPMDAIRTMAIGDVRPQEHKEQDQPSSSTTVHPPTQDDEQVPQEEACDQGGTQDVQVEEEEAPQAPPTQVRAMIRRNHPVDQILGDIIKGVTTCSRLVNFCEHYSFVSSIEPFRVEEALLDPDWVLAMQEELNNFKRNEVWTLVPRPKQNIVGTKWVFRNKQDEHGVVTRNKARLVAKGYAQVTGLDFEETFAPMARLESIRILLAYAAHHSFRLYQMDVKSAFLNGPIKEEVYVEQPPGFEDERYPDHVCKLSKALYGLKQAPRAWYECLRDFLIANAFKVGKADPTLFTKTCDGDLFVCQIYVDDIIFGSTNQKSCEEFSRVMTQKFEMSMMGELNYFLGFQVKQLKDGTFISQTKYTQDLIKRFGMKDAKPAKTPMGTDGHVDLNKGGKFVDQKVYRSMIGSLLYLCASRPDIMLSVCMCSRFQSDPRECHLVAVKRILRYLVATPCFGIWYPKGSTFDLIGYSDSDYAGCKVDRKSTSGTCQFLGRSLVSWSSKKQTFVALSTAEAEYVAAGQCCAQXLWM

SEQ ID NO: 10111 - protein, 1773 aa, Zea mays
  Clone ID: TF_ZM4904.C1.o7.fg.pep
MVINDNEKSIFNEPRDDKANDSGSSQKKKDGKKKRRIKKIVYYDSDESSSSQKDDEYEEKKKTVNSNFSFDYSRIPQNSNTHLLSIPLGKPPHFDGEDYGFWSHKMCSHLFSLHPSIWEIVENGMQFDSSDNSMFINEQIHKNAQATTVLLASLCRDEYHKVSGLDNAKQIWDTLKISHEGNDVTMLTKMELVEGKLGRFAMIRGEEPTQTYNRLKTLVNKKRSYGSTRWTDHDVVRLMLRSFTILDPHLVNSIRENPRYTKMTPEEILGKFVSGRMMIKEARYIDEVLNGPIHEPQTVSLKATSSREALPSKVAQVEAVGLNEDEMALIIKRFKTALKGRKEHPNKSKTKGKRSCFKCGKIGHFIANCPDNDSDQEQGKSGKWEKKKAYKNAKGEAHLGIEWDSDCSSSDSDNEGLAASAFNKSALFPNEHHTCLMAKEKKVSTRSTIMYASSSDDESSDDEVDYASLFKGLDKTKIDKINELIDALNEKNRLLEKQEDLLYEEHDKFVSAQNSLALEVKRNEMLSCELSTCHESISSLKSINNDLNTKLEIANKSISCVDHVVICNRCKDFNVDACSEHLISISKLNDEVAILNAQLKTSKNEFDKLKFARDAYTIGRHPSIKDGLGFRREAKNLTSHKAPIFNKEKGKAPMTSNSQKNHAFMYHDRKFSRNVHHDRSCNVYDSNAMIASSSSFVHGRDMPRKNVTHHMPRTNVVNHMPRKVYNRLTTVFHACNTKFVLSCRNEKVIAKNVGAKCKGDKTCIWVPKAIVTNLVGPNKSWVYASGGSSWIIDSGCTNHMTGEKKMFTSYVKNKDSQDSIIFGDGNQGKVKGLGKIAISSEHSISNVFLVESLGYNLLSVSQLCNMGYNCLFTNVDVSVFRRSDGSLAFKGVLDDKLYLVDFAKEEAGLDACLIAKTSMGWLWHRRLAHVGMKNLHKLLKGEHVLGLKNDKSETQGTLKRFLRRAQNEFELKVKKIRSDNGSEFKNLQVEEYLEEEGIKHEFSAPYTPQQNGVVERKNRTLIDMARTMLGEFKTPERFWSEAVNTACHAINRVYLHRLLKKTSYELLTGNKPNVSYFRVFGSKCYILVKKGRNSKFAPKAVEGFLLGYDSNTKAYRVFNKSSGLVEVSSDVVFDETNGSPREQVDPNDVDEYDVPTDVIHTMAIGDVRPQEHQEQDQPSSSTMVHPPIQDDEQVHQEEACDQGGAQDDHVIEEEAPQAPPTQVRATIQRKHPVDQILGDISKGVTTRSRLVNFCEHYSFVSSIEPFRVEEALLDPDWVLAMQEELNNFKRSEVWTLVPRPKQNVVGTKWVFRNKQDEHGVVTRNKARLVAKGYAQVAGLDFEEIFAPVARLESIRILLAYAAHHSFRLFQMDVKSAFLNGPIKEEVYVEQPPGFEDERYPDHVCKLSKALYGLKQAPRAWYECLRDFLIVNAFKVGKADPTLFTKTCDGDLFVCQIYVDDIIFGSTNQKSCEEFSRVMTQKFEMSMMGELNYFLGFQVKQLKDGTFISQTKYTQDLIKRFGMKDAKPAKTPMGTDGHVDLNKGGKSVDKKACRSMIGSLLYLCASRPDIMLSVCMCARFQSNPRECHLVAIKRILRYLVATPCFEIWYPKGSTFDLIGYSDSDYAGCKVERKSTSGTCQFLGRSLVSWSSKKQTSVALSTAEAEYVAAGQCCAQLLWMRQTLRDFGYNLSKVPLLCDNESAIRMADNPVEHSRTKHIDIRHHFLRDHQQKGDIEVFYVSTENQLVDIFTKPLDESTFCRLRSELNVLDSRNLD

SEQ ID NO: 10112 - protein, 1331 aa, Zea mays
  Clone ID: TF_ZM4940.C1.o6.fg.pep
MNPLLPKKDDGNVYENKKTVNSNFSFDYSHIPQSTNAHLLSIPLGKPPHFDGEDYRFWSHKMSSHLFSLHPSIWEIVESEMKFDSSDSPLFINEQIHKNAQATTVLLASLCRDEYHKVSGLDNAKQIWDTLKILHEGNDVTMLTKMELVEGELGRFAMIRGEEPTQTYNRLKTLVNKIRSYGSTRWTDHDVVRLMLRSFTVLDPHLVNNIRENPRYTKMTPEEILGKFVSGRMMIKEARYVDDALNGPIQEPQTIALKATRSKEALPSKVAQVEAAGLNDEEMALIIKRFKMALKGRKEHPNKNKTKGKRSCFKCGKIGHFIANCPDNDSDQEKKSGKWEKMKNYKKAKGEAHLGNEWDSDCSSSDSDNEGLAATAFNKSSLFPNEYHTCLMAREKKVNTRNTSTYASSSEDESSDDDEIDYSCLFKGLDRTKVDKINELIDALNDKNRLLEKQEDLLYEEHDKFVSAQNSLALEVKRNEMLSCELSTCHETISTLKDVNDDLNAKLEVANKSNSCVEHVMICNRCKDVDVDACSEHLICISKLNDEVASLNAQLKTSKSEFEKLKFARDAYTIGRHPSIKDGLGIKKEVKNLTSHKAPISAKEKGKAPMARSAQKNHAFMYHDRRHSRNVYRSYDAFDSHAMVASSSSIVHDRNLARRNAINHMPRRNVVHVPRKTNSEPSTIYHALNASFAICRKDRKIITRKLGAKCKGDKTCIWVPKTICTNLVGPNMSWYLRPKPKFALQVYASGGSSWIIDSGCTNHMTGEKRMFSSYVKNKDPQDSIIFGDGNQGKIKGLGKIAISNEHSISNVFLVESLGYNLLSVSQLCNMGYNCLFTNVDVSVFRRSDGSLAFKGVLDDKLYLVDFAKEEAGLDACLIAKTSMGWLWHRRLAHVGMKNLHKLLKGEHVIGLTNVTFEKDRPCAACQAGKQVGSTHHAKNVMTTSRPLELLHMDLFGPVAYLSIGGSKYGLVIVDDFSRFTWVFFLQDKSETQGTLKRFLRRAQNEFEIKVKKIRNDNGSEFKNLQVEEYLEEEGIKHKFSAPYTPQQNGVVERKNRTLIDMARTMLGEFKTPERFWSEAVNTACHAINRVYLHRLLKKTSYELLTGNKPNVSYFRVFGSKCYILVKKGRNSKFAPKAVEGFLLGYVSNTKAYRVFNKSSGLVEVSSDVVFDETNGSPREQVVDLDDVDEEDVLMAAMRTMVIGDVRPMEQKEQDQPSSSTMVHPPTQEDEQVHQEEAWDQGGAQDDQVMEEEAQPAPPTQVRAMIQRDHLVDQILGDISKGVTTRSRLVNFCEHYSFVSSIEPFRVEEALLDPDWVLAMQEELNNFKRNEV

SEQ ID NO: 10113 - protein, 1583 aa, Zea mays
  Clone ID: TF_ZM4940.C2.o17.fg.pep
MDPKGKGIVINDKEKESFVNKPKDDKPTDSGSGHKRRDGKKKKTRRIKEIVYYDDSDESTSSQKDNDDNDYDKRKTVNSNFSFDYSRIPQSTITHLLSIPLGKPPHFDGEDYGFWSHKMCSHLFSLHPSIWEIVESGMKFDSNDSPMFINEQIHKNAQATTVLLASLCRDEYHKVSGLDNAKQIWDTLKISHEGNDVTMLTKMELVEGELRRFAMISGEEPTQTYNRLKTLINKIRSYGSTRWMDHDVVRLMLRSFTVLDPHLVNNIRENPRYTKMTPEEILGKFVSGRMMIKEARYVDDTLNGPIHEPQPIALKATRSKEALPSKVAQVEAAGLNDEEVALIIKRFKTTLKVRKEHPNKNKTKGKRSCFKCGKIGHFIANCPDNDSDQEKKSGKWEKKKNYKKAKGEAHLGKEWDSDCSSSDSDNEGLAATAFNKSSLFPNEHHRCLMAKEKKVCTRNNTTYASSSEDESSDDDEIDYSCLFKGLDRTKIDKINELIDALNDKNRLLEKQEDLLYEEHDKFVGAQKSHALEVKRNEMLACELSTCHETISSLRSINDDLKAKSEIASKSTSCVENVVTCNRCKDFDIDACSKHLASMSKLNDEVASLNAQLKTSKSEFDKHPSIKDGLGFKREAKNLTSHKAPISAKEKGKAPMAISAKKNHAFMYHDRRYSRNAYRSYDTYDSYAMTASSSHVVHDRDIPRRNVVPRKINEPSTIYHACNDSFAICRKDKKVYASGGSSWIIDSGCTNHMTGEKKMFTSYVKNKGPQDSIIFGDGNQGKVKGLVKIAISNEHSISNVFLVDSLGYNLLSVSQLCNMGYNCLFTNVDVSVFRRSDGSLAFKGVLDGKLYLVDFAKEEVGLDACLIAKTSMGWLWHRRLAHVGMKNLHKLLKGEHVIGLTNVTFEKDRPCAACQAGKQVGSSHHAKNVMTTSRPLELLHMDLFGPVAYLSIGGSKYGLVIVDDFSRFTWVFFLQDKSETQGTLKRFLRRAQNEFELKVKKIRSDNGSEFKNLQVEEYLEEEGIKHEFSAPYTPQQNGVVERKNRTLIDMARTMLGEFKTPERFWSEAVNTACHAINRVYLHRLLKKTSYELLTGNKPNVSYFRVFGSKCYILVKKGRNSKFAPKAVEGFLLGYDSNTKAYRVFNKSSGLVEVSSDVVFDETNGSPREQVVDFDDVDEEEVPTAAIRTMAIGDVQPQEQDERDQPSSSTKVQPPTQDDEQEACDQGGAQDDHVMEEEAQPAPSTQVRAMIQRDHPVDQILGDISKGVTTRSRLVNFCEHYSFVSSIEPFRVEEALLEPDWVLVMQEELNNFKRNEVWTLVPRPKQNVVGTKLFQMDVKSAFLNGPIKEEVYVEQPPSFEDERYPDHVCKLSKALYGLKQAPRAWVMTQKFEISMMGELSYFLGFQVKQLKDGTFISQTKYTQDLIKRFGMKDAKPAKTPMGTDRHTDLNKGGKSVDQKAYQSMIGSLLYLCASRPDIMLSVCMCARFQSDPKECHLVAVKRILRYLVATPCFGIWYPKGSTFDLIGYSDSDYAGCKVDRKSTSGTCQFLGRSLVSWSSKKQTSVALSTAEAEYVAAGQCCAQLL

SEQ ID NO: 10114 - protein, 1600 aa, Zea mays
  Clone ID: TF_ZM4944.C4.o5.fg.pep
MDPKGKGIVINDKEKESFVNEPKDDKSNDSGSGHRRKDGKKKKTRRIKEIVYYDSDESTSSHKDDDNDYRKTVNSNFSFDYSRIPHSSNSHLLSIPLGKPPHFDGEDYGFWSHKMRSHLFSLHPSIWEIVESGMKFDSSDSPMFINEQIHKNAQATTVLLASLCRDEYNKVSGLDNAKQIWDTLKISHEGNDITMLTKMELVEGELGRFAMIRGEEPTQTYNRLKTLINKIRSYGSTRWTDHDVVRLLLRSFTILDPHLVNNIRENPRYTKMSPEEVLGKFVSGRMMIKEARYVDDALNGPINEPQPLALKATRSKEALPSKVAQIEAAGLNDEEMALIIKRFKTVLKGHKGQPSKTKTKGKRSCFKCGKIGHFIANCPDNDIDQEQGNKREKKKNYKKAKGEAHIGKEWDSDCSSDSDNEGLAATAFNKSSLFPNERHTCLMAREKKVSTRDSTYASSSDNESSDDDDIDYSYLFKGLDRSKIDKINELIDALNDMNRLLEKQEDLLYDEHDKFVEAQKSYALEVKRNEVLSSELSSCHENIATLKSVNDDLNAKLEKSSKLTSCVEHVVICTRSKDFNVDACSEHLECISKLNDEVASLNAQLKTSKSDLDKLKFARDAYTIGRHPSIKDGLGFKREVKNLTSHKAPISAKEKGKAPMATSVKKNHAFLYHDRKNSRNAFRRYDAFDSHAYDSYAMTASSSHVVHDRKVGRRNVVHNMPRRNVVNIPRKVNEPSTIYHALNASFAIYKNDRKVYASGGSSWIIDSGCTNHMTGEKKMFTSYVKNKDSQDSIIFGDGNQGKDKSETQGTLKRFLRRAQNEFELKVKKIRSDNGSEFKNLQVEEFLEEEGIKHEFSAPYTPQQNGVVERKNRTLIDMARTMLGEFKTPERFWSEAVNTACHAINRVYLHRLLKKTSYELLTGNKPNVSYFRVFGSKCYILVKKGRNSKFAPKAVEGFLLGYDSNTKAYRVFNKSSGLVEVSSDVVFDETNGSPREQVVDCDDVDEEDVPTVAIRTMAIGEVHQQEACDQGGAQDDRVMEEDAQPAPPTQVRAMIQRDHPVDQILGDISKGVTTRSRLVNFCEHYSFVSSIEPFRVEEALLDPDWVLAMQEELNNFKRNEVWTLVPRPKQNVVGTKWVFRNKQDEHGVVTRNMARLVAKGYAQVAGLDFEETFAPVARLESIRILLAYAAHHSFRLFQMDVKSAFLNGPIKEEVYVEQPPGFEDERYPNHVCKLSKALYGLKQAPRAWYECLRDFLIANAFKVGKADPTLFTKTCDGDLFVCQIYVDDIIFGSTNQKSCEEFSRVMTQKFEMSMMGELNYFLGFQVKQLKDGTFISQTKYTQDLLKRFGMKDAKPPKTPMGTDGHTDLNKGGKSVDQKAYRSMIGSLLYLCASRPDIMLSVCMCARFQSNPKECHLVAVKRILRYLVATPCFGLWYPKGSTFDLVGYSDSDYAGCKVDRKSTSGTCQFLGRSLVSWNSKKQTSVALSTAEAEYVAAGQCCAQLLWMRQTLRDFGYNLSKVPLLCDNESAIRMAENPVERSRTKHIDIRHHFLRDHQQKGDIEVFHVSTENQLADIFTKPLDEKTFCRLHSELNVLDSRNLD

SEQ ID NO: 10115 - protein, 1446 aa, Zea mays
  Clone ID: TF_ZM4951.C1.o4.fg.pep
MDPKGKGIVINDKEKESFVNEPKDDKSNDSGSGHRRKDGKKKKTRRIKEIVYYDSDESSSSQKDDDNDYRKTVNSNFSFDYSRIPHSSNSHLLSIPLGKPPHFDGEDYGFWSHKMRSHLFSLHPSIWEIVENGMKFDSSDSPMFINEQIHKNAQATTVLLASLCRDEYNKVSGLDNAKQIWETLKISHEGNDITMLTKMELVEGELGRFAMIRGEEPSQTYNRLKTLINKIRSYGSTRWTDHDVVRLLLRSFTVLDPHLVNNIRENPRYTKMTPEEVLGKFVSGRMMIKEARYVDDALNGPINEHQPLALKATRSKEVLPSKVAQIEAAGLNDEEMALIIKRFKTVLKGHKGQPSKTKTKGKRSCFKCGKIGHFIANCPDNDSDQEQGNKREKKKNYKKAKGEAHIGKEWDSDCSSDSDNEGLAATAFNKSSLFPNEHHTCLMAREKKVSTRDSTYASSSDNESSDDDDIDYSCLFKGLDRSKIDKINELIDALNDKNVLLKKQEDLLYEEHDKFVEAQKSLALEINRNKMLSCELSTCHDSIASLKSINDDLNAKLEKSGKTTSCVEHVEICTRCKDFDVDACSDHLASISKLTEELASLNAQLKTSKNDFDKLKFARDAYTIGRHPSIKVYASGGSSWIIDSGCTNHMTGEKKMFTSYVKNKDSQDSIIFGDGNQGKDKSETQGTLKRFLRRAQNEFELKVKKIRSDNGSEFKNLQVEEFLEEEGIKHEFSAPYTPQQNGVVERKNRTLIDMARTMLGEFKTPERFWSEAVNTTCHAINRVYLHRLLKKTSYELLTGNKPNVSYFRVFGSKCYILVKKGRNSKFAPKAVEGFLLGYDSNTKAYRVFNKSSGLVEVSSDVVFDETNGSPREKVVDCDDVDEEDVPTAAIRTMAIGEVRPQEQDERHQPSSSTMVLPPTQDDEQVHQQEAYDQGGAQDDHVMEEDAQPAPPTQVRAMIQRDHLVDQILGDISKGVTTRSRLVNFCEHYSFVSSIEPFRVEEALLDPDWVLAMQEELNNFKRNEVWTLVPRPKQNVVGTKWVFRNKQDEHGVVTRNKARLVAKGYAQVAGLDFEETFAPVARLESIRILLAYAAHHSFRLFQMDVKSAFLNGPIKEEVYVEQPPGFKDERYPNHVCKLSKALYGLKQAPRAWYECLRDFLIANAFKVGKADPTLFTKTCNGDLFVCQIYVDEIIFGSTNQKSCEEFSRVMTQKFEMSMMGELNYFLGFQVKQLKDGTFISQTKYTQDLLKRFGMKDAKPAKTPMGTDGYTDLNKGDSDYAGCKVDRKSTSGTCQFLGRSLVSWNSKKQTSVALSTAEAEYVAAGQCCAQLLWMRQTLRDFGYNLSKIPLLCDNESAIRMAENPVEHNRTKHIDIRHHFLRDHQQKGDIEVFHVSTKNQLADIFTKPLDEKTFCRLRSSFCILLLIVVLKLYKHSLDLTSPLQSDAHV

SEQ ID NO: 10116 - protein, 1191 aa, Zea mays
  Clone ID: TF_ZM4959.C2.o4.fg.pep
MDPKGKGMVVNNKEKESFVNDPKDDKPTDSGSSHKRKDRKKKKTRRIKEIVYYDDSDESSSSQKDDDNYEKKKTVNSNFSFDYSRIPQNTNAHLLSIPLGKPPHFDGEDYGFWSHKMRSHLFSLHPSIWEIVESGMQFDSSDSPMFINEKIHKNAQATTVLLASLCRDEYHKVSGLDNAKQIWDTLKISHEGNDVTMLTKMELVEGELGRFAMIRGEEPTQTYNRLKTLVNKIRSYGSTRWTDHDVVRLMLRSFTVLDPHLVNNIHENPRYTKMTPEEILGKFVSGRMMIKEARYVDDALNGPIQEPQTIALKATRSKEAIPSKVAQIEAVGLNDEEIALIIKRFKTALSGRKEHPNKTKTKGKRSCFKCGKIGHFIANCPDNDSDQEKGNKREKKKAYKKAKGEAHLGKEWDSDCSSSDSDNEGLAATAFNKSSLFPNEHHTCLMAREKKVSTHNTSTYASSSDEESSDDEIDYSCLFKGLDRTKVDKINELIDALNDKNRLLEKQEDLLYEEHDKYVEAQKSLALEIKRNEMLSCELSTCHDSISSLKSINDDLNAKLEIANKSTSCVEHVAICNRCKDFKVDACSEHLVSISKLNDEVASLNAQLKTSKNDFDKLKFARDAYTVGRHPSIKNGLGFKREAKNLTSHKAPISIKEKGKAPMANSVQKNHAFLYHDRRYSRNVHHDRSCNDIVSHAYDSNAMFASSSSMMYDRSLARKNVIHHVPRRNTHMPRKTSNEPSTIYHALNASFAICRKDKKIVARKLGAKCKGDKTFIWVPKAICTNLVGPNKSWVYASGGSSWIIDSGCTNHMTGEKRMFSSYVKNKDPQDSIIFGDGNQGKVKGLGKIAISSEHSISNVFLVESLGYNLLSDKSETQGTLKRFLRRAQNEFELKVKKIRSDNGSEFKNLQVEEYLEEEGIKHEFSAPYTPQQNGVVERKNRMLIDMARTMLGEFKTPERFWSEAVNTACHAINRVYLHRLLKKTSYELLTGNKPNVSYFRVFGSKCYILVKKGRNSKFAPKAVEGFLLGYDSNTKAYRVFNKSSGLVEVSSDVVFDETNGSPREQVVDLDDVDEEDVPTAAIRTMVIGDVRPQELKEQDQPSSSTMVHPPTQDDEQVHQEEACDQGGAQDDHVMEEEAQPAPTTQVRATIQRNHPVDQILGDISKGVTTRSRLVNFCEHYSFVSLRAPRGG

SEQ ID NO: 10117 - protein, 277 aa, Zea mays
  Clone ID: TF_ZM4959.C3.o1.fg.pep
MALIIKRFKTALKGRKEHPNKNKTKGKRSCFKCGKIGHFIANCPDNDSDQEKKSGKWEKKKNYKKAKGEAHLGKEWDSDCSSSDSDNEGLAATAFNKSSLFPNEHHTCLMAKEKKGLDKTKIDKINELIDALNDKNRLLEKQDDLLYEEHDKFVSAQNSLALEVKRNEMLSCELSTCHETISTLKGVNDDLNAKLEVANKSNSCVEHVMICNRCKDFNVDACSEHLVCISKLNDEVASLNAQLKTSKSEFDKLKFARDAYTIGRHPSIKDGLGFKRE

SEQ ID NO: 10118 - protein, 726 aa, Zea mays
  Clone ID: TF_ZM4983.C4.o2.fg.pep
MDPKGKGIVINDKEKESFVNEPRDDKSNDSGSGHRRKDGKKKKTRRIKEIVYYDSDESTSSQKDDDHNDYERKKPVNSNFSFDYSRIPQTSLCRDEYHKVSGLDNAKQIWDTLKISHEGNDVTLLTKMELVEGELGRFAMIRGEEPTQTYNRLKTLINKIRSYGSTRWMDHDVVRLMLRSFTVLDPHLVNNIRENPRYTKMSPEEVLGKFVSGRMMIKEARYVDDALNGPIHEPQPIALKATRSKEALPSKVAQVEAARLNNEEMALIIKRFKMALKGRKGQPSKTKTKEKRSCFKCGKIGHFIANCPDNESDQEKGNKREKKKHYKKAKGEAHIGKEWDSDCSSSDSDNEGLAATAFNKSSLFPNEHHTCLMAREKKVYASGGSSWIIDSGCTNHMTREKKMFTSYVKNKDSQDSIIFGDGNQGKDKSETQGTLKRFLRRAQNEFELKVKKIRSDNGSEFKNLQVEEFLEEEGIKHEFSAPYTPQQNGVMKKMFRRPLYEPWRLEKCDHRNKMNEINLLPQQRCIPHLKMMNRVEEALLDPDWVLAMQEELNNFKRNEVWTLVPRPKQNVVGTKWVFRNKQDEHGVVTRNKARLVAKGYAQVAGLYQMDVKSAFLNGPIKEEVYVEQPPGFEDERYPDHSCEEFSRVMTQKFEMSMMGELNYFLGFQVKQLKDGTFISQTKYTQDLLKRFGMKDAKPAKTPMGTDGHTDLNKGDFGEAMGLKGQD

SEQ ID NO: 10119 - protein, 1423 aa, Zea mays
  unsure (1)..(1423): unsure at all Xaa locations
  Clone ID: TF_ZM4988.C5.o3.fg.pep
MDPKGKGMMVNDKEKESFVNDPKDDKPTDSGSGHKRKDGRKKKTRRIKEIVYYDNDESSSSQKDDYNDYEKKKTIWDTLKISHEGNDVTMLTKMELVEGELGRFTMIRGDEPTQTYNWLKTLVNKIRSYGSTRWTDHDVVRLMLRSFTVLDPHLVNNIRENPMXHQDDARGDTWKVRXGRMMIKEARYVDDSLNGPIQEPKTIALKATRSKEALPSKVAQVEAAGLNEEEMALIIKRFKTTLRVRKEHPNKTKTKGKRSCFKCGKIGHFIANCPDNDSDQEQGNKREKKKAYKNTKGEAHLGKEWDSDCSSSDSDNEGLAATAFNKSALFPNEHHTCLMAREKKGLDRTKVDKINELIDALNDKNSLKSINDDLSAKLEIANKSTSCVKHVVVCTRCKDFNVDACSEHLVSISKLNDEVASLNAQLKTSKSEFDKLKFARDAYTIGRHPSIKDGLGFKREVKNLTSHKASISAKEKGKAPMASSAQKNHAFMYHDRRHSRNVCRGYDAFDSHAMIVSSSSIMHDRNLARKNVVHHMPRRNSVHVPRKVMNEPSTVYYACNASFAICRKDKKVYASRGSSWIIDSGCTNHMTGEKRMFSSYVKNKVPQDSIIFGDGNQGKVKGLGKIAILSEHSISNVFLVESLGYNLLSVSQLCNMGYNCLFTNVDVSVFRRSDGSLAFKGVLDGKLYLVDFAKEEAGLDACLIAKTSMGWLWHRRLAHVGMKNLHKLLKGEHVIGLTNLVKQDKSETQGTLKRFLRRAQNEFELKVKKIRSDNESEFKNLQVEEYLEEEGIKHEFSAPYTPQQNGVVERKNRTLLDMARTMLGEFKTPEQFWTEAMSTACHAINWVYLHRLLKKTSYELLTGNKPNVSYFRVFGSKCYILVKKGRNSKFAPKAVERFLLGYDSNTKAYRVFNKSSGLVEVSSDVVFDETNGSPREQVVDLDDVDEEDVPTTAMRTMAIGDVRSQEQKEQDQPSSSTMVHPPTQDDEQVHQEEACDQGGAQDDLVMEEEAQPAPPTQVRATIQRDHPVDQILGDISKGVTTRSRLVDFCEHYSFISSIEPFRQNVVGTKWVFRNKQDEHGVVTRNKTRLVAKGYAQVAGLDFEETFAHVARLESIRILLAYATHHSFRLFQMDVKSAFLNGPIKEEVYVEQPPGFEDERYPDHVCKLSKALYGLKQAPRAXVKQLKDGTFISQTKYTXDLIKRFGMKDAKPAKTPMGTDGHTDLNKGXFQSDPRDCHLVAVKRILRYLVATPCFGIWYPKGSTFDLIGYSDSDYAGCKVDRKSTSGMCQFLGRSLVSWSSKKQTSVALSTAKAEYVATGQCCAQLLWMRQTLRDFGYNLSKVLLLCDNESAICMADNPVEHSRTKHIDIRHHFLRDHQQKGDIEVFHVSTENQLADIFTKPLDESTFYKLRSELNVLDSRNLD

SEQ ID NO: 10120 - protein, 1431 aa, Zea mays
  unsure (1)..(1431): unsure at all Xaa locations
  Clone ID: TF_ZM5000.C1.o15.fg.pep
MDPKGKGMVVNDKEKETIFNEPRDDKATNSGSSQKKKEGKKKRRIKKIVYYDDSDESSSSQKDNDDNDHEKKKTVNSIFSFDYSRTHLLSIPLGKPPHFDGEDYGFWSHKMRSHLFSLHPSIWEIVESGMQFDSTDSPIFINEQIHKNAQATTVLLASLCRDEYHKLVEGELGRFAMIRGEEPTQTYNRLKTLVNKIRSYGSTRWTDHDVVRLMLRSFTVLDPHLVNNIRENPMXHQDDTRGNTWEVXSGRMMIKEARYVDDALNGPIHEPQTVALKATRSKEVLPSKVAQVEAAGLNEEEMALIIKCFKTTLRGRKEHPNKNKTKGKRSCFKCGKIGHFIANCPDNDSDQEQEKKRENKKAYKKAKRETHLGKEWDSDCSSSDSDNEGLAASAFNKSSLFPNEHHTCLMAKEKKVNTRKTTYASSSDDESSDDEIDYASLFKGLERTKIDKINELIDALNDKNRLLEKQEDLLYEEHDKFVEAQKSLVLEVKRNEMLSCELSTCHETISSLKSVNDDLNAKLEVANRSNSCVDHVVICNRCKDFNVDACSEHLVSIAKLNDEVASLNAQLKTSKNEFDKLKFARDAYTIGRHPSIKDGLGFKREAKNLTSHKAPISAKEKGKAPMTNSSQNNHAFIYAIADYRKIVINHVPRRNVLVPMNTPRTFYNLYIALQCFLCIRMKDKKVYAFGGSSWIIDSGCTNHMTGEKKMFTSYVKNKDFQDSIVFGDGNQGKVKGLGKIAISSEHSIPNVFLVESLGYNLLSVSQLCNMGYNCLFTNVDVSVFRRSDGSLAFKGVLDGKLYLVDFAKEEGGLDACLIAKTSMGWLWHRCLAHVGMKNLHKRLKGEHVIGLTNDKSETQGTLKRFLRRAQNEFELKVKKIRSDNRSEFKNLQVEEYLEEEGIKHEFSALYTPQQNGVVERKNRTLIDMARTMLGEFKTPERFWSEAVNTACHAINRVYLHRLLKKTSYELLTGNKPNVSYFRVFGSKCYILVKKGRNSKFAPKAVEGFLLGYDSNXKAYRVFNKSSDEEDVPTAAIRTMAIGDVRPQEQKDQDQPSSSTMVHPPTQDDEQVXFQMDVKSAFLNGPIKEELYVEQPPGFEDERYPDHVCKLSKALYGLKQAPRAWYECHRDFLIANAFKVGKADPTLFTKTCDGDLFVCQIYVDDIIFGSTNQKSCEEFSRVMTQKFEMLMMGELNYFLGFQVKQLKDGTFISQTKYTQDLLKRFGMKDAKPAKTPMGTDGHVDLNKGGKSIDQKAYRSMIGSLLYLCASRPDIMLSVCMCARFQSDPRECHLVAVKRILRYLVATPCFGIWYPKGSTFDLIGYSDSDYAGCKVDRKSTSGTCQFLGRSLVSWSSKKQTSVVLSTAEVEYVAAGQCCAQLLWMRQTLRDFGYNLSKVPLLCDNESAICMADNLVEHSRTKHIDIRHHFLRDH

SEQ ID NO: 10121 - protein, 947 aa, Zea mays
  Clone ID: TF_ZM5007.C1.o6.fg.pep
MALIIKRFKTTLKGRKRHPNKNKTKGKRSCFKCGKIGHFIANCPDNDSDQEQGNKREKKKTYKKANGEAHLGKEWDSDCSSSDSDNEGLAAIAFNKSFLFPNEHHTCLMAREKKGLDRTKVDKINELIDALNDKNRLLEKQEDLLYEEHDKFVEAQKSLALEIKRNEMLSCELSTCHDSISSLKSINDDLNAKLEIANKSTSCVEHVAICNRCKDFNVDACSEHLVSISKLNDEVASLNAQLKTSKSEFDKIKFARDAYTIGRHPSIKDGLGFKREAKNLTSHKASISAKEKGKAPMASSTQKNHAFMYHDRRHSRNAYRSYDAFDSHAMFASSSSIMHDRNLARKNAMPRRNVVHVPRKVNNEPSTIFHTCNAYFAICRKDKKVYASGGSSWIINNGCTNHMTGEKKMFSSYVKNKDSQDSIIFGDGNQGKVKGLGKIAISSEHSISNVLLVESLRYNLLSVSQLCNMGYNCLFTNVDVFVFRRSDGSLAFKGVLDGKLYLVDFAKEEAGLDACLIAKTSMGWLWHRRLAHVGMKNLHKLLKGEHVIGLTNVTFEKDRPCAACQAGKQVGSSHHTKNVMTTSRPLELLHMDLFGPIAYLSIGGSKYGLVIVDDFSRFTWVFFLQDKSETQGTLKRFLRRAQNEFELKVKKIRSDNRSEFKNLQVEEYLEEEGIKHEFSAPYTPQQNGVVERKNRTLIDMARTMLVEFKTPEWFWSEAVNTACHAINRVYLHRLLKKTSYELLTGNKPNVSYFRVFGSKCYILVKKGRNSKFAPKVVEGFLLGYDSNTKAYRVFNKSSGLVEVSSDVVFDETNGSPSEQVVDLDDVDEEDVPTAAIRTMVIGDVRPQEQKEQDQPSSSTMVHPPTQDDEQVHQEEACDQEGAQDDHVMEEEAQPTPPTQVRATIQRNHPVDQILGDISKGVTTRSRLVNFCEHYSFVSSIEPFRVEE

SEQ ID NO: 10122 - protein, 678 aa, Zea mays
  Clone ID: TF_ZM5028.C2.o6.fg.pep
MDPRGKGMVVNEKEKESFVNDPKDDKSTNSGSSHKRKDGKKKKTRRIKEIVYYDDSDESSSSQKDDDNDYKKRKTVNSNFSFDYSRISQSTNAHLLSIPLGKPPQFDGEDYGFWSHKMRSHLFSLHPSIWEIVESGMQFDSTDSPIFINEQIHKNAQATTVLLASLCRDEYHKVSGLDNAKQIWDTLKISHKGNNVTMLTKMELVEGELGRFAMIRGEEPTQTYNRLKTLVNKIRSYGSTRWTDHDVVRLMLRSFTVLDPHLVNNIRENPRYTKMSPEEILGKFVSGWMMIKEARYVDDALNGPIHEPQTVALKATRSKEALPSKVAQVEAVGLNEEEMALIIKRFKTALKGRKEHPNKNKTKGKRSCFKCGKIGHFIANCPDNDSDQEKKSGKWEKKKNYKKAKGEAHLGKEWDSDCSSSDSDNEGLATTAFNKSFLFPNEHHTCLMAKEKKVCTRNNTTYASSSEDESSDDEIDYSCLFKGLDRTKVDKINELIDVLNDKNMLLEKQEDLLYEEHDKFVEAQNSLALEIKRNEMLSCELSTCHDSISSLKSINDDLNAKLEIANKSTSCVEHVATCNRCKDFNIDACSEHLVSISKLNEEVASLNAQLKTSKNDFDKLKFARDAYTVGRHPSIKDGLGFKRKVKNLTSHKASISIKEKGKAPMANSIQKNHAFLYH

SEQ ID NO: 10123 - protein, 1411 aa, Zea mays
  unsure (1)..(1411): unsure at all Xaa locations
  Clone ID: TF_ZM5032.C3.o5.fg.pep
MDPKGKGMVVNDKEKESFVNDPKDDKPTDSGSGHKRKDGRKKKTRHIKEIVYYDSDESSSSQKDDDNDYEKKKTVNSNFYFDYSRIPQSTNAHLLSIPLGKPPHFDGEDYGFWSHKMRSHLFSLHPSIWEIVESGMQFDSTDSPMFINEQIHKNAQATTVLLASLCRDEYXRGEEPTQKYNRLKTLVXKIRSYGSTRWTDHDVVRLMLRSFTVLDPHLVNNIRENPRYTKMTPEEILGKFVSGQMMIKEARYVDDALNGPIHEPQTVALKAMRSKEALPSKVAQVEATGLNEEEMALIIKRFKTALRGRKEHPNKTKTKGKRSCFKCGKIGHFIANCPDNDSDQEQGNKREKKKAYKKAKGEAHLGKELDSDCSLSDSDNEGLAATAFNKSALFPNEHHTCLMAREKKVSTRDTSTYASSSDEESSDDEIDYSCLFKGLDRTKVDKINELIDALNDKNKLLEKQEDILYEEHDKFVEAQKSLALEIKRNEMLSCELSTCHDSISSLKSINDDLSAKLEITNKSTPCVEHVVVCNRCKDFNVDACSEHLVSISKLNDEVASLNAQLKTSKSEFDKLKFTRDAYTIGRHPSIKDGLGFKREVKNLTSHKASISAKEKGKAPVASSAQKNHAFMYHDRRHSRNVYRSYDAFDSHAMIASSSSIMHDRNLARKNVVHHMPRRNIVHAPRKVMNEPFTIYYACNTSFAICRKDKKVYASGGSSWIVDSGCTNHMTGEKKMFSSYVKNKDPQDSIIFGDGNQGKVKGLGKISISSEHSISNVFLVESLGYNLLSIDLVQLVKQDKSETQGTLKRFLRRAQNEFELKVKKIRSNNRSEFKNLQVEEYLEEEGIKHEFSAPYTPQQNGVVERKNRTLLDMARTMLGEFKTPERFWMEAVSTACHAINRVYLHRLLKKTSYELLTGNKPNVPYFRVFGSKCYILVKKXQNVVGTKWVFRNKQDKHGVVTRNKAXLVAKGYAQVAXLDFEETFAPVARLESIRILLAYATHHSFSLFQMDVKSAFLNGPIKEEVYVEQPPGFEDERYPDHVCKLSKALYGLKQAPRAWYECLRDFLITNDFKVGKADPTLFTKTCDGDLFVCQIYVDDIIFGSTNQKSCEEFSRVMTQKFEMSMMGELSYFLGFQVKQLKDGTFISQTKYTQDLIKRFGMKDAKPAKTPMGTDGHTDLNKGGKSVDQKAYRSMIGSLLYLCASRPDIMLSVCMCARFQSDPRECHLVAVKRILRYLVATPCFGIWYPMGSTFDLIGYSDSDYAGCKVDRKSTSGTCQFLGRSLVSWSSKKQTSVALSTAEAEYVAAGQCCAQLLWMRQTLRDFGYNLSKVPLLCDNESAIRMADNPVEHSRTKHIDIRHHFLRDHQQKGDIEVFHVSTENQLADIFTKPLDESTFCKLRSELNVLDSRNLD

SEQ ID NO: 10124 - protein, 579 aa, Zea mays
  Clone ID: TF_ZM5066.C5.o1.fg.pep
MDPKGKGIVINDKEKESFVNEPRDDKSNDSDSGHRRKDGKKKKTRRIKEIVYYDSDESTSSQKDDDHNEYERKKPVNSNFSFDYSRIPQSTNAHLLSIPLGKPPHFDGEDYGFWSHKMCSHLFSLHPSIWEIVESGMHFDSTDSPMFINEQIHKNAQATTVLLASLCRDEYHKVSGLDNAKQIWDTLKISHEGNDVTLLTKMELVEGELGRFAMIRGEEPTQTYNRLKTLINKIRSYGSTRWTDHDVVRLMLRSFTVLDPHLVNNIRENPRYTKMSPEEVLGKFVSGRMMIKEARYVDDVLNGPIHEPQPIALKAMRSKEALPSKVAQVEAAGLNNEEMALIIKRFKTALKGRKGQPSKTKTKEKRSCFKCGKIGHFIANCPDNESDQEKGNKREKKKHYKKAKGEAHIGKEWDSDCSSSDSDNEGLAATAFNKSSLFPYERHTCLMAREKKVSTHDTSTYASSSEDETSDDDEIDYSCLFKGLDRSKINKINELIDALNDKNRLLEKQEDLLYEEHDKFVSAQNSLALEIKRNEMLSSELSTCHESISKLKSVNDDLNAKLEIASKSTSCVEIVETCN

SEQ ID NO: 10125 - protein, 1665 aa, Zea mays
  Clone ID: TF_ZM5105.C7.o6.fg.pep
MDPKGKGIMINDKEKESFVNEPRDDKSNDSGSGHRRKDGKKKKTRRIKEIVYYDSDESTSSQKDDDHNDYEKKKPVNSNFSFDYSRIPHSSSSHLLSIPLGKPPHFDGEDYGFWSHKMRSHLFSLHPSIWEIVESGMHFDSSDSPMFINEQIHKNAQATTVLLASLCRDEYNKVSGLDNAKQIWDTLKISHEGNDVTLLTKMELVEGELGRFAMIRGEEPTQTYNRLKTLINKIRSYGSTRWTDHDVVRLMLRSFTVLDPHLVNNIRENPRYTKMSPEEVLGKFVSGRMMIKEARYVDDALNGPINEPQPLALKATRSKEALPSKVAQVEAAGLNNEEMALIIKRFKTALKGRKGQPSKTKTKEKRSCFKCGKIGHFIANCPDNESDQEKGNKREKKKHYKKAKGEAHIGKEWDSDCSSSDSDHEGLAATAFNKSSLFPNERHTCLMAREKKVSTHDTSTYASSSEDESSDDDEIDYSCLFKGLDRSKINKINELIDALNDKNRLLEKQEDLLYEEHDKFVSAQNSLALEIKRNEMLSSEVSTCHESISKLKSVNDDLNAKLEIASKSTSCVEIVETCNRCEDFDIDACSEHLVSISKLNDELASLNAQLKTSKSNFDKLKFARDAYTIGRHPSIKDGLGYKKEAKNLTSHKAPISAKEKGKAPMASNVQKNHAFMYHDRRQTRNTFRSYNTYDDFDSHAMFASSSSYMHGRNMSRRNAFHHVPRKNFIHASRKAVNEPSTIYCALNASFAICRKDRKIVARKLGAKCKGDKTCIWVPKDICTNLVGPNMSWVYASGGSSWIIDSGCTNHMTGEKKMFTSYVKNKDSQDSIIFGDGNQGKDKSETQGTLKRFLRRAQNEFELKVKKIRSDNGSEFKNLQVEEFLEEEGIKHEFSAPYTPQQNGVVERKNRTLIDMARTMLGEFKTPERFWSEAVNTACHAINRVYLHRLLKKTSYELLTGNKPNVSYFRVFGSKCYILVKKGRNSKFAPKAVEGFLLGYDSNTKAYRVFNKSSGLVEVSSDVVFDETNGSPREQVVDLDDVDDEDVPTAAIRTMTIGDVRPREQLEQDQPSSSTMVHPPTQDDEQVHQKEACDQWGAQDDHMMEEEAQPAPPTQVRAVIQRDHPVDQILGDISKGVTTRSRLVNFCEHYSFVSSIEPFRVEEALLDPDWVLAMQEELNNFKRNEVWTLVPRPKQNVVGTKWVFRNKQDEHGVVTRNKARLVAKGYAQVAGLDFEETFAPVARLESIRILLAYAAHHSFRLYQMDVKSAFLNGPIKEEVYVEQPPGFEDERYPDHMCKLSKALYGLKQAPRAWSECLRDFLIANAFKVGKADPTLFTKTCDGDLFVCQIYVDDIIFGSTNQKSCEEFSRVMTQKFEMSMMGELNYFLGFQVKQLKDGTFISQTKYTQDLLKRFGMKDAKPAKTPMGTDGHTDLNKGGKSVDQKAYRSMIGSLLYLCASRPDIMLSVCMCARFQSDPKECHLVAVKRILRYLVATPCFGIWYPKGSNFDLIGYSDSDYARCKVDRKSTSGTCQFLGRSLVSWNSKKQTSVALSTAEAEYVAAGQCCAQLLWMRQTLRDFGYNLSKVPLLCDNESAIRMAENPVEHSRTKHIDIRHHFLRDHQQKGDIEVFHVSTENQLADIFTKPLDEKTFCRLRSELNVLDSRNLD

SEQ ID NO: 10126 - protein, 534 aa, Zea mays
  Clone ID: TF_ZM5106.C2.o14.fg.pep
MDPKGKGIVINDKEKESFVNEPRDDKSNDSGSGHRRKDGKKKKTRRIKEIVYYDSDESTSSQKDDDHNEYEKKKPVNSNFSFDYSRIPQSSNAHLLSIPLGKPPHFDGEDYGFWSHKMRSHLFSLHPSIWEIVESGMHFDSTDSPMFINEQIHKNAQATTVLLASLCRDEYHKVSGLDNAKQIWDTLKISHEGNDVTLLTKMELVEGELGRFAMIRGEEPTQTYNRLKTLINKIRSYGSTRWTDHDVVRLMLRSFTVLDPHLVNNIRENPRYTKMSPEEVLGKFVSGRMMIKEARYVDDALNGPIHEPQPIALKATRSKEALPSKVAQVEAAGLNNEEMALIIKRFKTALKGRKGQPSKTKTKEKRSCFKCGKIGHFIANCPDNESDQEKGNKREKKKHYKKAKGEAHIGKEWDSDCSSSDSDNEGLAATAFNKSSLFPNERHTCLMAREKKVSTHDTSTYASSSDDESSDDDDIDYSCLFKGLDRSKIDKINELIDALNDKNRLLEKQEDLLYEEHDKFVEAQKSLALEIKRN

SEQ ID NO: 10127 - protein, 1663 aa, Zea mays
  Clone ID: TF_ZM5107.C2.o5.fg.pep
MDPKGKGIVINDKEKESFVNEPKDDKSNDSGSGHRRKDGKKKKTRRIKEIVYYDDSDESTSSQKDDVHNDYERRKPVNSNFSFDYSRIPQSTNAHLLSIPLGKLPHFDGEDYGFWSHKMRSHLFSLHPSIWEIVENGMHFDSTDSPMFINEQIHKNAQATTVLLASLCRDEYHKVSGLDNAKQIWDTLKISHEGNDVTLLTKMELVEGELGRFAMIRGEEPTQTYNRLKTLINKIRSYGSTRWTDHDVVRLMLRSFTVLDPHLVNNIRENPRYTKMSPEEVLGKFVSGRMMIKEARYVDDALNGPIHEPQPIALKATRSKEALPSKVAQVEAAGLNNEEMALIIKRFKTALKGRKGQPSKTKTKEKRSCFKCGKIGHFIANCPDNESDQEKGNKREKKKHYKKAKGEAHIGKEWDSDCSSSDSDNEGLAATAFNKSSLFPNERHTCLMAREKKVSTHNTSTYASSSEDESSDDDEIDYSCLFKGLDRSKINKINELIDALNDKNRLLEKQEDLLYEEHDKFVSAQNSIALEIKRNEMLSGELSTCHETISTLQGVNNDLNAKLEVANKSNSCVEHVIICTRCKDFDIDACSEHLVSISKLNDELDSLNAQLKTSKNDFDKLKFARDAYTIGRHPSIKDGLGFKREAKNLTSHKAPISAKEKGKAPMASSTKRNHAFMYHDRRQTRNAYRNYNAFDSHAMFASSSSYMHGRNMSRRNAIHHVPRKNIIHAPRKVVNEPSTIYCALNASFAIYRKDRKIVARKLGAKCKGDKTCIWVPKDICTNLVGPNMSWVYASGGSSWIIDSGCTNHMTGEKKMFTSYVKNKDSQDSIIFGDGNQGKDKSETQGTLKRFLSRAQNEFELKVKKIRSDNGSEFKNLQVEEFLEEEGIKHEFSAPYTPQQNGVVERKNRTLIDMARTMLGEFKTPERFWSEAVNTACHAINRVYLHRLLKKTLYELLTGNKPNVSYFRVFGSKCYILVKKGRNSKFAPKAVEGFLLGYDSNTKAYRVFNKSSGLVEVSSDVVFDETNGSPREQVVDLDDIDEEDVPTAAIRTMTIGDVRPREQLEQDQPSSSTMVNPPTQDDEQVLQVEAHDQGGAQDVQVEEEEAPQAPPTQVRAVIQRDHPVDQILGDISKGVTTRSRLVNFCEHYSFISSIEPFRVEEALLDPDWVLAMQEELNNFKRNEVWTLVPRPKQNVVGTKWVFRNKQDEHGVVTRNKARLVAKGYAQVAGLDFEETFAPVARLESIRILLAYASHHSFRLFQMDVKSAFLNGPIKEEVYVEQPPGFEDERYPDHVCKLSKALYGLKQAPRAWYECLRDFLIANAFKVGKADPTLFTKTCDGDLFVCQIYVDDIIFGSTNKKSCEEFSRVMTQKFEMSMMGELNYFLGFQVKQLKDGTFISQTKYTQDLLKRVGMKDAKPAKTPMGTDGHTDLNKGGKSVDQKAYRSMIGSLLYLCASRPDIMLSVCMCARFQSDPKECHLVAVKRILRYLVATPCFGIWYPKGSTFDLIGYSDSDYAGCKVDRKSTSGTCQFLGRSLVSWNSKKQTSVALSTAEAEYVAAGQCCAQLLWMRQTLRDFGYNLSKVPLLCDNESAIRMAENPVEHSRTKHIDIRHHFLRDHQQKGDIEVFHVSTENQLADIFTKPLDEKTFCRLRSELNVLDSRNLD

SEQ ID NO: 10128 - protein, 293 aa, Zea mays
  Clone ID: TF_ZmC4812_1.pep
MAEEKVGRIFVGGLSWNTTERTLERTFGQYGKVIEAQVVVERETGRSRGFGFVTFSEPRAVDAAIRGMHNGELDGRNISVNKAEPRNSDGYGYGGGGGGGYSSGGRGGYRSGADVVPAASDDCFKCGRPGHWARECPYSDGSGRTGRYSPGSRYGGGTGGRGDRFGGSDRFARYDDDRYDGGRYVDSRDTYYGSGRDRYAPAAERYSGDRYSGADRYASSGFARERSYERDGGRSNGGYYRDEPRGTGGYGRGGSRGGGGGGPARFGGSYRDRPAPYDRPSRGGAARAYDDRY

SEQ ID NO: 10129 - protein, 1367 aa, Zea mays
  unsure (1)..(1367): unsure at all Xaa locations
  Clone ID: TF_ZM5006.C3.o12.fg.pep
MDPKGKGMVVNDKEKESFFNEPKMTSPLTRARVTRRKTDEYHKVSGLDNAKQIWDTLKISHEGNDVTMLTKMELVEGKLGRLKTLVNKIRSYGSTRWTDHDVVRLMLRSFTVLDPHLVNSIRENPRYTKMTPEEILRKFVSGRMMIKEARYVDDALNGPIHEPQTIALKATSSREALPSKVAQIEAAGLNEDEMTLIIKRFKTALKGRKEHPNKSKTKGKRSCFKCGKIGHFISNCPDNDSDQEQEKKREKKKAYKKAKGEAHLGKEWDSDCSSSDSDNEGLAASAFNKSSLFPNEHHTCLMAKEKKVSTRNAITYTSSSDDESSDDEVDYASLFKGLDRTKIDKINELIDALNEKNRLLEKQEDLLYEEHDKFTSKNEFDKLKFARDAYTIGRHPSIKDGLGFKRESKNLTSHKAPISTKEKGKAPMANSTQKNHAFMYHDRRYSRNVHYDKSYNDVVSPAMIASSSSIMHDRSLARKNVTHHMPRRNVHVYASGGSSWIIDNGCTNHMTGEKKMFTSYVKNKDSQDSIIFGDGNQGKVKGLGKIAISFEHSISNVFLVESLGYNLLSVSQLCNMGYNCLFTNIDVTVFRRSDGSLAFKGVLDDKLYLVDFAKEEVGLDACLIAKTSMGWLWHRRLAHVEMKNLHKLLKGEHVIGLTNVTFKKDRPCAACQAGKQVGSSHHTKNVMTTSRPLELLHMDLFGPVAYLSIGGSKYGLVIVDDFSRFTWVFFLQDKTETQGTLKRFLRRAQNEFELKVKKIRSDNGSEFKNLQVEEYLEEEGIKHEFSAPYTPQQNGVVERKNRTLIDMARTMLGEFKTHERFWSEAVNTACHAINRVYLHRLLKKTSYELLTGNKPNVSYFRVFGSKCYILVKKGRNSKFAPEAVEGFLLGYDSNTKAYRVFNKSSGLVEVSSDVVFDKTNGSPREQVVDLDDVDEEDVPTAAIRTMAIGDVRLQEQKEQDQPSSSTMVHPXTQDNEQVHQEEACDQWGAQDDHVXQMDVKSAFLNGPIKEEVYVEQPPGFEDERYPDHVGKADPTLFTKTCDGDLFVCQIYVDDIIFGSTNQKSCEEFSRVMTQKFEMSMMGELNYFLGFQVKQLKDGTFISQTKYTQDLIKRFGMKDAKPAKTPMGTDGHVDLNKGGKSVDQKAYRSMIGSLLYLCASRPDIMLSVCMCARFQSDPRECHLVAVKRILRYLVATPCFGIWYPKGSTFDLIGYSDSDYAGCKVDRKSTSGTCQFLGRSLVSWSSKKQTSVALSTAEAEYVATGQCCAQLLWMRQTLRDFGYNLSKVPLLCDNESAIRMADNPVEHSRTKHIDIQHHFLRDHQQKGDIEVFYVSTENQLADIFTKPLDEKTFCRLCSELNVLDSRNLD

SEQ ID NO: 10130 - protein, 1175 aa, Zea mays
  Clone ID: TF_ZM4932.C3.o9.fg.pep
MAGESWSLAPSLLDRVYESSIRTTTCAWPKSTEREKKTEKRRRGPPPRCMGVAIPWQMGNMTCGYRVQPLQSVKLMVNTRKGGGIDLPPNRHTRRIFRQPQPQPTEMDPPPPPPPSGVDPLVAAQMRMMQQMADTMADMHAQMQQERQEMHQEREEIRRELHQEREEIRQERRTQQQQQQQQQPQQAPQPPPPPPVPPRDKHREFMSHKPPTFASCPDPLDADDWLKFVEKMLNIAQCTDQEKGSMSVSEYRDKFIQLSRYAPEEVAKDERKQEHFIEGLNGPLQYSLVAHTFPSFQRLLDKALSIEHKRVQLGDLKRKAISQGQGSNSATPTCTPMKFSGQSAGTTCFKCGKTGHYAIVCPQRIATTPVQNKQQTPGSGKGHSIARVNQVSTDATPDGADIVLGMFYVNAIPATILFDSGATHSFMSARYANTNEVPLLNMRKSMIVITPKGPVEANKMTRRLTLTIMGREFIATAIILEASSIDLILGMSWLRKAKAIIACGRGTVELTSPKGERFQVQIAVTTSSRHAMYFIVEEFVGDNIRVVRDFLDVFPEELPGMPPDREVEFVIDLLPGTVPISKRPYKMSVKELKELKKQLTELQEAGFIHPSSSPWGAPILFVQKKDGSQRMCVDYRSLNDVTVKNKYPLPRIEDLFDQMRGARVFLKIDLRSGYHQMRIRPSDIPKTTFLTRYGLYEFTVMSFGLTNAPAYFMNLMNKVFMEYLDKFVVVFIDDILIYSKSYSDHEEHLRLVLQKLRDNQLYAKYSKWEFWIGEVPFLGHIISNGGISVDPAKVKEIMEWSVSTTVKEIQSFLGLTGYYRRFIEGFSKITKPMTSLLEKEREFKWDEKCQDSFDQLKKRLMSPPVLKDINLRQRRWLELIKDYDLEIHYHPGKANLVADALSRKEHVHSAIVAQLPDELVEDFRRLNLGIVAHNEGVTIDVEPTLEQEIRKGQIGDAKIQEIKDLITEGRGPEFTEDEQGTIWFKDRICVPDIESLRETILKEAHDSDYSIHPGSTKMYQDLKQKYWWYGLKRDVAAHVAMCDVCQRVKAEHQRPAGLLHPLKIPGWKWEEIGMDFITGLPRTQKGYDAIWVIVDRLIKVAHFIPVKTTYKGSQLAELYMAQIVCLHGVPKKIVSDRGSQFTSRFWRSFHENMNTKLNFSTTYHPQTDGQTERTN

SEQ ID NO: 10131 - protein, 1403 aa, Zea mays
  unsure (1)..(1403): unsure at all Xaa locations
  Clone ID: TF_ZM4352.C1.o5.fg.pep
MSTQRDHVDPLLEEIPITSSGEEVDPKVLDLAMKIAEKMFLKMKEEDAKKKAEEEESRRKAEEDKGKGKFDXKVLSKVSLNTEGSSTKSXRNFIPNFSSSPLGKLPTLSELNYDEWADKMKSHLIGVHPSLWEIVNVGMFKPAQGEEMTPEMMQEVHRNAQAVSIIKGSLCPEEYRKVQGREDARDIWNILKMSHEGDPKAKRHRVEALESELARYDWTKGESLQSLFDRLMVLVNKIRVLGSEDWSDSKVTRLFMRAYKEKDKSLARMIRDRDDYEDMTPHQLFAKNQQHESEEAPIKTRDSHALITNEQDNPKKNKDHKAKKVVETSSGEDSSSDEDTTMFIKTFKKFVRKNDKFQRKGKKRACYECGQTGHFIVDCPNKKEQEAKKEYKKDKFKKGGKTKGYFKKKKYGQAHIGEEWNSDEESSSSKEEEVVANVAIQSTSSSQLFTNLQDDSYTPTCLMAKGDKVSLFSNDLPNDDDDEQIAMKNKMIKEFGLNGYNVITKLMEKLDKTKATLDAQEDLLILEKERNLELQELLHNKDEMLDVLTKEVSLVKITIENKDKEVINMKTSIANLANEKNALETSMLSLNVQNQELQVQLENCKNINASSLVIESKSSSLNDNFCKHCAKYHASCCLTNHARKNSPQVKVKGILKRCSSNDGLKKVKPKYKSLKPNNGRRGLGFNSSKENPSTVHKGWRSPKFIEGTTLYDALGRIHSSNDKSPQVKVYSSGGSSWVLDSGCTNHMTGEKDMFHSLQLTQEAQEIVFGDSGKSKVIGIGKIPISDQQSLSNVLLVDSLSYNLLSVSQLCGMGYNYLFSDVDVKILRREDSSVAFTGRLKGKLYLVDFTTSKVTPETCLVAKSDKGWLWHRRLAHVGMRNLAKLQKDNHIIRLTNVVFEKDRVCGACQAGKQHGVPHKSKNVVTTKRPLELLHMDLFGPMAYISIGGETQEILKKFMRRAQNEFELKIKKVRSDNGTEFKNTGVEEFLGEEGIKHEFSVPYTPQQNGVVERKNRTLIEAARTMLDEYKTPDNFXAINRLYLHKIYKKTAYELLTXVKSSKFAPRVDEGFLLGYASNAHGYRVFNNTTGLVEIAIDVTFDESNGSQGHVSNGTAGNEELPCEAIKKLAIGEVRPQEKDDEEGTLWMTNEVVDVGAKVVGDKSSTQANPSTSSHPSIEENHQFQRMPTMVEDGHESVDGEVPLDQVNDEEEQIQRQPSVPHPRVHHTIQRDHPVDNILGSIRRGVTTRSRLANFCEFYSFVSSLEPLKVEEALGDPDWIIAMQEELNNFTWNEVWSLVQRPKQNVIVTKWVFRNKQDEHGVVTRNKARLVAQGYTQVEGLDFGETYAPVARLESIRILIAYATNHDFKLYQMDVKSAFLNGPLQERVYVEQPPGFEEPKKPNHVY

SEQ ID NO: 10132 - protein, 98 aa, Zea mays
  Clone ID: TF_LIB3059-057-Q1-K1-G9.pep
KRKTITQGQGSSSICRRYVPPQGTPARPGGGQLSYQRPALHIPQATPHTRQAAPTGTPTRPTGQGTTTVTTCFKCGEVGHYANACPKRNPNTPARSNV

SEQ ID NO: 10133 - protein, 247 aa, Zea mays
  Clone ID: TF_LIB4756-066-R1-K1-F8.pep
MARVYVGNLDPRVTAREIEDEFRMFGVLRSVWVARKPPGFAFIDFDDRRDAQDAIRELDGKNGWRVELSTKVGGGRGRDRNGSDMKCYECGEAGHFARECRLRIGSGGLGSGRRRSRSPRYRSRSRSRSRSPRYRRSPSYSRSPRDRSPRRRSYSRSPLGSPARSLSRSPPLPPPPPRNNSRSPPGAREVSRSPPPPPPRNNSRSPPAARDVSRSPPAARDVSRSPPPPPDARRSYSGSPQQPQRDE

SEQ ID NO: 10134 - protein, 255 aa, Zea mays
  unsure (1)..(255): unsure at all Xaa locations
  Clone ID: TF_ZmC5918_1.pep
MARVFVGNLDPRVTAREIEDEFRXFGVLRSVWVARKPPGFAFIDFDDRRDAQDAIRELDGKNGWRVELSTKVGGGRGRDRNGSDMKCYECGEAGHFARECRLRIGSGGLGSGRRRSRSPRYRSRSRSRSRSPRYRRSPSYSRSPRDRSPRRRSYSRSPLGSPARSLSRSPPLPPPPPRNNSRSPPGAREVSRSPPPPPPRNNSRSPPAARDVSRSPPAARDVSRSPPPPPDARRSYSGSPGQQPQRDESPYANDA

SEQ ID NO: 10135 - protein, 233 aa, Zea mays
  Clone ID: TF_ZmC5918_3.pep
MARVYVGNLDPRVTAREIEDEFRTFGVLRSVWVARKPPGFAFIDFDDRRDAQDAIRELDGKNGWRVELSTKVGGGRGRDRNGSDMKCYECGEAGHFARECRLRIGSGGLGSGRRRSRSPRYRSRSRSRSRSPRYRRSPSYSRSLSRSPPLPPPPPRNNSRSPPGAREVSRSPPPPPPRNNSRSPPAARDVSRSPPAARDVSRSPPPPPDARRSYSGSPGQQPQRDESPYANDA

SEQ ID NO: 10136 - protein, 88 aa, Zea mays
  Clone ID: TF_jC-zmX700382080a1.pep
SSLVGGRPSLLCRSLRLLGRFKAFDERTGPHTHATGERCDYHLLLTDAYLKARKKNNWTIGKCFNCGNRGHFAQDCPKPKKEEALFDN

SEQ ID NO: 10137 - protein, 160 aa, Zea mays
  Clone ID: TF_ZmC263852_1.pep
MARLYVGNLDARVTAGELEDEFRVFGVLRSVWVARKPPGFAFIDFDDKRDAEDALRDLDGKNGWRVELSRNDRGDRGGRGGGAGGGGGGRDRGGSDMKCYECGESGHFARECRLRIGSGGLGSGRRRSRSRSRSRSPRYRRSPSYGRRSYSPRDRSPRRR

SEQ ID NO: 10138 - protein, 220 aa, Zea mays
  Clone ID: TF_ZmC518624_1.pep
MARVYVGNLDPRATAREIEDEFRVFGVLKSVWVARKPPGFAFIDFDETRDAKDAIRELDGKNGWRVELSTKSGSGRGRERERSGGSDMKCYECGESGHFARECRLRIGSGGLGSGRRRSRSPRHRSRSRSPRYRRSPSYGRRSYSPRDRSPRKRSYSRSPPPPRARSISRSPPPARARSISRSPPGPVEASAGHRLPVRTSAGHHRLLAQKASVSHTASP

SEQ ID NO: 10139 - protein, 193 aa, Zea mays
  Clone ID: TF_ZmC518624_2.pep
MARVYVGNLDPRATAREIEDEFRVFGVLKSVWVARKPPGFAFIDFDETRDAKDAIRELDGKNGWRVELSTKSGSGRGRERERSGGSDMKCYECGESGHFARECRLRIGSGGLGSGRRRSRSPRHRSRSCSPRYRRSPSYGRRSYSPRDRSPRKRSYSRSPPPARARSTSRSPPPARGRSISRSPPPARARSIS

SEQ ID NO: 10140 - protein, 229 aa, Zea mays
  unsure (1)..(229): unsure at all Xaa locations
  Clone ID: TF_LIB4738-138-A1-K1-B7.pep
GRALPNPSPPRRHSRARLPDRDPGDMPRYDDRHGNTRLYVGRLAPRTRSRDLEYLFSKYGRFSVFYPTMEMKLQVDAFEYLTHVSSLLFXGNYLRRIREVELKRDYAFIEFSDPRDADDAQYNLDGREVDGSRIIVEFAKGVPRGSGGSREYMGRGPPPGTGRCFNCGMDGHWARDCKAGDWKNXCYRCGESGHIEXNCQNSXRNLRRDKSYSRLHPPRGGTWPQPELQ

SEQ ID NO: 10141 - protein, 1922 aa, Zea mays
  Clone ID: TF_ZmC74_112.pep
MATYQEFLSTQPPLFTKAEDPLDADVWRHVVESKFPLLTGDCPDEAKARFAAQQFRGPARTWWDHFRAMLPADREVSWEEFKTAFRGHHIPAGILDRKLNEFLALNQGTRMVLQYAQAFNDLCQYAGYHADSDEKKRDRFRRGLNTKLRERLNTVRADSFNELVNMAISQEDCIVAHRAEKKRKAPMAAPSAQAQRFRIVSHNQSRGFQQQAGRWVIRPPQQQQQAPNRYPAPAPRNNQPPQQQQFRQGNGNKCFTCGSVGHYAKNCPRNQQRQMPAPNQDKGRKQKVQVRQGKLNFTTLEEVPEGAPIMTGTFSVYNQPALILFDSSASHSFISQKFSAKCKLPFSHSKGSFMIVTPGGKIATNQLNQSVPIQLGSHIIKTTLLVLGLENVDIILGANWMTLHQVVLDVASRTVEVNSPFCGNFTLILPSRDSTQSCAFSMTELPLKKIPVVCEYADVFPDELPGMPPDRDIEFAIKLQPGTAPISKRPYRMPPAELAELKKQLQELLDKSFIRPSTSPWGCPALFVKKKDESLRLCIDYRPLNAVTIKNKYPLPCIDVLFDQLVGAKVFSKIDLRSGYHQIKIRACDIPKTAFSTRYGLYEFLVMSFELTNAPAYFMYLMNSVFMPELDKFVVVFIDDILVYSKNEEEHAGHLHVVLQRLREHHLYAKLSKCDFWLKEIKFLGHTISQAGIAVDPDKVQEVMNWRPPTTVRQIRSFLGLVGYYRRFIPDFSRIAKPITELLKKEVKFVWSQKCEDAFHALRQHLTTAPILAQPNSSKPFDVYCDASGTGLGCVLMQDNRVIAYASRALRPHEQNYPTHDLKLAAVADLNMRQRRWLELIKDYDLEVHYHPGKANVVADALSRKLQCNCVLMDSRINTLCDELSKMQIEVIPSGSLSHISVEPALQDQVIMAQLSDKGVQFIKKNLHQKVEKYNCFRQDEKGVLWFKSRLVIPKDQDLKRKILDEAHLSKFSMHPGSTKMYHDLKPLYWWTRMKREIGQYVSECDTCQRIKASHLKSAGALQPLSVPSWKWDDINMDFIVGLPNTSRHHDSIWVIVDRLTKVAHFLPVHTTDKAQKYAELYIDRIVCLHGLPRTIVSDRGAQFVARFWEQLQESLGTKLIRSSAYHPQTDGQTERVNQILEDMLRACAIDCGKNWDKHLSLAEFAYNNSYQSSLKMAPFEALYGRRCRTPLNWSQPGEREVFGPDLVTEAERKVKLIRKNLEAAHARQKSYHDKRRKPLQFEVGSFVYLKVSPTKGVQRFGIKGKLAPRYIGPYEIIEACGPVAYKLKLPSKMSAIHSVFHVSQLKKCVRLPTEIIAEPELEIEPDLSYQEYPSKILDCKERSTRAKSIKMYKVQWSNHSEEEATWETEEFLRSNFPDCLPKEADCNLADGEYVLIPEQGPVQEEDQEQASETAIEDLPAAPAIEGKPRYGGYKCGHCTAAAGVSGALYAKAVPFRKWLTPRTAIKSQVLADFVVDWTGPITQPDPSAEKVWTIHCDGAWCYAGAGAAAVITSPTGVKHRYAARLSFALESDRCTNNIAEYEAVILGLRKLRVFGVTTCIIRTDSKVVAGQVKKDYAAKDPALMQYLAAIRSLERQFKGFTLQHVDRAKNEEADALVKAAAKGESLPSDVFYHVIGTPAVRSPKGLQITNDSEGHRIVNLIMTEDWRAPITLFLQGYYHPTDINEAKRLKHRSRDFALIEGQLYKKGVSQPMLKCVTETEGVQILCEVHSGTCGSHAGPRALAAKVIRQGFYWPAMICAANRVTRSCKACQKFSPRSGSPSQFTKLIAHTWPLQRWGLDIVGPLPTTQGNLKFTFVAVEYFTKWIEARAISTITSKTAQKFFWQNIVCRFGVPSELTVDNDKQFDSQDFKDFCFSIGTKLALASVYHPQSNGVVERVNGKNFTAVKKMLLDEKGQVGRFVT

SEQ ID NO: 10142 - protein, 61 aa, Zea mays
  Clone ID: TF_LIB3354-024-P1-K1-H6.pep
SLSNIRRVCDGEEDSSHCTIACSKKRRTCYECGIPGHLSSNCPNKKDPEFISDEKNTNVDS

SEQ ID NO: 10143 - protein, 159 aa, Zea mays
  Clone ID: TF_LIB3068-029-H3_FLI.pep
LRSLIFLNPTQVQLIRGNPRYTQMTPEEVIGNFVSFECMIKGSKKINELDEPSTSEAQPVAFKATEEKKEESTPSRQQIDASKLDNEEMALIIKSFRQILKQRKGKDYKPRSKKVCYKCGKPGHFIAKCPLSSDSDRGDNKKGKRREKKRYHKRRAAAR

SEQ ID NO: 10144 - protein, 550 aa, Zea mays
  Clone ID: TF_ZmC119_821.pep
MSGASAKREIRTGEKPATSHGKAPSGESANKVKGSPSHDKSRRSGDKKKKMKKVVYYETDSSSPSTSGSDTPSVTSKRHERKKFSKIPLRYPRISKRTPLLSVPLGKPPMFDGEDYNMWSDKMRHHLTSLHTSIWDVVEIGVQVPSPGDEDYDSDEVAQIRHFNSQATTILLASLSREEYNKVQGLKSAKEIWDVLKTAHEGDEVTKITKRETIEGKLGRFRLNQGEDPQAMYNRLKTLVNQVRYLGSTKWDDHEMVKVILRSLVFLNPTQVQLIRGDPRYTLMSPEEVIGKFVSFELMIKGSKKIIEQGDSSMPEAQPVAFKATKEKKQDSNPSRIPIDASKLNNKEMALIIKSFRQILKQRKGKYYKPRSKKVCYKCGKPGHFIAKCPLSSDSDRGDDKKEKRREKKRYYKKKGGDAHVCREWNSDESSSDSSSDEDTANIAVTKGLCHTRILGVQNPGANIITRGCASLPTSHVTHLPRDRDFPYTSTEEARQGNTTRPLQSSTSFRKPATVIGSSNAGFLPDRHRSKINQGPPYTDHSPTALAPFG

SEQ ID NO: 10145 - protein, 794 aa, Zea mays
  Clone ID: TF_ZmC31816_2.pep
MSGASAKREIGTSGDKSASSGRTHSRESAHKHKEESASSIKSQRRGDKKKKMKKVVYYESDSSSPSTSDSESTSATSKCHERKKYSKPPVFYGEDYSMWSDKMRHHLTSLHKSIWDIVEYGAQEYNKVQGLKSAKEIWDVLKTAHEGDEVTKITKRETIEGELSRFMLNQGEEPHAMYNRLKTLVNQVRNLGSTKWDDHEMVKVQPVAFKATEEKKEESTSSRLPIDASKLDNEEMALIIWSFHQILKQRRGKDYKPRSKKVCYKCGKPDHFIAKCPLSSDSDRGDDKKGKRREKKRYYKKKGGDAQVCREWDSDESSTDSSSDEDAANIAVTKGLVFPNVGHKCLMAKDDKKKKVKSRASTKYATSSDEASSSDDEDDLLTLFANLNMQQKEKLNELISAIHEKDGLKDRQDDFLIKENKKHVKVKNAYAHEIEKCEKLTSELNICHDTISNLRNENVKLIAKVEKLNVCDDSLVKLKNDNASLIAKIDKLNESLSSLRIENDKLISKAKDLNRCRDINVDAIHDHLALSKQQNDHIAQLSVKIIEREIENEKFKFARSLLYNGRRPGIKDGIGFQQGDNVKLNTPKRLSIFVKGKAPMAQDNKGYILYHVGYLEHKIRRIHARKPHNVTHHAFMYKNEASSSRQSTHVKLPKKKSPIASNETNVSFKTFDASYVLTNKSGKVIAKYVGGKHKGSKACVWEPKVYASGGSSWIIDSGCTNHMTGEKKMFSSYEKNHDPQRAITFGDENQSLVKGLGKIAISPDHSISNVFLEDSLDYNLLSVSQLCKMGYNCL

SEQ ID NO: 10146 - protein, 462 aa, Zea mays
  unsure (1)..(462): unsure at all Xaa locations
  Clone ID: TF_ZmC31816_27.pep
IKIERGATSTPEVQPVAFKATEEKKEESTSSRLPIDASKLDNEEMALIIKSFRQILKQRRGKDYEPRSKKVCYKCGKPGHFIAKCPLSSDSDRGNNKKGKRKEKKKYYKKGGDAHVYREWDSDESSTDSSSDEDATNIVVNKGLLFPNVGHXCLMAKDGKRKKVDSRSSTKYATSSDEDSSSDDEDDLLTLFANLNMQQKEKLNELISAIHEKDELLDSQEDFLIKENKKHVKVKNAYAQEVEKCKKLTSKLNICHDTISNLRNENAKLNVKVEKSNVCDDSISNLRNDNASLIVKIDKLNASLAAFKFEIENLFAKAKNLMCLXYAISNLRNEYSMLHAKIDELNVCKPSTSSVDHVSICTRCRDINVDAIHDYLALIKQQNDHIAQLSAKINEHDLENEKFKFARSMLYSGRRPVIKDGIGFQQGGNVKLNATKRLSNFVKGKATXPQDNKDYILYHAGY

SEQ ID NO: 10147 - protein, 176 aa, Zea mays
  Clone ID: TF_ZmC31816_40.pep
FELMIKGSKKIIERGASSTPEAQPVAFKATEEKEEESTPSRTPIDASKLDNEEMALIIKSFRQILKQRRGKDYKPRSKKVCYKCGKPGHFIAKCPLSSDSDRGDDKKGRRKEKKRHYKKKGGDAHVCREWDSDESSIDSSSNEDAANIAVTKGLLFPNVGHKCLMAKEGKKKKVKS

SEQ ID NO: 10148 - protein, 824 aa, Zea mays
  Clone ID: TF_ZmC3310_3.pep
MSGDHAKKMVIGGEKTATSHGKALSRESANKKKDGSPSRIQSHKSGEKKKKMKKLVYYEADSSSPSTSGSDTASVTSKRQERKKYSKIPLRYPRIAKHAPLLSVPLGKPPTFDGEDYSRWSDIMRYHITSLHKSIWDVVEFGVQVPSVWDEDYDEDEVAQIVHFNSQATTILLTSLSREEYNKVQGLKSAKEIWDVLKTAHEGDEVTKITKRETIEGELGRFRLRQGEEPQEMYNWLKTLVNQVRNLGSKKWDDHEMVTEVIGKFVSFELMIKGSRKIIEQDGPSTPEAQPIAFKATEEKKEESTSSRLPIDAYKLDNEEMALIIKSFRQILKQRRGEDYKFRSKKVCYKCGKPGHFIAKCPLSSDSDRGDDKKGKRREKKRYYKKGGDAHVCREWNSDESSSDSSSDEDAANIAVTKGLLFPNVSHKCLMAKDGKRKKVKSKSSTKYATSSDEDNSSDEEDNLRTLFANLNMQQKEKLNELISAIHEKDELLDTQEDFLIKENKKHVKIDSNVCDVSIPNLRDDNVSLLAKIEELNVSLASLRNENEKLIAKAKDLDVCNITISILRSENDILHAKIVELKSCKPSTSTVEHVSICTRCRDINVDAIHDHLALIKQQNDHIAQLDAKISEHDLENENFKFARSMLYSGRRPGIKGGIGFQQGGNVKLNAPPKRLSNFVKGKAPMPQDNEGYILHPAGYPERKIRRTHSRKSHSGPNHAFMYKGETSSSRQPTRAKLPKKKTPSASNDPDISFKTFDASYVLTNKSGKVVAKYVGGKHKGSKTCVWVPKVLVSNAKGPKTVWVPKIFMHPGAQVGSSIADAQTT

SEQ ID NO: 10149 - protein, 652 aa, Zea mays
  Clone ID: TF_ZmC3310_8.pep
MSPEEVIGKFVSFELMIKGSNKIIEQDGPSTPEAQPVAFKATEEKKKESTSSRLPINASKLDNEEMALIIKSFRQILKQRRGKDYKSRTKKVCYKCGKPGHFIAKCPLSSDSDRGNDKKGKRREKKRYYKKKGGDAHVCREWDSDESSSDSSSDEDAANIVVTKGLLFPNVGHKCLMAKDDKRKKVKSRSSTKYASSSDEDNSSDEEDNLRTLFANLNMQQKEKLNELISAIHEKDELLDSQEDFLIKENKKHVKVKDAYALEVEKCEKLSSELSKCHDIITNLRNENTSLIAKVDSNLCDDSISNLRDDNANLLAKIEKLNDSLASLRNDNEKLIAKAKDLDVCNVTISNLRSENDILHAKIVELKSCKPSTSTVEHVSINVDAIHDHLALIKKQNDHIAQLNAKINEHDLENEKFKFARSMLYSGRRPGIKDGIGFQKGDNVKLNASPKRLSNFVKGKAPMPQDNEGYILYPAGYPEHKIWRIHSWKSHSGPHHAFMYRGETSSSRHSTRAKLPRKKSPTASNDPNVSFKTFDASYVLTNKSGKVVAKYVGGKHKGSKTCVWVTKVYASGGSSSIIDSGCTNHMTWEKRMFSSYEKNKDPQRAITFGDGNQDIGVAVFRRSDDSVAFKGVFEEKISNPRDFEGILETSLK

SEQ ID NO: 10150 - protein, 928 aa, Zea mays
  unsure (1)..(928): unsure at all Xaa locations
  Clone ID: TF_ZmC7465_2.pep
MSGDHAKKEMETGEKPTTSHGSTSSEESRTKRREKKSSSSNKGKEKKSSSHHKEKKERSSSHKPHRSGDKHKRMRKVVYYETDTSPTSTSGSDAPSVTSKRQERKKFSKIPLHYPRTSRHTPLLSVPLGKPPTFDGEDYARWSDLMRFHLTSLHKSIWDVVEFGAQVPSVGDEDYDEDEVAQIEHFNSQATTILLASLSREEYNKVQGLKSANEVWDLLKTAHEGDELTKITKRETIEGELGRFRLRQGEEPQHMYNRLKTLVNQVRNLGSVKWDDHEVVKVILRSLIFLNPTQVQLIRGNPRYTQMTPEEVIGHFVSFECMIEGSRKINELDDPSTSEAQPVAFKATEEKKEESTPSRQPIDASKLDNEEMALVIKSFRQILKQRRGKDYKSRSKKVCYKCGKPGHFIAKCPLSSDSDRGDDKKGRRKEKKRYHKKRGGDAHVCREWDSDESSTDSSADEDAANIAVTKGLLFPNVGHKCLMAKDGKRKKVKSRSSTKYESSSDDNASDEEDNLRTLFADLNMQQKEKLNELISAIHEKDDLLDSQEDCLIKENKKHVKVKNAYALEVEKCEKLSSELSTCRETIDNLRNENASLNAKVDSHVCDVSIPNPRDNNDDLLARIEELNISLASLRVENENLIAKAKDLDVCNATISDLRDKNDILRAKIVELNSCKPSTSTVEHVSICTRCRDVDVNAIHDHMALIKQQNDHIAKLDAKIAEHNLENEKFKFARSMLYSGRRPGIKDGIGFQRGDNVKLSAPPKRLSNFVKGKAPMPQDNEGYILYPAGYPESKIRRTHSRKSHSGPNHAFMYKGETSSARQPARPLVPRXKTPSASNDHDISFNTFDASYVLTNKSGKVYASGGSSWILDSGCTNHMTGEKKMFSSYEKNQDPQRAITFGDGNQGVTVFRRSDDSIAFKGVLEGQLYL

SEQ ID NO: 10151 - protein, 550 aa, Zea mays
  unsure (1)..(550): unsure at all Xaa locations
  Clone ID: TF_ZmC7465_25.pep
MSGAFAKREIETGDKSASSGRTHSRESAHKHKEESSSSIKSQRKGDKKKKMKKVVYYETDSSSPSTSGSESASATSKRHERKKYSKMPLRYPRISKCTPLLSVPLGKPPMLEGEDYSMWSDKMRHHLTSLHKSIWDVVEYGAQVPKKGDKDYDSEEVEQIQHFNSQATTILLASLSREEYNKVQGLKSAKEIWDVLKTTHEGDEVTKITKRETIEGELGHFMLHQGEEPQAMYNRLKTLVNQVRNLGRTKWDDHEMVKVILRSLVFLNPTQVQMIRGDPRYTLMSPEEVIGKFVSFELMIKGSKQIIERGATSTPEVQPVAFKATEEKKEESTSSRLPIDASKLDNEEMALIIKSFRQILKQRKGRDYKPRSKKVCYKCGKPGHFIAKCPLSSDSDRDNDKKGKRREKKRYYKKKGGDAHVCREWDSDESLKGKCALGPFLSILVIXGLLFPNVGHKCLMAKDGKRKKVKSRSSTKYETSSDEDDASNEEDNLRVLFANLNMEQKEKLNELISEIHEKDDLMDSQEDFLIKGNYXHVKNKKAYALKSTCR

SEQ ID NO: 10152 - protein, 1602 aa, Zea mays
  unsure (1)..(1602): unsure at all Xaa locations
  Clone ID: TF_ZmC951_286.pep
MSGDHAKKEMETGEKPTTSHGSTSSEESRTKRKEKKKISSNKGKEKKSSSHHKDKKEKSSSHKPHRSGDKKKRMRKVVYYETDSSSASTSGSDAASVTSKRQERKKYSKIPLRYPRISKHTPLLSVPLGKPPTFDGEDYARWSDLMRFHLTSLHKSIWDVVEFGAQVPSVGDKDYDEDEVTQIEHFNSQATTILLASLSREEYNKVQGLKSAKEVWDVLKTAHEGDELTKITKRKTIEGELGRFRLRKGEEPQHMYNRLKTLVNQVRNLGSVKWDDHEVVKIYXMTPEEVIGNFVSFELMIKGSKKINELDDPSTSEAQPVAFKATEEKKEESTPSRTPIDASKLDNEEMTLIIKSFRQILKQRRGKDYKPRSKKVCYKCGKPGHFIAKCPLSSDSDRGDDKKGRRKEKKKHYKKRGGDAHVCREWDSEESSTDSSSDEDATNIAVTKGLLFPNVGHKCLMAKDGKKKKVKSRSSTKYETSSDEDNASNEEDNLRILFANLNMQQKEKLNELISAIHEKDDLLDSQEDFLIKENKKHVKVKNAYALEVEKCEKLSCELSTCQETIDNLRNENANLLAKVDSHVCDVSTPNPRDDNVDLLAKTDELNVSLASLRIENEKLLAKAKDFDVTISNLRSENDVLHAKVVELKSCKPSTSTVKHVSICTRCRDIDVDAIHDQMTLIKQQNDHIAILDAKIVEHNLENEKFKFARSMLYNGRCPGIKDGIGFQRGDNVKLNAPPKRLSNFVKGKALMPQDNEGYILYPAGYPESKIRRIHSRKSHSGPNHTFMYKGETSSSRQPTRAKLPKKKTPNASNDHNISFKTFDASYVPTNKSGKVYASGGSSWIIDSGCTNHMTGEKKMFSSYEKNQDPQRAITFGDGNQGLVKGVTVFRRSDDSIAFKGVLEGINPEYGILSKSYPTKEKTLKGMLVMWESSKQVRKILKTSRKVANAPGLAFVNRLRMEGDVPDDGWASSVIGRFGEHQGHMRTLEQGTEGRELTGIELAAFTALRRLWHTQFIDPIDGGVQFRKVVLAAGDGEGLWRHGFVSTAVAGSPASEKSQTQETLKGFLRRAQNEFGLRIKKIRSDNGTEFKNSQIEGFLEEEGIKHEFSSPYTPQQNGVVERKNRTLLDMTRTMLDEYKTPDRFWAEAVNTACYAINRLYLHRILKKTSYELLTGKKPNISYFRVFGSKCFILVKRGRKSKFAPKTVEGFLLGYNSNTRAYRVFNKSSGLVEVSCDVVFDETNGSQVEQVDLDEIGEEEAPCIALRNMSIGDVCPKESEEPPNEQDQPSSSTQASPPTQIEDEAQPPQDDGNDQGGDTNDQDKEDEEPRPPHPRVHQAIQRDHPVDTILDDIHKGVSTKSRVAHFCEHYSFVSSIKPHRVEEALQDSDWVMAMQEELNNFTRNEVWHLVPRPNQNVVGTKWVFRNKQDEHGVVTRNKARLVANGYSQVEGLDFGETYAPVARLESIRILLAYATYHGFKLYQMDVKSAFLNGPIKEEVYVEQPPGFEDSEYPNHVYRLSKALYGLKQAPRAWYECLRDFLIANGFKVGKADPTLFTKTLDNDLFVCQIYVDDIIFGSTNESTCEEFSRIMTQKFEMSMMGELK

SEQ ID NO: 10153 - protein, 1800 aa, Zea mays
  Clone ID: TF_ZmC951_300.pep
MSGDHAKKEMETGDDKPTTSQGSTSSSSEESRTKRREKKKKSSKRKEKRSSSSHHKEKKEKSSHKPHRSGDKHKRMRKVVFYETDTSSTSTSGSDAASVTSKRQERKKYSKIPLRYPRVPKHTPLLSVPLGKPPTFNGEDYAMWSNLMQFHLISLHKRLWDVVEYGVQVPSVGDEDYDTDEVAQIEHFNSQATTILLASLSKEEYNKVQGLKNAKEIWDLLKTAHEGDELTKITKRETIEGELGRFRLRQGEEPQDMYNRLKTLVNQVRNLGSTKWDDHEVVKVILRALIFLNPTQVQLIRGNPRYTQMTPEEVIGNFVSFECMIKGSKKINELDEPSTSEAQPVAFKATEEKKEESTPSRQPIDASKLDNEEMTLIIKSFRQILKQRKGKDYKSRSKKVCYKCGKPGHFIAKCPLSSDSDRDNDKRGKRKEKKKYYKKKGGDAHVCREWDSDESSSDSSDDEDAANIAVTKGLLFPNVGHKCLMAKDGKKKVKSKSSTKYETSSDEDDKNEEDNLRILFANLNMEQKEKLNELISAIHEKDDLLDSQEDFLIKENKKHVKVKNAYALEREKCEKLSSELSTCHEILDNLRNENANLLAKVDSHVCIDPRNDDVDLLARIDELNASIASLRNENEKLIAKAKDFDVCNTTISDLRTKNDLLHAKVIELKSCKPSTSTIEHVSICTRCRDINVDAIHDHLALIKKQNDHIAQLNAKIREHDLENEKFKLARSMLYNGRRPGIKDGIGFQRGNNVKINAPPKNLSNFVKGKAPMPQDNEGYILYPAGYPENKIKKIHSRKSHSGPNYAFMYKGETSRSRQPTHAKLPRKKTINASNDHAISFKTFDASYVLTSKSGKVYASGGSSWILDSGCTNHMTGEKRMFSSYEKNKDPQRAITFGDGNQGLVKGVTVFRRSDDSIAFKGVLEGQLYLVDFDRAELDTCLIAKTNMGWLWHRRLAHVGMKNLHKLLKGEHILGLTNVHFEKDRICSACQAGKQVGTHHPHKNIMTTDRPLELLHMDLFGPIAYISIGGSKYCLVIVDDYSRFTWVFFLQEKSQTQETLKGFLRRAQNEFGLRIKKIRSDNGTEFKNSQIESFLEEEGIKHEFSSPYTPQQNGVVERKNRTLLDMARTMLDEYKTPDRFWAEAVNTACYAINRLYLHRILKKTSYELLTEGFLLGYDSNTRAYRVFNKSTGLVEVSCDVVFDETNGSQVEQVDLDEIGEEQAPCIALRNMSIGDVCPKESEEPSNTQDQPSSSTQASPPTQNEDEAQVDEGQNQEDEPPQDDGNDQGGDANDQEKEDEEEPRPPHPRVHQAIQRDHPVDTILGDIHKGVTTRSRVAHFCEHYSFVSSIEPHKVEEALQDSDWVVAMQEELNNFTRNEVWHLVPRPNQNVVGTKWVFRNKQDEHGVVTRNKARLVAKGYSQVEGLDFGETYAPVARLESIRILLAYATYHGFKLYQMDVKSAFLNGPIKEEVYVEQPPGFEDSEYPNHVYRLSKALYGLKQAPRAWYECLRDFLIANGFKVGKADPTLFTKTLENDLFVCQIYVDDIIFGSTNKSTCEEFSRIMTQKFEMSMMGELKYFLGFQVKQLQEGTFISQTKYTQDILAKFGMKDAKPIKTPMGTNGHLDLDTGGCKINRKSTSGTCQFLGRSLVSWASKKQNSVALSTAEAEYIAAGEESTSRALMIPFLAIHANKGEKCQKFIYNYAKSTVRNTVDYSGQEKLFGKTGQARTVRALAADRPRHKNNPRTEPMQKSKSVLWTVRRKSKDRPSPCADRPASGADRPGRTVRTRRADRPRSAEWPNG

SEQ ID NO: 10154 - protein, 1531 aa, Zea mays
  Clone ID: TF_ZmC951_302.pep
MRDLGTGDKTASSRRTHSRESAHKHKEKSSSSIKSHRMGDKKKKMRKVVYYETDSSSPSTSGSESASTTSKSQERKKYSKMPLRYPHISRRTPLLSVPLGKPPMFEGEDYPMWSDKMRHHLTSLHKSIWDIVEYGVQVPKKGDEDYDSEEVKQIQHFNSQATTILLASLSREEYNKVQGLKSAKEIWDVLKTAHEGDEVTKITKREMIEGELGRFRLRQGEEPQDMYNQLKTLVNQVRNLGSKKWDDHKMVKVILRSLVFLNPTQVQLIRGNPRYTLMTPEEVIGNFVSFELMIKGSKKIVELDGPSTSEAQPVAFKATEEKKEESTSSRTPIDASKLDNEEMALIIKSFRQILKQMRGKDYKSRSKKVCYKCGKPGHFIAKCPLCSDSDRDNDKKGKRREKKRYHKKRGSDAHVCREWNSNESSSDSSSDEDAANIAITKGLLFPNVGHKCLMAEDGKRKKVKSKSSSKYATSSDEDNSSDEEDNLRTLFANLNMQQKEKLNELISAIHEKDELLDSQEDFLIKENKKHVKVDSNACDDSISNIRDDNVNLLAKIEELNVSLASLRNENVKSIAKAKDLDVCNVTISNLRNENDILHAKIVELKSCKPSTSTIEHVSICTRCRDINVEAIHDHLALIKKKNDHIAQLNAKINEHDLENEKIKFARSMLYSGRCPGIKDGIGFQKGDNVKLNAPPKRLSNFVKGKAPMPQDNEGYILNPAGYPEHKIRRNHSRKSHSGPNHAFMYKGETSSSRQSTRAKLPKKKTPIASNDSNISFKTFDAYYVLTNKSGKIVAKYVGGKHKGSKTCVWVPKVLVSNVKGPKIVWEKSHTQETLKGFLRRAQNEFGLRIKKIRSDNGTEFKNSQIEGFLEEEGIKHEFSSPYMPQQNGVVERKNRTLLDMARTMLDEYKTSDRFWAEAVNTACYAINRLYLHRILKKTSYELLTGKKPNVSYFRVFGSKCFILVKRGRKSKFAPKAVEGFLLGYDSNTRAYRVFNKSSGLVEVSCDIVFDETNGSQVEQVDLDELDDEEAPCVALRNMSIGDVCPKESEEPPQAQDQPSSSTQASPPTQDEGKAQNDEGEDQEVEPPQEESNDQGGDAHDQDEEDEQATRPTHPRPHKVEEALQDSDWVVAMQEELNNFTRNEVWHLVPRPNQNVVGTKWVFRNKQDEHGVVTRNKARLVAKGYSQVEGLNFGETYAPVARLESIRILLSYATYHGFKLYQMDVKSAFLNGPIKEEVYVEQPPGFEDSEYPNHVYKLSKALYGLKQAPRAWYESLRDFLITNGFKVGKADSTLFTKTLENDLFICQIYVDDIIFGSTNESTCKEFSRIMTQKFEMSMMGELKYFLGFEVKQLQEGTFISQTKYIQDILNKFGMKDAKPIKTPMGTNGHLDLDTGGCKINRKSTSGTCQFLGRSLVSWASKKQNSVALSTAEAEYIATGHCCAQLLWMRQTLRDYGYKLTKVPLLCDNESAIRMADNPVEHSRTKHIVIRYHFLRDHQQKGDIEIAYINTKEQLADIFTKPLDEQTFTKLRH

SEQ ID NO: 10155 - protein, 1776 aa, Zea mays
  Clone ID: TF_ZmC951_303.pep
MSGDHTKKEMVTGEKPATSHEKAPSGESCNKGKEKESPSHKSHRSGDKKKKMRKVVYYETDSSSPSTSGSDTPSVTSKRHERKKFSKIPLRYPRFPKHTPLLSVPLGKPPTFDGEDYARWSDLMRYHLTSLHKSIWDVIEFGVQVPSVGDEDYDEDEVAQIQHFNAQATTILLASLSREEYNKVQGLKRAKEIWDTLKTAHEGDEVTKITKRETIKGELGRFRLRQGEEPQDMYNRLKTLVNQVRNLGSKKWDDHEMVKVILRSLVFLNPTQVQLIRGNPRYTLMTPEEVIGNFVSFELMIKGSKKINELDGPSTSEAQPVAFKATEKKKEESTSSRQPIDASKLYNEEMALIIKSFRQILKQRRGEDYRPRSKKVCYKCGKPGHFIAKCPLSSDSDRGDDKKGRRKEKKRYYKKKGDDAHVCREWDSDESSSDSSSDEDAANITVTKGLLFPNVGHKCLMAKDSKNKKVKSKSSTRYESSSDEENASDEEDNLRTLFANLNMQQKEKLNELISAIHDKDDLLDSQEDFLIKENKKHVKVKNAYALEVEKCEKLSTLIKKQNDHIAQLNAKINEHDLENEKFKFARSMLYSGRRPGIKDGIGFQKGDNVKLNAPPKRLSNFVKGKAPMPQDNEGYILYPAGYPESKIRRIHSRKSHSGPNHAFMYKGETSSSRESTRAKLPKKKTPSASNDHDISFKTFDASYVLTNKSDKVVAKFVGGKHKGSKTCVWVPKVLVSNAKGPKTVWVYASGGSSWIIDSGCTNHMTGEKNMFSSYEKNQDPQRAITFGDGNQGVTVFRRSDDSIAFKGVLEGQLYLVDFDKAELDTCLIAKTNMGWLWHRRLAHVGMKNLHKLLKGEHILGLTNVHFEKDRICSACQAGKQVGIHHPHKNIMTTDRPLELLHMDLFGPIAYISIGGSKYCLVIVDDYSRFTWVFFLQEKSHTQETLKGFLRRAQNEFGLRIKKIRSDNGTEFKNSQIEGFLEEEGIKHEFSSPYTPQQNGVVQRKNRTLLDMARTMLDEYKTSDRFWVEAVNTACYAINRLYLHRILKKTSYELLIGKKPNISYFRVFGSKCFILVKRGRKSKFAPKTVEDFLLGYDSNTRAYRVFNKSSGLVEVSCDVVFGETNGSQVEQVDLDEIGNEEAPCIELRNMSIGDVCPKEFEEPPNAQDQPSSSTQASPPTQNEDEAKVDEGQDPRDEPPQDDDNDQGGDANDQDKEDEEPRPPHPRVHQAIQRDHPVDTILGDIHKGVTTRSRVAHFCEHYYFVSSIEPHRVEEALQDSDWVVAMQEELNNFTRNEVWHLVPRPNQNVVGTKWVFRNKQDEHGVVTRNKARLVAKGYSQVEGLDFGETYALVARLESIRILLAYATYHGFKLYQMDVKSAFLNGPIKEEVYVEQPPGFKDSEYPNHVYKLSKALYGLKQAPRAWYECLRDFLITNGFKVGKADPIIFTKTLNNDLFVCQIYVDDIIFGSTNESTCEEFSRIMTQKFEMSMMGELKYFLGFQLKQLQEGTFISQTKYIQDILNKFGMKDAKPIKTPMGTNGHLDLDTEGKSVDQKVYRSMIGSLLYLCASRPDIMLSVCMCARFQADPKEAHLMAVKRILRYLVHTPKFGLWYPRGSTFDLIGYSDADWAGCKINRKSTSGTCQFLGRSLVSWASKKKNSIALSTAEAEYIVAGHCCAQLLWMRQTLRDYGYKLTKVPLLCDNESAIRMADNPVEHSRTKHIAIRYHFLRDHQQKGDIEIAYINTKEQLADIFTKPLDEQSFNKLRHELNILDSRNFF

SEQ ID NO: 10156 - protein, 1216 aa, Zea mays
  unsure (1)..(1216): unsure at all Xaa locations
  Clone ID: TF_ZmC951_320.pep
MSGEHAKKEIMTGDDKSTIHGKAPSGESDNKMKGAPSHTKSHRSGDKKKKMKKVVYYETDSSSPSTSGSDTPSVTSKRHERKKFRDEAYDSDEVAQIRHFDSQATTILLASLSREEYNKVQGLKSAKEIWDVLKTVHEGDEVTKITKRETIEGKLGRFILNQGEEPQAMYNRLKTLVNQVRNLGSTKWDDHEMVKVILRSLVFRNPMQVQLIRGDPRYKLMSPEEVIGKFVSFELMIKGSKQIVEQGGTSTPEVQPVAFKATEEKKEESMSSRLPIDASKLDNEEMALIIKSFRQILKQRRGKDYKSRFKKVCYKCGKPGHFIAKCPLSSDSDRGDDKKGRRKEKKKYYKKKGDDAHVCREWDSDESSTYSSSDEDAANIAVTKGLLFPNVGHKCLMAKNGKKKKVEKCENLSSELSTCHDVISNLRNENAKLIAKVEKSNVCDDSIDNLRNDNASSIAKIEKLNASLASLRIENDKLTAKAKDLDVCNASISNLRDENAILHAKIVELNDCKPSTSSIDHVSICTRCRDINIDAIHGHLAMIKQQNDHIAKLDAKIVEHELENEKFKFARSMLYSGRRPGITDGIGFQQGDNVKLNAPPKRLSNFVKGKAPMPQDNEGYILYPIGYPEHKIRRIHSRKSHSGPNHAFIYKSETSSSRQSTHAKLPKKKTPIASNDHNISFKTFDASYVLTNKSGKVVAKYVGGKHKGGCTNHMTGEKKMFSSYEKNHDPQRAITFVDGNQGVTVFRRSDDSVAFKGVLEGQLYLVDFDRAELDTFLIAKTNMGWLWHRRLAHVGMKNLHKLLKGEHILGLTNVHFEKDRVRSACQAGKQVGVHHPYKNIMTTDRPLELLHMDLFGPIAYISIGGXKSQTQETLKGFLRRXERKNRTLLDMARTMLDEYKTSDRFWAEAVNTACYAINRLYLHRILKKTLYELLIGKKPNVSYFRVFGSKCFILVKRGRKSKFAPKAVEGLLLGYDSNTRAYRVFNKSTGLVEVSCDIVFDETNGSQVEQVDLDELDDEEALCIALRNMSIGDVCPKKSEEPPQAQDQPSSPMQASPPTQDEDQDQDNDDEDQEEPPQEEDNDQRGDANDQDKEDDEGTKWVFRNKQDEHGVVTRNKARLVAKGYSQVEGLDFGETYAPVARLESIRILLAYATYHGFKLYQMDVKSAFLNGPIKEEVYVEQPPSFEDSEYPNHVYKLXKALYGLKQAPRAWYECL

SEQ ID NO: 10157 - protein, 1155 aa, Zea mays
  unsure (1)..(1155): unsure at all Xaa locations
  Clone ID: TF_ZmC951_356.pep
MSARSITAHEGXEVTKITKRETIEGELGRFVLNQGEEPQAMYNRLKTLVNQVRNLESTKWDDHEMVKVILRSLVFRNPTQVQLIHGDPRYKLMSLEEVIGKFVSFELMIKGSKHIVDLEQGDSSTPEAQPVAFKATEEKKEDSTPSRIPIDASKLDNEEMALIIKSFRQILKQRRGKDYKPRSKKVCYKCGKPGHFIAKCPLSSDSDRGDDKKGRRKEKKRYYKKKGGDAHVCREWDSDESSTDSSSYEDAANIAVTKGLLFPNVGHKCLMAKDGKKKKVKSKSSTKYATSSDEANSSDDEDNLRTLFANLNMQQKEKLNELISAIHEKDELLDSQEDFLIKENKKHVKVKNAYALEVEKCEKLSSELSTCHDIIANLRNENARLIAKVDSNVCDDSIPNLRDDNVSLLAKIEELNVSLASLRNEYEKLIAKAKDLDVCNVTVSNLRSENDILHAKIVELKSCKPSTSTVEHVSICTRCRDINVDAIHDHLALIKKQNNHIAQLNAKINEHDLENENFKFARSMLYSGRHPGIKDGIGFQKGDNVKLNAPPKRLSNFVKGKAPMPQDNEGYILYPAGYPEHKIRRIHSRKSHSGPNHAFMYKGETSSSRQSTRAKLPKKKTPIASNDFNISFKTFDASYVLTNKSGKVVAKYVGGKHKGSKTCVWVPKVLVSNVKGPKIVWVYASGGSSWIIDSGCTNHMTGEKKMFSSYEKNQDPQQAITFRDGNQDSLDYNLLSVSQLCKMGYNYLFTDIGVTVFRRSDDSIAFKGVLEGQLYLVDFDRAELDTCLIAKTNIGWLWHRRLAHVGMKNLHKLLKGEHILGLTNVHFEKDRVCSACQAGKQVGVHHPHKNIMTTDRPLELLHMDLSIGPIAYISIGGDQEIRSATGPRFKNSQIEGFLEEEGIKHEFSSPYTPQQNGVVERKNRTLLDMARTMLDEYKTSNWFWAKAVNTACYAINRLYLHRILKKTSYELLTGKKPNVSYFRVFGSKCFILVKRGRKSKFAPKAVEGFLLGYDSNTRAYRVFNKSSGLVEVSCDIVFDETNGSQVEQVDLNELDDEEALCVALRNMSIGDVCPKESEEPPQAQDQPSSSMQAAPPTNDEDEAQNDEGEDQGVKPPQEESNDQGXDAHDQDKEDEQVPKPPHPRVHQAIQRDHPV

SEQ ID NO: 10158 - protein, 1472 aa, Zea mays
  unsure (1)..(1472): unsure at all Xaa locations
  Clone ID: TF_ZmC951_357.pep
MSGDHAKKMVIGGEKSATSHGKAPSRESANNKKDGSPSRIRSHKSGEKKKMKKVVYYETDSSSPSTSGSDAASVTSKRQERKKYNKIPLRYPCIPKHTPLLSVPLGKPPTFDGEDYSRWSDMMRYHLTSLHKSIWDVVEFGVQVPSVGDEDYDEDEVAQIVHFNSQATTILLTSLSREEYNKVQGLKSAKEIWDVLKTTHEGDEVTKITKRETIEGELSRFRLRQGEKPQEMYNRLKTLVNQVRNLGSKKWDDHEMVKVILRSLVFLNPTQVQLIRGDPRYTLMSPEEVIGKFVSFELMIKGSKKIIEQDGPSTPEAQPVAFKVTKEKKEESTSSRLPIDASKLDNEEMALIIKSFRQILKQRWRKDYKSRSNKVCYKCGKPGHFIAKCPLSSDSDRGDDKKGRRREKKRFHKKKGGDAHVCRKWDSDESSTDSSSNEDAANIAVSPXTKGLLFPNVGHKCLMAKDGKRKKXEDNSSDEEDNLRTLFANLNMQQKEKLNELISAIHEKDELLDTQEDFLIKENKKHVKVKNAYALEVDKCEKLSNELSMCHDIIANLRNENDKLIAKVDSNVCDDLIPNHRDDNVSLLAKIEELNVSLASLKIENEKLIAKARDLDVCNITISNLRSENDILHAKIVELKSCKPSTSTVEHVSICTRCRDINVDAIHDHLALIKKQNDHIAQLNAKINEHDLENEKFKFARSMLYSGRRPGIKDGIGFQKGDNVKLNAPPKRLSNFVKGKALMPQDNEGYILYPAGYPEHKIRRIHSRKSHSGPNHAFMYKGETSSSRQSTRAKLHKKKTPIASNDSNISFKAFDASYVLTNKSGKVVAKYVGSKHKGSKTCVWVYASGGSSWIIDSGCTNHMTGEKKMFSSYEKNQDPQRAITFGDGNQGVTVFRRSDDSVAFKGVLEGQLYLEKSHTQETLKGFLRRTQNEFGLRIKKIRSDNRTEFKNSQIEGFLEEEGIRHEFSSPYTPQQNGVVERKNRTLLDMARTMLDEYKTSDRFWAEAVNTACYAINRLYLHRIFKKTSYELLTGKKTNVSYFRVFGSKCFILVKRGRKSKFVPKAVEGFLLGYDSNTRAYRVFNKSSGLVEVSCDIVFDETNGSQVEQVDLDELDDEEAPCVALRNISIRDVCPKESEEPPQAQDQPSSSMQASPPTQDEDEAQNDEGEDQEEEPPQEESNDQGGARLESIRILLAYATYHGFKLYQMDVKSVFLNGPIKEEVYVEQPPGFEDSEYPNYVYKLSKALYGLKQALRAWIMTQKIEMSMMGELKYFLGFQVKQLQEGTFISQTKYIQDILNKFGMKDAKPIKTPMGTNGHLDLDTGGCKINRKSTSGTCQFLGRSLVSWASKKQNSVALSTAEAEYIAVGHCCAQLLWMRQTLRDYGYKLTKVPLLCDNESAIRMADNPVEHSHTKHIAIRYHFLRDRQQKGDIEIAYINTKEQLADIFTKPLDEQTFNKLRHELNILDSRNFF

SEQ ID NO: 10159 - protein, 1601 aa, Zea mays
  Clone ID: TF_ZmC951_361.pep
MREIGTGNKSASSGRTYSRESAHKHKEESSSSIKSQRKGDKKKKMKKVVYYETDSSSPSTSVSESASTTSKRHERKKYSKMPLRYPRISKRTPLLSVPLVKPPMFEGEDYSMWSDKMRHHLTSLHKSIWDIVEYGAQVPKKGDKDYDLEEVEQIQHFNSQATTILLASLSREEYNKVQGLKSAKEIWDVLKSAHEGDETLVNQVRNLGSTKWDDHEMVKVILRSLVFLNPTQVQLIRGDPRYKLMSPEEAIRKFVSFELMIKGSKQIIEQGATSTPEVQPVVFKATEEKKEESTPSRLPIDASKLDNEEMALIIKSFRQIFKQRKGRDYKPRSKKVCYKCGKPGHFIAKCPLSSDSDRDDDKKGKRREKKRYYKNKGGDAHVCREWDSEESSTDSSSDEDAANIAVTKGLLFPNVVHKCLMAKDGKKKVKSRSSTKYATSSDEASSSDDEDDLLTLFANLNMQQKEKLNELISAIHDKDELLDSQEDFLIKENKKHVKVKNAYALEVEKCEKITSELSTCHDVISNLRNENAKLIAKVENLNVCDDSLVNLRNDNPSLITKIDKLNASLYSLKIENEKLIAKDKDLNVCNVSISNLRDENAILHAKIVELNTCKPSTSTVEHVTICTRCRDINVDAIHDHLALIKKQNDHIAQLSAKNNEHDLENEKFKFARSMLHSGRRPGIKDGIGFQQGDNVKLNAPKKLPNFVKGKAPMVYASGGSSWIIDSGCTNHMTGEKRMFSSYEKNHDPQRAITFGDGNQGVTVFRRSDDSVAFKGVLEGQLYLVDFDRAELDTCLIAKTNMGWLWHRRLAHVGMKNLHKLLKGEHILGLTNVHFEKDRVCSACQAGKQVGVHHPHKNIMTTDRSLELLHMDLFGPIAYISIDGSKYCLVIVEDYSRFTWVFFFQEKSQTQETIKGFLRRAQNEFGLRIKKIRSDNGTEFKNSQIEGFLEDEGIKHEFSSPYTPQQNGVVERKNRTLLDMARTMLDEYKTSDRFWVEAINTACYAINRLYLHQIVKKTSYELLTGRKSKFAPKAVEGFLLGYDSNTRAYRVFNKSTGLVEVSCDIVFDETSGSQVEQVDLDELDDEEAPCVALRNMSIGDVCPKEFEEPPQAQDQPSSSMQASPPTQDEDQAQEDENEDQEDEPPQEGDNDLGGDAHDQDKEDDDGLRPPHPRVHQAIQRDHPVNTILDDIQKGITNRSRVAHFCEHYSFVSSIEPYKIEDALRDSDWVLAMQEELNNFTRNEWVFRNKQDEHGVVIRNKARLVAKGYSQVEGLDFGETYAPVARLESIRILLAHATYHGFKLYQMDVKSAFLNGPIKEEVYVEQPPGFEDSEYPNHVYKLSKALYGLKQAPRACRIMIQKFKMSMMGELKYFLGFQVKQLQEGTFISQMKYIQDILTKFGMKDAKPIKTPMGTNGLRAVKRILRYLVYTHKFGLWYPKGSTFDLIGYSDADWAGCKIDRKSTSGTCQFLGRSLVSWTSKKQNSVALSTAEAEYIAAGHCCAQLIWMRQTLRNYGYKLTKVPLLCDNESAIRMVDNPVEHSHTKHIAIRYHFLRDHQQWGDIEIAYINTKEQLADIFTKPLDEKTFTKLRHELNILDSRNFD

SEQ ID NO: 10160 - protein, 1028 aa, Zea mays
  Clone ID: TF_ZmC951_387.pep
MSGDHAKKEMETGDKPATSHGKASSEESRKKEKGKEKKASSHKSHRSGDKKKKMRKVVYYETDSSSPSTSGSDASSVTSKRHERNKYSKPPFFDGEDYCMWSDKMRHHLTSLHASIWDIVEFGAQEYNKVQGLKSAKEIWDVLKTAHEGDEVTKITKRETIEGELGRFILNEGEKPQAMYNRLKTLVNQVRNLRSTKWDDHEMVKVILRSLVFRNPTQVQLIRGDPRYKLMSPEEVIGKFVSFELMIKGFKQIINLEQGGASTLEVQPVAFKATEEKKEESTSSRLPIDASKLDNEEMTLIIKSFCQILKQRRGKDYKPRSKKVCYKCGKPGHFIAKCPLSSDSDRGDDKKGKRREKKRYYKKKGGDAHVCREWDSEESSFDSSSDEDAAHIAVTKGLLFPNVDHKCLMAKDGKRKKVKSRSSTKYASSSDEYHFSDEEDNLCILFANLNMQQKEKLNELISAIHEKDELLDSQEDFLIKENKKHVKVKDAYALEVQKCEKISSELSKCHDIITNLRNENASLIAKVDSNVCDDSISNFRDDNANLLARIEKLNDSLIRLRNENENLIAKAKDLDVCNVTISNLRSENDILHVKIVELKSCKPSTSTVEHVSICTRCRDINVDAIHDHLDLIKKQNDHIAQFNAKINEHDLENEKFKFARSMLYSGRCPGINDDIGFQKGDNVKLNVPPKRLSNFVKGKAPMPQDNEGYILYPVGYPEHNIRRIHSRKSHSGPSHAFMYKGETSSSRQSTRAKLPKKKTPIASNDSNISFKTFDASYVLTNKSAKEKSHTQETLKGFLRRAQNEFGLRIKKIRSDNGTEFKNSQIEGFLEEEGIKHEFSSPYTPQQNGVVERKNRTLLDMARTMLDEYKTSDRFWAEAVNTACYAINRLYLHRILKKTSYELLTGKKPNVSYFRVFGSKCFILVKRGRKSKFAPKAVEDFLLGYDSNTRAYRVFNKSSRLVEVSCDIVFDETNGSQVEQVDVDEIGDEEALCVALRNMSIGDVCPKESEEPPNAQDQPSSSMQESPPT

SEQ ID NO: 10161 - protein, 2578 aa, Zea mays
  unsure (1)..(2578): unsure at all Xaa locations
  Clone ID: TF_ZmC951_391.pep
MSGEHAKKEMETGDKPATSHGKASSEESHKKGKGKEKKASSHKSHRSGDKKKKMRKVVYYETDTSSPSTSGSDAPFVTSKRHERKKFSKIPLHYPRTSRHTPLLSVPLGKPPTFDGEDYARWSELMKFHLTSLHKSIWNVVEFGAQVPSVGDEDYDEDEVAQIEHFNSQATTILLASLSREEYNKVQGLKRAKEVWDVLKTAHEGDELTKITKRETIEGELGRFRLRQGEEPQDMYNRLKTLVNQVRNLGSKKWDDHEMVKVILRSLIFLNPTQVQLIRGNPRYTLMTPEEVIGNFVSFEFMIKGSRKINELDGPSTSEAQPIAFKATEEKESTPSRTPIDASKLDNEKMALVIKSFRQILKQRRGKDYKPRSKKVCYKCGKPGHFIAKCPISSDNDRGDDKKGRRKEKKRYYKKKGGDAHVCREWDSDESSSDSSDDEDAANIVVTKGLLFPNVGHKCLMAKDGKKKKVKSKSSTRYESSSDDNASDEEDNLRTLFANLNMQQKEKLNELISVIHEKDDLLDSQEDFLIKENKKHVKVKNAYALEVEKCKKLSSELSTCHETIDNLRNENSNLLAKVDSIACNVSIPNLRNDNDDLLAKIEELNMSLASLRIENEKLLAKAKELDVCNATISDLRTKNDILHAKVVELKSCKPSTSIVEHTSICTRCRDVNIDAIHDHMALIKQQNDHIAKLDAKIAEHDLENENFKFARSMLYRGRRPGIKDGIGFQQEGNVKINAPPKKLSNFVKGKAPMSQDNEGYILYPVGYPESKIRRIHSRKSHSGPNHAFMYKGETSSSRQPTRAKLPKKKTPSASNDHDISFKTFDASYVLTNKSGKVYASGVSSWIIDSRCTNHMTREKKMFSSYEKNQDPQRAITFGDGNQGLVKGVTVFRRSDDSIAFKGVLEGQLYLVDFDRAELDTCLIAKTNMGWLWHRRLAYVGMKNLHKLLKGEHILGLTNVHFEKDREKSQTQETLKGFLRRTQNEFGLRIKKIRSDNGTEFKNSQIEGFLEEEGIKHEFSSPYMPQQNGVVERKNRTLLDMTRTMLDEYKTSDQFWAEAVNTACYAINRLYLHRILKKTSYELLTGKKPNISYFRVFGSKCFILVKRGRKSKFAPKTVEGFLLGYDSNTRAYRVFNKSSGQVEVSCDVVFDETNGSQVEQVDLDEIGNEEAPRIALRNMSIGDVCPKESEEPPNAQDQPSSSTQASPPTQNEDEAQVDEIEDQANEPPQDNGNDQGGDANDQDKEDEEQRPPHPRVHQAIQRDHPVDTILGDIHKGVTTRSRVAHFCEHYSFVSSIEPHRVEEALQDSDWVVAMQEKLNNFTRNEVWHLVPRPNQNVVGTKWVFRNKQDEHGVVTRNKARLVAKGYSQVEGLDFGETYAPVARLESIRILLAYATYHGFKLXYQMDVKSAFLNGPIKEEVYVEQPPDFEDSEYPNHVYKLSKALYGLKQAPRAWYECLRDFLITNGFKVGKADPTLFTKTLENDLFVCQIYVDDIIFGSTNESTCEEFSRIMTQKFEMSMMGEFKYFLGFQVKQLQEGTFLSQTKYTQDILNKFGMKDAKPIKTPMGTNGHLDLDEGGKSVDQKFRPIHPPSRRLSVGDEDYDEDEVAQIEHFNSQATTILLASLSREEYNKVQGLKSAKEVWDVLKTAHEGDELTKITKRETIEGELGRFRLRQGEEPQDMYNRLKTLVNQVRNLGSKKWDDHEVVKVILRSLIFLNPTQVQLIRGNPRYTLMTPEEVIGNFVSFEFMIKGSRKINELDDPSTSEAQPVAFKATEEKKEESTPSRTPIDASKLDNEEMTLVIKSFRQILKQRRGKDYKPRSKKVCYKCGKPGHFIAKCPLSSDSDRGDNKKRRRKEKKKYYKKKGGDAHVCREWDSDESSSDSSDDEDAANIAVTKGLLFPNVGHKCLMAKDDKKKKVKSKSSTRYESSSDDNASDEEDNLRTLFANLNMQQKEKLNELISAIHEKDDLLDSQEDFLIKENKKHVKVKNAYALEVEKCEKLSSELRTCHETIDNLRNENANLLAKVDSNVCDVSIPNLRNDNDNLLAKIEELNTSTLASLRIENEKLLAKAKELDVCNVTISDLRTKLDAKIAEHDLENEKFKFARSMLYRGRRPGIKDDIGFQQGGNVKLNAPPKKLSNFVKGKAPMPQDNEGYILYPAGYPNNKIRRIHSRKSHSGPNHAFMYKGETSSSRQPTRAKLPKKKTPSASNDHDISFKTFDASYVLTNKSGKLVAKYVGGKHKGSKTCVWVTKVLVSNAKGPKTIWEKSHTQETLKGFLRWAQNEFGLRIKKIRSDNGTEFKNSQIEGFLEEEGIKHEFSSPYTPQQNGVVERKNRTLLDMARTMLDEYKTSDRFWAEAVNTACYAINRLYLHRILNKTSYELLTDKKPNISYFRVFGSKCFILVKRGRKSKFAPKTVEGFLLGYDSNTKAYRVFNKSSGQVEVSCDVVFDETNGSQVEQVDLDEIGVEEAPCIALRNMSIGDVCPKESEEPPNAQDKPSSSTPASPPTQNEDEAQVDEVEDQANEPPQDDGNDQGGDANDQDKEDEEPRPPHPRVHQAIQRDHPADTILGDIHKGGNH

SEQ ID NO: 10162 - protein, 1413 aa, Zea mays
  unsure (1)..(1413): unsure at all Xaa locations
  Clone ID: TF_ZmC951_392.pep
MYNRPKTLVNQVHNLRSKKWDDHEVVKVILRSLVFLNPTQVQLIRGNPRYTLMTPEEVIGNFVSFELMIKGSKKINELDGPSMSEAQPVAFKATKEKKEESTSSRTPIDASKLDNEEMTLIIKSFRQILKQRKGKDYKPRSKKVCYKCGKPGHFIAKCPLSSDSDRGDDKKGRRKEKKRYYKKKGGDAHVCREWDSDESSTDSSSDEDAANIAVTKGLLFPNVGHKCLMAKDDKRKKVKSRSSTKYETSSDEDNASNEEDNLRILFANLNMQQKEKLNELISAIHEKDDLLDTQEDFLIKENKKHVKVKNAYTLEVENCEKLSSELSTCHDVITNLRNENANLIAKVDSNVCDVSIPNLRNDNVDLLAKIEELNISLASLRIENEKLLAKAKELDVCNASISDLRSKNDILHGKVVELKSCKPSTSTVEHTSICTRCRDINVDAIRDHLALIKKQNDHIAQLNAKIAEHDLENEKFKFARSMLYSGRRPGIKDDIGFQKGDNVKLNDPPKRLSNFVKGKAPMPQYNKGYILYPAGYPESKIGRIHSRKSHSGPNHAFMYKGETSSSRQSTCAKLPKKKTPSASNDHNISFKTFDASYVLTNKSDKIVAKYVGGKHKGSKTCVWVYASGGSSWIIDSGCTNHMTGEKKMFSSYEKNQDPQRAITFGDGNQDVGVTVFRRSDDSIAFKGVLEGQLYLVDFDRAELDTCLIAKTNMGWLWHRRLAHVGMKNLHKLLKGEHILGLTNVHFEKDRVCSACQAGKQVGVHHPHKNIMTTDTPLELLHMDVFGPIAYISIGGSKYCLVIVDDYYRFTWVLFLLEKSHTQETLKGFLRRAQNEFGLRIKKIRSDNGTKFKNSQIEGFLEEEGIKHEFSSPYPPQQNGVVERKNRTLLDMARTMLDEYKISDRFWAEAVNTACYAINRLYLHRILKKTSYELLTGKKLNVSYFRVFGSKCFILVKRGRKSKFAPKAVEGFLLGYDSNTRAYRVFNKSSGQVEVSCDIVFDETNGSQVEQVDLDEIGDEEAPCIALRNMSIGDVCPKESEEPPNAQDQPSSSTQASPPTQNEDEAQVDEGEDQTDEPPQDDDNNQGGDANDQDKEDEEPRPPHPRVHQAIQRDHPVDTILGDIHKGVTTRSRVAHFCEHYSFVSSIEPHRVEEALQDSDWVVAMQEELNNFTRNEVCHLVPRPNQNVVGTKWVFRNKQDEQPPGFEDSEYPNHVYKLSKALYGLKQAPRAWYECLRDFLITNGFKVGKADPTLFTKTLDNDLFVCQIYVDDIIFGSTNESACEEFSRIMTQKFKISMMGELKYFLGFQVKQLQEGTFISQTKYIQDILNKFGMKDAKPIKTPMGTNGHLDLDTGGKTVDXQRKSTSGTCQFLGRSLVSWASKKQNSVALSTAEAEYIAAGHCCAQLLWMRQTL

SEQ ID NO: 10163 - protein, 1358 aa, Zea mays
  Clone ID: TF_ZmC951_393.pep
MSGDHAKKDMVTGRKPATSHGKAPSGESYNKGKGKEKESPSHKSCRSGDKKKKMRKVVYYETDTSSPSTFGSDTPSITSKRHERKKFREEPQDMYNRLKTLVNQVRNLGSKKWDDHEMVKVILRSPVFLNPTQVQLIRGNPRYTLMSPEEVIGHFVSFELMIKGSKKINELDGPSTFEAQPVAFKATEEKKEESTSSRTPIDASKLDNEEMALVIKSFRQILKLRRGKNYKPRSKKVCYKCGKPGHFIAKCPLSSDSDRGDDKKGRRKEKKRYYKKGGDAHVCREWDSDESSTDSSSDEDAANMAVTKGLLFPNVGHKCLMAKDGKRKKVKSRFSTKYETSSDEENASNEEDNLCILFANLNMQQKEKLNELISAIHEKDDLLDTQEDFLIKENKKHVKIKNAYALEVEKCEKLSSELSTFHETIDNLRNENASLIAKVDSNACNVSISNLRDDNVDLLAKIEELNVTLASLRIENEKLIAKAKELDVCNVTISDLRDKNDILRAKIVELNSCKPSTSITEHVTICTRCRDVDVSAIHDHLSMIKQQNDHIAKLDAKIAEHELENEKFKFARSMLYNGRRPGIKDGIGFQQGGNVKLNAPPKKLSNFVKGKAPMPQDNEGYILYPAGYLEDKIRRIHSRKSHSGPNHAFMYKGETSSSRQPTRAKLPKKKTPSASNDHSILFKTFDASYVLTNKSGKVYASGGSSWIIDSGCTNHMTGEKKMFSSYEKNQDPQRAITFGDGNQGVTVFRRSDDSIAFKGVLEGQLYLVDFDRAELDTCLIAKTNMGWLWHRRLAHVGMKNLHKLLKGEHILGLTNEKSHTQETLKGFLRRAQNEFGLRIKKIRSDNGTEFKNSQIEGFLEEEGIKHEFFSLYTPQQNGVVERKNRNLLDMARTMLDEYKTSDRFWAEAVNTACYAINRLYLHRILKKTSYELLTEQVDLDEIGDEEASCITLRNMSIGDVCPKESEEPPNAQDQPSSSPQASPPTQNENEAQFDEGENQEDEPPQDDGNNQGGDANDQDKEDEEPRPPHPRVHQAIQRDHPVDTILDDIHKGVTTRSRVAHFCQHYSFVSSIEPHRVEEALQDSDWVVAMQEELNNFTRNEVWHLVPRPNQNVVGTKWVFHNKQDEHGVVTRNKARLVAKGYSQVEGLNFGETYAPVARLESIRILLAYATYHGFKLYQMDVKSAFLNGPIKEEVYVEQPPGFEDSEYPNHVYKLSKALYGLKQAPRAWYKCFRDFLITNGFKVGKVDPTLFTKTLENDLFVCQIYVDDIIFGSTNESTCEEFSRIMTQKFEMSMMGELKYFLGFQVKQLQEGTFISQTKYIQDILNKFGMKDAKPIKTPMGTNGHLDLDTEGDPHLI

SEQ ID NO: 10164 - protein, 1228 aa, Zea mays
  unsure (1)..(1228): unsure at all Xaa locations
  Clone ID: TF_ZmC951_397.pep
MSPEEVIGKFVSFELMIKGSNKIIEQDGPSTPEAQPVAFKATEEKKKESTSSRLPINASKLDNEEMALIIKSFRQILKQRRGKDYKSRTKKVCYKCGKPGHFIAKCPLSSDSDRGNDKKGKRREKKRYYKKKGGDAHVCREWDSDESSSDSSSDEDAANIVVTKGLLFPNVGHKCLMAKDDKRKKVKSRSSTKYASSSDEDNSSDEEDNLRTLFANLNMQQKEKLNELISAIHEKDELLDSQEDFLIKENKKHVKVKDAYALEVEKCEKLSSELSKCHDIITNLRNENTSLIAKVDSNLCDDSISNLRDDNANLLAKIEKLNDSLASLRNDNEKLIAKAKDLDVCNVTISNLRSENDILHAKIVELKSCKPSTSTVEHVSINVDAIHDHLALIKKQNDHIAQLNAKINEHDLENEKFKFARSMLYSGRRPGIKDGIGFQKGDNVKLNASPKRLSNFVKGKAPMPQDNEGYILYPAGYPEHKIRRIHSRKSHSGPNHAFMYKGETSSSRQSTRAKLPRKKTSIASNDSNISFKTFDASYVLTNKSGKVYASGVSSWIIDSGCTNHMTWEKKMFSSYEKNQDPQRAITFGDGNQGLEKSHTQETLKGFLRRAQNEFGLRIKKIRSDNGMEFKNSQIEGFLEEEGIKHEFSSPYTPQQNGVVERKNRTLLDMARTMLDXYKTSDRFWAEXRVFGSKCFILVKRGRKSKFAPKAVEGFLLGYDSNTRAYRVFNKSTGLVEVSCDIVFDETNSSQVEQVDLDELDDEEAPCVALRNMSIGDVCPKESEEPPQAQDQPSSYTQASPPTQDEDEAQKDKGEDQEVEPPQEESNDQGGDAHDQVKEDEQVPRPPHPRVHQAIQRDHPVNTILGDIQKGVTTRSRVAHFCEHYSFVSSIEPHRVEEALQDSDWVVAMQEDLNNCTRNEVWHLVPRPNQNVVGTKWVFRNKQDEHGVVTRNKARLVAKGYSQVEGLDFGETYAPVARLESIRILLAYATYHGFKLYQMDVKSAFLNGPIKEEVYVEQPPGFEDSEYPNHVYKLSKALYGLKQAPXAWYECLRDFLITNGFKVEKADPTLFTKTLENDLFVCQIYVDDIIFGSTNESTCEEFSRIMTQKFEMSMMGELKYFLGFQVKQLQAGTFISQTKYIQDILNKFGMKDAKPIKTPMGTNGHLDLDTGGKSVDQKKEHIGDLPVLGKVSGVLGFKEAKFRSSFYHRGRLYCHRPLLHAIALDEANP

SEQ ID NO: 10165 - protein, 1583 aa, Zea mays
  Clone ID: TF_ZmC951_406.pep
MAGVGRSTRAGGDARRRRGDRPGHGEIVQSNGSERSTGCQRRYEREELGGDSLDSSVHARRRKTEVRRCRLRSPDEVLSPFVGGDVEVHFPKQLLGGGWRLMQYGSNKGQVIRSPVEILNYHCLSDHGYAISHGLKPLEVRPKCFIAPMPDGFEVPWLRRLVGEELKVGDEAPTEVAPVIDAVSRTPFSSATDEMVAKQNTDPGQKAIWHWKVTAIELAWINNTPPSWCTSCQCLEPDRAPGVTPREVSRGRIGSRMWITFKSNEPPGPESAHSLRRPILPAVLPWPTKGWPRESTGPRPFARPSCLLVDPGDIRPPTVTKITKRETIEGELGRFVLHQGEEPQAIYNWLKALVNQVRNLGSKKWDDHEMVKVILRSLVFCNPTQVQLIRGDPRYKLMSPEEVIGKFVSFELMIKGSKHIVDLEQGGTSTPEVQPIAFKATEEKKEESTSSRQPIDASKLDNEEMALIIKSFRQILKQRRGKDYKPRSKKVCYKCGKPGHFIAKCPLSSDSDRGDDKKGKRTENKRYHKKRGGDAHVCREWDSDESSSDSSSDEDAANIAVTKGLLFPNVGHKCLMAKDGKRKKDELLDTQEDFLIKENKKHVKVKNAYALEVEKCEKLSSELSTCHDTIVNLRNENAKLIAKVDSNVCNDSIPNLSDDNANLLAKIEKLNDSLASLRIENEELIAKAKDLDVCNVTISNLRSENDILHANIVELKSCKPSTSTIEHVSICTRCRYINVDAIHDHLALIKKQNDHIAQLNAKINEHDLENGKFKFARSMLYSGRCPGIKDGIGFQKGDNVKLNAPPKRLSNFVKGKAPMPQDNEGYILYPAGYPESKIRRIHSKKSHSSPNQDFMYKGETSSSRQSTRAKLPKKKTPTASNDHNISFKTFDASYVLTNKSGKVYASGGSSWIIDSGCTNHMTGEKKMFSSYEKNQDPQRAITFGDGNQGLEKSHTQETLKGFLRRAQNEFGLRIKKIRSDNGTEFKNSQIEGFLEEEGIKHEFSSPYTPQQNGVVERKNRTLLDMARTMLDEYKTSDRFWVEAVNTACYAINRLYLHRILKKTSYELLTGKKPNVSYFRVFGSKCFILVKRGRKSKFAPKAVEGFLLGYDSNTRAYRVFNKSSGQVEVSCDIVIDETNGSQVEQVDLDEIGDEEASCVALRNMSIGDVCPKESEEPPHAEDQPSSSMQASPPTQDEDEAQNDEVVDQEVEPPQGESNDQGGDAHDQDEEDEQAPKPPHPRVHQAIQRDHPVNTILGDIQKGVTTRSRVAHFCEHYSFVSSIEPHRVEEALQDSDWVVAMQEELNNFTRNEVWHLVPRPNQNVVGTKWVFRNKQDENGVVTRNKARLVAKGYSQVEGLDFGETYAPIAKLESIRILLAYATYHGFKLYQMDVKSAFLNGPIKEEVYVEQPPSFEDSEYPNYVYKLSKALYGLKQAPRAWYECLRDFLITNGFKVGKADPTLFTKTLENDLFVCQIYVDDIIFGSTNESTCEEFSRIMTQKFEMSMMEELKYFLGFQVKQLQEGTFISQTKYIQDILNKFGMKDAKPIKTPMGTNGHLDLDTGGCKINRKSTSGTCQFLGRSLVS

SEQ ID NO: 10166 - protein, 1546 aa, Zea mays
  unsure (1)..(1546): unsure at all Xaa locations
  Clone ID: TF_ZmC951_409.pep
MSGDDAKKMVIGGEKSATSHGKAPSRESANNKKDGSPSRIRSHKSGEKKKKMKKVVYYETDSSSPSTSGSDAASVTSKRQERKKYSKTPLRYPRIPKDTPLLSVPLGKPPTFDGEDYSRRSDMMRYHLTSLHKSIWDVVEFGVQVPSVGDEDYDEDEVAQIVHFNSQATTILLTSLSREEYNKVQGLKSAKDIWDVLKTAHEGDEVTKITKWETIEGELGRFRLRQGEEPQEMYNRLKTLVNQVRNLGSKKWDDHEMVKVILRSLVFLNPMQVQLIRGDPRYTLMSPKEVIEKFVSFELMIKGSKKIIEQDGPSTPEAQPVAFKAMEEKKEESTSSRLPIDASKLDNEEMALIIKSFRQILKQRRGKDYKSRSKKVCYKCGKPGHFIAKCPLSSDSDRDNDKKGKRREKKKYHKKRGDDAHVCREWDFDESSTDSSSDEDAANITVTKGLLFPNVGHKCLMAKTGKRKKVKSRSSTKYASSSDEDNSSDEEDNLRTLFANLNMQQKEKLNELISAIHEKDELLDSQEDFLIKENKKHVKVDSNVCDVLIPNLRDDNVSLLAKIEELNVSLASLRNENEKLIAKAKDLDVCNVTISNLRSENDILHAKIVELKSCKPSTSTVEHVFICTRCRDINVNAIHDQLALIKKRNDHIAQLNAKINEHDLENENFKFARSMLYSGRRPGIKDGIGFQKGDNVKLNAPPKKLSNFVKGKAPMPQDNEGYILYPAGYPEHKIRRIHSRKSHSGPNHAFMYKGSCQVYASRGSSWIIDSGCTNHMTGEKKMFSSYEKNQDPQRAITFGDGNQGVTVFRRSDDSVAFKGVLEGQLYLVDFGRVELDTCLIAKTNMGWLWHRRLAHVGMKNLHKLLKGEHILGLTNVHFEKDRICSACQAGKQVGVNHPHKNIMTTDRPLELLHMDLFGPIAYISISGNKKRNGTKFKNSQIEGFLEKEGIKHEFSSPYTPQQNGVVERKNRTLLDMARTMLDEYKTSDRFWAEAVNTVCYAINRLYLHRILKKTSYELLTGKKPNVSYFRVFGSKCFILVKRGRKSKFAPKAVEGFLLGYDSNTRAYRVFNKSSGLVEVSCDIVFDETNGSQVEQVDLDELDDEKAPCVALRNMTIGDVCPKEPEEPPQAQDQPSSSMQASPPTQDEDKAQNDEGEDQDVEPPQEECNDQGGDAHDQDEEDEQVPRPPHPRVHQAIXRDHPVDTILGDIHKGXEEALQDSDWVVAMQEELNNFTRNEVWHLVPRPNQNVVGTKWVFRNKQDEHGVVTRNKARLVAKGYSQVEGLDFGETYAPVARLESIRILLAYATYHGFKLYQIDVKSAFLNGPIKEEVYVEQPPGFEDSEYPNHVYKLSKALYGLKQAPRAWYECLRDFLITNGFKVGKVDPTLFTKTLDNDLFVCQIYVDDIIFGSTNESTCEEFSRIMTQKFEMSMMGELKYFLGFQVKQLQEGTFISQTKYIQDILNKFGMKDAKPIKTPMGTNGHLDLDTGGKSVDQKKEHIGDLPVLGKILGVLGFKEAKFRSSFYRRSRVYCRRSLLRTTTLDEANP

SEQ ID NO: 10167 - protein, 1072 aa, Zea mays
  Clone ID: TF_ZmC951_414.pep
MSGDHAKEMVTGEKPATSHGKVPSKESGNKKKEGSPSRIRTHKSGEKKRKMKKVVYYETDSSSPSTLGSDAASITSKRQERKKYSKIPLRYPCIPRHTPLLSIPLGKPPTFDGEDYSRWSDMMRYHLTSLHKCIWDVVEFGVQVPSVGDEDYDEDEVAQIEHFYSQATTILLTSLSREEYNKVQGLKSAKEIWDVLKTAHEGDEVTKITKRETIEGELGRFMLNQGEELQAMYNRLKTLVNQVLNLGSSKWDDHEMVKVILRSLVFLNPTQVQLIRGDPRYKLMSPEEVIGKFVSFELMIKGSKKIIEQGATSTPEVQPVDFKVTEEKKEDSTPSRVPIDASKLDNEEMALIIKSFRQILKQRRGKDYKSRSKKVCYKCGKPGHFIAKCPLSSDSDRGDDKKGRRKEKKRYHKKKGGNAHVCREWESDESSTDSSSDEDAANIAITKGLLFPNVGHKCLMAKDDKKKKVKSRSSTKYETSSDEDNASDKEDNLRTLFANLNMQQKEKLNELISAIHEKDDLLDSQEDFLIKENKKHVKVKNAYALEVEKCEKLSSELSTCHDTITNLRNENDKLIAKVDSNTCDVSIPNLRDENVDLLAKIEELNISLDSLRIENEKLLAKVKDFDVCNVTISNLRSENDILHAKVVELKSFKPSTSTVEHVPICTRCRDVDIDAIRDHMVYASGGSSWIIDSGCTNHMTGEKKMFSSYEKNQDPQRAITFGDGNQGLVKGVTVFRRSDDSIAFKGVLEGQLYLDFDRAELDTCLIAKTNMGWLWHRRLAHVGMKNLHKLLKGEHILGLTNVHFEKDRICSACQAGKQVGAHHPHKNIMTTDRPLELLHMDLFGLIAYISIGGTYATYHGFKLYQMDVKSAFLNGPIKEEVYVEQPPGFEDSKYPNHVYKLSKALYGLKQDPRAWYECLRDFLIANGFKVGKADPTLFTKTLNNDLFDHDTKIRDVDDGGVEVLLGISSEATPRGTFISQTKYTQDILSKFGMKDAKPIKTPMGTNGHLDLDTGGKSVDQKKEHIEDLSVLGKILGVLGFKEAKFRSSFYRRGRVHCRRPLLRATTLDEANP

SEQ ID NO: 10168 - protein, 1434 aa, Zea mays
  unsure (1)..(1434): unsure at all Xaa locations
  Clone ID: TF_ZmC951_418.pep
MSGASAKREIGTDDKSASSGRTHSRESAHKHKEESSSSIKSQRKGDKKKKMKKVVYYETDSSSPSTSGSESAFATSKRHERKKYSKMPLRYSRISKRTPLLSVPLGKPPMLEGEDYSIWSDKMRHHLTSLHKSIWDIVEYGPQVPKKGDKDYDSEEVEQIQHFNSQATTILLASLSREEYNKVQGLKSAKEIWDVLKTAHERDEVTKITKRETIEGELGRFMLHQGEEPQAMYNRLKTLVNQVRNLGSTKWDDHEIVKVILRSLVFLNPTQVQLIRGDSRYTLMSPEEVIGKFVSFELMIKGSKKIIEQGTSSTPDVQPVAFKATEEKKENPTPSRVPIDASKLDNEEMTLIIKSFRQILKQRRGKDYKPRSNKVCYKCGKPGHFIAKCPLSSDSDRGDDKKGKRREKKRYYKKKGGDAHVCREWDSDESSTDSSSDEDATNIVVTKGLLFPNVGHKCLMAKDDKRKKVKSKSSTKYATSSDEASSSDNEDDLLTLFAHLNMQQKEKLNELISAIHEKDEHLDTQEDFLIKENKKHVKVKNAYALEVEKCEKLSSELSTCHDVISNLRNENAKLIAKVEKSNVCNDSIDNLRNDNASSHAKVEKLNASLASLRNENEKLIAKAKELNACNVSISSLRDENAILHAKIVELNSCKPSTSTIEHVTICTRCRDVNIDAIHDHMAMIKQQNDHIVKLDAKITEHELENEKIKFARSMLYSGRRPGIKDGIGFQQGGNVKLNAPPKRLSNFVKGKTPMAQDNEGYILYPAGYPEHKIRKIHSRKSHSGSNYAFMYKSEASSSRQSTHAKLPKKKTPIASNDHNISFKTFDASYVLTNKSGKVVAKYVGGKHKGSKTCVWVPKAYAFGGSSWIIDSGCTNHMTGEKRMFSSYEKNQDPQRAITFGDGNQDSLDYNLLSVSQLCKMGYNCLFTDEKSQTQETLKGFLRRAQNEFGLRIKKIRSDNGTEFKNSQIEGFLEDEGIKHEFSSPYTPQQNGVVERKNRTLLDMARTMLDEYKTLDRFWAEAVNTACYAINRLYLHRILKKTSYELLTGKKPNVSYFRVFGSKCFILVKRGRKSKFAPKAVEGFLLGYDSNTRAYRVFNKSTGLVEVSCDIVFDETNGSQVEQVDLDELDDEEAPCVALRNMSIGDVCPKESEEPPHAQDQPSSSMQASTPTQDEDQAQDDEDDDQEEPPQEENNDRGGDANDQDKEDDDGPRPPHPRVHQAIQRDHPVNSILGDIHKGVTTRSRVAHFCEHYSFVSSIEPYRVEDALRDXNXVLAMQEELNNFMRNKVWHLVPRPNQNVVGTKWVFRNKQDXHGVVTRNKARLVAKGYSQVKGLDFGETXYAPVARLESIRILLAYATYHGFKLYXMDVKSAFLNGPIKXEVYVEQPPSFEDXSEYPNHVYKLSKALYGLKQAPRAWYECLRDFLIANGFKVGK

SEQ ID NO: 10169 - protein, 1489 aa, Zea mays
  Clone ID: TF_ZmC951_440.pep
MSGASAKREIGTGEKPATSNGKAPSGESANKVKGSSSHNKSRQSGDKKKKMKKVVYYDTDSSSPSTSGSNTPSVTSKRHERKKFSKIPLRYPRISIRTPLLSVPLGKPPMFDGEDYNMWSDKMRHHLTSLHTSIWDVVEIGVQVPSPGDEDYDSDEVAQIRHFNSQATTILLASLSREEYNKVQGLKSAKEIWDVLKTAHEGDEVTKITKRETIEGELGSKMIIEQGDSSTPEAQLVAFKATEEKKEDSTPSRIPIDASKLDNKEMALIIKSFRQILKQRKGKDYKPRSRKVCYKCGKPGHFIAKCPLSTDSDKGDDKKGKRGEKKRYYKKKGGDAHVCREWDSDESSTDSSSDEDAANIAVTKGLLFPNVGHKCLMAKDGKRKKVKSKSSTKYETSSDEDNSGVEEDNLRTLFANLNMQQKEKLNELISAIHEKDELLDSQEDFLIKENKKHVKVKNAYALEVEKCEKLSSELSTCHDVISNLRNENAKVIVKVDSNVCDVSIPNLIDDNVSLLAKIEELNVSLASLKIENEKLIAKAKDLDVCNVTISNLRSENDILHAKIVELKSCKPSTSIVEHVSICTRCRDINVDAINDHLALIKKQNDHIAQLNAKINEHDLENENFKFARSMLYSGRRPGIKDGIGFQKGDNVKLNAPPKRLSNFVKGKAPMPQDNEGYILYPVGYPKHKIRRIHSRKSHSGPNHAFMYKGETSSSRQSTRAKLPKKKTPIASNNSNISFKTFNASYVLTNKSGKVYASGGSSWIIDSRCTNHMTGEKKMFSSYEKNQDPQRAITFGDGNQGVTVFRRSDDSVAFKGVLEGQLYLVDFNRAELDTCLIAKTNMGWLWHRRLAHVGIKNLHKLLKGEHILRLTNVHFEKDRICSACQAGKQVGVHHPHKNIMTTDRPLELLHMDLFGPIAYISIGGSKYCLVIVDDYSRFTWVFFLQEKSHTQETLKGFLRHAQNEFSLRIKKIRSDNGTEFKNSQIEGFLEEEGIKHEFSSPYTPQQNGVVERKNRTLLDMARTMLDEYKTSDRVFGSKCFILVKRGRKSKFAPKAVEGFLLVYDSNTRAYRVFNKSSRLVEVSCDIVFDETNGSQVEKVDLDELDDEEALCVALRNMSIGDVCPKESEEPPQAQDQQSSSTQASPPTQDEDEAQNDEREDQEVEPPQEESNDQGGDAHDQDEEDKQVPRPPHPRVHQAIQRDHPMNTILGDIQKGVTTRSRVAHFCEHYSFVSSIEPHKVEEALQDSDWVVAMQEELNNFTRNEVWHLVPRPNQNVVGTKWVFRNKQDEHGVVTRNKARLVAKGYSQVEGLDFGETYAPVARLESIRILLAYATYHGFKLYQIDVKSAFLNGPIKEEVYVEQPPGFEDSEYPNHVYKLSKALYGLKQAPRAWYECLRDFLITNGFKVGKADPTLFTKTLENNLFVCQIYVDDIIFVSTNESTCEEFSRIMTQKFEMSMMGELKYFLGFQVKQLQEGTFISQTKYIQDILT

SEQ ID NO: 10170 - protein, 1668 aa, Zea mays
  Clone ID: TF_ZmC951_453.pep
MSGDHTKREMETGDKPTTSHEKASSEESRNKGKGKEKKSSSHKSYRNGDKKKKMRKVVYYETDTSSPSTSGSNAPSVTSKRHERKKFSKIPLRYPCIPKHTPLLSVPLGKPPTFDGEDYARWSDMMRYHLTSLHKSIWDVVEFGVQVPFVGDDDYDEDEVAQIEHFNSQATTILLASLSKEEYNKVQGLKSAKEIWDVLKTAHEGDELTKITKRETIEGELGRFRLHKGEEPQHMYNRLKTLVNQVRNLGSKKWDDHEVVNVILRSLIFLNPTQVQLIRGNPRYTKMTPEEVIGHFVSFECMIKGSKKINELDGPSTSEAQPIAFKATEEKKEESTSSRQPIDASKLDNEEMALIIKSFRQILKQRRGEDYKPRSKKVCYKCGKPGHFIAKCPLSSDSDRGDDKKGRRKEKKKYYKKKGGDAHVCREWDSDESSTDSSSDEDAANIAVTKGLLFPNVGHKCLMAKDDKRKKVKSRSSTKYETSSDEDNASNEEDNLRILFANLNMQQKEKLNELISAIHEKDDLLDTQEDFLIKENKKHVKVKNAYALEVEKCEKLSNELSTCHETINNLRNENASLIAKVDSNACDVSIPNLRNDNDDLLAKIEELNISLASLRIENEKLLAKAKELDVCNVTISDLRDKNDILRAKIVELNSCKPSTSTTEHVTICTRCRDIDVNAIHDHLSMIKQQNDHIAKLDAKIAEHELENEKFKFARSMLYSGRRPGIKDGIGFQKGDNVKLNAPPKRLSNFVKGKAPMPQDNEGYILYPAGYPESKIRRIHSRKSHSGPNHAFMYKGETSSSRKSTHAKLPKKKTLSASNEPSISFKTFDASYVLTNKSGKVYASGGSSWIIDSGCTNHMTGEKKMFSSYEKNQDPQRAITFGDGNQGVTVFRRSDDSIAFKGVLEGQLYLVDFDRAELDTCLIAKTNMGWLWHRRLAHVGMKNLHKLLKGEHILGLTNVHFEKDRICSACQAGKQVGTHHPHKNIMTSDRPLELLHMDLFGPIAYISIGGSKYCLVIGDDYSRFTWVFFLQEKSHTQETLKGFLRRAQIEFGLRIKKIRSDNGMEFKNSQIEGFLEEEGIKHEFSSPYTPQQNGVVERKNRTLLDMARTMLDEYKTPDRFWAEAVNTACYAINRLYLHRILKKTSYELLTGKKPNISYFRVFGSKCFILVKRGRKSKFAPKTVEGFLLGYDSNTKAYRVFNKSSGLVEVSCDVVFDETNGSQVEQVDLDEIGEEQAPYIALRNMSIGDVCPKESEEPPHAQDQPSSSTQASPPTQNEDEAQVDEGEDQRDEPPQDDDNDQGRDANDQDKEDEQPRPPHPRVHQAIQRDHPVDTILDDIHKGVTTRSRVAHFCEHYSFVSSIEPHRVEEALQDSDWVVAMQEELNNVTRNELYQMDVKSAFLNGPIKEEVYVEQPPGFEDSEYPNHVYRLSKALYGLKQAPRAWYECLRDFLIANGFKVGKADPTLFTKTLDNDLFVCQIYVDDIIFGSTNESTCEEFSRIMTQKFVMSMMGELKYFLGFQVKQLQEGTFISQTKYTQDILTKFGMKDAKPIKTPMGTNGHLDLDTGDASQNLIHLPLTILQKTFEKDLQKNLQKCQRFIYNYTKSTVRNTIDYSGQEKLFGKTGQARTVRALAADRPRHKDDPRTEPMQKSESALWTVRRISVDRLRPL

SEQ ID NO: 10171 - protein, 899 aa, Zea mays
  Clone ID: TF_ZM3615.C3.o9.fg.pep
MSGDHAKKEMETGDKPTTSQGSTSSEESRTKRKEKKKDSSKRKEKRFSSSHHKEKKEKSSSHKSHRKGDKHKRMRKVVYYETGTSSTSTSDSDAPSVTSKRQERKKFSKIPLHYPRTSRHTPLLSVPLGKPPTFDDEDYARWSDLMKFHLTSLHKSIWNVVEFGAQVPSVGDEDYDEDEVAQIEHFNSQATTILLASLSKEEYNKVQGLKNAKEIWDLLKTTHEGDELTKITKRETIEGELGRFSLRQGEEPQDMYNRLKTLVNQVRNLGSKKWDDHEVVKVILRSLIFLNPTQVQLIRGNPRYTQMTPEEVIGNFVSFECMIKGSKKINELDEPSTSEAQPVAFKATEEKKEESTPSRQPIDASKLDNEEMALIIKSFRQILKQRKGKDYKSRSKKVCYKCGKPGHFIAKCPLSSDSDRDNDKKGKRKEKKRYHKRRGDAHVCREWDSDESSTDSSSDEDAANIAVTKGLLFPNVGHKCLMAKDGKRKKVKSRSSTKYETSSDEDDASNEEDNLRVLFANLNMEQKEKLNELISAIHEKDDLLHSQEDFLIKENKKHVKVKNAYALEVEKCEKLSSELSTCHETIDNLRNENTRLNAKVDSHVCDVSIPNPRDNNDDLLARIEELNISLASLKIVELNSCKPSTSSVEHVSICTRCRDVDINAIHDHMTLIKQQNDHIAILDAKIAEHNLENEKFKFARSMLYNGRHPGIKDGIGYQRGDNVKLNAPPKNLSNFVKGKAPMPQDNEGYILYPAGYPESKIRRIHSRKSHSGPNHAFMYKGETSSSRQPTRAKLPKKKTPNASNDHDISFKTFDASYVLTNKSGKVYASGGTSWIIDSGCTNHMTGEKKMFSSYEKNQDPQRAITFGDGNQGLVKGVTVFRRSDDSIAFKGVLEGQLYL

SEQ ID NO: 10172 - protein, 746 aa, Zea mays
  unsure (1)..(746): unsure at all Xaa locations
  Clone ID: TF_ZM4166.C5.o13.fg.pep
MSGDHAKKEMGTGEKSITSHGKAPSGESYNKGKGKEKESSSHKSRRSGDKKKKMRKVVYYETDSSSPSTSGFDTPSVTSKRHERKKFNYARWSDMMRYHLTSLHKSIWDVVEFGVQVPSVGDEDYDEDEVAQIVHFNSQATTILLASLSREEYNKVQGLKSAKEIWDMLKTEHEGDEVTKITKRETIEGELNPDDHEVVKEPQDMYNWLKTLVNQVCNLGSKKWDDHEVVKVILRSLVFLIPTQVQLICGNPRYTLMTPEEVIGNFVRFELMIKGSKKINELDGPSMFEAQPVAFKATEEKKEESTSSRTPIDASKLDNKEMALIIKSFRQILKQRKGKDYKPRSKKVCYKCGKPGHFIAKCPLSSASDRDNDKKGKRYHKKRGGDAHVCREWDSDESSSDSSSNEDAANIVVTKGLLFPNVGHKCLMAKDGKRKKVKSKSSTKYETSSDEDNASDEEDNLHILFANLNMQQKEKLNELISAIHEKDELLDTQEDFLIKENKKHVKVKNAYALEIEKCEKLSSELSNCHDTIANLRNENAKLIAKVDSNICDVSIPNLRDENVDLLAKIEELNISLASLRNENEKLIAKAKDFDVCNVTISNLRSENDILHAKVVELKSCKPSTSTVEHTSICTRCRDINIDAIHDHMALIKQQNDHIAKLDAKITEHDLENEKFKFARSMLYSGRRPGIKDGIGFQKGDNVKINAPPKRLSNFVKGKAPMPQDNEGYILYPAGYPXENKIRRIHS

SEQ ID NO: 10173 - protein, 932 aa, Zea mays
  Clone ID: TF_ZM4328.C1.o1.fg.pep
MSGDHAKKEMETGEKPTTSHGSTSSEESRTKRKEKKKSSSNKGKEKKSSSHHKEKKEKSSSHKPHRKGDKHKRMRKVVYYETDTSSTSTSDSDAPSVTSKRQERKKFSKIPLHYPHTSRHTPLLSVPLGKPPTFDGEDYARWSDLMKFHLTSLHKSIWNVVEFGAQVPSVGDEDYDEDEVAQIEHFNSQATTILLASLNREEYNKVQGLKNAKEIWDLLKTAHEGDELTKITKRETIEGELGRFQLRQGEEPQDMYNRLKTLVNQVRNLGSKKWDDHEVVKVILRALIFLNPTQVQLIRGNPRYPLMTPEEVIGNFVSFECMIKGSKKINELDELSTSEAQPVAFKATEEKKEESTPSRQPIDASKLDNEEMALIIKSFRQILKQRKGKDYKSRSKKVCYKCGKPGHFIAKCPLSSDSDRDNDKKGKRREKKRYHKKRGDDAHVCREWDSDESSTESSSDEDAANIAVTKGLLFPNVGHKCLMAKDGKKKKVKSKSSTKYESSSDDNASDEEDNLLTLFANLNMEQKEKLNELISAIHEKDDLLDSQEDFLIKENKKHVKVKNAYALEVEKCQKLSSELSTCHDTIANLRNENASLIAKVESHVCDASIPNLRNDNNDLLAKIKELNDSLANIRVENENLIAKAKDFDVCNSIISDLRTKNDMLHAKIVELKSCKPSTSNVEHVSICTRCRDVDINAIHDHMSLIKQQNDHIALLDAKIAEHNLENEKFKFARSMLYNGRRPGIKDGIGFQRGDNVKLNAPPKNLSNFVKGKAPMPQDNKGYILYPAGYPESKIRRIHSRKSHSGPNHAFMYKGETSSSRQPTRAKLPRKKTPNASNDHAISFKTFDASYVLTNKSGKVYASGGTSWIIDSGCTNHMTGEKKMFSSYEKNQDPQRTITFGDGNQGLVKGVTVFRRSDDSIAFKGVLEGQLYL

SEQ ID NO: 10174 - protein, 1692 aa, Zea mays
  Clone ID: TF_ZM4398.C2.o1.fg.pep
MSGEHAKREMETGDKPIGDKPTTSHEKASSEESHNKKKGKEKKASSHKSHQSGDKKKKMRKVVYYETDTSSPSTSGSDASSVTSKCHERKKFSKIPLRYPRIPKHTPLLSVPLGKPPTFDGEDYARWSDMIRYHLTSLHKSIWDIVEFGVQVPSVGDEDYDEDEVAQIQHFNSQATTILLTSLSREEYNKVQGLKSAKEIWDVLKTAHEGDEVTKITKRETIEGELGRFRLRQGEEPQDMYNRLKTLVNQVRNLGSKKWDDHEVVKVILRSLVFLNPTQVQLICGNPRYTLMTPEEVIGNFVSFELMIKGSKKINELDGPSTPEAQPVAFKATEEKKEESTSSRQPIDASKLDNEEMALIIKSFRQILKQRKGKDYKSRSKKVCYKCGKPGHFIAKCPLSSDSDRDNDKKGRRKEKKRYYKKKGGDAHVCREWDSDESSTDSSSDEDAANIAVTKGLLFPNVGHKCLMAKDGKKKKVKSKSSTKYESSSDDNASDEEDNLRTLFANLNMQQKEKLNELISAIHEKDDLLDTQEDFLIKENKKHVKVKNAYALEVEKCEKLSSELSTCHETIDNLRKENPNLLAKVDSNVCDVSIPNLRNDNNDLLAKIEELNTSIASLRIENEKLLAKAKELDVCNVTISDLRDKNDILRAKIIELNSCKPSTSTTEHVTICTRCRDVDIDAIHDHMVLIKQQNDHIEKLDAKIAEHELENEKFKFARSMLYSGRRPGIKDDIGFQKGDNVKLNASPKKLSNFVKGKAPMPQDNEGYILYPAGYPESKIRRIHSRKSHSGPNHAFMYKGETSSSRQPTRAKLPKKKTPSASNDHSISFKTFDASYVLTNKSGKVVAKYVGGKHKVYASGGSSWIIDSGCTNHMTGEKKMFSSYEKNQDPQRAITFGDGNQGLVKGVIVFRRSDDSIAFKGVLEGQLYLVDFDRAELDTCLIAKTNIGWLWHHRLAHVGMKNLHKLLKGEHILGLTNVHFEKDREKSHTQETLKGFLRRAQNEFGLRVKKIRSDNGTEFKNSQIEGFLEEEGIKHEFSSPYTPQQNGVVERKNRTLLDMARTMLDEYKTSDRLGGGGRKTKFAPKTIEGFLLGYDSNTRAYRVFNKSSGLVEVSCDVVFDETNGSQVEQVDLDEIGDEEALCIALRNMTIGDVCPKESEEPPNAQDQPSSSTQASPPTQNEDEAQVDEGEDQRDEPPQDDGNDQGGDAKDQNKEDEEPRPPHPRVHQAIQRDHPVDTILGDIHKGVTTRSCVAHFCEHYSFVSSIEPHRVEEALQDSDWVVAMQEELNNFTRNEVWHLVPRPNQNVVGTKWVFRNKQDEHGVVTRNKARLVDKGYSQVEGLDFGETYAPVARLESIRILLAYATYHGFKLYQMDVKSAFLNGPIKEEVYVEQSPGFEDSEYPNHVYKLSKALYGLKQAPRSWYECLRDFLITNGFKVGKVDPTLFTKTLDNDLFVCQIYVDDIIFGSTNESTCEEFSRIMTQKFEMSMMGELKYFLGFQVKQLQEGTFISQTKYTQDILNKFGMKDAKPIKTPMGTNGHLDLDTEGCKINRKSTSGTCQFLGRSLVSWASKKQNSVALSTAEAEYIVAGHCCAQLLWMRQTLRDYGYKLTKVPLLCDNESAIRMADNRVEHSRTKHIVIRYHFLRDHQQKGDIDIAYINTKDQLADIFTKPLDEQTFNKLRHELNILDSRNFF

SEQ ID NO: 10175 - protein, 637 aa, Zea mays
  Clone ID: TF_ZM4406.C6.o3.fg.pep
MSGDHAKKEMETGDKPTTSQGSTSSEESRTKRKEKKKSSSNKGKEKKPSSHHKEKKEKSSSHKPHQSGDKHKRMRKVVYYETDTSSTSTSGSDAPSVTSKRQERDEDYDEDEVAQIEHFNSQATTILLASLSKEEYNKVQGLKNAKEIWDLLKTAHEGDELTKITKRETIEGELGRFRLRQGEEPQDMYNRLKTLVNQVRNLGSKKWDDHEVVKVILRSLIFLNPTQVQLIRGNPRYTQMTPEEVIGNFVSFECMIKGSKKINELDEPSTSETQPVAFKATEEKKEESTPSRQPIDASKLDNEEMALIIKSFRQILKQRKGKDYKSRSKKVCYKCGKPGHFIAKCPLSSDSDRDNDKKGKRKEKKRYHKRRGGDAHVCREWDSDESSTDSSSDEDAANIAVTKGLLFPNVGHKCLMAKDGKRKKEKSQTQETLKGFLRRAQNEFGLRIKKIRSDNGTEFKNSQIEGFLEEEGIKHEFSSPYTPQQNGVVERKNRTLLDMARTMLDEYKTSDRFWAEAVNTACYAINRLYLHRILKKTSYELLTGTKWVFRNKQDEHGVVTRNKARLVAKGYSQVEGFQVKQLQEGTFISQTKYTQDILNKFGMKDAKPIKTPMGTNGHLDLDTGDFKPTLRKLTLRP

SEQ ID NO: 10176 - protein, 711 aa, Zea mays
  unsure (1)..(711): unsure at all Xaa locations
  Clone ID: TF_ZM4444.C4.o5.fg.pep
MSGDHAKKEMETGEKPTTSHGSTSSEESRTKRKEKKDSSKGKEKKSSSHKEKKEKSSSHKPRRSGDKKKRMRKVVYYETDSSSASTSGSDAASVTSKRQERKKYSKIPLRYPRISKHTPLLSVPLGKPPTFDGEDYARWSDLMRFHLTSLHKSIWDVVEFGAQVPSVGDEDYDEDEVAQIEHFNSQATTILLASLSREEYNKVQGLKSAKEVWDVLKTAHEGDELTKITKRETIEGELGRFRLRKGEEPQNMYNRLKTLVNQVRNLGSKKWDDHEMVKVILRSLIFLNPTQVQLIRGNPRYTLMTPEEVIGNFVSFECMIEGSRKINELDDPSTSEAQPVAFKVTEEKKEESTSSRTPIDASKLDNEEMALVIKSFRQILKQRRGKDYKSRSKKVCYKCGKPGHFIAKCPLSSDSDRGDDKKGRRKEKKRYYKKKGGDAHVCREWDSDESSSDSSDDEDAANIAVTKGLLFPNVGHKCFMAKDDKKKKDDLLDTQEDFLIKENKKHVKVKNAYALEIEKCEKLSSELSTCHETLDNLRNENANLLAKVDSHVCTSNPRDVNDDLLARIEELNISLDSLRIENEKLLAKAKDFDVCNVXISNLRSENDILHAXRCRDVDINAIHDHMSLIKQQNDHIAKLDAKIAKHNLENEKFKFARSMLYNGRRPGIKDGIGFQRGDNVKLSVPPKRLSNLVKGKALMPQDNEGYILYPA

SEQ ID NO: 10177 - protein, 796 aa, Zea mays
  Clone ID: TF_ZM4491.C2.o4.fg.pep
MKKVVYYETDSSSPSTSESDAASVTSKRQERKKYSKPPMFDGEDYNMWSDKMRHHLTSLHTSIWDVVEIGVQEYNKVQGLKSAKEIWDVLKTAHEGDEVTKITKRETIEGELGRFRLRQGEEPQDMYNRLKTLVNQVRNLGSTKWDDHEMVKVILRSLVFLNPTQVQLIRGDPRYMLMSPEEVIGKFVSFELMIKGSKKIIEQDGPSMPEAQPVAFKATEEKKEESTSSRVSIDASKLDNEEMALIIKSFRQILKQRRGKDYKSRSKKVCYKCGKPGHFIAKCPLSSDSDRGDDKKGKRREKKRYHKKRGEDAHVCREWDSDESSTDEDAANIAVTKGLIFPNIGHKCLMAKDDKRKKVKSKSSTKYETSSDEDNLRTLFANLNMQQKEKLNELISAIHEKDEHLDSQEDFLIKENKKHVKVKNAYALEVEKCEKLSSELSKCHDIIINHRNENASLIAKVDSNVCDDSISNLRDDNPNLLARIEKLNDSLASLRNENENLIAKAKDLDVCNVTIFNLRSENDILHAKIVELKSCKSSTSTTEHVSNCTRCRDINVDAIHDHLALIKKQNDHIAQLNAKINEHDLENEKFKFARSMLYSGRRPDIKDGIGFQKGDNVKLNAPPKRLSNFVKGKALMPQDNEGYILYPAGYPEHKIRRIHSRKSHSGPNHAFMYKGETSSSRQSTRAKLARKKTPIASNDSNISFKTFDASYVLTNKSGKVYASGGSSWIIDSGCTNHMTGEKKMFSSYEKNQDPQRAITFGDGNRGLVKRLGKCWGEGKAATLRSKSSPLSLVRRR

SEQ ID NO: 10178 - protein, 557 aa, Zea mays
  Clone ID: TF_ZM4545.C15.o1.fg.pep
MSGDHAKKEMETGEKPTTSHGSTSSEESRTKRREKKKSSSNKGKEKKSSSHHKEKKERSSSHKPHRSGDKQKRMRKVVYYETDTSSTSTSDSDAPSVTSKCQERKKFSKIPLHYPRISKHAPLLSVPLGKPPTFDGEDYARWSDLMRFHLTSLHKSIWDVVEFGAQVPSVGDKDYDEDEVAQIEHFNSQATTILLASLSREEYNKVQGLKSAKEVWDVLKTAHEGDELTKITKRETIEGELGRFRLGKGEEPQHMYNRLKTLVNQVRNLGSIKWDDHEVVKVILRSLIFLNPTQVQLIRGNRRYTKMTPEEVIGHFVSFECMIEGSRKINELDDPSTSEAQPVAFKATEDKKEESTPSRQPIDASKLDNEEMALVIKSFRQILKQRRGKDYKSRSKKVCYKCGKPGHFIAKCPLSSDSDRGDDKKGRRKEKKRYYKKKGGDAHVCREWDSDESSSDSSDDANIAVTKGLLFPNVGHKCLMAKNGKKKKVKSNSSTKYESSSDDNASGEEDNLRTLFANLNMEQKEKLNELISAIHEKDDLLDSQEDFLIKENKKHVK

SEQ ID NO: 10179 - protein, 532 aa, Zea mays
  Clone ID: TF_ZM4550.C4.o1.fg.pep
MSRDHAKKEMVTGEKPATSHGKAPSGESDNKVNGSPSHNKSQRSGEKKKKMKKVVYYETDSSSPSTSGSDAPSVTSKRHERKKFSKIPLRYPHISKRTPLLSVPLGKPPVFDGEDYCMWSDKMRHHLTSLHASIWDIVEFGAQEPSVGDEGYDSDEVAQIRQFNSQATTILLASLSREEYNKLQGLKSAKEIWDVLKTAHEGDEVTKITKRETIEGELGRFMLHQGEEPQAMYNRLKTLVNQVRNLGSTKWDDHEMVKVILRSLIFINPTQVQLIRGDPRYKLMSPEEVIGKFLSFELMIKGSKKIIEQGVSSTTDVQPVAFKATEEKKDESTSSRLPIDASKLDNKEMQRRGKDYKPRSKKVCYKCGKPGHFIAKCPLSSDSDRGDNKKGRRKEKKKYYKKKGGDAHVCREWDSNESSTDSSSDEDAANIAVNKGLLFPNVDHKCLMEKDGKKKKVKSRSSAKYATSSDEDNSSDDEDNLLTLFANLNMQHKKKLNELISAIHEKDELLDSQEDFLIKENKKHVKVKMLML

SEQ ID NO: 10180 - protein, 640 aa, Zea mays
  Clone ID: TF_ZM4554.C3.o2.fg.pep
MSRDHAKKEMVTGEKPATSHGKAPSGESDNKVNGSPSHNKSQRSGEKKKKMKKVVYYETDSSSPSTSGSDAPSVTSKRHERKKFSKIPLRYPHISKRTPLLSVPLGKPPVFDGEDYCMWSDKMRHHLTSLHASIWDIVEFGAQEPSVGDEGYDSDEVAQIRQFNSQATTILLASLSREEYNKLQGLKSAKEIWDVLKTAHEGDEVTKITKRETIEGELGRFMLHQGEEPQAMYNRLKTLVNQVRNLGSTKWDDHEMVKVILRSLIFINPTQVQLIRGDPRYKLMSPEEVIGKFLSFELMIKGSKKIIEQGVSSTTDVQPVAFKATEEKKDESTSSRLPIDASKLDNKEMQRRGKDYKPRSKKVCYKCGKPGHFIAKCPLSSDSDRGDNKKGRRKEKKKYYKKKGGDAHVCREWDSNESSTDSSSDEDAANIAVNKGLLFPNVDHKCLMEKDGKKKKVEKCEKLTSELSTCHDTISNLRNENSKIIAKVEKSNVCDDSIVDLRNDNASLIAKIDMLNGSLASLKIENEKLIAKAKDLNVCNATITNLRDDNAILQTNIVELNTCKPSTSTVEHVSICTKCRDINVDAIHDHLALIKKQNDHIAQLSAKINEHDLENEKFKFARSMLYSGRRPDIKDGIGFQ

SEQ ID NO: 10181 - protein, 1362 aa, Zea mays
  Clone ID: TF_ZM4579.C1.o1.fg.pep
MSGDHTKREMETGDKPTTSHGSTSSEESRTKRKEKKKDSSNKGKGKEKKSSSHKSHRRGDKNKRMRKVVYYETDTSSTSTSDSDVPSVTSKRQERKKYSKIPLRYPHISKRTSLLSVPLGKPPVFDDEDYNMWSDKMRHHLTSLHTSIWNVVEFGVQVPSVGDEDYDSDEVAQIHHFNSQATTILLASLSREEYNKVQGLKCAKEIWDVLKTAHEGDEVTKITKWETIEGELGRFMLHQGEDPQAMYNRLKTLVNQVRNLGSEKWDDHEMVKVILRSLVFLNPTQVQLIRGDPRYKLMSPEEVIGKFVSFELMIKGSKKIIEQGTSSTPEAQPVAFKATEEKKEESTSSRQLIDASKLDNEEMTLIIKSFRQILKQRRGKDYKPRSKKVCYKCGKPGHFIAKCPLSSDSDRDDDKKGRRREKKRYHKKKGGDAHVCREWDSDESSTDSSFDEDATNIAITKGLLFPNVGHKCLMAKDSKRKKVKSKSSTKYESSSDDNASDEEDNLRTLFVDLNMQQKEKLNELISVIHEKDDLLDSQEDFLIKENKKHVKVKNAYALEVEKCEKLSSELSTCHNTIANLRNENAKLIAKVDSHVCDVSIPNLRNDNDDLLAKIEELNISLASLRVENEKLIAKAKELDVCNVTISDLRDNNDILRAKIVELNSCKPSTSTIEHVSICTRCRDVDIDAIHDHMVLIKQQNDHIAKLDAKIAEHNLENEKFKFARSMLYNGRRPGIKDGIDFQRGDNVKLSAPPKRLSNFVKGKAPMPQDNEGYILYSAGYPESNIRRIHSRKSHSGPNHAFMYKGETSSSRQPTRAKLPKKKTPNASNDHDISFKTFDASYVLTNKSGKVYASGGSSWIIDSGCTNHMTGEKKMFSSYEKNQDPQRAITFGDGNQGLVKGVTVFRRSDDSIAFKGVLEGQLYLVDFDRAELDTCLIAKTNMGWLWNRRLAHVGMKNLHKLLKEEHILGLTDVHFEKDRICSACQAGKQVGVHHPHKNIMTTDRPLELLHMDLFGPIAYISIGGMERKNRTLLDMERTMLDEYKTPDRFWAEAVNTACYAINRLYLHQILKKTSYELLTGKKPNISYFRVFGSKCFILVKRGRKSKFAPKTVEGFLLGYDSNTRAYRVFNKSSGLVEVSCDVVFDETNGSQVEQVDLDEIGDEEAPCIALRNMSIGDVCPKESKEPPNAQDQPSSSTQASPPTQNEDEAQVDGGEDQSGEPPQDDDNDQGEDANDQDKEDDEPRPPHPRVHQAIQRDHPVDTILGDIHKGVTTRSRVAHFCEHYSFVSSIEPHRVEEALQDSDWVMAIQEELNNFIRNEVWHLVPRPNQNVVGTEWVFRNKQDEHGVVTRNKARLVAKGYKSK

SEQ ID NO: 10182 - protein, 770 aa, Zea mays
  Clone ID: TF_ZM4589.C2.o4.fg.pep
MSGDHTKKEMETGEKPTTSHGSTSSEESRTKRKEKKKDSSKRKEKKSSSSHHKEKKEKSSSHKPHRKGDKHKRMRKVVYYETDTSSTSTSDSDAPSVTSKRQERKKYRDEDYDEDEVAQIEHFNSQATTILLASLSREEYNKVQGLKSAKEIWDVLKTAHEGDELTKITKRETIEGELGRFRLRKGEEPQHMYNRLKTLVNQVRNLGSVKWDDHEMVKVILRSLIFLNPTQVQLIRGNPRYTKMTPEEVIGNFVSFECMIEGSRKINELDDATTSEAQPVAFKATEEKKEESTPSRQPIDASKLDNEEMALVIKSFRQILKQRRGKDYKSRSKKVCYKCGKPGHFIAKCPLSSDSDRGDDKKGRRKEKKRYYKKKGGDAHVCREWDSDESSSDSSDDEDAANIAVTKGLLFPNVGHKCLMAKDGKKKKEKSQTQETLKGFLRRAQNEFGLRIKKIRSDNGTEFKNSQIEGFLEEEGIKHEFSSPYTPQQNGVVERKNRTLLDMARTMLDEYKTSNRFWAEAVNTACYAINRVEEALQDSDWVVAMQEELNNFTRNESRGDRRHSTAPLANLTEGQRRLRHSDCSATRQSESDRQLGLAKGATANSAPPDPRARTRAKTRKTANSAPPDPRARTRAKTRKTANSAPPDPRARTRAKTRKTANSAPPDPRARTRAKTRKTANSAPPDPRARTRAKTRKTANSAPPDPRARTRAKTRKTANSAPPDPRARTRAKTRKTTKLRLARPQGSDSALASAGRLPPRPTPWLGLGHGN

SEQ ID NO: 10183 - protein, 965 aa, Zea mays
  Clone ID: TF_ZM4590.C6.o1.fg.pep
MSGDHAKKEMETDDKPTTSHGSTSSEESRTKRKEKRKDSSKGKKSSSHSKGKEKKSSSHHKEKKEKSSSHKPHRSGDKKKRMRKVVYYETDSSSTSTSGSDAASVTSKRQERKKYSKIPLRYPHISKHTLLLSVPLGKPPTFDGEDYARWSDLMRFHLTSLHKSIWDVVEFGAQVPSVGDEDYDEDEVAQIEHFNSQATTILLASLSKEEYNKVQGLKNAKEIWDLLKTAHEGDELTKITKRETIEGELGRFRLRQGEEPQDMYNRLKTLVNQVRNLGSKKWDDHEVVKVILRSLIFLNPTQVQLIRGNPRYTLMTPEEVIGNFVSFECMIKGSKKINELDDPSTSEAQPVAFKATEEKKEESAPSRQPIDASKLDNEKMALIIKSFRQIHKQRKGKDYKSRSKKVCYKCGKPGHFIAKCPLSSDSDRDNDKKGKRREKKRYHKKRGGDAHVCREWDSDESSTESSSDEDAANIAVTKGLLFPNVGHKCLMANDGKKKKVKSKSSTRYESSSDENASDEEDNLHTLFANLNMEQKEKLNELISAIHEKDDLLDSQEDFLIKENKKHVKVKNAYALQIEKCEKLSSELSTCHETIDNLRNENGKLLAKVDSHVCIDSISNPRDDNVDLLARIDELNISLDSLRIENEKLIAKAKDFDVCNTTISDLRTKNDMLHAKVVELKSCKPSTSTVEHTSICTRCRDVDINAIHGHMALIKQQNDHIAILDAKIVEHNLENEKFKFARSMLYNGRRPSIKDGIGYQKGDNVKLSAPPKRLSNFVKGKAPMPQDNEGYILYPAGYPESKIRRIHSRKSHSGSNHAFMYKGETSSSRQPTRAKLPRKKTPNASNDHDISFKTFDASYVLTNKSGKIVAKFVGGKHKGSKTCVWVPKVLVSNAKGPKTVWVYASGGSSWILNSGCTNHMTGEKKMFSSYEKNQDPQRAITFGDGNQGVTVFRRSDDSIAFKGVLE

SEQ ID NO: 10184 - protein, 533 aa, Zea mays
  Clone ID: TF_ZM4611.C1.o1.fg.pep
MVIGGKKSATSHRKAPSRESANNKKDGSPSRIRSHKSGEKKKKMKKVVYYETDSSSPSTSGSDAASVTSKRQERKKYRDEDYDEDEVAQIVHFNSQATTILLTSLSREEYNKVQGLKSAKEIWDVLKTAHEGDEVTKITKQETIEGELGCFRLRQGEEPQEMYNRLKTLVNQVRNLGSKKWDDHEMVKVILRSLVFLNPTQVQLIRGDPRYTLMSPEEVIRKFVSFELMIKVSKKIIEQDAPSTSEAQPVAFKATEKKKEESTSSRLPIDASKLDNEEMVLIIKSFRQILKQRRGKDYKSRSKKVCYKCGKPGHFIAKCPLSSNNDRGEDKKGKRREKKTYYKKKGGDAHVCREWNSDESSTDSSDDEDAANIAVTKGLLFPNVGHKCLMAKDDKRKKVKSRSSTKYASSSDEDNSSDEEDNLRTLFANLNMQQKEKLNELISAIHEKDELLDSQEDFLIKENKKHVKVKNAYALEVEKCEKLSSELNTCHDIIANLRNENAKIIAKVDSNACDVSIPNLRDDNVSYLLRLKN

SEQ ID NO: 10185 - protein, 1245 aa, Zea mays
  Clone ID: TF_ZM4618.C5.o1.fg.pep
MYNRLKTLVNQVRNLGSTKWDDHEMVKVILRSLVFLNPTQVQLIRGDPRYKLMSLEKVIGKFVSFELMIKGSKKIIEQGASSTPKMQPVAFKATEEKKEESTSSRLPIDASKLDNEEMALIIKSFRQILKQRRGKDFKPRSKKVCYKCGKPGHFIAKCPLSSDSGRDNDKRGKKKEKKRYYKKKGGDAHVCQEWDSNESSTDSSSDEDAANITINKGLLFPNVGHKCLMAKDDKRKKDDLLTLFANLNMQQKEKLNELISAIHEKDELLDSQEDFLIKENKNHVKVKNAYAQEIEKCEKLTSELSTCHDTISNLRFENDKLIAKVEKVNVGDDYLVNLRNDNANLIAKIDKLNASLSILKIENEKLIAKAKDLNVCNVSISNLRDENAILHAKIVELSTCKPSTSAVEHVTICTRCRDINVDAIHDHLALIKQQNDHIAQLSAKISEHDLENEKFKFARSMLYSGRRPGIKDGISFQKGDNVKLNAPKKLSNFVKGKAPMAQDNEGYILYPAGYLEHKIRRIHSRKSHSGSHHAFMYKSEASSSRQSTHVKLPKKKSPIASNEPNISFKTFDASYVLTNKSGKVVAKYVGGKHKGSKTCVWVPKVYASGGSSWIIDSGCTNHMTGEKRMLSSYEKNHDPQRAITFGDGNQDSLDYNLLSVSQLCKMGYNCLFTDIGVTIFRRSDDSVAFKEKSQTQETLEGFLRRAQNEFGLRIKKIRSDNGMEFKNSQIEGFLEDEGIKHEFSSPYTPQQNGVVERKNRTLLNMARTMLDEYKTLDRFWAEAINTACYAINCLYLHRILKKTSYELLTGKNPNVSYFRVFGSKCFILVKRGRKSKFAPKAVEGFLLGYDSNTRAYRVFNKSTGLAEVSCDIVFDETNGSQVEQVDLDELDDEEAPCVALRNMSIGDVCPKESEEPPQAQDQPSSSMQASPPTQDEDQAQEDENEDQEDEPPQEGDNDQGRDAHDQDKEDDDGPRPPHPRVHRAIQRDHPVNSILGDIHKGVTTRSRVAHFCEHYSFVSSIEPYRVEDALRDSDWVLAIQEELNNFTRNELYQMDMKSAFLNGPIKEEVYVEQPPGFEDSEYPNHVYKLSKALYGLKQAPRAWYECLRDFLIANGFKVGKADPTLFTKTIANDLFVCQIYVDDIIFGSTNKSTCEEFSRIMVQKFEMSMMGELKYFLGFQVKQLQEGTFISQTKYIQDILTKFGMKDAKPIKTPMGTNGHLDLDTGGKSVDQKVCVGINHQKGGD

SEQ ID NO: 10186 - protein, 308 aa, Zea mays
  Clone ID: TF_ZM4630.C3.o1.fg.pep
MSLEKVIGKFVSFELMIKGSKKIIEQGASSTPKMQPVAFKATEEKKEESTSSRLPIDASKLDNEEMALIIKSFRQILKQRRGKDFKPRSKKVCYKCGKPGHFIAKCPLSSDSGRDNDKRGKKKEKKRYYKKKGGDAHVCQEWDSNESSTDSSSDEDAANITINKGLLFPNVGHKCLMAKDDKGKKVKSRASTKYESSSDDNASDEEDNLRTLFANLNMQQKEKLNELISDIHEKDDLLDTQEDFLIKENKKHVKVKNAYALEVEKCEKLSSELSTCHETIDNLRSENANLLAKVDFKCLQCFNSQSRK

SEQ ID NO: 10187 - protein, 532 aa, Zea mays
  Clone ID: TF_ZM4644.C10.o1.fg.pep
MSGASAKREIGTGEKPATSNGKAPSGESANKVKGSSSHNKSRQSGDKKKKMKKVVYYDTDSSSPSTSGSNTPSVTSKRHERKKFSKIPLRYPRISIRTPLLSVPLGKPPMFDGEDYNMWSDKMRHHLTSLHTSIWDVVEIGVQVPSPGDEDYDSDEVAQIRHFNSQATTILLASLSREEYNKVQGLKSAKEIWDVLKTAHEGDGGSKMIIEQGDSSTPEAQLVAFKATEEKKEDSTPSRIPIDASKLDNKEMALIIKSFRQILKQRKGKDYKPRSRKVCYKCGKPGHFIAKCPLSTDSDKGDDKKGKRGEKKRYYKKKGGDAHVCREWDSDESSTDSSSDEDAANIAVTKGLLFPNVGHKCLMAKDGKRKKVKSKSSTKYETSSDEDNSGVEEDNLRTLFANLNMQQKEKLNELISAIHEKDELLDSQEDFLIKENKKHVKVKNAYALEVEKCEKLSSELSTCHDVISNLRNENAKVIVKVDSNVCDVSIPNLIDDNVSLLAKIEELNVSLASLKIENEKLIAKAKDLDVCN

SEQ ID NO: 10188 - protein, 597 aa, Zea mays
  Clone ID: TF_ZM4792.C4.o6.fg.pep
MKEDEAKREAQEEEERKKVEEDEKGKTKVDYFDDLVELLVSKVHRNAQAVSVIKGSLGQEEYQKVQGREDARDIWNILKMSHEGDPKAKRHRIEVLESELARDRDDYDEMTPHQLFTKIQQHELVEAPIKTRDSHALVTNDQESSKKSSTNKDHKSKKMIESSSEDESSSDEDIVMFIKSFRKFVRKGDKYQRKGKKRACYECGKTGHSIADCPNKKEQEEKKDFKKDKSKKGERSKGCFKKKKKVSPKVEVKQILKKCSSNDGSSEVVPKYKPLRNNNGKKGLGYNIFKANPSIEGTTLYDALGRIHSSNGNITHEKIDVYSSGGSIWVFDSGCTNHMIGERNMFQSLQLTKESQEIVFGDSVKGEVIGIGETQEILKTFMRHAQNEFELKINKVRSDNGTEFKNSCIEEFLGEEGIKHEFSVPYTPQQNGVMERKSQTLIEAAKTMQDESKTHDNYWVEAINTACHAINRLYLHKIYKKTAYELLTGNKPKVDYFQVFGCKCFILNKKAKSSKFAPKVNEGFLHGYASNVHGYCVFNNTIGLVEIVLNMTFDESNGSQGHVASDIAGDEQQPCDVTKKLAIAEIRPREKENEGRI

SEQ ID NO: 10189 - protein, 1179 aa, Zea mays
  Clone ID: TF_ZM4796.C4.o1.fg.pep
MKVVYYETDSSSPSTSGSESASATSKRHERKKYSKMPLHYPRISKRTPLLSVPLGKPPMFEGEYYSMWSDKMRHHLTSLHKSIWDIVEYGAQVPKKGDKDYDSEEVEQIQHFNSQVTTILLASLSREEYNKVQGLKSAKEIWDVLKTAHEGDEVTKITKRETIEGELGCFMLHQGEEPQVMYNRLKTLVNQVRNLGSTKWDDHEMVKVILRSLVFLNPTQVQLIRGDPRYKLMSLEEVIGKFVSFELMIKGSKQIIERGATSTPEVQPVAFKATEEKKEEFTPSRLPIDASKLDNKEMALIIKSYRQILKQRKGRDYKLRSKKVCYKCGKPGHFIAKCPLSSDSDRGDDKKGKRREKKRYYKKKGGDAHVCREWDSDESSTDSSSDEDAANIAINKGLLFPNVGHKCPMAKYGKKKEKLNELISVIHEKDELLDSQEDFLIKENKRHVNTKNAYAQETIENEKLIAKAKDLNVCNISISNLKNENAILHAKIDELNACKPSTSTVEHVTICTRCRDINVDAIHDHLTLIKQQNDHIAQLSAKINEHDLENENFKFARSMLYSGRCPGIKDGISFQQGDNVKLNAPKRLSNFVKGKALMVQDNEGYILYPTGYPEHKIRRIHSRKSHSGSHHAFMYKSEASSSRQSTHAKLPKKKTPIASNEPNISFKTFDASYVLTNKSGKVVAKYVGGKHKGSKTCVWVPKVLVSNVKGPKTVWVYASGGSSWIIDSGCTNHMTWEKRMFSSYEKNQDPQRAITFRDGNQAHVGMKNLSKLLKGEHILGLTNVHFEKDRDKSQTQETLKGFLRRAQNEFGLRIKKIRSDNGTEFKNSQIEGFLEEEGIKHEFSSSYTPQQNGVVERKNRTLLDMVRTMLDEYKTSDRVFGSKCFILVKRGRKSKFAPKVVEGFLLGYDSNTRVYRVFNKSTGLVEVSCDIVFDETNGSQVEQVDLDELDDEEAPCVVLRNMSIGDVCPKESEEPPQAQDQPSSSMQASPPTQDEDQAQEDENEDQEDEPPQEEDNDQGGDANNQDKEDDDARLESIRILLAYGTYHGFKLYQMDVKSAFLNGPIKEEVYIEQPPGFEDKFSRIMVQKFEMSMMGELKYFLGFQVKQLQEGTFISQTKYIQHILTKFGMKDAKPIKTPMGTNGHLDLDTGGNEQPVVLDCVAEDLPEQQPGEGKCPLIV

SEQ ID NO: 10190 - protein, 322 aa, Zea mays
  Clone ID: TF_ZM4844.C2.o1.fg.pep
MKKVVYYETDSSSPSTSESDAASVTSKRQERKKYKEYNKVQGLKSAKEIWDVLKTAHEGDEVTKITKRETIEGELGRFRLRQGEEPQDMYNRLKTLVNQVRNLGSTKWDDHEMVKVILRSLVFLNPTQVQLIRGDPRYMLMSPEEVIGKFVSFELMIKGSKKIIEQDGPSMPEAQPVAFKATEEKKEESTSSRVSIDASKLDNEEMALIIKSFRQILKQRRGKDYKSRSKKVCYKCGKPGHFIAKCPLSSDSDRGDDKKGKRREKKRYHKKRGEDAHVCREWDSDESSTDEDAANIAVTKGLIFPNIGHKCLMAKDDKRKKR

SEQ ID NO: 10191 - protein, 518 aa, Zea mays
  Clone ID: TF_ZM4887.C4.o3.fg.pep
MSGASAKRDLETGDKSACSGRTHSRESAHKHKEESSSSIKSHRMGDKKKKMKKVVYYETDSSSPSTSGSESASTTSKRHERKKYSKPPMFEGEDYSMWSDKMRHHLTSLHKSIWDIVEYGVQEVEQIHHFNSQATTILLASLSREEYNKVQGLKSAKEIWDVLKTAHEGDEVTKITKRESIEGELGRFRLRQGEEPQDMYNRLKTLVNQVSNLGSKKWDDHEMVKVILRSLVFLNPTQVQLIRGNPRYTLMSPEEVIGNFVSFELMIKGSKKIIEHDGPSTPEAQPVAFKATEEKEEESTSSRLPIDASKLDNEEMALIIKSFRQILKQRRGKDYKSRSKKVCYKCGKPGHFIAKCPLSSDSDRGDDKKGKKREKKRYYKKKGGDAHVCREWDSDESSSDSSSDEDAANIAVTKGLLFPNVGHKCLMAKYGKRKKDELLDSQEDFLIKENKKHVKVKNAHALEVEKCEKLSSELSTCNDIIVNLRNENAKLIAKVDSNVNDVSIPNLRDDNVSLLAKI

SEQ ID NO: 10192 - protein, 1696 aa, Zea mays
  unsure (1)..(1696): unsure at all Xaa locations
  Clone ID: TF_ZM4920.C3.o11.fg.pep
MSGDHAKKEMETGDKPTPSHGKASSEESRNKGKGKEKKPSSHKSHRSGDKKKKMRKVVYYETDTSSPSTSGSDAPSITSKRHEHKKFSKIPLRYPRIPKHTPLLSVPLGKPPTFDGEDYARWSDLMRFHLTSLHKSIWDVVEFGVQVPSVGDEDYDEDEVAQIEHFNSQATTILLASLSREEYNKVQGLKSAKEVWDVLKTAHEGDELTKITKRETIEGELGRFRLRQGEEPQDMYNRLKTLVNQVRNLGSKKWDDHEMVKVIFRSLIFLNPTQVQLVRGNPRYTLMTPEEVIGNFVSFEFMIKGSRKINELDGPSTSEAQPVAFKAMEEKKEESTSTRTPINASKLDNEEMSLVIKSFRQILKQRRGKDYKRRSKKVCYKCGKPGHFIAKCPLSSDSDRGNDKKGRKKEKKKYYKKKGGDAHVCREWDSDESSSDSSSDEDAANIAINKGLLFPNVGHKCLLAKNGKKKKVKSKSSTRYESSSDDNASDEEDNLRTLFANLNMQQKEKLNELISAIHEKDDLLDTQEDILIKENKKHVKVKNVYALEVEKCEKLTSELSTCHDVINNLRNENASLIAKVDSNACDVPIPNLRNDNDDLLAKIEELNISLASLRNENEKLIAKAKDFDVCNATISDLRSKNDILHAKVVELKSCKPSTSTIEHTSICTRCRDVDIDAIHDHMVLIKQQNDHIAKLDAKIAEHELENEKFKFARSMFYNGRRPGIKDGIGFQQGGNVKLNAPPKKLSNFVKGKAPMPQDNEGYILYPVGYPESKIRRIHSRKSHSGPNHAFMYKGETSSSRQPTRAKLSKKKTPRASNDSNISFKTFDASYVLTNKSGNVVAKYVGGKHKGSKTCVWVPKVLVSNAKGPKTIWVYASGGSSWVIDSGCTNHMTGEKKMFSSYEKNHDPQRAITFGDGNQGVTVFRRSDDSIAFKGVLEGQLYLEKSHTQETLKGFLRRAQNEFGLRIKKIRSDNGMEFKNSQIEGFLEEEGIKHELSSPYTPQQNGVVERKNRTLLDMARTMLDVLDYGEATLAQNKIFNPIKPRTTAVIGHGITTRRAEQRKTSRCRRTRRAVPCSHRRPSRPRTVRPSAPDAAPPRYPHVQGGSAAYRTARFATAAWRGREASGYSFVGGKLGVFGSKCFILVKRGRKSKFAPKTVEGFLLGYDSNTRAYRVFNKSTGQVEVSCDVVFDETNGSQIEQVDLDEIGDEEAPCIALRNMSIGDVCPKQYEEPPNAQDQPSSSTQASPSTRNEDEAQVDEGEEQRDEPPKDDANDQGGDANDQDKEDEEPRPPHPRVHQAIQRDHPVDTILGDIHKGXVEEALQDSDWVVAMQEXLNNFTRNEVWHLVPRPNQNVVGTKWVFRNKQDEHGVVTRNKARLVAKGYSQVEGLDFGETYAPVARLESIRILLACATYHGFKLYQMDVKSAFLNGPINEEVYVEQPPSFEESEYPNHVYKLSKALYGLKQAPRAWYECLRDFLITNGFKVGKADPTLFTKTLENDLFVCQIYVDDIIFGSTNESTCEEFSRIMTQKFEMSMMGELKYFLGFQVKQLQEGTFISQTKYTQDILNKFGMKDAKPIKTPMGTNEHLDLDTEDIMLSVCMCARFQANPKEAHLTAVKRTLRYLVYTPKFGLWYPRGSTFDLIGYSDANWEGCKINKKSTSGTCQFLGRSLVSWASKKQNSVALSTAEAEYIAADFG

SEQ ID NO: 10193 - protein, 437 aa, Zea mays
  Clone ID: TF_ZM4921.C4.o1.fg.pep
MSGDHAKKEMETDDKPTTSHGSTSSEESRTKRKEKRKDSSKGKKSSSHSKGKEKKSSSHHKEKKEKSSSHKPHRSGDKKKRMRKVVYYETDSSSTSTSGSDAASVTSKRQERKKYRDEDYDEDEVAQIEHFNSQATTILLASLSKEEYNKVQGLKNAKEIWDLLKTAHEGDELTKITKRETIEGELGRFRLRQGEEPQDMYNRLKTLVNQVRNLGSKKWDDHEVVKVILRSLIFLNPTQVQLIRGNPRYTLMTPEEVIGNFVSFECMIKGSKKINELDDPSTSEAQPVAFKATEEKKEESAPSRQPIDASKLDNEKMALIIKSFRQIHKQRKGKDYKSRSKKVCYKCGKPGHFIAKCPLSSDSDRDNDKKGKRREKKRYHKKRGGDAHVCREWDSDESSTESSSDEDAANIAVTKGLLFPNVGHKCLMANDGKKKKP

SEQ ID NO: 10194 - protein, 920 aa, Zea mays
  Clone ID: TF_ZM4951.C1.o3.fg.pep
MSGDHAKKEMETGEKPTTSHGSTSSEESRTKRKEKKNSSKGKEKKSSSHQKEKKEKSSSHKTRRSGDKKKRMRKVVYYETDSSSTSGSDAASVTSKRQERKKYSKIPLRYPRISKHTPLLSVPLGKPPTFDGEDYARWSDLMRFHLTSLHKSIWDVVEFGAQVPFVGDEDYDEDEVAQIEHFNSQATTILLASLSREEYNKVQGWKSAKEVWDVLKTAHEGDELTKITKRETIEGELGRFRLRKGEEPQNMYNRLKTLVNQVRNLGSKKWDDHEVVKVILRSLIFLNPTQVQLICGNPRYTLMTPEEVIGNFVSFECMIEGSRKINELDEPSTSEAQPVAFKATEEKKEESTPSRQPIDASKLDNEEMALIIKSFRQILKQRKGKDYKSRSKKVCYKCGKPGHFIAKCPLSSDSDRDNDKKGKRREKKRYYKKKGGDAHVCREWDSDESSTDSSSDEDAANIVVTKGLLFPNVGHKCLMAKDGKKKKVKSKSSTRYESSSDNNASDEEDNLRTLFANLNMEQKEKLNELISAIHEKDDLLDSQEDFLIKENKKHVKVKNAYALEIEKCEKLSSELSTCHETIDNLRNENANLLAKVDSHVCNVSIANSRNNDDDLLARIEELNISLASLRIENEKLLAKAKDFDVCNATISDLITKNDMLHAKVVELKSCKPATSIVEHVSICTRCRDVDINAIHDHMSLIKQQNDHIAKLDAKIAEHNLENENFKFARSMLYSGRRPGIKDDIGFQKGDNVKLNTPPKRLFNFVKGKAPMPQDNEGYILYPAGYPEDKIRRIHSRKSHSGPNHAFMYKGETSSSRQPTRAKLPKKKTPSASNEHSVSFKTFDASYVLTNKSGKVVAKYVGGKHKGSKTCVWVPKVLVSNAKGPKTIWVYASGGSSWIIDSGCTNHMTGEKKMFSSYEKN

SEQ ID NO: 10195 - protein, 1411 aa, Zea mays
  Clone ID: TF_ZM4959.C2.o1.fg.pep
MSGEHAKKEMETGKKPTTSHGKASSEESRKKGKGKEKKASSHKSHQSGDKKKKMRKVVYYETDTSSPSTSDSDAPSVTSKRHERKKFSKIPLHYPRTSRHTPLLSIPLGKPPTFDGEDYARWSDLMKFHLTSLHKSIWNVVEFGAQVPSVKDEDYDEDEVAQIEHFNSQATTILLASLSREEYNKVQGLKSAKEVWDVLKTAHEGDELTKITKQETIKGELGRFRLRQGEEPQDMYNRLKTLVNQVRNLGSKKWDDHEMVKVILRSLIFLNPTQVQLIRGNPRYTLMTPEEVIGNFVSFEFMIKGSRKINELDGPSTSEAQPVAFKATEEKKEESTPSRTPIDASKLDNEEMALVIKSFRQILKQRRGKDYKPRFKKVCYKCGKPGHFIAKCPLSSDSDRGDDKKGRRKEKKKYYKKKGGDAHICREWDSDESSYDSSDEDAANIAINKGLLFPNVGHKCLMAKDGKRKKVKSKSSIRYESSSDDNASDEEDNLRTLFANLNMQQKEKLNELISAIHEKDDLLDTQEDFLIKENEKHVKVKNAYALEVEKCEKLSSELSTCHETIDNLRIENANLLAKVDSNVCNVSIPNLRNDNDDLLAKIEELNISLASLGVENEKLLAKAKDFYVCNVTISDLRSKNDILHAKVVELKSCKPSTSTVEHTSICTRCRDVDVNAIHDHMALIKQQNYHIAKLDAKIAEHELENEKFKFARSMLYSGRRPGIKDGIGFQKGDNVKINAPPKKLSNFVKGKATMPQDNEGYILYPVGYPESKIRRIHSRKSHSGPNHAFMYKGETSSSSQPTRAKLPNKKTPSASNDHGISFKTFDASYVLTNKSGKVYASGGSSWIIDSGCTNHTTGEKKMFSSYEKNQDPQRAITFGDGNQGLVKGLDSLDYNLLSVSQLCQMGYNCLFTEEKSHTQETLKGFLRRAQNEFGLRIKKIRSDNGTEFKNSQIEGFLEEEGIKHELSSPYTPQQNGVVERKNRTLLDMARTMLDEYKTSDRFWAEAVNTACYAINRLYLHQILKKSSYELLTEQVDLDEIGDEEAPCIVLRNMSIGDVCPKESEEPPNAQDQPSSSTQASPPTQNEDEAQVDEEEDQTNEPPQDDDNDQGGDANDQEKEDEEPRPPHPRPHKVEEALQDSDWVVVMQEELNNFTRNEVWHLVPRPNQNVVGTKWVFHNKQDEHGVVTRNKARLVAKGYSQVEGLDFGETYAPVARLESIHILLAYATYHGFKLYQMDVKSAFLNGPIKEEVYVEQPPGFEDSEYPNHVYKLSKALYGLKQAPRAWYECLRDFLIDNGFKVGKADPTLFTKTLENDLFVCQIYVDEIIFGSTNESTCEEFSRIMTQKFEMSMMGELKYFLGFQVKQLHEGTFISQTKYTQDILNKFGMKDAKPIKTPMGTNGHLDLDTEGRK

SEQ ID NO: 10196 - protein, 1347 aa, Zea mays
  unsure (1)..(1347): unsure at all Xaa locations
  Clone ID: TF_ZM4989.C5.o1.fg.pep
MSGASAKKEIGTGDKSASSGRTHSRESAHKHKEESSSSIKSQWKGDKKKKMKKVVYYETDSSSPSTSGKPLMLDGEDYSMWSDKMRHHLTSLHKSIWDIFEYGAQVQKEGDKDYDSEEVEQIQHFNSQATTILLASLSREEYNKVQGLKSAKEIWDVLKTTHEGDEVTKITKRETIEGELGRFMLHQGEEPQAMYNRLKTLMNQVHNLGSTKWDDHEMIKVILRSLVFLNPTQVQLIRGDPRYKLMSPEEVIGKFVSFELMIKGSKKIIEQGATSTPEVQPVAFKATEEEKKDSTPSRIPIDASKLDNEEMTLIIKSFRQILKQRRGKDYKPSSKKVCYKCGKPGHFIAKCPLSSDCDRGDDKKGKRREKKRYYKKKGGDTHVCREWDSDESSIDFSSDEDATNIAVTKGLLFPNVGHNQEDFLIKENKKHVKVKNAYALEVEKCEKLTSELSTCHDTNSNLRIENANLIAKVEKSNICDDSIVNLRNDNASSIAKIEKLNASLASLRNENEKLIAKAKDLDVCNVSISNLRDENTILHAKIVELKTCKPSTSTIEHVTICTRCRDINVDAIHDHLALIKKQNDHIAQLSAKINEHDLENEKIKFARSMXYSGRRPGIKDGIGFQQGDNVKLNAPPKRLSNFVKGKAPMPQDNEGYILYPAGYPEHKIRRIHSRKSHSGSHHAFMYKXEKSQTQETLKEFLRQAQNEFGLRIKKIRSDNGTEFKNSQIEGFLEEEGIKHEFSSPYTPQQNGVVERKNRTLLDMERTMLDEYKTSDRFWAEAVNTACYAINRVFGSKCFILVKRGRKTKFAPKVVEGFLLGYDSNTRAYRVFNKSTGLVEVSCDIVFDETNGSQVEQVDLDELDDEEAPCVALRNMSIGDVCPKESEEPPHAQDQPSSSMQASPPTQDEDGSQDDEGEDQEDEPPQEDDNDQGXDANDQDKEDEQDPRPPHPRVHQAIQQDHPXVEEALQDLDWVLAMQEDLNNFTRNEVWHLVPRPNQNVIETKWVFHNKQDEHGVVTRNKARLVAKGYSQVEGLDFGETYAPIARLESICILLAYATYHGFKLYQMDVKSAFLNGPIKEEVYVGQPPGFEDSEYPNHVYKLSKVLYGLKQAPRAWYECLRDFLITNSFKVGKADPTLFTKTIENDLFVCQIYVDDIIFGSTNKSICEEFSRIMTQKFEMSMMGELKYFLGFQVKQLQEGTFISQTKYIQDILTKFGMKDAKPIKTPMGTNGHLDLDTGACKIDRKSTSGTCQLLGRSLVSWASKKQNSVALSTAEAEYIAAGHCCAQLLWIRQTHRDYGYKLTKVPLLCDNESAIRMADNPVEHSRTKHIVIRYHFLRDHQQRGIS

SEQ ID NO: 10197 - protein, 445 aa, Zea mays
  Clone ID: TF_ZM4997.C1.o12.fg.pep
MLGDHAKKELETSDKPTTSHGKASSEESRNKGKGKEKKSSSHKSHQSGDKKKKMRKVPFVGDEDYDEDEVAQIEHFNSQATTILLASLSREEYNKVQGLKSAKEVWDVLKTAHEGDELTKITKRETIEGELGRFRLRQGEEPQDMYNRLKTLVNQVRNLGSKKWDDHEMVKVILRSLIFLNPTQVQLIRGNPRYTLMTPEEVIGNFVSFEFMIKGSRKINELDGPSTSEAQLVTFKATEEKKEESTSSRTPIDASKLNNEEMALVIKSFRQIIKQRRGKDYKPRSKKVCYKCGKPGHFIAKCPLSSDSDRGDDKKGRRKEKKRYYKKKGGDAHVCREWDSDKSSSDSSSDEDAANIAVTKGLLFPNVGHKCLMAKDGKKKKVYASGGSSWIIDSGCTNHMTGENKMFSSYEKNQDPQRAITFGDGNQGKISYPRDLKGILKTSSK

SEQ ID NO: 10198 - protein, 2049 aa, Zea mays
  Clone ID: TF_ZM5031.C1.o8.fg.pep
MGALVRSAFKFPRASSASGVQVKRSAFLKRRYKGNPLSPRREMKRLRAARHPMTLCTPFKSLMGPMLVMAAIFSGLASMPRSETMNPRSMPQGTSKTHFSRLSFNPFARRHPKVTSRSERRCCFTGRAPARISSECSATSLGMPGMSEGLHAKNLGVCAEEVDEHYFLFGVELGADPDVLAGVVAGVEGDGLNRLGRFEVAGVALRIRRLLGEAIQVGDEGLGLGDVLSVLHAFHVALVSVAFALDYEFYRCQSEKTATSHGKAPSSESANKKKDGSPSRIRSHKSGEKKKKMKKVVYYETDSSSPSTSGSDATSVTSKRQERKKYSKIPLRYPRIPKHIPLLSVPLGKPPTFDSEDYSRWSDMMRYHLTSLHKSIWDVVEFGVQVPSVGDEDYDEDEVAQIEHFNSQATTILLTSLSREEYNKVQGLKSAKEIWDMLKTAHEGDEVTKITKRETIEGELSRFRLRQGEEPQEMYNRLKTLVNQVRNLRSTKWDDHEMVKEVIGKFVSFELMIKGSNKIIEQDASSTPEAQPVAFNATEEKKEESTSSRLPIDASKLDNEEMALIIKSFYQILKQRRGKDYKSRSKKVCYKCGKPGHFIAKCPLSSDSDRDNDKKGKRRENNRYHKKKGGDAHVCREWNSDESSTDSSSDEDAANITVTKGLLFPNVGHKCLMAKDDKRKKVKSRSSTKYASSSDEDNSSDKEDNLCTLFANLNMQQKEKLNELIIVIHEKDELLDTQEDFLIKENKKHVKVKNANALEVEKCEKLSSELSTCHDIITNLRNKNARLIAKIDSNVCDDSISNLRDDNVSLLAKIEELNVSLASLRNENEKLIAKTKDLDVCNANISNLRSENDILHAKIVELKSCKPSTSTVEHVSICTRCRDINVDAIHDHLALIKKQNDHIAQLNAKINEHDLENENFKFARSMLYSGRRPGIKDGIGFQKGDNVKLNAPPKKLSNFVKGKAPMAQDNEGYILYPADYPEHKIRRIHYMKFHSGSNHAFMYKSETSSSRQSTRAKLPKKKTPIASNETSISFKTFDASYVLTNKSGKIVAKYIGGKHKGSKTCVWVPKVLVSNVKGPKTIWVYASGGSSWIIDSGCTNHMTGEKKMFSSYEKNQDPQRAITFGDGNQDLVKGLGKIVISPDHSISNVFLVDFLDYNFLSVSQLCKMGYNCLFTDIGVNVFRRSDDSVAFKGVLEGQLYLVDFDRAELDTCLIATTNMGWLWHRRLAHVGMKNLHKLLKGEHILGLTNVHFEKDMICSACQAGKQVGVHHPHKNIMTTDRPLELLHMDLFGPIAYISIDESKYCLVIVDDYSRFTWVFFLQEKSHTQETLKGFLRRAQNEFGLRIKKIRSDNGTEFKNSQIEGFLEEEGIKHEFSSPYTPQQNGVVERKNRTLLDMARTMLDEYKTSDRFWAEAVNTACYAINRLYLHRILKKTSYELLTGKKPNISYFRVFGSKCFILVKRGRKSKFAPKAVKGFLLGYDSNTRAYRVFNKSSGLVEVSCDIVFDETNGSQVEQVDLDELDNEEAPCVALRNMSIGDVCPKESEEPPNTKDQQSSSMQASPPTQDEDEVQDDEGEDQEDEPPQEESNDQGGDAHDQDEEDEQVPKPPHPRVHQAIQRDHPVNTILGDIQKGVTTRSRVAHFCEHYSFVSSIEPHKVEEALQGTKWFFRNKQDEHGVVTRNKARLVAKGYSQVEGLDFGETYAPVARLESIRILLAYATYHGFKLYQMDVKSAFLNGPIKEEVYVEQPPGFEDSEYPNHVYKLSKALYGLKQAPRAWYECLRDFLITNGFKVGKTDPTLFTKTLANDLFVCQIYVDDIIFGSTNESTCEEFSRIMTQKFEMSMMGELKYFLGFQVKQLQKGTFISQTKYIQDILNKFGMKDAKPIKTPMGTNRHLDLDTGGCKINRKSTSGTCQFLGRSLVSWASKKQNSVALSTAEAEYIAVGHCCVQLLWMRQTLRDYGYKLTKVPLLCDNESAIRMADNPVEHSRTKHIAIRYHFLRDHQQKGDIEIAYINTKEQLADIFTKPLDEQTFNKLRHELNILDSRNFF

SEQ ID NO: 10199 - protein, 953 aa, Zea mays
  Clone ID: TF_ZM5031.C3.o1.fg.pep
MSGDHAKKEMETGEKPTTNHGSTSSEESRTKRKEKKKISSNKGKEKKSSSHHKEKKEKSSSHKPRRSGDKQKRMRKVVYYETDTSSTSTSDSDAPSVTSKRQERKKFSKIPLHYPRISKHAPLLSVPLGKPPTFDGEDYARWSDLMRFHLTSLHKSIWDVVEFGTQVPSVGDKDYDEDEVAQIEHFNSQATTILLASLSREEYNKVQGLKSAKEVWDVLKTAHEGDELTKITKRETIEGELGRFRLRKGEEPQHMYNRLKTLVNQVRNLGSVKWDDHEVVKVILRSLIFLNPTQVQLIRGNRRYTKMTPEEVIGHFVSFECMIEGSRKINELDDPSTSVAQPVAFKAMEEKKEESTPSRQPIDASKLDNEEMALVIKSFRQILKQRRGKDYKSRSKKVCYKCGKPGHFIAKCPLSSDSDRDNDKKGKRREKKRYYKKKGGDAHVCREWDSDESSSDSSDDEDAANIAVTKGLLFPNVGHKCLMAKDGKRKKVKSNSSTKYESSSDDNASDEEDNLRSLFANLNIAQKEKLNELVSAIHEKDDLLDSQEDCLIKENKKHVKVKNAYALEIEKCEKLSSELSTCREMIDNLRNENASLNAKVDSHICNVSILNPKDNNDNLLARIEELNISLASLRVENENLIAKAKELDVCNAIISNLRDKNDILHAKIVELNSCIPSTSIVEHVSICTRCRDVDVNAIHDHMALIKQQNDHIAKLDAKIAEHNLENEKFKFARSMLYNGRRPGIKDGIGFQRGDNVKISAPPKRLSNFVKGKAPMPQDNEGYILYPAGYPESKIRRIHSRKSHSGPNHAFMYKGETSSSRQPTRAKLPKKTPTASNEHNLSFKTFDASYVLTNKSGKVYASGGSSWILDSGCTNHMTGEKRMFSSYEKNQDPQRAITFGDGNQGLVKDYNLLSVSQLCQMGYNCLFTDVGVTVFRRSDDSIAFKGMLEGQLYL

SEQ ID NO: 10200 - protein, 890 aa, Zea mays
  Clone ID: TF_ZM5043.C3.o2.fg.pep
MSGDHAKKEMETGEKPTTSHGSTSSEESRTKRKEKKKSSSNKGKEKKSSSHHKEMKERSSSHKPHRSGDKKKRMRKVVYYETDSSSASTSGSDAASITSKRQERKKYSKIPLHYPRISKHTPLLSVPLGKPPTFDGEDYARWSDLMRFHLTSLHKSIWDVVEFGAQVPSIGDKDYDEDEVAQIEHFNSQATTILLASLSREEYNKVQGLKSAKEVWDVLKTAHEGDELTKITKRETIEGELGRFRLRKGEEPQHMYSRLKTLVNQVRNLGSKKWDDHEMVKVILRSLIFLNPTQVQLIRGNPRYTKMTPEEVIGNFVSFECMIEGSRKINELDDPSTSEAQPVAFKATEEKKEESTPSRQPIDASKLDNEEMALVIKSFRQILKQRRGKDYKSRSKKVCYKCGKPGHFIAKCPLSSDSDRDNDKKGKRREKKRYYKKKGGDAHVCREWDSDESSSDSSSDEDAANIVVTKGLLFPNVGHKCLMAKDGKRKKDGLLDSQEDLLIKENKKHVKVKNAYALEIEKCEKLSSELSTCREMIDNLRNENASLNAKVDSHVCNVSIPHPRDNNDDLLARIEELNISLASLRSENEKLITKAKDFDVCKVTISDLRDKNDILHAKIVELNSCKPSTSTIEHVTICTRCRDIDVDAIHDHMILIKQQNDHIAKLDAKIAEHNLENEKFKFARSMLYNGRRPGIKDGIGFQRGDNVKISAPPKRLSNFVKGKAPMPQDNEGYILYPAGYPEDKIRKIHSRKSHSGSNHAFMYKSETSSSRQPTRAKLPKKKIPIASNDHNISFKTFDASYVLTNKSGKVYASGGSSWILDSGCTNHMTGEKKMFSSYEKNQDPQRAITFGDGNQDSLDYNLLSVSQLCQMGYNCLFTDVGVTDSRLEGG

SEQ ID NO: 10201 - protein, 640 aa, Zea mays
  Clone ID: TF_ZM5107.C1.o2.fg.pep
MSGDHAKKEIETGEKPTTSHESTSSEKSRTKRKEKKKDSSKGKEKRSSSHHKEKKEKSSSHKPHRSGDKKKRMRKVVYYETDSSSASTSGSDAASVTSKRQERKKYSKIPLRYPRISKHTPLLSVPLGKPPTFDGEDYARWSDLMQFHLTSLHKSIWDVVEFGAQVPFVGDENYDEDEVAQIEHFNSQATTILLASLSREEYNKVQGLKNAKEIWDLLKTAHEGDELTKITKRETIEGELGRFRLRQGEEPQDMYNRLKTLVNQVRNLGSKKWDDHEVVKVILRSLIFLNPTQVQLIRGNPRYTLMTPEEVIGNFVSFECMIKGSKKINELDDPSTSEAQPVAFKATEEKKEESTLSRQPIDASKLDNEEMALIIKSFRQILKQRKGKDYKSRSKKVCYKCGKPGHFIAKCPLSSDSDRDNDKKGKRREKKRYHKKRGGDAHVCREWDSDESSIDSSDDEDAANIAVTKGLLFPNVGHKCLMAKDGKRKKVKSKSSTKYESSSDDNASDEEDNLRTLFANLNIEQKEKLNKLISAIHEKDDLLDSQEDFLIKENKKHVKVKNAYALEIEKCEKLSSELSTCHDTITNLRNENAKLIAKVDSHICNVSTSNPRDDNVDLLARIDELNVSIASLRIENEKLQ

SEQ ID NO: 10202 - protein, 140 aa, Zea mays
  unsure (1)..(140): unsure at all Xaa locations
  Clone ID: TF_LIB4699-002-R1-K1-D10.pep
QRGKPRKARGGAFAEARGQAQGGARGGAQGGAVGNKKPTRDDGCHNCGKLGHWARECXQPRRGQGNVAXRRRRSRXALLLAHASIKIPSASPAAAALLHLDESKAHAFLGDGYNNDMIEGWCCLSLVLKCCESRIRQHNC

SEQ ID NO: 10203 - protein, 506 aa, Zea mays
  Clone ID: TF_ZmC1028_2.pep
MKNKAMVFKCFVLISDMDAVDALVLCGILLTNQTYNRLKTLVNKIRSYGSTRWTDHDIVRLMLRSFTVLDPHLVNNIRENPRYTKMTPEEILGKFVSERMIIKEATYVDGALNGPINEPQPLTLKATRSKETLPSKVAQIEAAGLNDEEMALIIKRFKTRDGNGYPRPDTRWVFTPLGWLNDARNFTMTALKGRKGQPSKTKTKGKRSCFKCGKLGHFIANCPDNDSDQDQGNKREKKKNYKKAKGEAHLGKEWDSDCSSSDSDNEGLAATAFNKSSLFPNERHTCLMAREKKVCTRNSTYASSSEDESSDEDEIDYSCLFKGLDRTKVDKINELIDALNDKNRLLEKQEDLLYEEHDKFVEAQKSHALEVKRNEMLSCELSSCHETISNLRSINDDLNAKLEIASKSTSCVEIVATCNRCKDFDIDACSEYLVSISKLNDELASLNAQLKTSKSEFDKLKFARDAYTIGRHPSIKDGLGFKREAKNLTSHKVPIPANEKGKAPRQ

SEQ ID NO: 10204 - protein, 768 aa, Zea mays
  unsure (1)..(768): unsure at all Xaa locations
  Clone ID: TF_ZmC119_1385.pep
MDPKGKGIVINDKEKESFVNEPKDDKPTDSGSGQRRKEGKKKKTRRIKEIVYYDSDESTSSQKDEDHNDYERRKPVNSNFSFDYSRIPQSSHSHLLSIPLGKPPHFDGEDYGFWSHKMRSHLFSLHPSIWEIVESGMHFDSSDSPMFINEQIHKNAQATTVLLASLCKNEYHKVSGLDNAKQIWDTLKISHEGNDVTLLTKMELVEGELGRFAMIRGEEPTQTYNRLKTLINKIRSYGSTRWTDHDVVRLMLRSFTVLDPHLVNNIRENPRYTKMSPEEVLGKFVSGRMMIKEARYVDDALNGPINEPQPLTLKATRSKEALPSKVAQIEAAGLNDEEMALIIKRFKTVLKGRNGQPSKTKTKGKRSCFKCGKLGHFIANCPDNESDQEKGNKREKKKQYKKAKGEAHLGKEWDSDCSSSDSDNEGLAATAFNKSALFPNERLTCLMAREKKVSTQDSTYASSSDSESSDDDIDYSCLFKGLDRSKIDKINELIDALNEKDRLLEKQEDLLYDEHDKFVEAQKSYALEVKRNEMLSYELSTCHETISTLQGVNNDLNAKLEIANKSNSCVEHVKICTRCKDFDVDACSEHLVLISKLNKEVASLNAQLKTSKNEVDKIKFARDAYTVGRHPSIKDGLGFKREAKNLTSHKAPIFVKEKGKAPMASSAKKNHAFIYSDRKFSRNAYRNYSYDSYXMTASSSSIVHDMPRKNVIHHMPRRNVVHVPRKASNEPSTIYHACNTSFAICRNDKKVIARKLGAKCKGDKTCIL

SEQ ID NO: 10205 - protein, 444 aa, Zea mays
  Clone ID: TF_ZmC119_1489.pep
MDPKGKGIVINDKEKESFVNEPKDDKPTDSGSGHRRKEGKKKKTRRIKEIVYYDDSDESSSSQKDNDDNDYDKQKTVNSNFSFDYSRIPHSSNAHLLPIPLGKPPHFDGEDYGFWSHKMRTHLFSLHPSIWEIVESGMKFDSSDSPSFINEQIHKNAQATTVLLASLCRDEYHKVSGLDNAKQIWDTLKISHEGNDVTLLTKMELVEGELGRFAMIRGEEPTQTYNRLKILINKIRSYGSTRWTDHDVVRLMLRSFTVLDPHLVNNIRENPRYIKMSPEEIHGKFVSGRMMIKEARYVDDALNGPIHEPQPIALKATRSKEALPSKVAQIEAAGLNDEEMALIIKRFKTALKGRKGQPSKTKTKGKRSCFKCGKLGHFIANCPDNDSDQEHGSKREKKKHYKKAKGEALKGKCALGPFLNILVIECQHKCLNVNQCPWMNKVQI

SEQ ID NO: 10206 - protein, 1707 aa, Zea mays
  Clone ID: TF_ZmC29741_13.pep
MDPKGKGIVINDKEKESFVNEPKDDKPTDSGSGHRRKDGKKKKTRRIKEIVYYDDSDESTSSHKDNDDNDYDKRKTVNSNFSFDYSRIPQSANAHLLSIPLGKPPHFDGEDYGFWSHKMRSHLFSLHPSIWEIVESGMHFDSSDSPMFINEQIHKNAQATTVLLASLCRDEYHKMELVEGELGRFAMIRGEEPTQTYNRLKTLINKIRSYGSTRWTDHDVVRLMLRSFTVLDPHLVNNIRENPRYTKMSPEEVLGKFVSGRMMIKEARYVDDALNGPINEPQPLALKATRSKEALPSKVAQIEAAGLNDEEMALIIKRFKTALKGRKGQPSKTKAKGKRSCFKCGKLGHFIANCPDNDSDQDQGNKREKKKNYKKAKGEAHLGKEWDSDCSSSDSDNEGLAATAFNKSSLFPNERHTCLMAREKKVCTRDSTYASSSEDESSDEEIDYSSLFKGLDRNKIDKINELIDALNEKDRLLEKQEDLLYDEHDKFVEAQKSYALEVKRNEMLSYELSTCHETISTLQSVNNDLNAKLEVANKSNSCVEHVMICTRCKNFDIDACNGHLVSISRLNDEVASLNAQLKTSKSDFDKLKFARDAYTIGRHPSIKDGLGFKREAKDLTSHKAPISAKEKGKAPMASSTKKNHAFMYNNRRQSHRSCNALDSHAYDSYAMYASSSSYMHCRDMPRKNIHHVPRKNFAHAPRKVMNGPSTIYHALNASFAICRKDRKIVARKLGAKCKGDKTCIWVPKEIVTNLVGPNKSWVYASGGSSWIIDSGCTNHMTGEKKMFTSYVKNKDSQDSIIFGDGNQGKVKGLGKIAISNEHSISNVFLVESLGYNLLSVSQLCNMGYNCLFTNVDVSVFRRCDGSLAFKGVLDGKLYLVDFAKEEVGLDACLMAKTCMGWLWHRRLAHVGMKNLHKLLKGEHVIGLTNVHFEKDRPCAACQAGKQVRGAHHSKNVMTTSRPLELLHMDLFGPVAYLSIGGSKYGLVIVDDFSRFTWVFFLQDKSETQGTLKRFLRRAQNEFELKVKKIRSDNGSEFKNLQVEEFLEEEGIKHEFSAPYTPQQNGVVERKNRTLIDMARTMLGEFKTPECFWSEAVNTACHTINRVYLHRLLKKTSYELLTVKKGRNSKFAPKAVEGFLLGYDSNTKAYRVFNKSSGLVEVSSDVVFDETNGSPREQVVDLDDVDEEDVPTAAIRTMAIGDVRPQEHLEQDQPSSSTMVHPPTQDDKQVPQVEAHDQGGAQDVQVEEEEAPQAPPTQVRATIQRDHHVDQILGDISKGVTTRSRLVNFCEHYSFVSSIEPFRVEEALLDLDWVLAMQEELNNFKHNEVWTLVPRPKQNVVGTKWVFRNKQDEHGVVTRNKARLVAKGYAQVAEEVYVEQPPGFEDERYPDHVCKLSKALYGLKQAPRAWYECLRDFLIANAFKVGKADPTLFTKTCDGDLFVCQVYVDDIIFGSTNQKSCEEFSRVMTQKFEMSMMGELNYFLGFQVKQLKDDTFISQTKYTQDFLKRFGMKDAKPAKTPMGTDRHTDLNKGVATPCFGIWYPKGSNFDLIGYSDSDYAGCKVDRKSTSGTCQFLGRSLVSWNSKKQTSVALSTAEAEYVAAGQCCAQLLWMRQTLRDFGYNLSKVPLLCDNESAIRIAENPVEHSRTKHIDIRHHFLRDHQQKGDIKVFHVSTENQLADIFTKPLDEKTFCRLRSELNILDSRNLD

SEQ ID NO: 10207 - protein, 923 aa, Zea mays
  Clone ID: TF_ZmC29741_17.pep
MDPKGKGIVINDKEKESFVNEPRDDKSNDSGSGHKRKDGKKKKTRRIKEIVYYDSDESSSSQKDDDHDKQKTVNSNFSFDYSRIPYSSNAHLLPIPLGKPPHFDGEDYGFWSHKMRTHLFSLHPSIWEIVENGMKFDSSDSPSFINEQIHKNAQATTVLLASLCRDEYNKVSGLDNAKQIWDTLKISHEGNDVTLLTKTELVEGELGRFAMIRGEEPTQTYNRLKTLINKIRSYGSTRWTDHDVVRLMLRSFTVLDPHLVNNIRENPRYTKMSPEEVLGKFVSGRMMIKEARYVDDALNGPINEPQPFALNATRSKEALPSKVAQIEAVGLNDEEMALIIKRFKTVLKGRNGQPSKTKTKGKRSCFKCGKLGHFIANCPDNESDQEKGNKREKKKHYKKAKGEAHLGKEWDSDCSSSDSDNEGLAATAFNKSALFPNERHTCLMAKEKKVSTRNSTHASSSGDDSSDDDEIDYSSLFKGLDRITIGKINELIDALNEKDKLLEKQEDLLYEEHDKFLEAQKSHALEVKRNEMLTCELSSCHETISKLKSINDELNAKIEIASKSTTCVENVVICNRCKDFDIDACSEHIASIAKLNNEVASLNAQLKTSKSDFEKLKFARDAYTVGRHPSIKDGLGFKREAKNLTSHKAPISAKEKGKAPMATSAKRNHAFLYHDKRQTRNRSYDAFDSYVYDSHAMFAPSSSYVYDRNITRRNVVPKRNVANVHKKVYASGGSSWIIDSGCTNHMTGEKKMFTSYVKNKDSQDSIIFGDGNQGKVKGLDVSVFRRSDGSLAFKGVLDSKLYLVDFAKEEAGLDACLIAKTSMGWLWHRRLAHVGMKNLHKLLKGEHVIGLTNVQFEKDRPCAACQAGKQVGGSHHTKNVMTTSRPLEMLHMDLFGPVAYLSIGGRKVRNPRDSQTLPQESSK

SEQ ID NO: 10208 - protein, 936 aa, Zea mays
  Clone ID: TF_ZmC29741_18.pep
MDPKGKGIVINDKEKESFVNEPKDDKPTDSGSGHRRKEGKKKKTRRIKEIVYYDDSDESSSSQKDNNDYDKQKTVNSNFSFDYSRIPHSSNAHLLPIPLGKPPHFDGEDYGFWSHKMRTHLFSLHPSIWEIVESGMKFDSSDSPSFINEQIHKNAQATTVLLASLCRDEYHKVSGLDNAKQIWDTLKISHEGNDVTLLTKMELVEGELGRFAMIRGEEPTQTYNRLKILINKIRSYGSTRWTDHDVVRLMLRSFTVLDPHLVNNIRENPRYIKMSPEEILGKFVSGRMMIKKARYVDDALNGPIHEPQPIALKATRSKEALPSKVAQIEAAGLNDEEMALIIKRFKTTLKGRKGQPSKTKTKGKRSCFKCGKLGHFIANCPDNDSDQEHGSKREKKKHYKKAKGEAHIGKEWDSDCSSSDSDNEGLAATAFNKSSLFPNERHTCLMAREKKVCNQNNVTYDSSSDDESSDDEIDYSSLFKGLDRTKVDKINELIDALNEKDRLLEKQEDLLYEEHDKFVEAQKSYALEVKRNEVLSSELSSCHETIATLKSVNDDLKAKLEVASKSNSCVEHVEICTRCKDFDVDACSDHLVSISKLTEELASLNAQLKTSKNEFEKLKFARDAYTVGRHPSIKDGLGFKREVKNLTSHKAPISAKEKGKAPMSSSAKKNHAFMYHDKRQIRNAYRSYNAYDDFDSHDMFASSSFYVHDRNVGRRNVVHNTPRKNVVNVYASGGSSWIIDSGCTNHMTGEKKMFTSYVKNKDSQDSIIFGDGNQGKVKGLVESLGYNLLSVSQLCNMGYNCLFTNVDVSVFRRSDGSLAFKGVLDGKLYLVDFAKEEAGLDACLIAKTSMGWLWHRRLAHVGMKNLHKLLKGEHVIGLTNVQFEKDRPCAACQAGKQVGGAHHNKNVMTTSRPLELLHMDLFGPVAYLSIGGMYHG

SEQ ID NO: 10209 - protein, 780 aa, Zea mays
  Clone ID: TF_ZmC29741_34.pep
MDPKGKGMVINDKEKETFVNEPNDDKPTDSGSGHKRKDGRKKKTRRIKEIVYYDSDESSSSQKDDDDHDRRKTVNSNFSFDYSRIPHSSNAQLLPIPLGKPPHFDGEDYGFWSHKMRTHLFSLHPSIWEIVESGMKFDSSDSPVFINEQIHKNAQATTVLLASLCRDEYHKVSGLDNAKQIWDTLKISHEGNDVTLLTKMELVEGELGRFAMIRGEEPTQTYNRLKTLINKIRSYGSTRWTDHDVVRLMLRSFTVLDPHLVNNIRENPRYTKMSPEEVLGKFVSGRMMIEEARYVDDALNGPINEPQPLALKATRSKEALPSKVAQIEAAGLNDEEMALIIKRFKTVLKDRKGQPSKTKAKGKRSCFKCGKLGHFIANCPDNDSDQDQGNKREKKKNYKKAKGEAHLGKEWDSDCSSSDSDNEGLAATAFNKSSLFPNERHTCLMAREKKVSTPNTSTYASSSEDESSDDDEIDYSCLFKGLDRTKEDTVREARGAVEGRNILLEKQEDLLYEEHDKFVEAQKSLALEIKRNEMLSSELSSCHETIAKLKSFNDDLNAKLKVASKSNSCVEIVETCNRCKDFDIDACSDHLVSISKLNEELASLNAQLKTSKNEFDKLKFARDAYTIGRHPSIKDGLGYKREAKNLTSHKAPISTKEKGKAPMASSVQKNHAFMYHDRRQSRNSYRSCNAYNAIDSHAMFASSSSYVHDRNVGRRNAVHNLPRRNVVNVPRKVYASGGSSWIIDSGCTNHMTGEKKMFTSYVKNKDSQDSIIFGDGNQGK

SEQ ID NO: 10210 - protein, 792 aa, Zea mays
  Clone ID: TF_ZmC29741_40.pep
MDPKGKGMVINDKEKETFVNEPNDDKPTDSGSGHKRKDGRKKKTRRIKEIVYYDSDESSSSQKDDDDHDRRKTVNSNFSFDYSRIPHSSNAQLLPIPLGKPPHFDGEDYGFWSHKMRTHLFSLHPSIWEIVESGMKFDSSDSPVFINEQIHKNAQATTVLLASLCRDEYHKVSGLDNAKQIWDTLKISHEGNDVTLLTKMELVEGELGRFAMIRGEEPTQTYNRLKTLINKIRSYGSTRWTDHDVVRLMLRSFTVLDPHLVNNIRENPRYTKMSPEEVLGEFVSGRMMIKEARYVDDALNGPINEPQPLALKATRSKEALPSKVAQIEAAGLNDEEMALIIKRFKTVLKGRKGQPSKTKAKGKRSCFKCGKLGHFIANCPDNDSDQDQGNKREKKKNYKKAKGEAHLGKEWDSDCSSSDSDNEGLAATAFNKSSLFPNERHTCLMAREKKVSTPNTSTYASSSEDESSDDDEIDYSCLFKGLDRTKVDKINELIDALNDRNILLEKQEDLLYEEHDKFVEAQKSLALEIKRNEMLSSELSSCHETIAKLKGFNDDLNAKLEVASKSNSCVEIVETCNRCKDFDIDACSDHLVSISKLNEELASLNAQLKTSKNEFDKLKFARDAYTIGRHPSIKDGLGYKREAKNLTSHKAPISAKEKGKAPMASSVQKNHAFMYHDRRQSYRSCNAYDAFDSHAMFASGSSYMHGRDMPRKNIHHVPRKNIVHVPRKVVNGPSTIYHALNASFAICRKDRKIVARKLGAKCKGDKTCISVPKDICTNLVGPNMSWVPKTQA

SEQ ID NO: 10211 - protein, 667 aa, Zea mays
  Clone ID: TF_ZmC29741_48.pep
MDPKGKGIVINDKEKESFVNEPKDDKPTDSGSGHRRKEGKKKKTRRIKEIVYYDDSDESSSSQKDNDDNDYDKQKTVNSNFSFDYSRIPHSSNAHLLPIPLGKPPHFDGEDYGFWSHKMRTHLFSLHPSIWEIVESGMKFDSSDSPSFINEQIHKNAQATTVLLASLCRDEYHKVSGLDNAKQIWDTLKISHEGNDVTLLTKMELVEGELGRFAMIRGEEPTQTYNRLKILINKIRSYGSTRWTDHDVVRLMLRSFTVLDPHLVNNIRENPRYIKMSPEEILGKFVSGRMMIKEARYVDDALNGPIHEPQPIALKATRSKEALPSKVAQIEAAGLNDEEMALIIKRFKTALKGRKGQPSKTKTKGKRSCFKCGKLGHFIANCPDNDSDQEHGSKREKKKHYKKAKGEAHIGKEWDSDCSSSDSDNEGLAATAFNKSSLFPNERHTCLMAREKKVCNQNNVTYDSSSDDESSDDEIDYSSLFKGLDRTKVDTINELIDALNEKDRLLEKQEDLLYEEHDKFVEAQKSYALEVKRNEVLSSELSSCHETIATLKSVNDDLNAKLEVASKSNSCVEHVEICTRCKDFDVDACSDHLVSISKLNEELASLNAQLKTSKNEFDKLKFARDAYTIGRHPSIKDGLGFKREAKNLTSHKAPIPAKEKGKAPMAT

SEQ ID NO: 10212 - protein, 751 aa, Zea mays
  Clone ID: TF_ZmC29741_49.pep
MDPKGKGIVINDKEKESFVNEPRDDKSNDSGSGHKRKDGKKKKTRHIKEIVYYDSDESSSSQKDDDHDKQKTVNSNFSFDYSRIPYSSNAHLLPIPLGKPPHFDGEDYGFWSHIMRTHLFSLHPSIWEIVESGMKFDSSDSPSFINEQIHKNAQATTVLLASLCRDEYNKVSGLDNAKQIWDTLKISHEGNDVTLLTKMELVEGELGRFAMIRGEEPTQTYNRLKTLINKIRSYGSTRWTDHDVVRLMLRSFTVLDPHLVNNIRENPRYTKMSPEEVLGKFVSGRMMIKEARYVDDALNGPINEPQPFALKATRSKEALPSKVAQIEAAGLNDEEMALIIKRFKTVLKGRNGQPSKTKTKGKRSCFKCGKLGHFIANCPDNESDQEKGNKREKKKHYKKAKGEAHLGKEWDSDCSSSDSDNEGLAATAFNKSALFPNERHTCLMAKEKKVSTRNSTYASSSDNDSSDDDEIDYSSVFKGLDRITIGKINELIDALNEKDKLLEKQEDLLYEEHDKFLEAQKSHALEVKRNEMLTCELSSCHETISKLKSINDELNVKIEIASKSTTCVENVAICNRCKEFDIDACSEHIASIAKLNNEVASLNVQLKTSKSEFDKLKFARDAYTIGRHPSIKDGLGFKREAKNLISHKDPIPAKEKGKAPMDTSAKRNHAFLYHDRRQTRNVSHDAFDSYVYDSHAMFAPSSSYVYDRNATRINVVPKRNAIHHVPRRNVIHAPRKIANEPSTIYCALNFP

SEQ ID NO: 10213 - protein, 437 aa, Zea mays
  Clone ID: TF_ZmC29741_72.pep
MDPKGKGIVINDKEKESFVNEPKDDKPTDSGSGHRRKEGKKKKTRRIKEIVYYDDSDESSSSQKDNNDNDYDKQKTVNSNFSFDYSRIPHSSNAHLLPIPLGKPPHFDGEDYRFWSHKMRTHLFSLHPSIWEIVESGMKFDSSDSPSFINEQIHKNAQATTVLLASLCRDEYHKVSGLDNAKQIWDTLKISHEGNDVTLLTKIELVEGELGRFAMIRGEEPTQTYNRLKILINKIRSYGSTRWTDHDVVRLMLRSFTVLDPHLVNNIRENPRYIKMSPEEILGKFVSGRMMIKEARYVDDALNGPIHEPQPIALKATRSKEVLPSKVAQIEAAGLNDEEMALIIKRFKTALKGRKGQPSKTKTKGKRSCFKCGKLGHFIANCPDNDSDQEHGSKREKKKHYKKAKGEAHIGKEWDSDCSSSDSDNEGLTATAFNKSS

SEQ ID NO: 10214 - protein, 386 aa, Zea mays
  Clone ID: TF_ZmC29741_78.pep
MDPKGKGMVINDKEKETFVNEPNDDKPTDSGSGHKRKDGRKKKTRRIKEIVYYDSDESSSSQKDDDDHDRRKTIHKNAQATTVLLASLCRDEYHKVSGLDNAKQIWDTLKISHEGNDVTLLTKMELVEGELGRFAMIRGEEPTQTYNRLKTLINKIRSYGSTRWTDHDVDRLMLRSFTVLDPHLVNNIRENPRYTKMSPEEVLGEFVSGRMMIKEARYVDDALNGPINEPQPLALKATRSKEALPSKVAQIEAAGLNDEEMALIIKRFKTVLKGRKGQPSKTKAKGKRSCFKCGKLGHFIANCPDNDSDQDQGNKREKKKNYKKAKGEAHLGKEWDSDCSSSDSDNEGLAATAFNKSSLFPNERHTCLMAREKKEYTVRKARGFVV

SEQ ID NO: 10215 - protein, 179 aa, Zea mays
  Clone ID: TF_ZmC29741_90.pep
MSPEEVLGKFVSGRMMIKEARYVDDALNGPIHEPQPLALKATRSKEALPSKVAQVEAAGLNDEEMALIIKRFKTALKGRKGQPSKTKAKGKRSCFKCGKLGHFIANCPDNESDQEQGDKREKKKHYKKAKGEAHLGKEWDSDCSSSDSDNEGLAATAFNKSSLFPNERHTCLMAREKKV

SEQ ID NO: 10216 - protein, 418 aa, Zea mays
  Clone ID: TF_ZmC4916_360.pep
MDPKGKGIVINDKEKESFVNKPKDDKPTDSGSGHRRKEGKKKKTRHIKEIVYYDDSDESTSSQKDDDHNDYERRKPVNSNFSFDYSRIPQSSNSHLLSIPLGKPPHFDGEDYGFWSHKMRSHLFSLHPSIWEIVESGMNFDSSDSPMFINEQIHKNAQATTVLLASLCRDEYHKVSGLDNAKQIWDTLKISHEGNDVTLLTKMELVEGELGRFAMIRGEEPTQTYNRLKTLINKIRSYGSTRWTDHDVVRLMLRSFTVLDPHLVNNIRENPRYTKMSPEEVLGKFVSGRMMIKEARYVDDALNGPINEPQPLALKATRSKEALPSKVAQIEAAGLNDEEMALIIKRFKTALKGRKGQPSKTKAKGKRSCFKCGKLGHFIANCPDNDSDQDQGNKREKKKNYKKAKGEARDGNGYIPVG

SEQ ID NO: 10217 - protein, 1669 aa, Zea mays
  unsure (1)..(1669): unsure at all Xaa locations
  Clone ID: TF_ZmC4916_361.pep
MDPKGKGIVINDKEKESFVNEPRDDKSNDSGSGHKRRDGKKKKTRRIKEIVYYDSDESSSSQKDDDHDKQRKPVNSNFSFDYSRIPQSSNSHLLSIPLGKPPHFDGEDYGFWSHKMRSHLFSLHPSIWEIVDSGMHFNSSDSPIFINEQIHKNAQATTVLLASLCRDEYNKVSGLDNAKQIWDTLKISHEGNDATLLTKMELVEGELGRFAMIRGEEPTQTYNRLKTLINKIRSYGSTRWTDHDVVRLMLRSFTVLDPHLVNNIRENPRYTKMSPEEVLGKFVSGRMMIKEARYVDDALNGPINEPQPFALKATGNKEALPSKVAQIEAAGLNEEEMTLIIKRFKTVLKGRNGQPSKTKTKGKRSCFKCGKLGHFIANCPDNDSDQEKGNKREKKKHYKKAKGEAHLGKEWDSDCSSSDSDNEGLAATAFDKSTLFPNERHTCLMAREKKVCTRNSTYASSSEDESSDEDEVDYSCLFKGLDRSKIDKINELIDALNEKNILLEKQEDLLYEEHDKFVEAQKSYALEVKRNKMLSFELSTCHETISTLKGVNNDLNAKLEVANKSNSCVEHVEICTRCKDFDINACSEHLVSISKLNDELASLNAQLKTSKNDFDKLKFARDAYTIGRHPSIKDGLGFKREAKNLTSHKAPIPAKEKGKXAPMASNVQKNHAFMYYDRRQTRNAYRSYNAFDDFDSHAMFAPSSSYVYDRNVTRRNVVPKRNTIHHVSRKNAIHAPRKVVNEPSTIYYALNASFAICRKDKKIVARKLGAKCKGDKTCIWVPKDICTNLVGPNMSWVYASGGSSWIIDSGCTNHMTGEKKMFTSYVKNKDSQDSIIFGDGNQGKDKSETQGTLKRFLRRAQNEFELKVKKIRSDNGSEFKNLQVEEFLEEEGIKHEFSAPYTPQQNGVVERKNRTLIDMARTMLGEFKTPECFWTEAVNTACHAINRVYLHRLLKKTSYELLTGNKPNVSYFRVFGSKCYILVKKGRNSKFAPKAVEGFLLGYDSNTKAYRVFNKSSGLVEVSSDVVFDETNGSPREQVFDCDDIDEEDVPTAAIRTMAIGEVRPQEQDEQDQPSSSIMVHPSTQDDEQVHQKEACDQGGAQDDHVMEEEAQPAPPTQVRATIQRDHPVDQILGDISKGVTTRSRLVNFCEHYSFVSSIEPFRVEEALLDPDWVLAMQEELNNFKRNEVWTLVPRPKQNVVGTKWVFRNKQDEHGVVTRNKARLVAKGYAQVAGLDFEETFAPVARLESIRILLAYAAHHSFRLYQMDVKSAFLNGPIKEEVYVEQPPGFEDERYPDHVCKLSKALYGLKQAPRAWYECLRDFLLANAFRVGKADPTLFTKTCDGDLFVCQIYVDDIIFGSTNQKSCEEFSRVMTQKFEMSMMGELNYFLGFQVKQLKDGTFISQTKYTQDLLKRFGMKDAKPAKTPMGTDGHTDLNKGGKSVDQKAYRSMIGSLLYLCASRPDIMLSVCMCARFQSDPKECHLVAVKRILRYLVATPCFGLWYPKGSTFDLVGYSDSDYAGCKVDRKSTSGTCQFLGRSLVSWNSKKQTSVALSTAEAEYVAAGQCCAQLLWMRQTLRDFGYNLSKVPLLCDNESAIRMAENPVEHSRTKHIDIRHHFLRDHQQKGDIEVFHVSTENQLADIFTKPLDEKTFCRLRSELNVLDSRNLD

SEQ ID NO: 10218 - protein, 1595 aa, Zea mays
  Clone ID: TF_ZmC4916_362.pep
MDPKGKGIVINDKEKESFVNEPRDDKSNDSGSGHKRKDGKKKKTRRIKEIVYYDSDESSSSQKDDDHDYKKTVNSNFSFDYSRIQHSSNSHLLSIPLGKPPHFDGEDYGFWSHKMRSHLFSLHPSIWEIVENGMKFDSSDSPMLINEQIHRNAQATTVLLASLCREEYNKVSGLDNAKQIWDTLKISHEGNDITMLTKMELVEGELGRFAMIRGEEPTQTYNRLKTLINKIRSYGSTRWTDHDVVRLMLRSFTVLDPHLVNNIRENPRYMMMTPEEVLGKFVSGRMMIKEARYVDDALNGPLHEPQPIALKATRSKESLPSKVAQIEAAGLNEEEMALIIKRFKTVLKGRNGQPSKTKTKGKRSCFKCGKLGHFIANCPDNDSDQEKGNKREKKKHYKKAKGEAHLGKEWDSDCSSSDSDNEGLAATAFNKSALFPNEHHTCLMAREKKVITRNANTYDSSSDDESSEDEIDYSSLFKGLDRTKIAKINELIDALNEKDRTLEKQEDLLYEEHDKFVSAQNSLALEVKRNGILSCELSTCNETISSLKGEIKDLTTKLEVASNSYVENITICTRCKDFDVNACSEHLVSISKLSDEVASLNAQLKTSKSDFEKLKFARDAYTVGRHPSIKDGLGFKREAKNLTSHKAPIPAKEKGKAPMATSAKRNHAFLYHERRHTRNDVFDSHAYDSYAMTASSSHVMHDRRNVVHQMPRKNVVHNAPRKVYASGGSSWIIDSGCTNHMTGEKKMFTSYVKNKDSQDSIIFGDGNQGKDKSETQGTLKRFLRRAQNEFELKVKKIRSDNGSEFKNLQVEEFLEEEGIKHEFSAPYTPQQNGVVERKNRTLIDMARTMLGEFKTPECFWTEAVNTACHAINRVYLHRLLKKTSYELLTGNKPNVSYFRVFGSKCYILVKKGRNSKFAPKAVEGFLLGYDSNTKAYRVFNKSSGLVEVSSDVVFDETNGSPREQVVDLDDVDEEDVPTAAIRTMAIGDVRPQEQEEQDQPSSSTMVNPPTQDDEQVHQQEACDQGGAQDDLVVEEEAQPAPPTQVRAMIQRDHPVDQILGDISKGVTTRSRLVNFCEHYSFVSSIEPFRVEEALLDPDWVSAMQEELNNFKRNEVWTLVPRPKQNVVGTKWVFRNKQDEHGVVTRNKARLVAKGYAQVAGLDFEETFAPVARLESIRILLAYAAHHSFRLFQMDVKSAFLNGPIKEEVYVEQPPGFEDERYPDHVCKLSKALYGLKQAPRAWYECLRDFLIANAFKVGKADPTLFTKTCDGDLFVCQIYVDDIIFGSTNQKSCEEFSRVMTQKFEMSMMGELNYFLGFQVKQLKDGTFISQTKYTQDLLKRFGMKDAKPAKTPMGTDGHTDLNKGGKSVDQKAYRSMIGSLLYLCASRPDIMLSVCMCARFQSDPKECHLVAVKRILRYLVATPCFGLWYPKGSTFDLVGYSDSDYAGCKVDRKSTSGTCQFLGRSLVSWNSKKQTSVALSTAEAEYVAAGQCCAQLLWMRQTLRDFGYNLSKVPLLCDNESAIRMAENPVEHSRTKHIDIRHHFLRDHQQKGDIEVFHVSTENQLADIFTKPLDEKTFCRLRSELNVLDSRNLD

SEQ ID NO: 10219 - protein, 609 aa, Zea mays
  Clone ID: TF_ZmC4916_369.pep
MDPKGKGMMINDKEKETFVNEPNDDKPTDSGSGHKRKDGRKKKTKRIKEIVYYDSDESSSSQKDDDDHDRRKTIHKNAQATTVLLASLCRDEYHKVSGLDNAKQIWDTLKISHEGNDVTLLTKMELVEGELGRFAMIRGEEPTQTYNRLKTLINKIRSYGSTRWTDHDVVRLMLRSFTVLDPHLVNNIRENPRYTKMSPEEVLGEFVSGRMMIKEARYVDDALNGPINEPQPLALKATRSKEALPSKVAQIEAAGLNNEEMALIIKRFKTVLKGRKGQPSKTKAKGKRSCFKCGKLGHFIANCPDNDSDQDQGNKREKKKNYKKAKGEAHLGKEWDSDCSSSDSDNEGLAATAFNKSSLFPNERHTCLMAREKKDKSKTQGTLKRFLRRAQNEFELKVKKIRSDNGSEFKNLQVEEFLEEEGIKHEFSAPYTPQQNGVVERKNRTLIDMAWTMLGEFKTPECFWSEAVNTACHATNRVYLHRLLKKTSLYQMDVKSAFLNGPIKEEVYVEQPPGFEDERYPDHSCEEFSRVMTQKFEMSMMGELNYFLGFQVKQLKDGTFISQTKYTQDLLKRFGMKDAKPAKTPMGTDGHIDLNKGDFGEAMGLKGQD

SEQ ID NO: 10220 - protein, 1778 aa, Zea mays
  Clone ID: TF_ZmC4916_372.pep
MDPKGKGMVVNDKEKESLFVNDPKEDKPTDSGSSHKRKDGRKKKTRRIKEIVYYDSDESSSSQKDDDNVYENKKTVNSYFSFDYSHIPQTTNAHLLSIPLASLCRDEYHKVSGLDNAKQIWDTLKISHEGNDVTMLTKMELVEGELGRFAMIRGEEPTQTYNRLKTLVNKIRSYGSTRWTDHDVVRLMLRSFTVLDPHLVNNIRENPRYTKMSPEEILGKFVSGRMMIKEARYIDDALNGPIHEPQIVALKATRSKEALPSKVAQVEAAGLNEEEMALIIKRFKTALKGRKEHPNKNKTKGKRSCFKCGKIGHFITNCPDNDSDQEKKSGKWEKKKNYKKAKGEAHLGKEWDSDCSSFDSDNEGLAATAFNKSSLFPNEHHTCLMAKEKKVCTRNNITYASSSEDESSDDDEIDYSCLFKGLDRTKIDKINELIDALNDKNRLLEKQEDLLYEEHDKFVSAQNSLALEVKRNEMLSCELSTCHETISTLKGVNDDLNAKLEVANKSNSCVEHVMICNRCKDFNVDACSEHLVCISKLNNEVASLNAQLKSSKSEFDKLKFARDAYTIGRHPSIKDGLGFKREVKNLTSHKASISAKEKGKAPMASNAQKNHAFMYHDRKHSRNGYRSYDALDSHAMVVSSSSIMHDRNLAWRNVINHMPRRNVVHVSRKIINEPSTIYHACNASFAIYRKDRKVIARKLGAKCKGDKTCIWVPKDIITNLVGPNKSWVYASGGSSWIIDSGCTNHMTGEKKMFTSYVKNKDSQDSIIFGDGNQGKVKGLGKIAISNEHSISNVFLVESLGYNLLSVSQLCNMGYNCLLTNVDVSVFRRSDGSLAFKGVLDDKLYLVDFAKEEVGLDACLIAKTSMGWLWHRRLAHVGMKNLHKLLKGEHVIGLTNVTFEKDRPCAACQAGKQVGSSHRAKNVMTTSRPLELLHMDLFGPVAYLSIGGSKYGLVIVDDFSRFTWVFFLQDKSETQGTLKRFLRRAQNEFELKVKKIRSDNGSEFKNLQVEEYLEEEGIKHEFSAPYTPQQNGVVERKNRTLIDMARTMLGEFKTPERFWSEVVNTACHTINRVYLHRLLKKTSYELLTGNKPNVSYFRVFGSKCYILVKKGRNSKFAPKAVEGFLLGYDSNTKAYRVFNKSLGLVEVSSDVVFDETNGSPKEQVVDLDDVDEEDVPTAAIRTMAIGDVRPQEQNERDQPSSSTMVHPPTQDDEQVHQEEAYDQGGAQDDHVMEEEAQPAPPTQVRAMIQRDHPVDQILGDISKGVTTRSRLVNFCEHYSFVSSIEPFREELNNFKRNEVWTLVPRPKQNVVGTKWVFRNKQDEHGVGTRNKARLVAKGYAQVAGLDFEETFAPVARLESIRILLAYAAHHSFRLFQMDVKSAFLNGPIKEEVYVEQPPGFEDEQYPDHICKLSKALYGLKQAPRAWYECLRDFLIANTFKVGKADPTLFTKTCDGDLFVCQIYVDDIIFGSTNQKSCEEFSRVMTQKFEMSMMGELSYFLGFQVRQLKDGTFISQTKYTQDLIKRFGMKDAKPAKTPMGTDGHTDLNKGGKSVDQKAYQSMLVSLLYLCASRPDIMLSVCMCARFQSDPRECHLVAVKRILRYLVATPCFGIWYPKGSTFDLIGYSDSNYAGCKVDRKSTSGTCQFLGRSLVSWSSKKQTFVALSTAEAEYVSAGQCCAQLLWMRQTLRDFGYNLSKVPLLCDNESAIRMVDNPVEHSRTKHIDIRHHFLRDHQQKGDIEVFHVSTENQLADIFTKPLDESTFCRLRSELNVLDSRNLD

SEQ ID NO: 10221 - protein, 548 aa, Zea mays
  Clone ID: TF_ZmC4916_373.pep
MTWLAHRTCPVCTGLSGDFQKGIVINDKEKESFVNEPKDDKPIDSGSGHKRKDGKKKKTKRIKEIVYYDDSDESTSSQKNDNNDYEKKKTVNSNFSFDYSRIPQSTNAHLLSIPLGKPPHFDGEDYGFWSHKMRSHLFSLHPSIWEIVESGMHFDSSDSPMFINEQIHKNAQATTVLLASLCRDEYHKVSGLDNAKQIWDTLKISHEGNDVTMLTKMELVEDELGRFAMIRGEEPTQTYNRLKPLVNKIRSYGSTRWTDHDVVRLMLRSFTVLDPHLVNNIRENPRYTKMTPEEILGKFVSGRMMIKEARYVDDALNGPINEPQPIALKATRSNEMLPSKVAQIEAAGLNDEEMALIIKRFKTALKGRKGQPSKTKTKGKRSCFKCGKLGHFIANCPDNDSDQDQGNKREKKKNYKKAKGEAHLGKEWDSDCSSSDSDIEGLAATAFNKSSLFPNERHTCLMAREKKVSTPNTSTYASSSEDESSDDDEIDYSCLFKGLDRTKVDKINELIDALNDRNILLEKQEDLLYEEHEKFVEAQKSLAKSRPA

SEQ ID NO: 10222 - protein, 1664 aa, Zea mays
  Clone ID: TF_ZmC4916_387.pep
MDPKGKGIVINDKEKESFVNEPKDDKTTDSGSGHKCKDGKKKKTRRIKEIVYYDDSDESTSSQKDDDNDYRKTVNSNFSFDYSRIPHSSNSHLLSIPLGKPPHFDGEDYGFWSHKMRSHLFSLHPSIWEIVENGMKFDSSDSPMLINEQIHRNAQATTVLLASLCREEYNKVSGLDNAKQIWDTLKISHEGNDITMLTKMELVEGELGRFAMIRGEEPTQTYNRLKTLINKIRSYGSTRWTDHDVVRLMLRSFTVLDPHLVNNIRENPRYTKMSPEEVLGKFVSGRMMIKEARYVDDALNGPIHEPQPIALKATRSKEALPSKVAQVEAAGLNNEEMALIIKRFKTALKGRKGQPSKTKTKEKRSCFKCGKLGHFIANCPDNESDQEQGSKREKKKAYKKAKGEAHLGKEWDSDCSSSDSDNEGLAATAFNKSSLFPNEHHTCLMAREKKVSTQDSTYASSSDNESSDDDDIDYSCLFKGLDRSKIDKINELIDALNDKNRLLEKQEDLLYEEHDKFVSAQNSLALEIKRNEVLSSELSSCHETIATLKGVNNDLNAKLEVASKSNSCVEHVMVCTRCKDFNIDACSKHLVSISKLNDEVASLNAQLKTSKSDFDKLKFARDAYTIGRHPSIKDGLGFKREVKNLTSHKAPIPTKEKGKAPMATSAKKNHAFLYHDRKNSRNAFRSYDVFNSHAYDSYAMTASSSSYMHGRNVTRRNAIHHVPRKNIIHAPRKVVNEPSTIYCALNASFAICRKDRKIVARKLGARCKGDKTCIWVPKDICANLVGPNMSWVYASGGSSWIIDSGCTNHMTGEKKMFTSYVKNKDSQDSIIFGDGNQGKDKSETQGTLKRFLRRAQNEFELKVKKIRSDNGSEFKNLQVEEFLEEEGIKHEFSAPYTPQQNGVVERKNRTLIDMARTMLGEFKTPERFWSEAVNTACHAINRVYLHRLLKKTSYELLTGNKPNVSYFRVFGSKCYILVKKGRNSKFTPKAVEGFLLGYDSNTKAYRVFNKSSGLVEVSSDVVFDETNGSPREQVVDCDDVDEEDVPTAAIRTMAIGEVRPQEHDERDQTSSSTMVLPPTQDDEQVHQQEACDQGGAQDDRVMEEDAQPAPPTQVRAMIQRDHPVDQILGDISKGVTTRSRLVNFCEHYSFVSSIEPFRVEEALLDPDWILAMQEELNNFKRNEVWTLVPRPKQNVVGTKWVFRNKQDEHGVVTRNKARLVAKGYAQVAGLDFEETFAPVARLESIRILLAYAAHHSFRLYQMDVKSAFLNGPIKEEVYVEQPPGFEDERYPDYVCKLSKALYGLKQAPRAWYECLRDFLIANAFKVGKADPTLFTKTCDGDLFVCQIYVDDIIFGSTNQKSCEEFSRVMTQKFEMSMMGELNYFLGFQVKQLKDGTFISQTKYTQDLLKRFGMKDAKPAKTPMGTDGHTDLNKGGKSVDQKAYRSMIGSLLYLCASRPDIMLSVCMCARFQSNPKECHLVAVKRILRYLVATPCFGLWYPKGSTFDLVGYSDSDYAGCKVDRKSTSGTCQFLGRSLVSWNSKKQTSVALSTAEAEYVAAGQCCAQLLWMRQTLRDFGYNLSKVPLLCDNESAIRMAENPVEHSRTKHIDIRHHFLRDHQQKGDIEVFHVSTENQLADIFTKPLDEKTFCRLRSELNVLDSRNLD

SEQ ID NO: 10223 - protein, 660 aa, Zea mays
  Clone ID: TF_ZmC4916_389.pep
MDPKGKGIVINDKEKESFINEPKDDKPTDSGSGHKRKDGKKKKTRRIKEIVYYDDSDESTSSQKDDYRKTVNSNFSFDYSRIPHSSNSHLLSIPLGKPPHFDGEDYGFWSHKMRSHLFSLHPSIWEIVENGMKFDSSDSPMLINEQIHKNAQATTVLLASLCREEYNKVSGLDNAKQIWDTLKISHEGNDITMLTKMELVEGELGRFAMIRGEEPTQTYNRLKTLINKIRSYGSTRWTDHDVVRLMLRSFTVLDPHLVNNIRENPRYMMMTPEEVLGKFVSGRMMIKEARYVDDALNGPINEPQPLALKATRSKEMLPSKVAQIEAAGLNDEEMALIIKRFKTTLKGRKGQPSKTKTKGKRSCFKCGKLGHFIANCPDNDSDQDQGNKREKKKNYKKAKGEAHLGKEWDSDCFLSDSDNEGLAATAFNKSSFFPNEHHTCLMAREKKVSTRDPTYASSSDNESSDDDDIDYSCLFKGLDRSKIDKINELIDALNDKNRLLEKQEDLLYEEHDKFVEAQKSYALEVKRNEMLSYELSTCHETISTLQGVNNDLNAKLEVANKSNSCEEHVIICTRCKDFDIDACSEHLVSISRLNDEVASLNAQLKTSKSDFDKLKFARDAYTVGRHPSIKDGLGFKREAKNLTSHKAPISAKEKGKAPMA

SEQ ID NO: 10224 - protein, 1705 aa, Zea mays
  unsure (1)..(1705): unsure at all Xaa locations
  Clone ID: TF_ZmC4916_393.pep
MDPKGKGIVINDKEKESFVNEPKDDKPTDSGSGNRRKEGKKKKTRRIKEIVYYDDNDESTSSQKDDDHNDYERGKPVNSNFSFDYSCIPQSSNSHLLSIPLGKPPHFDGEDYGFWSHKMRSHLFSLHPSIWEIVESGMHFDSSDSPMFINEQIHKNAQATTVLLASLCRDEYHKVSGLDNAKQIWDTLKISHEGNDVTLLTKMELVEGELGRFAMIRGEEPTQTYNRLKILINKIRSYRSTRWTDHDVVRLMLRSFTVLDPHLVNNIRKNPRYVDDALNGPINEPQPLALKATRSKEALPSKVAQFEAAGLNDEEMALIIKRFKTALKGHKGQPSKTKTKGKRSCFKCGKLGHFIANCPDNDSDQEKGNKREKKKNYKKAKGEAHIGKEWDSDCSSSDSDNEGLAATAFNKSSLFPNEHHTCLMAKEKKVCTRDSTTYDSSSDDDSSDEEIDYSSLFKGLDRNKIDKINELIDALNEKDRLLEKQEDLLYDEHDKFVEAQKSYALEVKRNEMLSYELSTCHETISTLQGVNNDLNAKLEAANKSNSCVEHVMICIRCKDFDIDACSEHLVSISRLNDEIASLNDQLKTSKSDFDKLKFARDAYTIGRHPSIKDGLGFKREVKDLTSHKAPISTKEKGKAPMAISAKKNHAFMYHDRRHARNANRSYDAFDSHVYDSYAMFASSSXVYASGGSNWIIDSGCTNHMTGEKKMFTSYVKNKDXQDSIIFGDGNQGKVKGLDVSVVRRSDGSLAFKGVLDDKLYLVDFAKEEAGLDACLIAKTSMGWLWHRRLAHVGMKNLHKLLKGEHVICLTNVQFEKDRPCAACQAGKLVGSSHHIKNVMTTSRPLEMLHMDLFGPVAYLSIGGSKYGLVIVDDFSRFTWVFFLQDKSETQGTLKRFLRRAQNEFELKVKKIRSDNGSEFKNLQVEEYLEEEGIKHEFSAPYTPQQNGVVERKNMTLIDMARTMLGEFKTLERFWSEAVNTACHAINRVYLHRLLKKMSYELLTGNKPNFSYFRVFGSKCYILVKKGRNSKFAPKAVEGFLLGYDSNTKAYRVFNKSSGLVEVSSDVVFDETNGSPREQVVDFDDADEEEVPTTAICTMAIGDVRPQEQDEQDQPSSSTMVQPPSQDDEQEVCDQGGAQDDLAMEEEAQSAPPTQVRAMIQRDHPVDQILGDISKGVTTRSRLVNFCEHYSFVSSIEPFRVEEALLDPDWVLAMQEELNNFKRNEVWTLVPRPKQNVVGTKWVFRKKQDEHGVVTRNKARLVAKGYAQVAGLDFEETFAPVARLESIRILLAYAAHHSFRLFQMDVKSAFLNGPIKEEVYVEQPPGFEDERYPDHVCKLSKALYGLKQAPRAWYECLRDFLIANAFKVGKADPTLFTKTCDGDLFVCQIYVDDIIFGSTNQKSCEEFSKVMTQKFEMSMMGELSYFLGFQVRQLKDGTFISQTKYTQDLIKRFGMKDAKPAKTPMGTDGHTDLNKGGKSVDQKAYRSMIGSLLYLCASRPDIMLSVCMCARFESDPKECHLVAVKRILRYLVATPCFRIWYPKGSTFDLIGYSDSDYAGCKVDRKSTSGMCQFLGRSLVSWSSKKQTSVALSTAEAEYVAAGQCCAQLLWMRQTLRDFGYNLSKVPLLCDNESAIHKADNPVEHSRTKHIDIRHHFLRDHQQKGDIEVFHVSSENQLADIFTKPLDEQTFCKLRSELNVLDSRNLD

SEQ ID NO: 10225 - protein, 1095 aa, Zea mays
  unsure (1)..(1095): unsure at all Xaa locations
  Clone ID: TF_ZmC4916_408.pep
MDPKGKGIVINDKEKESFVNEPRDDKSNDSGSGHKRRDGKKKKTRRIKEIVYYDSDKSSSSQKDDDHDKQRKPVNSNFSFDYSRIPQSSNSHLLSIPLGKPPHFDGEDYGFWSHKMRSHLFSLHPSIWEIVDSGMHFNSSDSPIFINEQIHKNAQATTVLLASLCRDEYNKVSGLDNAKQIWDTLKISHEGNDATLLTKMELVEGELGRFAMIRGEEPTQTYNRLKTLINKIRSYGSTRWTDHDVVRLMLRSFTVLDPHLVNNIRENPRYTKMSPEEVLGKFVSGRMMIKEARYVDDALNGPINEPQPFALKATGNKEALPSKVAQIEAAGLNEEEMALIIKRFKTVLKGRNGQPSKTKTKGKRSCFKCGKLGHFIANCPDNDSDQEKGNKREKKKHYKKAKGEAHLGKEWDSDCSSSDSDNEGLAATAFNKSTLFPNERHTCLMAREKKVCTRNSTYASSSEDESSDEDEVDYSCLFKGLDRSKIDKINELIDALNEKNILLEKQEDLLYEEHDKFVEAQKSYTLEVKRNEMLSFELSTCHETISTLKGVNNDLNAKLEVANKSNSCVEHVEICTRCKDFDIDACSEHLVSISKLNDELASLNAQLKTSKNDFDKLKFARDAYTIGRHPSIKDGLGFKREAKNLTSHKAPILAKEKGKAPMASNVQKNHAFMYYDRRYSRNAFRGHDVFDSHAYDSYAMTASSSHVMHGRNMSRRNAIHHVPRKNVIHAPRKVVNEPSTIYCALNTSFAICRKDRKVIARKLGAKCKGDKTCIWVPKEIVTNLVGPNKSWVYASGGSSWIIDSGCTNHMTGEKKMFTSYVKNKDSQDSIIFGDGNQGKDKSETQGTLKRFLRRAQNEFELKVKKIRSDNGSEFKNLQVEEFLEEEGIKHEFSAPYTPQQNGVVERKNRMLIDMARTMLGEFKTPESFWTEAVNTACHTINRVYLHRLLKKTSYELLTGNKPNVSYFRVFGSKCYILVKKGINSKFAPKAVEGFLLGYDSNTKAYRVFNKSSGLVEVSSDVVFDETNGSPREKVVDLDDVDEEDVPTAAIRTMAIGEVRPQEQDKRDQPSPSTEDDEKVPQVEALDQGXAQDDQV

SEQ ID NO: 10226 - protein, 1809 aa, Zea mays
  Clone ID: TF_ZmC4916_409.pep
MDPKGKGIVINDKEKESFVNEPKDDKSNDLGSGHRRKDGKKKKTRRIKEIVYYDSDESSSSQKDDDNNYRKTVNSNFSFDYSRIPHNSNSHLLSIPLGKPPHFDGEDYGFWSHKMRSHLFSLHPSIWEIVENGMKFDSSDSPMLINEQIHRNAQATTVLLASLCREEYNKVSGLDNAKQIWDTLKISHEGNDVTMLTKMELVEGELGRFAMIRGEDHLALTEPRDDKSNNSGSGHKRKDGKKKKTRRIKEIVYYDSDESSSSQKNDDNDYRKTVNSNFSFDYSRIPHSSNSHLLSIPLGKPPHFDGEDYGFWSHKMRSHLFSLHPSIWEIVENGMKFDSSDSPMFINEQIHKNAQATTVLLASLCREEYNKVSGLDNAKQIWDTLKISHEGNDITMLTKMELVEGELGRFAMIRGEEPTQTYNRLKTLINKIRSYGSTRWTDHDVVRLMLRSFTVLDPHLVNNIRENPRYTMMTPEEVLGKFVSGRMMIKEARYVDDALNGPIHEPQPIALKASRSKEALPSKVAQIEAAGLNDEEMALIIKRFKTVLKGRNGQPSKTKTKGKRSCFKCGKLGHFIANCPDNESDQEKGNKREKKKHYKKAKGEAHLGKEWDSDCSSSDSDNEGLAATAFNKSTLFPNERHTCLMAREKKICTRNSTYASSSEDESSDEDEVDYSCLFKGLDRSKIDKINELIDALNEKNILLEKQEDLLYEEHDKFVEAQKSYALEVKRNEMLSFELSTCHETISTLKGVNNDLNAKLEVANKSNSCVEHVEICTRCKDVDINACSEHLVSISKLSDEVASLNARLKTSKSDFEKLKFARDAYTVGRHPSIKDGLGFKREAKNLTSHKAPIPAKEKGKAPMATSAKRNHAFLYHDKRQTRNRSYDAFDSYVYDSHAIKDRKVIARKLGAKCKGDKTCIWVPKEIVTNLVGPNKSWVYASGGSSWIIDSGCTNHMTGEKKMFTSYVKNKDSQDSIVFGDGNQGKEKSETQGTLKRFLRRAQNEFELKVKKIRSDNGSEFKNLQVEEFLEEEGIKHEFSVPYTPQQNGVVERKNRTLIDMARTMLGEYKTPECFWTEAVNTACHAINRVYLHRLLKKTSYELLTGNKPNVSYFRVFGSKCYILVKKGRNSKFAPKAVEGFLLGYDSNTKAYRVFNKSSGLVEVSSDVVFDETNGSPREQVVDCDDVDEEDVPTAAIRTMAIGEVRPQEQDERNQPSSSTMVHPPTEDDEQVPQVEALDQGGAQDNHVMEEEVQPAPPTQVRAMIQRDHPVDQILGDISKGVTTRSRLVNFCEHYSFVSSIEPFRVEEALLDPDWVLAMQEELNNFKRNEVWTLVPRPKQNVVGTKWVFRNKQDEHGVVTRNKARLVAKGYAQVAGLDFEETFAPVARLESIRILLAYAAHHSFRLYQMDVKSAFLNGPIKEEVYVEQPPGFEDERYPDHVCKLSKALYGLKQAPRAWYECLRDFLLANAFKVGKADPTLFTKTSDGDLFVCQIYVDDIIFGSTNQKSCEEFSRVMTQKFEMSMMGELNYFLGFQVKQLKEGTFISQTKYTQDLLKRFGMKDAKPAKTPMGTDGHTDLNKGGKSVDQKAYRSMIGSLLYLCASRPDIMLSVCMCARFQSDPKECHLVAVKRILRYLVATPCFGLWYPKGSTFDLVGYSDSDYAGCKVDRKSTSGTCQFLGRSLVSWNSKKQTSVALSTAEAEYVAAGQCCVQLLWMRQTLRDFGYNLSKVPLLCDNESAIRMAENPVEHSRTKHIDIRHHFLRDHQQKGDIEVFHVSTENQLADIFTKPLDEKTFCRLRSELNVLDSRNLD

SEQ ID NO: 10227 - protein, 837 aa, Zea mays
  Clone ID: TF_ZmC4916_428.pep
MDPKGKGMVVNNNEKESIFNEPKDDKPIDSGSSHKRKDGKKKKTRRIKEIKDDDDYEKKKTINSNFSFDYSRIPHSTNAHLLSIPLGKPPHFDREDYGFWSHKMRSHLFSLHPSIWEIVENGMHFDSSDSPMFINEQIHKNAQATTVLLASLCRDEYHKVSGLDNAKQIWDTLKISHEGNDVTMLTKMELVEGELRRFAMIRGEEPTQTYNRLKTLVNKIRSYGSTRWTDHDVVRLMLRSFTVLDPHLVNNIRENPRYTKMTPEEILGKFVSGRMMIKEARYVDDALNGPINEPQPLALKATRSKETLPSKVAQIEAAGLNDEEMALIIKRFKTALKGRKGQPSKTKTKGKRSCFKCGKLGHFIANCPDNDSDQDQGNKREKKKNYKKAKGEAHLGKEWDSDCSSSDSDNEGLAATAFNKSSFFPNEHHTCLMAREKKVYASGGSNWIIDSRCTNHMTGEKKMFTSYVKNKDSQDSIIFGDGNQGKDKSETQETLKHFLRRAQNEFELKVKKIRSDNGSEFKNLQVEEYLEEEGIKHEFSAPYTPQQNGVVERKNRTLIDMARTKLGEFKTPERFWSEAVNTACHAINRVYLHRLLKKTSYELLTGYDSNTKAYRVFNKSSGLVEVSSDVVFDETNGSPREQVVDLDDVDEEDVPTAAIRTMAIGEVRPQEQKEQDQPSSSTMVHPPTQDDEQVHQQEACDQGGSQDDHVMEEETHPAPPTQVRAMIQRDHPVDQILGDISKGVTTQSRLVNFCEHYSFVSSIEPFRVEEALLDPDWVLAMQEELNNFKRNEVWTLVPRPKQNVVGTKWVFVGVLGPTAHPGLPLKVFLGVGRCRQL

SEQ ID NO: 10228 - protein, 1817 aa, Zea mays
  Clone ID: TF_ZmC4916_434.pep
MDPKGKGMVINDKETFVNELNDDKPTDSGSSHKRKDGRKKKTRRIKEIVYYDSDESSSSQKDDDDHDRRKTVNSNFSFDYSRIPQSSNSHLLSIPLGKPPHFDGEDYGFWSHKMRSHLFSLHPSIWEIVENGMKFDSSDSPMLINEQIHRNAQATTVLLASLCREEYNKVSGLDNAKQIWDTLKISHEGNDITMLTKMELVEGELGRFAMIRGEEPTQTYNRLKTLINKIRSYGSTRWTDHDVVRLMLRSFTVLDPHLVNNIRENPRYTMMTPEEVLGKFVSGRMMIKEARYVDDALNGPINEPQPLALKATRSKEALPSKVAQIEAAGLNDEEMALIIKRFKTALKGRKGQPSKTKTKEKRLCFKCGKLGHFIANCPDNDSDQDQGNKREKKKNYKKAKGEAHLGKEWDSDCSSSDSDNEGLTVTAFNKSTLFPNERHTCLMAREKKVCTRNSTYASSSEDESSDEDEVDYSCLFKGLDRTKVDKINELIDALNDKNMLLEKQEDLLYEEHDKFVEAQRSHALEVKRNEMLSCELSSCHETISKLRSINDNLNAKLEIASKSNSCVEIVETCNRCKDFDIDACSDHLVSISKLNEELASLNAQLKTSKNEFDKLKFARDAYTIGRHPSIKDGLGFKREAKNLTSHKALIPAKEKGKAPMASSVQKNHAFMYHDKRQTRNAYRSYNAYNAFDSHAMIASSSFYVHDRNVGRRNVVHNLPRRNVVNVPRRVNEPSTIYHALNDSFAICRKDRKIVARKLGAKCKGYKTCIWVPKDICTNLVGPNMSWVYASGGSSWIIDSGCTNHMTGEKKMFTSYVKNKDSQDSIIFGDGNQGKVKGLVKSLGYNLLSVSQLCNMGYNCLFTNVDVSVFRRSDGSLAFKGVLDGKLYLVDFAKEEADLDACLIAKTSMGWLWHRRLAHVGMKNLHKLLKGEHVIGLTNVQFEKYRPCAACQAGKQVGGAHHSKNVMTTSRPLELLHMDLFGPVAYLSIGGSKYGLVIVDDFSRFTWVFFLQDKSETQGTLKRFLRRAQNEFELKVKKIRSDNGSEFKNLQVEEFLEEEGIKHEFSAPYTPQQNGVVERKNRTLIDMARTMLGEFKTPERFWSEAVNTACHAINQVYLHRLLKKTSYELLTGNKPNVSYFRVFGSKCYILVKKVRNSKFAPKAVEGFLLGYDSNTKAYRVFNKSSGLVEVSSDVVFDETNGSPREQVVDLDDVDDEDVPTAAIRTMTIGDVRPREQLEQDQLSSSTMVHPPTQDDEQVPQVEAHDQGGAQDVQVEEEEAQSAPPTQVRAVIQRDYPVDQILGDISKGVTTRSRLVNFCEHYSFVSSIEPFKVEEALLDPDWVLAMQEELNNFKRNEVWTLDEHRVVTRNKARLVAKGYAQVTGLDFEETFAPVARLESIRILLAYASHHSFRLFQMDVKSAFLNGPIKEEVYVEQPPGFEDERYPDHVCKLSKALYGLKQAPRAWYECLRDFLIANAFKVGKADPTLFTKTCDGDLFVCQIYVDDIIFGSTNQKSCEEFSRVMTQKFEMSMMGELNYFLGFQVKQLKDGTFISQTKYTQDLLKRFGMKDAKPAKTPMGTDGHTDLNKGGKSVDQKAYRSMIGSLLYLCASRPDIMLSVCMCARFQSDPKECHLVAVKRILRYLVATPCFGLWYPKGSTFDLVGYSGSDYAAYKVDRKSTSGTCQFLGRSLVSWNSKKQTSVALSTAEAEYVAAGQCCAQLLWMRQTLRDFGYNLSKVPLLCDNESAIRMAENPVEHSRTKHIDIRHQFLRDHQQKGDIEVFHVSTENQLADIFTKPLDEKTFCRLRSELNVLDSRNLD

SEQ ID NO: 10229 - protein, 1669 aa, Zea mays
  Clone ID: TF_ZmC4916_454.pep
MDPKGKGIVINDKEKESFVNEPKDDKPTDSGSGQRRKEGKKKKTRRIKEIVYYDSDESTSSQKDEDHNDYERRKPVNSNFSFDYSRIPHSSNSHLLSIPLGKPPHFDGEDYGFWSHKMRSHLFSLHPSIWEIVESGMHFDSSDSPMFINEQIHKNAQATTVLLASLCRNEYHKVSGLDNAKQIWDTLKISHEGNDVTLLTKMELVEGELGRFAMIRGEEPTQTYNRLKTLINKIRSYGSTRWTDHDVVRLMLRSFTVLDPHLVNNIRENPRYTKMSPEEVLGKFVSGRMMIKEARYVDDALNGPINEPQPLALKATRSKEALPSKVAQIEAAGLNDEEMALIIKRFKTALNGRKGQPSKTKTKGKRSCFKCGKLGHFIANCPDNESDQEKGNKREKKKQYKKAKGEAHLGKEWDSDCSSSDSDNEGLAATAFNKSALFPNERLTCLMAREKKVSTQDSTYASSSDSESSDDDIDYSCLFKGLDRSKIDKINELIDALNEKDRLLEKQEDLLYDEHDKFVEAQKSYALEVKRNEMLSYELSTCHETISTLQGVNNDLNAKLEVANKSNSCVEHVEICTRCKDFDINACSEHLVSISKLNDELASLNAQLKTSKNDFDKLKFARDAYTIGRHPSIKDGLGFKREAKNLTSHKAPIPAKEKGKAPMATSAKRNHAFLYHDRRQTRNVSHDAYDSYVYDSHTMFAPSSSYVYDRNVTRRNVVPKRNAIHHVPRRNVIHAPRKIANETSTIYYALNASFAICRKDKKIVARKLGAKCKGDKTCIWVPKDICTNLVGPNMSWVYASGGSSWIIDSRCTNHMTGEKKMFTSYVKNKDSQDSIIFGDGNQGKDKSETQGTLKRFLRRAQNEFELKVKKIRSDNGSEFKNLQVEEFLEEEGIKHEFSAPYTPQQNGVVERKNRTLIDMARTMLGEFKTPECFWTEAVNTACHAINRVYLHRLLKKTSYELLTGNKPNVSYFRVFGSKCYILVKKGRNSKFAPKAVEGFLLGYDSNTKAYRVFNKSSGLVEVSSDVVFDETNGSPIEQVVDCDDVDEEDVPTAAIRTMAIGEVRPQEQDERDQPSSSTMVQPPTKDDEQVPQVEALDQGGAQNDQVIEEEAQPAPPTQVRAMIQRDHPVDQILGDISKGVTTRSRLVNFCEHYSFVSSIEPFRVEEALLDPDWVLAMQEELNNFKRNEVWTLVPRPKQNVVGTKWVFRNKQDEHGVVTRNKARLVAKGYAQVAGLDFKETFAPVARLESIRILLAYAAHHSFRLFQMDVKSAFLNGPIKEEVYVEQPPGFEDERYPDHVCKLSKALYGLKQAPRAWYECLRDFLIANAFKVGKADPTLFTKTCNGDLFVCQIYVDDIIFGSTNQKSCEEFSRVMTQKFEMSMMGELNYFLGFQVKQLKDGTFISQTKYTQDLLKRFGMKDAKPAKTPMGTDGHTDLNKGGKSVDQKAYRSMIGSLLYLCASRPDIMLSVCMCARFQSDPKECHLVAVKRILRYLVATPCFGLWYPKGSTFDLVGYSDSDYAGCKVDRKSTSGTCQFLGRSLVSWNSKKQTSVALSTAEAEYVAAGQCCAQLLWMRQTLRDFGYNLSKVPLLCDNESAIRMAENPVEHSRTKHIDIRHHFLRDHQQKGDIEVFHVSTENQLADIFTKPLDEKTFCRLRSELNVLDSRNLD

SEQ ID NO: 10230 - protein, 1661 aa, Zea mays
  Clone ID: TF_ZmC4916_471.pep
MDPKGKGIVINDKEKESFVNEPKDDKPTDSGSGHKRKDGKKKKTRRIKEIVYYDDSDESTSSQKDDDNDYRKTVNSNFSFDYSRIPHSSNSHLLSIPLGKPPHFDGEDYGFWSHKMRSHLFSLHPSMWEIVENGMKFDSSDSPMLINEQIHRNAQATTVLLASLCREEYNKVSGLDNAKQIWDTLKISHEGNDITMLTKMELVEGELGRFAMIRGEEPTQTYNRLKTLINKIRSYGSTRWTDHDVVRLMLRSFTVLDPHLVNNIRENPRYTMMTPEEVLGKFVSGRMMIKEARYVDDALNGPINEPQPLALKATRSKEMLPSKVAQIEAAGLNDEEMALIIKRFKTALKGRKGQPSKTKTKGKRSCFKCGKLGHFIANCPDNDSDQDQGNKREKKKNYKKAKGEAHLGKEWDSDCSSSDSDNEGLAATAFNKSSLFPNERHTCLMAREKKVSTRDSTYASSSDNESSDDDDIDYSCLFKGLDRSKIDKINELIDALNDKNRLLEKQEDLLYDEHDKFVSAQNSLALEIKRNEMLSGELSTCHNTISTLEGVNNDLNAKLEVANKSNSCEEYVVICTRCKDFDIDACSEHLVSISKLNDELASLNAQLKTSKNDFDKLKFARDAYTIGRHPSIKDGLGFKREAKNLTSHKAPISAKEKGKAPMASSTKRNHAFMYHDRRQTRNAYRNNNAYDDFDPHAMFASSSSYMHGRNMSRRNAIHHVPKKNIIHAPRKVVNEPSTIYCALNASFAICRKDRKIIARKLGAKCKGDKTCIWVPKDICTNLVGPNMSWVYASGGSSWIIDSGCTNHMTGEKKMFTSYVKNKDSQDSIIFGDGNQGKDKSETQGTLKRFLRRAQNEFELKVKKIRSDNGSEFKNLQVEEFLEEEGIKHEFSAPYTPQQNGVVERKNRTLIDMARTMLGEFKTPECFWSEAVNTACHAINRVYLHRLLKKTSYELLTGNKPNVSYFRVFGSKCYILVKKSRNSKFAPKAVEGFLLGYDSNTKAYRVFNKSSGLVEVSSDVVFDETNGSPREQVVDLDDVDEEDVPTAAMRTMAIGDVRPQEQLEQDQPSSSTMMHPPTQNDEQVHQEECGQGGAQDDHVMEKEAQPAPPTQVRAMIQRDHPVDQILGDISKGVTTRSRLVNFCEHYSFVSSIEPFRVEEALLDPDWVLAMQEELNNFKRNEVWTLVPRPKQNVVGTKWVFRNKQDEHGVVTRNKARLVAKGYAQVAGLDFEETFAPVARLESIRILLAYAAHHSFRLYQMDVKSAFLNGPIKEEVYVEQPSGFEDERYPDHVCKLSKALYGLKQAPRAWYECLRDFLIVNSFKVGKADPTLFTKTCDGDLFVCQIYVDDIIFDSTNQKSCQEFSRVMTQKFEMSMMGELNYFLGFQVKQLKDGTFISQTKYTQDLLKRFGMKDAKPAKTPMGTDGHTDLNKGGKSVDQKAYRSMIGSLLYLCASRPDIMLSVCMCARFQSNPKECHLVAVKRILRYLVATPCFGLWYPKRSTFDLVGYSDSDYAGCKVDRKSTSGTCQFLGRSLVSWNSKKQTSVALSTAEAEYVATGQCCAQLLWMRQTLRDFGYNLSKVPLLCDNESAIRMAENPVEHSRTKHIDIRHHFLRDYQQKGDIEVFHVSTENQLADIFTKPLDEKTFCRLRSELNVLDSRNLD

SEQ ID NO: 10231 - protein, 1574 aa, Zea mays
  Clone ID: TF_ZmC951_358.pep
MSGDHAKKEMGTGEKPITSHGEAPSGESYNKGKGKEKESPSHKSRRSGDKKKKKMRKVVYYETDSSSPSTSGSDTPSVTSKRHERKKFSKIPLRYPRIPKHTPLLSVPLGKPPMFDGEDYARWSDMMRYHLTSLHKRDEDYDEDEVAQIMHFNSQATTILLASLSREEYNKVQGLNSAKEIWDVLKTAHEGDEVTKITKRETIEGELDRFRLRQGEEPQDMYNRLKTLVNQVRNLGSKKWDDHEMVKVILRSLVFLNPTQVQLIRGSKKINELDGPSTSEAQPVAFKATEEKKEKSTSSRTPIDASKLDNEEMTLIIKSFSQILTQRRGKDYKPRSKKVCYKCGKPGHFISKCPLSSDSDRGDDKKGRRKEKKRYYKKKGGDAHVCREWDSDESSTDSSSDEDAANIAVTKGLLFPNVGHNSIHEKDELLDTQEDFLIKENKKHVKVKNAYALEVEKCEKLTSELGTSHDLIANLRNENARLITKVDSNACDVSIPNLRNDNVDLLAKIEELNISLASLRIENEKLLAKAKELDVCNASISDLRDNNDILCAKIVELNSCKPSTSTTEHVTICTRCRDINIDAIHDHMALIKQQNDHIAKLDAKIAEHDLENEKFKFARSMLYSGRRPGIKDDIGFQKGDNIKLNAPPKRLSNFVKGKAPMPQDNEGYIFYPAGYPESKIRRIHSRKSHSGPNHAFMYKGETSSSRQSTHAKLPKKKTPSASNDHNISFKTFDASYVLTNKSGNVVAKYVGGKHKGSKTCVWVYASGGSSWIIDSGCTNHMTGEKKMFSSYEKNQDPQRAITFEDGNQDVGVTVFRRSDDSIAFKGVLEGQLYLVDFDRAELDTCLIAKTNMGWLWHRRLAHVGMKNVHKLLKGEHILGLTNVHFEKDRICSACQAGKQVGVHHPHKNIMTTDRPLELLHMDLFGPIAYISIGGRKISYPRNLNGFLRRAQNEFGLRIKKIRSDNGTEFKNSQIEGFLEEEGIKHEFSSPYTPQQNGVVERKNRTLLDMARTMLDEYKTSDRFWAEAVNTACYAINRLYLHRILKKTSYELLIGKKPNISYFRVFGSKCFILVKRGRKSKFAPKTVEGFLLGYDSNTRAYRVFNKSSGQVEVSCDVVFDETNGSQVEQVDLDEIGDEEAPCVALRNMSIGDVCPKESKEPPNAQDQPSSSTQASPPTQNEDEAQVDEGEDQKDEPPQDDSNDQGGDANDQDKEDAEPRPPHPRVHQAIQRDHPVDTILGDIHKGVTTRSRVAHFCEHYSFVSSIEPHKVEEALQDSDWVVAMQEELNNFTRNEVWHLVPRPNQNVVGTKWVFRNKQDEHGVVTRNKARLVAKGYSQVEGLDFGETYAPIARLESIRILLAYATYHGFKLYQMDVKSAFLNGSIKEEVYVEQPPGFEDSEYPNYVYKLSKALYGLKQAPRAWYECLRDFLITNGFKVGKADPTLFTKTFDNDLFVCQIYVDDIIFGSTNESTCEEFSRIMTQKFEMSMMGELKYFLGFQVKQLQEGTFISQTKYIQDILNKFGMKDAKPIKTPMGTNGHLDLNTGGKFVDQKVYRSMIGSLLYLCASRPDIIEST

SEQ ID NO: 10232 - protein, 1721 aa, Zea mays
  Clone ID: TF_ZM3612.C6.o4.fg.pep
MDPKGKGMVINDKEKESFVNEPNDDRSTDSGSGHKRKDERKKKTRRIKEIVYYDSDESSSSQKDVDDYDKRKMVNSNFSFDYSRIPHSSNAQLLPIPLGKPPHFDGEDYGFWSHKMCTHLFSLHPSIWEIVESGMKFDSSDSPVFINEQIHKNAQATTVLLASLCRDEYHKVSGLDNAKQIWDTLKISHEGNDVTLLTKMELVEGELGRFAMIRGEEPTQTYNRLKTLINKIRSYGSTRWTDHDVVRLMLRSFTVLDPHLVNNIRENPRYTKMSPEEVLGKFVSGRMMIKEARYVDDALNGPINEPQPLALKATRSKEALPSKVAQIEAAGLNDEEMALIIKRFKTVLKGRKGQPSKTKAKGKRSCFKCGKLGHFIANCPDNDSDQDQGNKREKKKNYKKAKGEAHLGKEWDSDCSSSDSDNEGLAATAFNKSSLFPNERHTCLMAREKKVSTHNTSTYASSSEDESSDDDEIDYSCLFKGLDRTKVDKINELIDALNDRNILLEKQEDLLYEEHDKFVEAQKSLALEIKRNEMLSSELSSCHETIAKLKSFNDDLNAKLEVASKSNSCVEIVETCNRCKDFDIDACSDHLVSISKLNDELASLNAQLKTSKNEFDKLKFARDAYTIGRHPSIKDGLGYKREAKNLTSHKAPISAKEKGKAPMASSVQKNHAFMYHDRRQPRNAYRSCNAYNVFDSHAMFASSSSYVHDRNVGRRNVIHNMPRKNVVNVPRKVNEPSTIYHALNASFAICRKDRKIVARKLGARCKGDKTCIWVPKDICANLVGPNMSWVYASGGSSWIIDSGCTNHMTGEKKMFTSYVKNKDSQDSIIFSDGNQGKVKGLGKIAISNEHSISNVFLVESLGYNLLSVSQLCNMGYNCLFTNVDVSVFRRCDGSLAFKGVLDGKLYLVNFAKEEAGLDACLMAKTCMGWLWHRRLAHVGMKNLHKLLKGEHVIGLTNVHFEKDRPCAACQAGKQVGSSHHTKNVMTTSRPLELLHMDLFGPVAYLSIGGSKYGLVIVDDFSRFTWVFFLQDKSETQGTLKRFLRRAQNEFELKVKKIRSDNGSEFKNLQVEEFLEEEGIKHEFSAPYTPQQNGVVERKNRTLIDMARTMLGEFKTPKCFWSEAVNTACHAINRVYLHRLLKKTSYELLTGNKPNVSYFRVFGSKCYILVKKGRNSKFAPKAVEGFLLGYDSNTKAYRVFNKSSGLVEVSSDVVFDETNGSPREQVVDLDDVDEEDVPTAAIRTMAIGDVRPQEHLEQDQPSSSTMPFRVEEALLDPDWVLAMQEELNNFKRNEVWTLVPRPKQNVVGTKWVFHNKQDEHGVVTRNKARLVAKGYAQVAGLNFEETFAPVARLESIRILLAYAAHHSFRLYQMDVKSAFLNGPIKEEVYVEQPPGFEDERYPDHVCKLSKALYGLKQAPRAWYECLRDFLIANAFKVGKADPTLFTKTCDSDLFVCQIYVDDIIFGSTNQKSCEEFSRVMTQKFEMSMMGELTYFLGFQVKQLKDGTFISQTKYTQDLLKRFGMKDAKPAKTPMGTNGHTNLNKGGSLLYLCASRPDIMLSVCMCARFQSDPKECHLVAVKRILRYLVATPCFGIWYPKGSNFDLIGYSDSDYAGCKVDRKSTSGTCQFLGRSLVSWNSKKQTSVALSTAEAEYVAAGQCCAQLLWMRQTLRDFGYNLSKVPLLCDNESAIRIAENPVEHSRTKHIDIRHHFLRDHQQKGDI

SEQ ID NO: 10233 - protein, 1364 aa, Zea mays
  Clone ID: TF_ZM3654.C1.o3.fg.pep
MDPKGKGIVINDKEKESFVNEPKNDKPTDSGSGHKRKDGKKKKTRRIKEIVYYDDSDESTSSQKDDDNDYRKTVNSNFSFDYSRIPHSSNSHLLSIPLGKPPHFDGEDYRFWSHKMRSHLFSLHPSIWEIVENGMKFDSSDSPMLINEQIHRNAQATTVLLASLCREEYNKVSGLDNAKQIWDTLKISHEGNDITMLTKMELVEGELGRFAMIRGEEPTQTYNRLKTLINKIRSYGSTRWTDHDAVRLMLRSFTVLDPHLVNNIRENPRYTTMTPEEVLGKFVSGRMMIKEARYVDDALNGPINEPQPLALKATRSKEMLPSKVAQIEAAGLNDEEMALIIKRFKTALKGRKGQPSKTKTKGKRSCFKCGKLGHFIANCPDNDSDQDQGNKREKKKNYKKAKGEAHLGKEWDSDCSSSDSDNEGLAATAFNKSSLFPNERHTCLMAREKKVYASGGSSWIIDSGCTNHMTGEKKMFTSYVKNKDSQDSIIFGDGNQGKVKGLVESLGYNLLSVSQLCNMGYNCLFTNIDVSVFRRSDGSLAFKGVLDGKLYLVEFAKEETGLDACLIAKTSMGWLWHRRLAHVGMKNLHKLLKGEHVIGLTNVQFEKDRPCAACQAGKQVGGAHHSKNVMTTSRPLELLHMDLFGPVTYLSIGGSKYGLVIVDDFSRFTWVFFLQDKSETQGTLKRFLRRAQNEFELKVKKIRSDNGSEFKNLQVEEFLEEEGIKHEFSAPYTPQQNGVVERKNRTLIDMARTMLGEFKTPECFWSEAVNTACHTINRVYLHRLLKKTLYELLTGNKPNVSYFRVFGSKCYILVKKGRKSKFAPKAVEGFLLGYDSNTKAYRVFNKSSGLVEVSSDVVFDETNGSPREQVVDCDDVDEEDVPTAAIHTMAIGDVRPQEQKEQDQPYSSTMVLPPTQDDEQVHQQEACDQGGAQDDHVMEEEAQPAPPTQVRAMIQRDHPVDQILGDISKGVTTRSRLVNFCEHYSFVSSIEPFRVEEALLDPDWVLAMQEELNNFKCNEVWTLVPRPKQNVVGTKLFQMDVKNAFLNGPIKEEVYVEQLPGFEDERYPDHVCKLSKALYGLKQAPRAWYECLRDFLIANAFKVGKADPTLFTKTCDGDLFVCQIYVDDIIFGSTNKKSCEEFSRVMTQKFEMSMMGELNYFLGFQVKQLKDGTFISQTKYTQDLLKQFGMKDAKPAKTPMGTDGHTDLNKGDSDYAGCKVDRKSTSGTCQFLGRSLVSWNSKKQTSVALSTAEAEYVAAGQCCAQLLWMRQTLRDFGYNLSKVPLLCDNESAIRMAENPVEHSRTKHIDIRHHFLRDHQQKGDIEVFHVSTENQLADIFTKPLDEKTFCRLRSELNVLDSRNLD

SEQ ID NO: 10234 - protein, 1447 aa, Zea mays
  unsure (1)..(1447): unsure at all Xaa locations
  Clone ID: TF_ZM3667.C6.o2.fg.pep
MDPKGKGMVIDNNEKESILNEPKNDKSTDLGSSHKRKDGKKKKTRHIKEIVYYDDSDESTSSQKDDDNDYRKTVNSNFSFDYSRIPHSSNSHLLSIPLGKPAQFDGEDYGFWSHKMRSHLFSLHPSIWEIVENGMKFDSSDSPMLINEQIHRNAQTTIVLLASLCREEYNKVSGLDNAKQIWDTLKISHDGNDITMLTKMELVEGELGRFAMIRGEEPTQTYNRLKTLINKIRSYGSTRWTDHDVVRLMLRSFTVLDPHLVNNIRENLRYTMMTPEEVLGKFVSGRMMIKEARYVDDALNGPINEPQPLALKATRSKETLPSKVAQIEAAGLNDEEMALIIKRFKTALKGRKGQPSKTKTKGKRSCFKCGKLGHFIANCPDNDSDQDQGNKREKKKNYKKAKGEAHLGKEWDSDCSSSDSDNEGLAATAFNKSSLFPNERHTCLMAREKKVSTQDSTYAFSSDNESSDDDDIDYSCLFKGLDRSKIDKINELIDALNDKNRLLEKQEDLLYEEHDKFVETQKSLALEIKRNEMLSFELSTCHETISTLKGVXNDLNAKLEVANKSNSCVEHVVICTRCKDFDIDACSEHLVSISKLNDELASLNVYASGGSSWIIDSGCTNHMTGEKKMFTSYVKNKDSQDSIIFGDGNQGKNKSETQGTLKRFLRRAQNEFELKVKKIRSDNGSEFKNLQVEEFLEEEGIQHEFSAPYTPQQNAVNTACHAINRVYLHRLLKKTSYELLTGNKPNVSYFRVFGSKCYILVKKGRNSKFAPKAVEGFLLGYDSNTKAYRVFNKSSDLVEVSSDVVFDETNGSPREQVVDLDDVDEEDVPTAAIRTMAIGDVRPQEQDEQDQPSSSTMVHPPTQDDEQVHQQETCDQGGAQDDHVMGEEAQPAPPTQVRAMIQRDHPVDQILGDISKGVTTRSRLVNFCEHYSFVSFIEPFRVEEALLDPYWVLAMQEELNNFKRNEVWTLVPRPKQNVVGTKWVFRNKQDEHGVVTRNKARLVAKGYAQVAGLDFEETFAPVARLESIRILLAYAAHHSFRLFQMDVKSAFLNGPIKEEVYVEQPPGFEDERYPDHVCKLSKALYGLKQAPRAWYECLRDFLIANAFKVGKADPTLFTKTCDGDLFVCQIYVDDIIFGSTNKKSCEEFSRVMTQKFEMLMMGELNYFLGFQVKQLKDGTFISQTKYTQDLLKRFGMKDAKPAKTPMGTDGHTDLNKGGKSVDQKAYRSMIGSLLYLCASRPDIMLSVCMCARFQYDPKECHLVAVKRILRYLVATPCFGLWYPKGSTFDLIGYSDSDYAGCKVDRKSTSGTCQFLGRSLVSWNSKKQTSVALSTAEAEYVVAGQCCAQLLWMRQTLRDFGYNLSKVPLLCDNESVIRMAENPVEHSRTKHIDIRHHFLRDHQQKGDIEVFHVSTENQLADIFTKPLDEKTFCRLRSELNVLDSRNLD

SEQ ID NO: 10235 - protein, 865 aa, Zea mays
  Clone ID: TF_ZM4163.C7.o1.fg.pep
MDPKGKGIVINDKEKESFVNEPRDDKSNDSSSGHRRKDGKKKKTRRIKEIVYYDSDESTSSQKDEDNDYKQKTVNSNFSFDYSRIPHSSNAHLLPIPLGKPPHFDGEDYGFWSHKMRTHLFSLHPSIWEIVESGMKFDSSDSPSFINEQIHKNAQATTVLLASLCRDEYHKVSGLDNAKQIWDTLKISHEGNDVTLLTKMELVEGELGRFAMIRGEEPTQTYNRLKILINKIRSYGSTRWTDHDVVRLMLRSFTVLDPHLVNNIRENPRYIKMSPEEILGKFVSGRMMIKEARYVDDALNGPIHEPQPIALKATRSKEALPSKVAQIEAAGLNDEEMALIIKRFKTALKGRKGQPSKTKTKGKRSCFKCGKLGHFIANCPDNDSDQDHGSKREKKKHYKKAKGEAHIRKEWDSDCSSSDSDNEGLAATAFNKTSLFPNERHTCLMAREKKVCNQDNVTYDSSSDNESSDDEIDYSSLFKGLDRTKVDKINELIDALNEKDRLLEKQEDLLYEEHDKFVEAQKSYALEVKRNKVLSSELSSCHETIATLKRVNDDLNAKLEVASKSNSCVEHVEICTRCKDFDIDACSEHLVSISKLNDELASLNAQLKTIKSNFDKLKFARDAYTIGRHPSIKDGLGFKREAKNLTSHKAPIPAKEKGKAPMATSAKKNHAFLYHDRRQTRNAYRSYNAYNDLSHAMFASSSSYVYDRNVGRRDVVHNMPRRNVVNIPRKVNEPSTIYHALNASFAICRKDRKVYASGGSSWIIDSGCTNHMTGEKKMFTSYVKNKDSQDSIIFGDGNQGKDKSETQGTLKRFLRRAQNEFELKVKKIRSDNGSEFKNLQVEEFLEEEGIKHEFSAPYTPQQNGV

SEQ ID NO: 10236 - protein, 1613 aa, Zea mays
  unsure (1)..(1613): unsure at all Xaa locations
  Clone ID: TF_ZM4323.C9.o5.fg.pep
MDPKGKGIVINDKEKESFVNEPKDDKHTDSGSGHRRKEGKKKKTRRIKEIVYYDDSDESSSSQKDNDDNDYDKQKTVNSNFSFDYSRIPHSSNAHLLPIPLGKPPHFDGEDYGFWSHKMRTHLFSLHPSIWEIVESGMKFDSSDSPSFINEQIHKNAQATTVLLASLCRDEYHKVSGLDNAKQIWDTLKISHEGNDVTLLTKMELVEGELGRFAMIRGEEPTQTYNRLKILINKIRSYGSTRWTDHDVVRLMLRSFTVLDPHLVNNIRENPRYIKMSPEEILGKFVSGRMMIKEARYVDDALNGPIHEPQPIALKATRSKEALPSKVAQIEAAGLNDEEMALIIKRFKTALKGRKGQPSKTKAKGKRSCFKCGKLGHFIANCPDNDSDQDQVNKREKKKHYKKAKGEAHLGKEWDSDCSSSDSDNEGLAATAFNKSTLFPNERHTCLMAREKKVCTRNSTYASSSEDESSDEDEVDYSCLFKGLDRTKVDKINELIDALNEKNMLLEKQEDLLYEEHDKFIEAQKSYALEVKRNEMLSFELSTCHETISTLKGVNNDLNAKLEVANKSNSCVEHVAICSRCKDFDINACSEHLVSISKLNDELASLNAQLKTSKSDFDKLKFARDAYTVGRHPSIKDGLGFKREAKNLTSHKAPIPAKEKGKAPMATSTKKNHAFLYHDRRQSRSAYRGYNAFDSHHMIASSSSYMHGRNMSRRNAIHHVPRKNVSHAPRKVVNEFSTVYHALNASFAICRKDRKVIARKLGAKCKGDKTCIWVPKKICANLVGPNMSWVYASGGSSWIIDSGCTNHMTGEKKMFTSYVKSKDSQDSIIFGDGNQGKDKSETQGTLKRFLRRAQNEFELKVKKIRSDNGSEFKNLQVEEFLEEEGIKHEFSAPYTPQQNGVVERKNRTLIDMARTMLGEFKTPERFWSEVVNTXACHAINRVYLHRLLKKTXAYRVFNKSLGLVEVSSDVVFDETNGSPREQVVDLDEVDEEDVPTAAIRTMAIGDVRPQEQDEQDQPSSSTMVHSPTQDDEQVHQQEACDQGGAQDDHVMEEEAQPAPPTQVRAMIQRDHPVDQILGDISKGVTTRSRLVNFCEHYSFVSSIEPFRVEEALLDPDWVLAMQEELNNFKRNEVWTLVPRPKQNVVGTKWVFRNKQDEHGVVTRNKARLVAKGYAQVAGLDFEETFAPVARLESIRILLAYAAHHSFRLFQMDVKSAFLNGPIKEEVYVEQPPGFEDERYPDHVCKLSKALYGLKQAPRAWYECLRDFLIANAFKVGKADPTLFTKTCDGDLFVCQIYVDDIIFGSTNKKSCEEFSRVMTQKFEMSMMGELNYFLGFQVKQLKDGTFISQTKYTQDLLKRFGMKDAKPAKTPMGTDGHTDLNKGGKSVDQKAYRSMIGSLLYLCASRPDIMLSVCMCARFQSDPKECHLVAVKRILRYLVATPCLGLWYPKGSTFDLIGYSDSDYAGCKVDRKSTSGTCQFLGRSLVSWKSKKQTSVALSTAEAEYIAAGQCCAQLLWMRQTLRDFGYTLSKVPLLCDNESAIRMAENPVEHSRTKHIDIRHHFLRDHQQKGDIEVFHVSTENQLADIFTKPLDEKTFCRLRSELNVLDSRNLD

SEQ ID NO: 10237 - protein, 1645 aa, Zea mays
  Clone ID: TF_ZM4330.C2.o1.fg.pep
MDPKGKGIMINDKEKESFVNEPKDDKPTDSGSGHRRKDGKKKKTRRIKEIIYYDDSDEFTSSQKDNNDDDYKKKKTVNSNFSFDYSRIPQSTNAHLLSIPLGKPPHFDGEDYGFWSHKMRSHLFSLHPSIWEIVESGMHFDSTDSPMFINEQIHKNAQATTVLLASLCRDEYHKVSGLDNAKQIWDTLKISHEGNDVTMLTKMELVEGELGRFAMIRGEESTQTYNQIKTLVNKIRSYGSTSFTVLDPHLVNNIRENPKYTKMTPEEILGKFVSGRMMIKEERYVDDALNGPINEPQPLALKATRSKETVPSKVAQIEAAGLNDEEMALIIKRFKTALKGCKGQPSKTKTKGKRSCFKCGKLGHFIANCPDNDSDQDQGNKREKKKNYKKAKGEAHLGKEWDSDCSSSDSDNEGLAATAFNKSSLFPNERHTCLMAREKKVCTRNSTYASSSEDESSDEDEIDYSCLFKGLDRTKVDKINELIDALNDKNRLLENQEDLLYEEHDKFVEAQKSHALEVKRNEVLSCELSSCHETISSLRSINDDLNARLEIASKSTSCVEIVETCNRCKDFDINACSKHLVSISKLSDEVASLSAQLKTSKSNFDKLKFSRDAYTVGRHPSIKDGLGFKREAKNLTSHKAPISAKEKGKAPMASSTKKNHAFMYNDRRQSYRSCNAYNAFDAHAYDSYAMFASSSSYMHGRDMPRKNIVHVARKVMDGPSTIYHTLNAFFAICKKDRKIVARKLGAKCKGDKTCIWVPKTIVTNLVGPNKSWVYASGGSSWIIDSGCTNHMTGEKKMFTSYVKNKDSQDSIIFGDGNQGKDKSETQGTLKRFLRRAQNEFELKVKKIRSDNGSEFKNLQVEEFLEEEGIKHEFSAPYTPQQNGVVERKNRTLIDMARTMLGEFKTPECFWSEAVNTACHAINRVYLHHLLKKTSYELLTGNKPNVSYFRVFGSKCYILVKKGRNSKFAPKAVEGFLLGYDSNTKAYRVFNKSSSLVEVSSDVVFDKTNGSPREQVVDCDDVDEEDVLTAAIRTMAIGDVRPQEQKKQDQPSSSTMVHPPTQDDEQVHQQEACDQGGAQDDHVMEEEAQPAPPTQVRAMIQRDHPVDQILGDISKGVTTRSRLVNFCEHYSFVSSIEPFRVEEALLDPDWVLAMQEELNNFKRNEVWTLVPRPKQNVVGTKWVFRNKQDEHGVVTRNKARLVAKGYAQVAGLDFEETFAPVARLESIRILLAYATHHSFRLFQMDVKSAFLNGPIKEEVYVEQPPGFEDERYPDHVCKLSKALYGLKQAPRAWYECLRDFLIANAFKVGKADPTLFTKTCDGDIFVCQIYVDDIIFGSTNKKSCEEFSRVMTQKFKMSMMGELNYFLGFQVKQLKDGTFISQTKYTQDLLKRFGMKDAKPAKTPMGTDGHTDLNKGGKSVDQKAYRSMIGSLLYLCASRPDIMLSVCMCARFQSDPKECHLVAVKRILRYLVATPCFGLWYPKGSTFDLIGYSDSDYAGCKVDRKSTSGTCQFLGRSLVSWNSKKQTSVALSTAEAEYVAAGQCCAQLLWMRQTLKDFGYNLSKVPLLCDNESTIRMAENPVEHSRTKHIDIRHHFLRDHQQKGDIEVFHVSTENQLADIFTKPLDETTFCRLRSELNVLDSWNLD

SEQ ID NO: 10238 - protein, 1817 aa, Zea mays
  Clone ID: TF_ZM4333.C3.o1.fg.pep
MDPKGKGIVINDKEKESFVNEPRDDKSNDSGSGHRRKDGKKKKTRRIKEIVYYDSDESTSSQKDDDHNEYERKKPVNSNFSFDYSRIPQSTNAHLLSIPLGKPPHVDGEDYGFWSHKMRSHLFSLHPSIWEIVESGMHFDSTDSPMFINEQIHKNAQATTVLLASLCRDEYHKVSGLDNAKQIWDTLKISHEGNNVTLLTKMELVEGELGRFAMIRGEEPTQTYNRLKTLINKIRSYGSTRWTDHDVVRLMLRSFTILDPHLVNNIRENPRYTKMSPEEVLGKFVSGRMMIKEARYVDDALNGPINEPQPLALKATRSKEALPSKVAQIEAAGLNDEEMALIIKRFKTVLKGRKGQPSKTKAKGKRSCFKCGKLGHFIANCPDNDSDQDQGNKRERKKNYKKAKGEAHLGKEWDSDCSSSDSDNEGLAATAFNKSSLFPNERHTCLMAREKKVSTHNTSTYASSSEDESSDDDEIDYSCLFKGLDRTKVDKINELIDALNDRNILLEKQEDLLYEEHDKFVEAQKSLALEIKRNEMLSSELSSCHETIAKLKSFNDDLNARLEVASKSNSCVEHVMDCTRCKDFNVDACSEHLVSISKLNDEVASLNAQLKTSKSNFDKLKFARDSYTIGRHPSIKDGLGYKREAKDLTSHKAPISAKEKGKAPMASSAKKNHAFMYHDRRHTRNANRSYNVFDSYAYDSHDMFASSSFYVHGRNVGRRNVVHNMTRRNVVNVPRKVNEPSTIYHALNASFAICRKDRKVIARKLGAKCKGDKTCIWIPKEIVTNLVGPNKSWVYASGGSSWIIDSGCTNHMTGEKKMFTSYVKNKDSQDLIIFGDGNQGKVKGLDVSVFRRCDGSLAFKGILDGKLYLVDFAKEEAGLDACLMAKTCMGWLWHRRLAHVGMKNLHKLLKGEHVIGLTNVHFEKDRPCAACQAGKQVGGSHHTKNVMTTSRPLELLHMDLFGPVAYLSIGGSKYGLVIVDDFSHFTWVFFLQDKSETQGTLKRFIRRAQNEFELKVKKIRSDNGSEFKNLQVEEFLEEEGIKHEFSAPYTPQQNGVVERKNRTLIDMARTMLGEFKTPECFWSEAVNTACHAINRVYLHRLLKKTSYELLTGNKPNVSYFRVFGSKCYILVKKGRNSKFAPKAVEGFLLGYDSNTKAYRVFNKSSGLVEVSSDIVFDETNGSPREQVVDCDDVDEEDVPTAAIRTMAIGEVRPQEQDERDQPSSSTTVHSPTQDDEQVHQKEACDQGGAQDDHVMEEEAQPAPPTQVRAVIQRDHPVDQILGDISKGVTTRSRLVNFCEHYSFVSSIEPFRVEEALLDPDWVLAMQEELNNFKRNEVWTLVPRPKQNVVGTKWVFRNKQDEHGVVTRNKARLVAKGYAQVAGLDFEETFAPVARLESICILLAYAAHHSFRLYQMDVKSAFLNGPIKEEVYVEQPPGFEDERYPDHVCKLSKALYGLKQAPRAWYECLRDFLIANAFKVGKADPTLFTKTCDGDLFVCQIYVDDIIFGSTNQKSCEEFSRVMTQKFEMSMMGELNYFLGFQVKQLKDGTFISQTKYTQDLLKRFGMKDAKPAKTPMGTDGHTDLNKGGKSVDQKAYRSMIGSLLYLCASRPDIMLSVCMCARFQSDPKECHLVAVKRILRYLVATPCFGIWYPKGSNFDLIGYSDSDYAGCKVDRKSTSGTCQFLGRSLVSWNSKKQTSVALSTAEAEYVAAGQCYAQLLWMRQTLRDFGYNLSKVPLLCDNESAIRMAENPVEHSRTKHIDIRHHFLRDHQQKGDIEVFHVSTENQLADIFTKPLDEKTFCRLRNELNVLDSRNLD

SEQ ID NO: 10239 - protein, 665 aa, Zea mays
  Clone ID: TF_ZM4454.C3.o1.fg.pep
MDPKGKGMVINDKEKESFVNEPNDDKLTDSGSGHKRKDGRKKKARRIKEIVYYDSDESSSSQKDDDDYDKRKTVNSNFSFDYSRIPHSSNAQLLPIPLGKPPHFDGEDYGFWSHKMRTHLFSLHPSIWEIVESGMKFDSSDSPMFINEQIHRNAQATTVLLASLCRDEYHKVSGLDNAKQIWDTLKISHEGNDVTLLTKMELVEGELGRFAMIRGEEPTQTYNRLKTLINKIRSYGSTRWTDHDVVRLMLRSFTVLDPHLVNNIRENPRYTKMSPEEVLGKFVSGRMMIKEARYVDDALNGPINEPQPLALKATRSKEALPSKVAQFEAAGLNDEEMALIIKRFKTVLKGRKGQPSKTKAKGKRSCFKCGKLGHFIANCPDNDSDQDQGNKREKKKNYKKAKGEAHLGKEWDSDCSLSDSDNEGLAATAFNKSSLFPNKRHTCLMAREKKVSTHNTSTYASSSEDESSDDDEIDYSCLFKGLDRTKVDKINELIDALNDRNILLEKQEDLLYEEHDKFVEAQKSLALEIKRNEMLSSELSSCHETIATLKSVNDDLNAKLEVASKSNSCVEHVEICTRCKDFDVDACSDHLVSISKLTEELASLNAQLKTSKNEFDKLKFARDAYTIGRHPSIKDGLGFKREAKNLTSHKAPIPAKEKGKAPMAT

SEQ ID NO: 10240 - protein, 662 aa, Zea mays
  Clone ID: TF_ZM4496.C1.o2.fg.pep
MDPKGKGIVINDKEKESFVNEPRDDKSNNSGSGHKRRDGKKKKTRRIKEIVYYDSDESSSSQKDDDHDKQRKPVNSNFSFDYSRIPHSSNSHLLSIPLGKPPHFDGEDYGFWSHKMRSHLFSLHPSIWEIVENGMNFDSSDSPMFINEQIHKNAQATTVLLASLCREEYNKVSGLDNAKQIWDTLKISHEGNDITMLTKMELVEGELGRFAMIRGEEPTQTYNRLKTLINKIRSYGSTRWTDHDVVRLMLRSFTVLDPHLVNNIRENPRYTKMSPEEVLGKFVSGRMMIKEARYVDDALNGPINEPQPFALKATGNKEALLSKVAQIEAAGLNEEEMALIIKRFKTVLKGRNGQPSKTKTKGKRSCFKCGKLGHFIANCPDNESDQEKGNKREKKKQYKKAKGEAHLGKEWDSDCSSSDSDNEGLAATAFNKSALFPNERLTCLMAREKKVSTQDSTYASSSDSESSDDDIDYSCLFKGLDRSKIDKINELIDALNEKDRLLEKQEDLLYDEHDKFVEAQKSYALEVKRNEMLSYELSTCHETISTLQGVNNDLNAKLEVANKSNSCVEHVKICTRCKDFDVDACSEHLVLISKLNKEVASLNAQLKTSKNEVDKIKFARDAYTVGRHPSIKDGLGFKREAKNLTSHKAPIFVKEKGKAPMA

SEQ ID NO: 10241 - protein, 705 aa, Zea mays
  Clone ID: TF_ZM4496.C6.o4.fg.pep
MDPKGKGIVINDKEKESFVNEPRDDKSNDSGSGHKRRDGKKKKTRRIKEIVYYDSDESSSSQKDDDYDKQRKPVNSNFSFDYSRIPHSSNSHLLSIPLGKPPHFDGEDYGFWSHKMRSHLFSLHPSIWEIVENGMKFDSSDSPMFINEQIHKNAQATTVLLASLCREEYNKVSGLDNAKQIWDTLKISHEGNDITMLTKMELVEGELGRFAMIRGEEPTQTYNRLKTLINKIRSYGSTRWTDHDVVRLMLRSFTVLDPHLVNNIRENPRYTMMTPEEVLGKFVSGRMMIKEARYVDDALNGPIHEPQPIALKASRSKEALPSKVAQIEAAGLNDEEMALIIKRFKTVLKGRNGQPSKTKTKGKRSCFKCGKLGHFIANCPDNESDQEKGNKREKKKHYKKAKGEAHLGKEWDSDCSSSDSDNEGLAATAFNKSTLFPNERHTCLMAREKKVGTRNSTYASSSEEESSDEDEVDYSCLFKGLDRSKIDKINELIDALNEKNILLEKQEDLLYEEHDKFVEAQKSYALEVKRNEMLSFELSTCHETISTLKGVNNDLNAKLEVANKSNSCVEHVEICTRCKDFDINACSEHLVSISKLNDELASLNAQLKTSKNDFDKLKFARDAYTIGRHPSIKDGLGFKREAKDLTSHKAPIPAKEKGKAPMASNVQKNHAFMYYDRRQTRNAYRSYNAFDDFDSHAMFAPSSSY

SEQ ID NO: 10242 - protein, 1669 aa, Zea mays
  Clone ID: TF_ZM4551.C4.o7.fg.pep
MDPKGKGIVINDKEKESFVNEPKDDKPTDSGSGQRRKEGKKKKTRRIKEIVYYDSDESTSSQKDEDHNDYERRKPVNSNFSFDYSRIPQSSHSHLLSIPLGKPPHFDGEDYGFWSHKMRSHLFSLHPSIWEIVESGMHFDSSDSPMFINEQIHKNAQATTVLLASLCRNEYHKVSGLDNAKQIWDTLKISHEGNDVTLLTKMELVEGELGRFAMIRGQEPTQTYNRLKTLINKIRSYGSTRWTDHDVVRLMLRSFTVLDPHLVNNIRENPRYTKMSPEEVLGKFVSGRMMIKEARYVDDALNGPINEPQPLALKATRSKEALPSKVAQIEAAGLNDEEMALIIKRFKTALNGRKGQPSKTKTKGKRSCFKCGKLGHFIANCPDNESDQEKGNKREKKKQYKKAKGEAHLGKEWDSDCSSSDSDNEGLAATAFNKSALFPNERLTCLMAREKKVSTQDSTYASSSDSESSDDDIDYSCLFKGLDRSKIDKINELIDALNEKDRLLEKQEDLLYDEHDKFVEAQKSYALEVKRNEMLSFELSTCHETISTLKGVNNDLNAKLEVANKSNSCVEHVEICTRCKDFDINACSEHLVSISKLNDELASLNAQLKTSKNDFDKLKFARDAYTIGRHPSIKDGLGFKREAKNLTSHKAPIPAKEKGKAPMATSAKRNHAFLYHDRRQTRNVSHDAYDSYVYDSHTMFAPSSSYVYDRNVTRRNVVPKRNAIHHVPRRNVIHAPRKIANEPSTIYYALNASFAICRKDKKIVARKLGAKCKGDKTCIWVPKDICTNLVGPNMSWVYASGGSSWIIDSGCTNHMTGEKKMFTSYVKNKDSQDSIIFGDGNQGKDKSETQGTLKRFLRRAQNEFELKVKKIRSDNGSEFKNSQVEEFLEEEGIKHEFSAPYTPQQNGVVERKNRTLIDMARTMLGEFKTPECFWTEAVNTACHAINRVYLHRLLKKTSYELLTGNKPNVSYFRVFGSKCYILVKKGRNSKFAPKAVEGFLLGYDSNTKAYRVFNKSSGLVEVSSDVVFDETNGSPREQVVDCDDVDEEDVPTAAIRTMAIGEVRPQEQDERDQPSSSTMVQPPTKDDEQVPQVEALDQGGAQDDQVIEEEAQPAPPTQVRAMIQRDHPVDQILGDISKGVTTRSRLVNFCEHYSFVSSIEPFRVEEALLDPDWVLAMQEELNNFKRNEVWTLVPRPKQNVVGTKWVFRNKQDEHGVVTRNKARLVAKGYAQVAGLDFEETFAPVARLESIRILLAYAAHHSFRLFQMDVKSAFLNGPIKEEVYVEQPPGFEDERYPDHVCKLSKALYGLKQAPRAWYECLRDFLLANAFKVGKADPTLFTKTCDGDLFVCQIYVDDIIFGSTNQKSCEEFSRVMTQKFEMSMMGELNYFLGFQVKQLKDGTFISQTKYTQDLLKRFGMKDAKPAKTPMGTDGHTDLNKGGKSVDQKAYRSMIGSLLYLCASRPDIMLSVCMCARFQSDPKECHLVAVKRILRYLVATPCFGLWYPKGSTFDLVGYSDSDYAGCKVDRKSTSGTCQFLGRSLVSWNSKKQTSVALSTAEAEYVAAGQCCAQLLWMRQTLRDFGYNLSKVPLLCDNESAIRMAENPVEHSRTKHIDIRHHFLRDHQQKGDIEVFHVSTENQLADIFTKPLDEKTFCRLRSELNVLDSRNLD

SEQ ID NO: 10243 - protein, 1608 aa, Zea mays
  Clone ID: TF_ZM4576.C1.o3.fg.pep
MDPKGKGIVINDKEKESFVNEPKDDKPTDSGSGHRRKEGKKKKIRRIKEIVYYDDSDESSSSQKDNDDNDYDKQKTVNSNFSFDYSRIPHSSNAHLLPIPLGKPPHFDGEDYGFWSHKMRTHLFSLHPSIWEIVESGMKFDSSDSPSFINEQIHKNAQATTVLLASLCRDEYHKVSGLDNAKQIWDTLKISHEGNDVTLLTKMELVEGELGRFAMIRGEEPTQTYNRLKILINKIRSYGSTRWTDHDVVRLMLRSFTVLDPHLVNNIRENPRYIKMSPEEILGKFVSGRMMIKEARSKEALPSKVAKIEAAGLNDEEMALIIKRFKTALKGRKGQPSKTKTKGKRSCFKCGKLGHFIANCPDNDSDQEHRSKREKKKHYKKAKGEAHIGKEWDSDCSSSDSDNEGLAATAFNKSTLFPNERHTCLMAREKKMSTRDTTYVSSSDDESSDEEIDYSNLFKGLDRNKIDKINKLIDALNEKDRLLEKQEDLLYEEHDKFIEAQKSYALEVKRNEMLSFELSTCHETISTLKGVNNDLNAKLEVANKSNSCVEHVVICTRCKDFDIDACSEHLVSISKLNGELASLNAQLKTSKNDFDKLKFARDAYTIGRHPSIKDGLGFKREAKNLTSHKAPIPAKEKGKAPMASNVQKNHAFIYHDRRQSRNAYRNYNAYDDFDSHAMFASSSSYMHGRNMSRRNAIHHVPRKNIIHAPRKVVNEPSTIYHALNASFAICRKDRKVYASGGSSWIIDSGCTNHMTREKKMFTSYVKNKDSQDSIIFGDGNQGKDKSETQGTLKRFLRRAQNEFELKVKKIRSDNGSEFKNLQVEEFLEEEGIKHEFSAPYTPQQNGVVERKNRTLIDMARTMLGEFKTPECFWTEAVNTACHAINRVYLHRLLKKTSYELLTGNKPNVSYFRVFGSKCYILVKKGRNSKFAPKAVEGFLLGYDSNTKAYRVFNKSSGLVEVSSDVVFDETNGSPREQVVDLDDVDEEDVPTAAMRTMAIGDVRPQEHLEQDQPSSSTMVHPPTQDDEQVHQQEACDQGGAQDDHVMEEEAQPAPPTQVRAMIQRDHPVDQILGDISKGVTTRSRLVNFCEHYSFISSIEPFRVEEALLDPDWVLAMQEELNNFKRNEVWTLVPRPKQNVVGTKWVFRNKQDEHGVVTRNKARLVAKGYAQVAGLDFEETFAPVARLESIRILLAYAAHHSFRLFQMDVKSAFLNGPIKEEVYVEQPPGFEDERYPDHVCKLSKALYGLKQAPRAWYECLRDFLIANAFKVGKVDPTLFTKTCDGDLFVCQIYVDDIIFGSTNKKSCEEFSRVMTQKFEMSMMGELNYFLGFQVKQLKDGTFISQTKYTQDLLKRFGMKDAKPAKTPMGTDGHTDLNKGGKSVDQKAYRSMIGSLLYLCASRPDIMLSVCMCARFQSDPKECHLVAVKRILRYLVATPCFGLWYPKGSTFDLIGYSDSDYAGCKVDRKSTSGTCQFLGRSLVSWNSKKQTSVALSTAEAEYVAAGQCCAQLLWMRQTLRDFGYNLSKVPLLCDNESAIRMAENPVEHSRTKHIDIRHHFLRDHQQKGDIEVFHVSTENQLADIFTKPLDEKTFCRLRNELNVLDLRNLD

SEQ ID NO: 10244 - protein, 1506 aa, Zea mays
  unsure (1)..(1506): unsure at all Xaa locations
  Clone ID: TF_ZM4577.C6.o12.fg.pep
MDPKGKGIVINDKEKESFVNKPKDDKPIDSGLGHKHKDGKKKKTRRIKEIVYYDDSDESTSSHKDNDDNDYDKRKTVNSNFSFDYSRIPQSSNSHLLSIPLGKPPHFDGEDYGFWSHKMRSHLFSLHPSIWEIVENGMKFDSSNSPIFINEQIHRNAQATTVLLASLCRDEYHKVSGLDNAKQIWDTLRISHEGNDVTLLTKMELVEGELGRFAMIRGEEPTQTYNRLKTLINKIRSYGSTRWTDHDVVRLMLRSFTVLDPHLVNNIRENPRYTKMSPEEVLGKFVSGRMMIKEARYVDDTLNGPIHEPQSIALKATRSKEALPSKVAQVEAAGLNDEEMALIIKHFKTTLKGRKGQPSKTKTKGKRSCFKCGKLGHFIANCPDNDSDQEKGNKREKKKNYKKTKGEAHIGKEWDSDCSSSDSDNEGLAATAFNKSSLFPNEHHTCLMAKEKKVCTRDTTYASSNDDDSSDDDEIDYSSLFKGLDRIKIGKINELIDALNDKNRLLEKQEDLLYEEHDKFVSAQNSLALEVKRNDMLSCEISTCHETISSLKSINDDLNAKLEKSSKLTSCVEHVVICTRCKDFNVDACSEHLDCIFKINDEVASLNAQLKTSKSEFDKLKFARDAYTIGRHPSIKDGLGFKREAKNLTSHKAPISAKEKGKAPMASSVQKNHAFMYHDRRQSRNTYRSCNAYDAFDSHAMFASSSSYVHDRNVDVSVFRRCDGSLAFKGVLDGKLYLVDFAKEEAGLDACLIAKTCMGWLWHRRLAHVGMKNLHKLLKGEHVIGLTNVHFEKDRPCAACQAGKQEEDKSETQGTLKRFLRRAQNEFELKVKKIRSDNGSEFKNLQVEEFLEEEGIKHEFSAPYTPQQNGVVERKNRTLIDMARTMLREFKTPERFWLEAVNTACHAINMVYLHRLLKKTSYELLTGNKPNVSYFRVFGSKCYILVKKGRTSKFAPKAVEGFLLGYDSNTKAYRVFNKSSGLVEVSSDVVFDETNGSPREQVVDLDDVDEEDVPTAAMRTMAIGDVRPLEQKEQDQPSSSTMVHPPTQDDKQVPQVEAHDQGGAQDVQVEEEEAPQAPPTQVRATIQRDHPIDQILGDISKGVTTRSRLVNFCEHYSFVSSIEPFRVEEALLDPDWVLAMQEELNNFKRNEVWTLDEHGXVTRNKARLVAKGYAQVXRLYQMDVKSAFLNGPIKEEVYVEQPPGFEDERYPNHVCKLSKALYGLKQAPRAWYECLRDFLIANAFKVGKADPTLFTKTCDGDLFVCQIYVDDIIFGSTNQKSCEEFSRQLKDGTFISQTKYTQDLLKRFGMKDAKPAKTSMGTDGHTDLNKGVATPCFGIWYPKGSNFDLIGYSDSDYARCKVDRKSTSGMCQFLVRSLVSWNSKKQTSVALSTAEVEYVAAGQCCAQLLWMRQTLRDFGYNLSKVSLLCDNESPIRIAENPVEHSRTKHIDIRHHFLRDHQQKGDIEVFHVSTENQLADIFTKPLDEKTFCRLRSELNILDSRNLD

SEQ ID NO: 10245 - protein, 641 aa, Zea mays
  unsure (1)..(641): unsure at all Xaa locations
  Clone ID: TF_ZM4581.C2.o1.fg.pep
MDPKGKGIVINDKEKESFVNEPRDDKSNNSGSGHKRKDGKKKKTRRIKEIVYYDSDESSSSQKDDDNDYRKTVNSNFSFDYSRIPHSSNSHLLSIPLGKPPHFDGEDYGFWSHKMRSHLFSLHPSIWEIVENGMKFDSSDSPMFINEQIHKNAQATTVLLASLCREEYNKVSGLDNAKQIWDTLKISHEGNDITMLTKMELVEGELGRFAMIRGEEPTQTYNRLKTLVNKIRSYGSTRWTDHDVVRLMLRSFTVLDPHLVNNIRENPRYTKMSPEEILGKFVSGRMMIKEARYVDDALNGPIHEPQPIALKASRSKEALPSKVAQIEAAGLNDEEMALIIKRFKTVLKGRNGQPSKTKTKGKRSCFKCGKLGHFIANCPDNESDQEKGNKREKKKHYKKAKGEAHLGKEWDSDCSSSDSDNEGLAATAFNKSTLFPNERHTCLMAREKKVCTRNSTYASSSEDESSDEDEVDYSCLFKGLDRSKIDKINELIDALNEKNILLEKQEDLLYEEHDKFVEAQKSYALEVKRNEMLSFELSTCHETISTLKGVNNDLNAKLEVANKSNSCVEHVEICTRCKDFDINACSEHLVSISKLNDELASLNAQLKTSKNDFDKLKFARDAYTIGRHPSIKXGLGFKREA

SEQ ID NO: 10246 - protein, 1617 aa, Zea mays
  Clone ID: TF_ZM4588.C1.o9.fg.pep
MDPKGKGMVVNNNEKESIFNESKDDKPTDSGSGHKRKDRKKKKTRRIKEIVDYDSDESSSSQKDDDDYEKKKTVNSNFSFDYSRIPQSTNAHLVSIPLGKPPHFDGEDYGFWSHKMRSHLFSLHPSIWEIVESGMHFDSTDSPMFINEQIHKNAQATTVLLASLCRDEYHKVSGLDNAKQIWDTLKISHEGNDVTMLTKMELVEGELGRFATIRGEEPTQTYNRLKTLVNKIRSYGSTRWTDHDVVRLMLRYFTVLDPHLVNNIRENPRYTKMTPEEILGKFVSGRMMIKEARYVDDTLNGPINEPQPLALKATRSKDTLPSKVAQIEAAGLNDEEMALIIKRFKTALKGRKGQPSKTKTKGKRSCFKCGKLGHFIANCPDNDSDQDQGNKREKKKNYKKAKGEAHLGKEWDSDCSSSDSDNEGLAATAFNKSSLFPNERHTCLMAREKKVCTRNTTYASSSEDESSDEDEIDYSCLFKGLDRTKVDKINELIDALNDKNRLLEKQEDMLYEEHDKFVEAQKSHALEVKRNEMLSCELSSCHETISNLRSINDDLNAKLEIASKSTSCVENDVICNRCKDFDIDACSEHIASIAKLNDEIASLNAQLKTSKSKFDKLKFARDAYTIGRHPSIKDGLGFKREVKNLTSHKASISTKEKGKAPMASNAKKNHAFMYHDRKFSRNVHDDRSCNAYNAFDSHAMFASSSSYMHGRNVFRRNVVHHMPRRNVGSTPRKVNEPSTIYHACDASFAICRKDRKVYASGGSSWIIDSGCTNHMTGEKKMFTSYVKNKDTQDSIIFGDGNQGKLSPLDIIYYLRSDGSLAFKGVLDGKLYLVDFAKEEAGLDACLIAKTSMGWMWHRRLAHVGMKNLHKLLKGEHVIGLTNVQFEKDRPCAACQAGKQVGGAHHSKNVMTTSRPLELLHMDLFGPVAYLSIGGSKYGLVIVDDFSRFTWVFFLQDKSETQGTLKRFLRRAQNEFELKVKKIRSDNGSEFKNLQVEEFFEEEGIKHEFSTPYTPQQNGVVERKNRTLIDMARMMLEEFKTPERFWSEAVNTACHAINRVYLHRLLKKTSYELLTGNKPNVSYFRVFGSKCYILVKKGRNSKFAPKAVEGFLLGYDSNTKAYRVFNKSSGLVEVSSDVVFDETNGSPREQVVDLDDVDEEDVPTAAIRTMAIGEVRPQEQKEQDQPSSSTMVHPPTQDDEQIHQQEACDQGGAQDDHVMEEEAQPAPPTQVRAMIQRDHPVEQILGDISKGVTTRSRLVNFCEHYSFVSSIEPFRVEEALLDPDWVLAMQEELNNFKRNEVWTLVPRPKQNVVGTKLFQMDVKSAFLNGPIKEEVYVEQPPGFEDERYPDHVCKLSKALYGLKQAPRAWYECLRDFLIANAFKVGKADPTLFTKTCDGDLFVCQIYVDDIIFGSTNKKSCEEFSRVMTQKFEMSMMGELNYFLGFQVKQLKDGTFISQTKYTQVLLKRFGMKDAKPAKTPMGTDGHTDLNKGGKSVDQKAYRSMIGSLLYLCASRPDIVLSVCMCARFQSDPKECHLVAVKRILRYLVATPCFGLWYPNGSTFDLIGYSDSDYAGCKVDRKSTSGTCQFLGRSLVSWNSKKQTSVALFTAEAEYVAAG

SEQ ID NO: 10247 - protein, 1719 aa, Zea mays
  unsure (1)..(1719): unsure at all Xaa locations
  Clone ID: TF_ZM4592.C3.o1.fg.pep
MDPKGKGMVVDNNEKESIFNEPKNDKSTDSGSSHKRKDGKKKKTRRIKEIVYYDSDESSSSQRDDDNDYRKTVNSNFSFDYSRIPHSSNSHLLSIPLGKPPHLDGEDYGFWSHKMRSHLFSLHPSIWEIVENGMKFDSSDSPMFINEQIHKNAQATTVLLASLCRDEYNKVSGLDNAKQIWDTLKISHEGNDITMLTKMELVEGELGRFAMIRGEEPTQTYNRLKTLINKIRSYGSTRWTDHDVVRLLLRSFTILDPHLVNNIRENPRYTKMSPEEVLGKFVSGRMMIKEARYVDDALNGPINEPQPLALKATRSKEALPSKVAQIEAAGLNDEEMALIIKRFKTALKGRKGQPSKTEAKGKRSCFKCGKLGHFIANCPDNDSDQDQGNKREKKKHYKKAKGEAHIGKEWDSDCSSSDSDNEGLAATAFNKSTLFPNERHTCLMAREKKVCTRNSTYASSSEDESSDEDEVDYSCLFKGLDRTKVDKINELIDALNDKNMLLEKQEDFLYEEHDKFVEAQRSHALEVKRNEMLSCELSSCHETISKLRSINDDLNAKLEIASKSTSCVENVVTCTRCKDINIDAYSEHLACISKLNEEVASLNAQLETSKSDFDKLKFARDAYTIGRHPSIKDGLGFKREAKNLTSHKAPIPAKEKGKAPMASSVQKNHAFMYHDKRQTRNAYRSYNTYDDFDSHDMFASSSFYVHNRNVGRRNAVHNMPRRNVVNVPRRVNEPSTIYHALNASFAICRKDRKIVARKLGARCKGDKTCIWVPKDICTNLVGPNMSWVYASGGSSWIIDSGCTNHMTGEKKMFTSYVKNKDSQDSIIFGDGNQGKVKGLDVSVFRRSDGSLAFKGVLDGKLYLVDFAKEEAGLDACLIAKTSMGWLWHRRLAHVGMKNLHKLLKGEHVIGLTNVQFEKDRPCAACQAGKQVGGAHHSKNVMTTSRPLELLHMDLFGPVAYLSIGGSKYGLVIVDDFSRFTWVFFLQDKSETQGTLKRFLRRAQNEFELKVKKIRSDNGSEFKNLQVEEFLEEEGIKHEFSAPYTPQQNGVVERKNRTLIDMARTMLGEFKTPECFWSEAVNTACHAINRVYLHRLLKKTSYELLTGNKPNVSYFRVFGSKCYILVKKGRNSKFAPKAVEGFLLGYDSNTKAYRVFNKSSGLVEVSSDVXEEDVPTAAIXTMAIGEVRPQEQDERDQPSSSTMVHPPTQDDEQXVEEALLDPDWVLAMQEELNNFKRNEVWTLVPRPKQNVVGTKWVFRNKQDEHGVVTRNKARLVAKGYAQVAGLDFEETFAPVARLESIRILLAYAAHHSFRLFQMDMKSAFLNGPIKEEVYVEQPPGFEDERYPDHVCKLSKALYGLKQAPRAWYECLRDFLIANAFKVGKADPTLFTKTCDGDLFVCQIYVDDIIFGSTNKKSCEEFSRVMTQKFEMSMMGELNYFLGFQVKQLKDGTFISQTKYTQDLLKRFGMKDAKPAKTPMGTDGHTDLNKGGKSVDQKAYRSMIGSLLYLCASRPDIMLSVCMCARFQSDPKECHLVAVKRILRYLVATPCFGLWYPKGSTFDLIGYSDSDYAGCKVDRKSTSGTCQFLGRSLVSWNSKKQTSVALSTAEAEYVAAGQCCAQLLWMRQTLRDFGYNMSKVPLLCDNESAIRMAENPVEHSRTKHIDIRHHFLRDHQQKGDIEVFHVSTENQLADIFTKPLDEKTFCRLRSELNVLDSRNLD

SEQ ID NO: 10248 - protein, 587 aa, Zea mays
  Clone ID: TF_ZM4596.C2.o12.fg.pep
MDPKGKGMVINDKEKESFVNEPNDDKPTDSGSGHKRKDGRKKKTRRIKEIVYYDSDESSSSQKDNDDYDRRKTVNSNFSFDYSRIPHSSNAQLLPIPLGKPPHFDGEDYGFWSHKMRTHLFSLHPSIWEIVESGMKFDSSDSPVFINEQIHKNAQATTVLLASLCRDEYHKVSGLDNAKQIWDTLKISHEGNDVTLLTKMELVEGELGRFAMIRGEEPTQTYNRLKTLINKIRSYGSTRWTDHDVVRLMLRSFTVLDPHLVNNIRENPRYTKMSPEEVLGKFVSGRMMIKEARYVDDALNGPINEPQPLALKATRSKEALPSKVAQFEAAGLNDEEMALIIKRFKTVLKGRKGQPSKTKAKGKRSCFKCGKLGHFIANCPDNDSDQDQGNKREKKKNYKKAKGEAHLGKEWDSDCSSSDSDNEGLAATAFNKSSLFPNERHTCLMAREKKVSTHNTSTYASSSEDESSDDDEIDYSCLFKGLDRTKVDKINELIDALNDRNILLEKQEDLLYEEHDKFVEAQKSLALEIKRNEMLSSELSSCHETIAKLKGFNDDLNAKLEVACKSNSCVEIVETCNRCKDFDIDAC

SEQ ID NO: 10249 - protein, 444 aa, Zea mays
  unsure (1)..(444): unsure at all Xaa locations
  Clone ID: TF_ZM4611.C3.o9.fg.pep
MDPKGKGIVINDKEKESFVNEPKDDKTTDSGSGHKRKDGKKKKTRRIKEIVYYDDSDESTSSQKDDDNDYRKTATRSKEALPSKVAQVEAAGLNNEEMALIIKRFKTALKGRKGQPSKTKTKEKRSCFKCGKLGHFIANCPDNESDQEQGSKREKKKAYKKAKGEAHLGKEWDSDCSSSDSDNEGLAATAFNKSSLFPNEHHTCLMAREKKVYASGGSSWIIDSGCTNHMTGEKKMFTSYVKNKDSQDSIIFGDGNQGKDKSETQGTLKRFLRRAQNEFELKVKKIRSDNGSEFKNLQVEEFLEEEGIKHEFSAPYTPQQNGVVERKNRTLIDMARTMLGEFKTPERFWSEAVNTACHAINRVYLHRLLKKTSYELLTGNKPNXEEDVPTAAIRTMAIGEVRPQEQDERDQPSSSTTVLPPTQDDEQVHQQEADDQGEAQDDHV

SEQ ID NO: 10250 - protein, 524 aa, Zea mays
  Clone ID: TF_ZM4621.C2.o3.fg.pep
MDPKRKGMVVNNEKESIFNEPKDDKPTDSGSGHKRKDGKKKKTRRIKEIVYYDSDESSSSQKDDDDYEKKKTVNSNFSFDYSRIPQSTNAHLLSIPLGKPPHFDGEDYGFWSHKMRSHLFSLHPSIWEIVESGMHFDSTDSPMFINEQIHKNAQATTVLLASLCRDEYHKVSGLDNAKQIWDTLKISHEGNDVTMLTKMELVEGELGRFAMIRGEEPTQTYNRLKTLVNKIRSYGSTRWTDHDVVHLMLRSFTVLDPHLVNNIRENPRYTKMTPEEILGKFVSGRMMIKEARYVDDALNGPINEPQPLALKATRSKETLPSKVAQIEAARLNDEEMALIIKRFKTVLKGCKGQPSKTKTKGKRSCFKCGKLGHFIANCPDNDSDQDQGNKREKKKNYKKAKGEAHLGKEWDSDCSSSDSDNEGLAATAFNKSSLFPNERHTCLMAREKKVCTQNSTYASSSEDKTSDEDEIDYSCLFKGLDKTKVDKINELIDALNDKNRLLEKQEDLLYEEHDKFVEAQNIML

SEQ ID NO: 10251 - protein, 670 aa, Zea mays
  Clone ID: TF_ZM4626.C4.o4.fg.pep
MDPKGKGIVINDKEKESFVNEPRDDKSNDSGSGHKRKDGKKKKTRRIKEIVYYDSDESSSSQKDDDHDYKKTIWDTLKISHEGNDITMLTKMELVEGELGRFAMIRGEEPTQTYNRLKTLINKIRSYGSTRWTDHDVVRLMLRSFTVLDPHLVNNIRENPRYTMMTPEEVLGKFVSGRMMIKEARYVDDALNGPLHEPQPIALKATRSKESLPSKVAQIEAAGLNEEEMALIIKRFKTVLKGRNGQPSKTKTKGKRSCFKCGKLGHFIANCPDNDSDQEKGNKREKKKHYKKAKGEAHLGKEWDSDCSSSDSDNEGLAATAFNKSALFPNEHHTCLMAREKKVYASGGSSWIIDNGCTNHMTGEKKMFTSYVKNKDSQDSIIFGDGNQGKEKSETQGTLKRFLRRAQNEFELKVKKIRSDNGSEFKNLQVEEFLEEEGIKHEFSAPYTPQQNGVVERKNRTLIDMARTMLGEFKTPECFWTEAVNTACHAINRVYLHRLLKKTSYELLTGNKPNMKKMFRRPLYEPWRLVMCDHRNKKSKINLLPQLWCIPQPKMTNRLFQMDVKSAFLNGPIKEEVYVEQPPGFEDERYPDHSCEEFSRVMTQKFEMSMMGELNYFLGFQVKQLKDGTFISQTKYTQDLLKQFGMKDAKPAKTPMGTDGHTDLNKGDFL

SEQ ID NO: 10252 - protein, 1513 aa, Zea mays
  Clone ID: TF_ZM4635.C5.o3.fg.pep
MDPKGKGIVINDKEKESFVNEPKDDKPTDSGSGQRRKEGKKKKTRRIKEIVYYDSDESTSSQKDEDHNDYEKRKPVNSNFSFDYSRIPQSSHSHLLSIPLGKPPHFDGEDYGFWSHKMRSHLFSLHPSIWEIVENGMNFDSSDSPMFINEQIHKNAQATTVLLASLCREEYNKVSGLDNAKQIWDTLKISHEGNDITMLTKMELVEGELGRFAMIRGEEPTQTYNRLKTLINKIRSYGSTRWTDHDVVRLMLRSFTVLDPHLVNNIRENPRYTKMSPEEVLGKFVSGRMMIKEARYVDDALNGPINEPQPFALKATGNKEALPSKVAQIEAAGLNEEEMALIIKRFKTVLKGRNGQPSKTKTKGKRSCFKCGKLGHFIANCPDNDSDQEKGNKREKKKHYKKAKGEAHLGKEWDSDCSSSDSDNEGLAATAFNKSTLFPNERHTCLMAREKKVCTRNSTYASSSEDESSDEDEVDYSCLFKGLDRSKIDKINELIDALNEKNILLEKQEDLLYEEHDKFVEAQKSYALEVKRNEMLSFELSTCHETISTLKGVNNDLNAKLEVANKSNSCVEHVEICTRCKDFDINACSEHLVSISKLNDELASLNAQLKTSKNDFDKLKFARDAYTIGRHPSIKDGLGFKREAKNLTSHKASIPAKEKGKAPMATSAKRNHAFLYHDRKQTRNVYASGGSSWIIDSGCTNHMTGEKKMFTSYVKNKDSQDSIIFGDGNQGKVKGLDVSVFRRSDGSLAFKGVLDGKLYLVDFAKEEAGLDACLMAKTCMGWLWHRRLAHVGMKNLHKLLKGEHVIGLTNVHFEKDRPCAACQAGKQVGGAHHSKNVMTTSRPLELLHMDLFGPVAYLSIGGSKYGLVIVDDFSRFTWVFFLQDKSETQGTLKRFLRRAQNEFELKVKKIRSDNGSEFKNLQVEEFLEEEGIKHEFSAPYTPQQNGVVERKNRTLIDMARTMLGEFKTPECFWTEAVNTACHAINRVYLHRLLKKTSYELLTDEEDVPTAAIRTMAIGDVRPQEQEEQDQPSSSTMVNPPTQDDEHVHQQEACDQGGAQDDHVMEEEAQPAPPTQVRAMIQRDHPVDQILGDISKGVTTRSRLVNFCEHYSFVSSIEPFRVEEALLDPDWVLAMQEELNNFKRNEVWTLVPRPKQNVVGTKWVFRNKQDEHGVVTRNKARLVAKGYAQVAGLDFEETFAPVARLESIRILLAYAAHHSFRLFQMDVKSAFLNGPIKEEVYVEQPPGFEDERYPDHVCKLSKALYGLKQAPRAWYECLRDFLIANAFKVGKADPTLFTKTCDGDLFVCQIYVDDIIFGSTNQKSCEEFSRVMTQKFEMSMMGELNYFLGFQGSTFDLVGYSDSDYAGCKVDRKSTSGTCQFLGRSLVSWNSKKQTSVALSTAEAEYVAAGQCCAQLLWMRQTLRDFGYNLSKVPLLCDNESAIRMAENPVEHSRTKHIDIRHHFLRDHQQKGDIEVFHVSTENQLADIFTKPLDEKTFCRLRSELNVLDSRNLD

SEQ ID NO: 10253 - protein, 1548 aa, Zea mays
  Clone ID: TF_ZM4646.C9.o8.fg.pep
MDPKGKGIVINDKEKESFVNEPRDDKSNDSGSGHRRKDGKKKKTRHIKEIVYYDSDESTSSQKDDDHNEYERKKPVNSNFSFDYSRIPQSTNAHLLSIPIGKPPHFDGEDYGFWSHKMRSHLFSLHPSIWEIVESGMHFDSTDSPMFINEQIHKNAQATTVLLASLCRDEYHKVSGLDNAKQIWDTLKISHEGNDVTLLTKMELVEGELGRFAMIRGEEPTQTYNRLKTLINKIRSYGSTRWTDHDVVRLMLRSFTVLDPHLVNNIRENPRYTKMSPEEVLGKFVSGRMMIKEARYVDDALNGPINEPQPLALKATRSKEALPSKVAQIEAAGLNDEEMALIIKRFKTVLKGRKGQPSKTKAKGKRSCFKCGKLGHFIANCPDNDSDQDQGNKREKKKNYKKAKGEAHLGKEWDSDYSSSDSDNEGLAATAFNKSSLFPNERHTCLMAREKKVSTHNTSTYASSSEDESSDDDEIDYSCLFKGLDRTKVDKINELIDALNDRNILLEKQEDLLYEEHDKFVEAQKSLALEIKRNEMLSSELSSCHETIAKLKSFNDDLNARLEVASKSNSCVEIVETCNRCKDFDIDACSEHLVSISKLNDELASLNAQLKTSKSNFDKLKFARDAYTIGRHPSIKDGLGFKREAKNLTSHKAPIPAKEKGKAPMASSVQKNHAFMYHDKRQTRNTNRSYNAYDDFDSHDIFASSSFYVHDRNVGRKNTVHNMPRRNVVNVPRRINEPSTIYHALNTSFAICRKDRKIVARKLGAKCKGDKTCIWVPKEICTNLVGPNISWVYASGGSSWIVDSGCTNHMTGEKKMFTSYVKNKDSQDSIIFGDGNQGKDKSETQGTLKRFLRRAQNEFELKVKKIRSDNGSEFKNFQVEEFLEEEGIKHEFSAPYTPQQNGVVERKNRTLIDMARTMLGEFKTPERFWSKAVNTACHAINRVYLHRLLKKTSYELLTSNKPNVSYFRVFGSKCYILVKKGRNSKFAPKAVEGFLLGYDSNTKAYRVFNKSSGLVEVSSDIVFDETNGSPREQVVDCDDPFRVEEALLDPDWVLAMQEELNNFKRNEVWTLVPRPKQNVVGTKWVFRNKQDEHGVVTRNKARLVAKGYAQVAGLDFEETFAPVARLESIRILLAYAAHHSFRLYQMDVKSAFLNGPIKEEVYVEQPPGFEDERYPDHVCKLSKALYGLKQAPRAWYECLRDFLIANAFKVGKADPTLFTKTCDGDLFVCQIYVDDIIFGSTNQKSCEEFSRVMTQKFEMSMMGELNYFLGFQVKQLKDGTFISQTKYTQDLLKRFGMKDAKPAKTPMGTDGNTDLNKGGKSVDQKAYRSMIGSLLYLCASRPDIMLSVCMCARFQSDPKECHLVAVKRILRYLVATPCFGLWYPKGSTFDLVGYSDSDYAGCKVDRKSTSGTCQFLGRSLVSWNSKKQTSVALSTAEAEYVAAGQCCAQLLWMRQTLRDFGYNLSKVPLLCDNESAIRMAENPVEHSRTKHIDIRHHFLRDHQQKGDIEVFHVSTENQLADIFTKPLDEKTFCRLRSELNVLDSRNMD

SEQ ID NO: 10254 - protein, 1662 aa, Zea mays
  Clone ID: TF_ZM4683.C5.o10.fg.pep
MDPKGKGIVINDKEKESFVNEPKDDKHTDSGSGHRRKEGKKKKTRRIKEIVYYDDSDESSSSQKDNDDNDYDKQKTVNSNFSFDYSRIPHSSNAHLLPIPLGKPPHFDGEDYGFWSHKMRTHLFSLHPSIWEIVESGMKFDSSDSPSFINEQIHKNAQATTVLLASLCRDEYHKVSGLDNAKQIWDTLKISHEGNDVTLLTKMELVEGELGRFAMIRGEEPTQTYNRLKILINKIRSYGSTRWTDHDVVRLMLRSFTVLDPHLVNNIRENPRYIKMSPEEILGKFVSGRMMIKEARYVDDALNGPIHEPQPIALKATRSKEALPSKVAQIEAAGLNDEEMALIIKRFKTALKGRKGQPSKTKAKGKRSCFKCGKLGHFIANCPDNDSDQDQVNKREKKKHYKKAKGEAHLGKEWDSDCSSSDSDNEGLAATAFNKSTLFPNERHTCLMAREKKVCTRNSTYASSSEDESSDEDEVDYSCLFKGLDRTKVDKINELIDALNEKNMLLEKQEDLLYEEHDKFIEAQKSYALEVKRNEMLSFELSTCHETISTLKGVNNDLNAKLEVANKSNSCVEHVAICSRCKDFDINACSEHLVSISKLNDELASLNAQLKTSKSDFDKLKFARDAYTVGRHPSIKDGLGFKREAKNLTSHKAPIPAKEKGKAPMATSTKKNHAFLYHDRRQSRSAYRGYNAFDSHHMIASSSSYMHGRNMSRRNAIHHVPRKNVSHAPRKVVNEFSTVYHALNASFAICRKDRKVIARKLGAKCKGDKTCIWVPKKICANLVGPNMSWVYASGGSSWIIDSGCTNHMTGEKKMFTSYVKSKDSQDSIIFGDGNQGKDKSETQGTLKRFLRRAQNEFELKVKKIRSDNGSEFKNLQVEEFLEEEGIKHEFSAPYTPQQNGVVERKNRTLIDMARTMLGEFKTPERFWSEVVNTACHAINRVYLHRLLKKTSYELLTGNKPNVSYFRVFGSKCYILVKKGRNSKFAPKAVEGFLLGYDSNTKAYRVFNKSLGLVEVSSDVVFDETNGSPREQVVDLDEVDEEDVPTAAIRTMAIGDVRPQEQDEQDQPSSSTMVHSPTQDDEQVHQQEACDQGGAQDDHVMEEEAQPAPPTQVRAMIQRDHPVDQILGDISKGVTTRSRLVNFCEHYSFVSSIEPFRVEEALLDPDWVLAMQEELNNFKRNEVWTLVPRPKQNVVGTKWVFRNKQDEHGVVTRNKARLVAKGYAQVAGLDFEETFAPVARLESIRILLAYAAHHSFRLFQMDVKSAFLNGPIKEEVYVEQPPGFEDERYPDHVCKLSKALYGLKQAPRAWYECLRDFLIANAFKVGKADPTLFTKTCDGDLFVCQIYVDDIIFGSTNKKSCEEFSRVMTQKFEMSMMGELNYFLGFQVKQLKDGTFISQTKYTQDLLKRFGMKDAKPAKTPMGTDGHTDLNKGGKSVDQKAYRSMIGSLLYLCASRPDIMLSVCMCARFQSDPKECHLVAVKRILRYLVATPCLGLWYPKGSTFDLIGYSDSDYAGCKVDRKSTSGTCQFLGRSLVSWKSKKQTSVALSTAEAEYIAAGQCCAQLLWMRQTLRDFGYTLSKVPLLCDNESAIRMAENPVEHSRTKHIDIRHHFLRDHQQKGDIEVFHVSTENQLADIFTKPLDEKTFCRLRSELNVLDSRNLD

SEQ ID NO: 10255 - protein, 1492 aa, Zea mays
  Clone ID: TF_ZM4791.C3.o3.fg.pep
MDPKGKGIVINDKEKESFVNEPRDDKSNDSGSGHRRKDGKKKKTRRIKEIVYYDSDESTSSQKDDDHNEYERKKPVNSNFSFDYSRIPQSTNAHLLSIPLGKPPHFDGEDYGFWSHKMRSHLFSLHPSIWEIVESGMHFDSTDSPMFINEQIHKNAQATTVLLASLCRDEYHKVSGLDNAKQIWDTLKISHEGNDVTLLTKMELVEGELGRFAMIRGEEPTQTYNRLKTLINKIRSYGSTRWTDHDVVHLMLRSFTILDPHLVNNIRENPRYTKMSPEEVLGKFVSGRMMIKEARYVDDALNGPINEPQPLALKATRSKEALPSKVAQIEAAGLNDEEMALIIKRFKTVLKGRKGQPSKTKAKGKRSCFKCGKLGHFIANCPDNDSDQDQGNKREKKKNYKKAKGEAHLGKEWDSDCSSSDSDNEALAATAFNKSSLFLNERHTCLMAREKKVSTHNTSTYASSSEDESSDDDEIDYSCLFKGLDRTKVDKINELIDALNDRNILLEKQEDLLYEEHDKFVEAQKSLALEIKRNEMLSSELSSCHETIAKLKSLNDDLNARLEVASKSNSCVEIVETCNRCKDFDIDACSEHLVSISKLNDELASLNAQLKTSKSNFDKLKFARDAYTIGRHPSIKDGLGYKKEAKNLTSHKAPISAKEKGKAPMASSVQKNHAFMYHDRRQSRNAYRRCNAYDAFDSHDMFASSSSYVHNRNVGRRNVVHNMPKRNVVNVPRKVYASGGSSWIIDSGCTNHMTGEKKMFTSYVKNRDSQDSIIFGDGNQGKDKSETQGTLKRFLRRAQNEFELKVKKIRSDNGSEFKNLQVEEFLEEEGIKHEFSAPYTPQQNGVVERKNRTLIDMARTMLGEFKTPERFWSEAVNMACHAINRVYLHHLLKKTSYELLTGNKPNVSYFRVFGSKCYILVKKGRNSKFAPKAVEGFLLGYDSNTKAYRVFNKSSGLVEVSSDVVFDETNGSPREQAVDLDDVDEEDVPTAAIRTMVIGDIRPQEQKEQDQPSSSTLMHPPTQDDEQVHQREACDQGGAQDDHVMEEEAQPAPPTQVRAMIQRDHPVDQILGDISKGVTTRSRLVNFCEHYSFVSSIEPFRVEEALLDPDWVLAMQEELNNFKRNEVWTLVPRPKQNVVGTKWVFRNKQDEHGVVTRNKARLVAKGYAQVAGLDFEETFAPVARLESIRILLAYAAHHSFRLFQMDVKSAFLNGPIKEEVYVEQPPGFEDERYPDHVCKLSKALYGLKQAPRAWYECLRDFLIVNAFKVGKADPTLFTKTCDGDLFVCQIYVDDIIFGSTNQKSCEEFSRVMTQKFEMSMMGELNYFLGFQVKQLKDGTFISQTKYTQDLLKRFGMKDAKPAKTPMGTDGHTDLNKGGSLLYLCASRPDIMLSVCMCARFQSDPKECHLVAVKRILRYLVATPCFGLWYPKGSTFDLVGYSDSDYAGCKVDRKSTSGTCQFLGRSLVSWNSKKQTSVALSTAEAEYVAAGQC

SEQ ID NO: 10256 - protein, 663 aa, Zea mays
  Clone ID: TF_ZM4796.C7.o1.fg.pep
MDPKGKGIVINDKEKESFVNEPKDDKPTDSGLSHKRKDGKKKKTRRIKEIVYYDSDESSSSQKDDDDYEKKKTVNSNFSFDYSRIPQSTNAHLLSIPLGKPPHFDGEDYGFWSHKMHSHLFSLHPSIWEIVESGMHFDSTDSPMFINEQIHKNAQATTVLLASLCRDEYHKVSGLDNAKQIWDTLKVSHEGNDVTMLTKMELVEGELGRFAMIRGEEPTQTYNRLKTLINKIRSYGSTRWTDHDVVRLMLRSFTVLDPHLVNNIRENPRYTKMTPEEILGKFVSGRMMIKEARYVDDALNGPINEPQHLALKATRSKETLPSKVAQIEAARLNDEEMALIIKRFKTALKGRKGQPSKTKTKGKRSCFKCGKLGHFIANCPDNYSDQDQGNKREKKKNYKKAKGEAHLGKEWDSDCSSSDSDNEGLAATAFNKSSLFPNERHTCLMAREKKVCTRNSTYASSSEDESSDEDEIDYSCLFKGLDRTKVDKINELIDALNDKNRLLEKQEDLLYEEHDKFVEAQKSHALEVKRNEMLSCELSSCHETISNLRSINDDLNAKLEIASKSTSCVEIVATYNRCKDFDIDACSEHLASISKLNDELASLNAQLKTSKSEFDKLKFATDAYMIGRHPSIKDGLGFKREAKNLTSHKVPIPAKEKGKAPMA

SEQ ID NO: 10257 - protein, 1236 aa, Zea mays
  Clone ID: TF_ZM4824.C5.o1.fg.pep
MDPKGKGIVINDKEKESFVNEPKDDKPTDSGSGHRRKEGKKKKTRRIKEIVYYDSNESSSSQKDNDDNDYDKQKTVNSNFSFDYSRIPHSSNAHLLPIPLGKPPHFDGEDYGFWSHKMRTHLFSLHPSIWEVVESGMKFDSSDSPSFINEQIHKNAQATTVLLASLCRDEYHKVSGLDNAKQIWDTLKISHEGNDVTLLTKMELVEGELGRFAMIRGEEPTQTYNRLKILINKIRSYGSTRWTDHDVVRLMLRSFTVLDPHLVNNIRENPRYIKMSPEEILGKFVSGRMMIKEARYVDDALNGPIHEPQPIALKATRSKEALPSKVAQIEAAGLNDEEMALIIKRFKTALKGRKGQPSKTKTKGKRSCFKCGKLGHFIANCPDNDSDQEHGSKREKKKHYKKAKGEAHIGKEWDSDCSSSDSDNEGLAATAFNKSSLFPNERHTCLMAREKKVCNQNNVTYDSSSDDESSDDEIDYSSLFKGLDRTKVDKINELIDALNEKDRLLEKQEDLLYEEHDKFVEAQKSYALEVKRNEVLSSELSSCHETIATLKSVNDDLNAKLEVASKSNSCVEHVEICTRCKDFDVDACSDHLVSISKLTKELASLNAQLKTSKNEFDKLKFARDAYTIGRHPSIKDGLGFKREAKNLTSHKAPIPAKEKGKAPMASSVQKNHAFMYHDRRQTRNAYRSFNAYDDFDFHAMFASSSSYMHGRNMSRKNAIHHMPRKNVIHAPRKVVNEPSIIYCALNASFAICRKDRKIVARKLGAKCKGDKTCIWVPKDICTNLVGPNMSWVYASGGSSWIIDSGCTNHMTGEKKMFTSYVKNKDSQDSIIFGDGNQGKIKGLVESLGYNLLSDKSETQGTLKRFLRRAQNEFELKVKKIRSDNGSEFKNLQVEEFLEEEGIKHEFSAPYTPQQNGVVERKNRTLIDMARTMLGEFKTPECFWTEAVNTACHAINRVYLHRLLKKTSYELLTGNKPNVSYFRVFGSKCYILVKKGRNSKFAPKAVEGFLLGYDSNTKAYRVFNKSSGLVEVSSDVVFDETNGSPREQVVDCDDVDEEDVPTAAIRTMAIGEVRPQEQDERDQPSSSTMVHPPTQDDEQVHQQEACDQGGAQDDHVMEEESQPAPPTQVRAMIQRDHPVDQILGDISKGVTTRSRLFNFCEHYSFVSSIEPFRVEEALLDPDWVLAMQEELNNFKRNEVWTLVPRPKQNVVGTKWVFRNKQDEHGVVTRNKARLVAK

SEQ ID NO: 10258 - protein, 1546 aa, Zea mays
  Clone ID: TF_ZM4868.C4.o4.fg.pep
MDPKGKGMVINDKEKESFVNEPRDDMSNDSSSGHKRKDGRKKKTRRIKEIVYYDSDESSSSQKDDDDYDRRKTRIPHSSNAQLLPIPLGKPPHFDGEDYGFWSHKMRTHLFSLHPSIWEIVESGMKFDSSDSPMFINEQIHRNAQATTVLLASLCRDEYHKVSGLDNAKQIWDTLKISHEGNDVTLLTKMELVEGELGRFAMIRGEEPTQTYNRLKTLINKIRSYGSTRWTDHDVVRLMLRSFTVLDPHLVNNIRENPRYTKMSLEEVLGKFVSGRMMIKEARYVDDALNGPINEPQTLALKATRSKKALPSKVAQFEAAGLNDEEMVLIIKRFKTALKGRKGQPSKTKTKGKRSCFKCGKLGHFIANCPDNDSDQEHGSKREKKKHYRKAKGEAHIGKEWDSDCSSSDSDNEGLTATAFNKSSLFPNERHTCLMAREKKVCNQNNVTYDSSSDDESSDDEIDYSSLFKGLDRTKVDKINELIDALNEKDRLLEKQEDLLYEEHDKFVEAQKSYALEVKRNEVLSSELSSCHETIATLKSVNDDLNAKLEVASKSNSCVEHVEICTRCKDFDVDACSNHLVSISKLTEELASLNAQLRTSKNEFDKLKFARDAYTIGRHPSIKDGLGFKREAKNLTSHKAPIPAKEKGKAPMATSAKKNHAFLYYDRRQPRNAYRSCNAYNAFDSHAMFASSSSYVHDRNVGRRNVVHNMPRRDVVNTPRKVNEPSTIYHALNASFAICRKDRKVYASGGSSWIIDSGCTNHMTGEKKMFTSYVKNKDSQDSIIFGDGNQGKDKSETQGTLKRFLRRAQNEFELKVKKIRSDNGSEFKNLQVEEFLEEEGIKHEFSAPYTPQQNGVVERKNRTLIDMARTMLGEFKTPKCFWSEAVNTACHAINRVYLHRLLKKTSYELLTGNKPNVSYFRVFGSKCYILVKKGRNSKFAPKVVEGFLLGYDSNTKAYRVFNKSSGLVEVSSDVVFDETNGSPREQVVDCDDVDEEDVPTAAIRTMAIGVVRPQEQDERDQPSSSTMMHPPTQNDEQPFRVEEALLDPDWVLAMQEELNNFKRNEVWTLVPRPKQNVVGTKWVFRNKQDEHGVVTRNKARLVAKGYAQVAGLDFEETFAPVARLESIRILLAYAAHHSFRLFQMDVKSAFLNGPIKEEVYVEQPPGFEDERYPDHVCKLSKALYGLKQAPRAWYECLRDFLLANAFKVGKADPTLFTKTCDGDLFVCQIYVDDIIFGSTNQKSCEEFSRVMTQKFEMSMMGELNYFLGFQVKQLKDGTFISQTKYTQDLLKRFGMKDAKPAKTPMGTDGHTDLNKGGKSVDQKAYRSMIGSLLYLCASRPNIMLSVCMCARFQSDPKECHLVAVKRILRYLVATPCFGLWYPKGSTFDLVGYSDSDYAGCKVDRKSTSGTCQFLGRSLVSWNSKKQTFVALSTAEAEYVAAGQCCAQLLWMRQTLRDFGYNLSKVPLLCDNESAIRMAENPVEHSRTKHIDIQHHFLRDHQQKGDNELFHVSTENQLADIFTKPLDEKTFCRLRSELNVLDLRNLD

SEQ ID NO: 10259 - protein, 213 aa, Zea mays
  Clone ID: TF_ZM4875.C4.o12.fg.pep
MDPKGKGMVINDKEKESFVNEPKDDKPTDSGSGHKRKDGKKKKTRRIKEIVYYDDSDESSSSQKDNDDYDRRKTATRSKEALPSKVAQIEAAGLNDEEMALIIKRFKTALKDRKGQPSKTKTKGKRSCFKCGKLGHFIANCPDNDSDQEQGNKREKKKNYKKAKGEAHLGKEWDSDCSSSDSDNEGLAATAFNKSALFPNERHTCLMAREKKV

SEQ ID NO: 10260 - protein, 698 aa, Zea mays
  Clone ID: TF_ZM4885.C4.o3.fg.pep
MDTHRPPHFDGTNFPYYSARMACYLEAVDLGVWRVTRDGMKPLKNPEKPTTSEEKEIHLNARAKNCLYESLSMDIFNQVFTLKTANEIWLKLHELHDGTSNVREQKHCLVLNEYNSFAMKDDELVRDMYSRLNLIINELNSIGINKLGDADIVRKIISLLPQRRYGSIITILHNMEDLGNMTPTIVIGKIATFEMSRKMCRGEEPTSSRPYAFACDERKGKKKAPTPSSSSEEEEEEEIDDDEDNQPCTSSSEDEETIRRVGKVMGMIRKINLMGVPLQVEDLLFNIDRKKQRKRGCFTCGEKGHFRDNCPTMAEPKKERSKGKALTSVRTWDDSSSEDEPPRTRSHRSSSRSSHKCLMARGNKSIPYSSDESGSDDEGEGKPSVDELANAVEFFQDVCTKQKAQLKTLKNKLVSSQNDYKGLLEKFETFANLNSELSTKIELLESSAPSTATDDNLIKKNEKLKAKLASSQEAIENLLEKMEILSIHNNELTTKLENIGSTPATSLVEIPEIIKKDASTSCFDLIDDSNPCNQVVVENIVVETCSDEVAKENEQLKQEVARLGKALYDKKGKAKQIRPPQDNTTAGVNKPVEGETMICRLCHMEGHKSFQCKAMTGNKQRQKLKQKPSSKISNTYIKKVNKKDATPYLIKKKKNGKVIAIKANKQANKGKGAKRIWVPKEIISTMKSTKKVWIPKGK

SEQ ID NO: 10261 - protein, 779 aa, Zea mays
  Clone ID: TF_ZM4885.C4.o5.fg.pep
MDPKGKGMVINDKEKESFVNEPNDDKPTDSGSGHKRKDGRKKKARRIKEIVYYDSDESSSSQKDDDDYDRRKTVNSNFSFDYLRIPHSSNAQLLPIPLGKPPHFDGEDYGFWSHKMRTHLFSLHPSIWEIVESGMKFDSSDSPMFINEQIHRNAQATTVLLASLCRDEYHKVSGLDNAKQIWDTLKISHEGNDVTLLTKMELVEGELGRYTKMSPEEVLGKFVSGRMMIKEARYVDDALNGPINEPQPLALKATRSKEALPSKVAQFEAAGLNDEEMALIIKRFKTVLKGRKGQPSKTKAKGKRSCFKCGKLGHFIANCPDNDSDQDQGNKREKKKNYKKAKGEAHLGKEWDSDCSSSDSDNEGLAATTFNKSSLFPNERHTCLMAREKKVSTHNTSTYASSSEDESSDDDEIDYSCLFKGLDRTKVDKINELIDALNDRNILLEKQEDLLYEEHDKFVEAHKSLALEIKRNEMLSSELSSCHETIAKLKSFNDDLNAKLEVASKSNSCVEIVETCNRCKDIDIDACSEHLVSISKLNDELASLNAQLKTSKSNFDKLKFARDAYTIGRHPSIKDGLGYKREAKDLTSHKAPISAKEKGKAPMASSATKNHAFMYHDRRHTRNANRSYNVFDSYVYDSHDMFASSSFYVHDRNVGRRNVVHNMPRRNVVNVPRKVNEPSTIYHALNASFAICRKDRKVIARKFGAKCKGDKTCIWIPKEIVTNLVGPNKSWVYASGGSSWIIDSGCTNHMTGEKKMFTSYVKNKDSQDSIIFGDGNQGK

SEQ ID NO: 10262 - protein, 1609 aa, Zea mays
  Clone ID: TF_ZM4929.C1.o1.fg.pep
MDPKGKGIVINDKEKESFVNEPRDDKSNDSGSGHKRRDGKKKKTRRIKEIVYYDSDESSSSQKNDDHDKQRKPVNSNFSFDYSRIPHSSNSHLLSIPLGKPPHFDGEDYGFWSHKMRSHLFSLHPSIWEIVENGMKFDSSDSPMFINEQIHKNAQATTVLLASLCREEYNKVSGLDNAKQIWDTLKISHEGNDITMLTKMELVEGELGRFAMIRGEEPTQTYNRLKTLINKIRSYGSTRWTDHDVVRLMLRSFTVLDPHLVNNIRENPRYTMMTPEEVLGKFVSGRMMIKEARYVDDALNGPIHEPQPIALKASRSKEALPSKVAQIEAAGLNDEEMALIIKRFKTVLKGRNGQPSKTKTKGKRSCFKCGKLGHFIANCPDNESDQEKGNKREKKKHYKKAKGEAHLGKEWDSDCSSSDSDNEGLAATAFNKSTLFPNERHTCLMAREKKVCTRNSTYASSSEDESSDEDEVDYSCLFKGLDRSKIDKINELIDALNEKNILLEKQEDLLYEEHDKFVEAQKSYALEVKRNEMLSFELSTCHETISTLKGVNNDLNAKLEVANKSNSCVEHVEICTRCKDVDINACSEHLVSISKLSDEVASLNARLKTSKSDFEKLKFARDAYTVGRHPSIKDGLGFKREAKNLTSHKAPIPAKEKGKAPMATSAKRNHAFLYHDKRQTRNRSYDAFDSYVYDSHAIKDRKVIARKLGAKCKGDKTCIWVPKEIVTNLVGPNKSWVYASGGSSWIIDSGCTNHMTGEKKMFTSYVKNKDSQDSIVFGDGNQGKDKSETQGTLKRFLRRAQNEFELKVKKIRSDNGSEFKNLQVEEFLEDEGIKHEFSAPYTPQQNGVVERKNRTLIDMARTMLGEFKTPECFWTEAVNTACHAINRVYLHRLLKKTSYELLTGNKPNVSYFRVFGSKCYILVKKGRNSKFAPKAVEGFLLGYDSNTKAYRVFNKSSGLVEVSSDVVFDETNGSSREQVVDCDDVDEEDVPTAAIRTMAIGEVRPQEQDEQDQPSSSIMVHPPTQDDEQVHHKEACDQGGAQDNHVMEEEVQPAPPTQVRAMIQRDHPVDQILGDISKGVTTRSRLVNFCEHYSFVSSIEPFRVEEALLDPDWVLAMQEELNNFKRNEVWTLVPRPKQNVVGTKWVFRNKQDEHGVVTRNKARLVAKGYAQVAGLDFEETFAPVARLESIRILLAYAAHHSFRLYQMDVKSAFLNGPIKEEVYVEQPPGFEDERYPDHVCKLSKALYGLKQAPRAWYECLRDFLIANAFKVGKADPTLFTKTCDGDLFVCQIYVDDIIFGSTNQKSCEEFSRVMTQKFEMSMMGELNYFLGFQVKQLKEGTFISQTKYTQDLLKRFGMKDAKPAKTPMGTDGHTDLNKGGKSVDQKAYRSMIGSLLYLCASRPDIMLSVCMCARFQSDPKECHLVAVKRILRYLVATPCFGLWYPKGSTFDLVGYSDSDYAGCKVDRKSTSGTCQFLGRSLVSWNSKKQTSVALSTAEAEYVAAGQCCAQLLWMRQTLRDFGYNLSKVPLLCDNESAIRMAENPVEHSRTKHIDIRHHFLRDHQQKGDIEVFHVSTENQLADIFTKPLDEKTFCRLRSELNVLDSRNLD

SEQ ID NO: 10263 - protein, 865 aa, Zea mays
  unsure (1)..(865): unsure at all Xaa locations
  Clone ID: TF_ZM4951.C1.o9.fg.pep
MDPKGKGIVINEKEKESFVNEPKDDKPTDSGSGHRRKEGKKKKTRRIKEXVYYDDSDESTSSHKDNDDNDYDKXKRRDEYHKVSGLDNAKQIWDTLKISHEGNDVTLLTKMELVEGELGRFAMIRGEEPTQTYNRLKTLINKIRSYGSTRWTDHDVVRLMLRSFTVLDPHLVNNIRENPRYTKMSPEEVLGKFVSGRMMIKEARYVDDALNGPINEPQPLALKATRSKEALPSKVAQIEAAGLNDEEMALIIKRFKTALKGRKGRPSKTKTKGKRSCFKCGKLGHFIANCPDNDSDQDQGNKREKKKNYKKAKGEAHLGKEWDSDCSSSDSDNEGLAATAFNKSSLFPNERLTCLMAREKKVCSRNSTYASSSEDESSDEDEIDYSCLFKGLDRTKVDKINELIDALNDKNRLLEKQEDLLYEEHDKFLEAQKSHALEVKRNEMLSCELSSCHETISSLRSINDDLNAKLEMARKSTTCVENVAICNRCKDFDIDACSEHIASIAKLNDEMASLNAQLKASKSDFDKLKFARDAYSIGRHPSIKDELGFKREAKNLTSHKAPISTNEKGKAPMASSTKRNHAFMYNDRRQSHRSCNAFDSHAYDSYAMYASSSSYMHCRDMPRKNIHHVPRKNFVHAPRKVYASGGSSWIIDSGCTNHMTGEKKMFTSYVKNKDFQDSIIFGDGNQGKVKGLGKIAISNEHSISNVFLVESLGYNLLSVSQLCNMGYNCLFTNVDVSVFRRCDGSLAFKGVLDGKLYLVDFAKEEAGLDACLMAKTCMGWLWHRRLAHVGMKNLHKLLKGEHMIGLTNVHFEKDRPCAACQAGKQVGGAHHSKNVMTTSRPLELLHMDLFGPVAYLSIGGRLKVA

SEQ ID NO: 10264 - protein, 498 aa, Zea mays
  Clone ID: TF_ZM4956.C1.o12.fg.pep
MDPKGKGMVINDKEKETFVNELNDDKPTDSGSGHKRKDGRKKKTRRIKEIVYYDSDESSSSQKDDDDHDRRKTVNSNFSFDYSRIPHSSNAQLLPIPLGKPPHFDGEDYGFWSHKMRTHLFSLHPSIWEIVESGMKFDSSDSPVFINEQIHKNAQATTVLLASLCRDEYHKVSGLDNAKQIWDTLKISHEGNDVTLLTKMELVEGELGRFAMIRGEEPTQTYNRLKTLINKIRSYGSTRWTDHDVVCLMLRSFTVLDPHLVNNIRENPRYTKMSPEEVLGKFVSGRMMIKEARYVDDALNGPINEPQPLALKATRSKEALPSKVAQVEAAGLNDEEMALIIKRFKTVLKDRKGQPSKTKAKGKRSCFKCGKLGHFIANCPDNDSDQDQGNKREKKKNYKKAKGEAHLGKEWDSDCSSSDSDNEGLAATAFNKSFLFPNERHTCLMAREKKVSTPNTSTYASSSEDESSDDDEIDYSCLFKGLDRTKEYTVRKARGFVV

SEQ ID NO: 10265 - protein, 1609 aa, Zea mays
  Clone ID: TF_ZM4957.C1.o6.fg.pep
MDPKGKGIVINDKEKESFVNEPRDDKSNDSGSGHKRRDGKKKKTRRIKEIVYYDSDESSSSQKNDDHDKQRKPVNSNFSFDYSRIPHSSNSHLLSIPLGKPPHFDGEDYGFWSHKMRSHLFSLHPSIWEIVENGMKFDSSDSPMFINEQIHKNAQATTVLLASLCREEYNKVSGLDNAKQIWDTLKISHEGNDITMLTKMELVEGELGRFAMIRGEEPTQTYNRLKTLINKIRSYGSTRWTDHDVVRLMLRSFTVLDPHLVNNIRENPRYTMMTPEEVLGKFVSGRMMIKEARYVDDALNGPIHEPQPIALKASRSKEALPSKVAQIEAAGLNDEEMALIIKRFKTVLKGRNGQPSKTKTKGKRSCFKCGKLGHFIANCPDNESDQEKGNKREKKKHYKKAKGEAHLGKEWDSDCSSSDSDNEGLAATAFNKSTLFPNERHTCLMAREKKVCTRNSTYASSSEDESSDEDEVDYSCLFKGLDRSKIDKINELIDALNEKNILLEKQEDLLYEEHDKFVEAQKSYALEVKRNEMLSFELSTCHETISTLKGVNNDLNAKLEVANKSNSCVEHVEICTRCKDVDINACSEHLVSISKLSDEVASLNARLKTSKSDFEKLKFARDAYTVGRHPSIKDGLGFKREAKNLTSHKAPIPAKEKGKAPMATSAKRNHAFLYHDKRQTRNRSYDAFDSYVYDSHAIKDRKVIARKLGAKCKGDKTCIWVPKEIVTNLVGPNKSWVYASGGSSWIIDSGCTNHMTGEKKMFTSYVKNKDSQDSIVFGDGNQGKDKSETQGTLKRFLRRAQNEFELKVKKIRSDNGSEFKNLQVEEFLEEEGIKHEFSAPYTPQQNGVVERKNRTLIDMARTMLGEFKTPECFWTEAVNTACHAINRVYLHRLLKKTSYELLTGNKPNVSYFRVFGSKCYILVKKGRNSKFAPKAVEGFLLGYDSNTKAYRVFNKSSGLVEVSSDVVFDETNGSPREQVVDCDDVDEEDVPTAAIRTMAIREVRPQEQDDQDQPSSSIMVHPPTQDGEQVHQKEACDQGGAQDNHVMEEEALPAPPTQVRAMIQRDHPVDQILGDISKGVTTRSRLVNFCEHYSFVSSIEPFRVEEALLDPDWVLAMQEELNNFKRNEVWTLVPRPKQNVVGTKWVFRNKQDEHGVVTRNKARLVAKGYAQVAGLNFEETFAPVARLESIRILLAYAAHHSFRLYQMDVKSAFLNGPIKEEVYVEQPPGFEDERYPDHVCKLSKALYGLKQAPRAWYECLRDFLLANAFKVGKADPTLFTKTCDGDLFVCQIYVDDIIFGSTNQKSCEEFSRVMTQKFEMSMMGELNYFLGFQVKQLKDGTFISQTKYTQDLLKRFGMKDAKPAKTPMGTDGHTDLNKGGKSVDQKAYRSMIGSLLYLCASRPDIMLSVCMCARFQSDPKECHLVAVKRILRYLVATPCFGLWYPKGSTFDLVGYSDSDYAGCKVDRKSTSGTCQFLGRSLVSWNSKKQTSVALSTAEAEYVAAGQCCAQLLWMRQTLRDFGYNLSKVPLLCDNESAIRMAENPVEHSRTKHIDIRHHFLRDHQQKGDIEVFHVSTENQLADIFTKPLDEKTFCRLRSELNVLDSRNLD

SEQ ID NO: 10266 - protein, 498 aa, Zea mays
  Clone ID: TF_ZM4958.C1.o3.fg.pep
MDPKGKGMVINDKEKETFVNELNDDKPTDSGSGHKRKDGRKKKTRRIKEIVYYDSDESSSSQKDDDDHDRRKTIHKNAQATTVLLASLYRDEYHKVSGLDNAKQIWDTLKISHEGNDVTLLTKMELVEGELGRFAMIRGEEPTQTYNRLKTLINKIRSYGSTRWTDHDVVRLMLRSFTVLDPHLVNNIRENPRYTKMSPEEVLGKFVSGRMMIEEARYVDDALNGPINEPQPLALKATRSKEALPSKVAQIEAAGLNDEEMALIIKRFKTVLKDRKGQPSKTKAKGKRSCFKCGKLGHFIANCPDNDSDQDQGNKREKKKNYKKAKGEAHLGKEWDSDCSSSDSDNEGLAATAFNKSSLFPNERHTCLMAREKKDKSETQGTLKRFLRRAQNEFELKVKKIRSDNGSEFKNLQVEEFLEEEGIKHEFSAPYTPQQNGVMKKMFRRPLYEPWRLEKCGHRNKMNEINLLPQQQCIPQLKTMNRFIKRRRVIKGEHKMIT

SEQ ID NO: 10267 - protein, 1831 aa, Zea mays
  Clone ID: TF_ZM4960.C1.o7.fg.pep
MDPMGKGMVVNNNEKESIFNEPKDDKPTDSGSSHKRKDGKKKKTRRIKEIVYYDSDESSSSQKDDDDYEKKKTVNSNFSFDYSRIPQNTNAHLLSIPLGKPPHFDGEDYGFWSHKMRSHLFSLHPSIWEIVENGMHFDSSDNPMFINEQIHKNAQATTVLLASLCRDEYHKVSGLDNAKQIWDTLKISHEGNDVTMLTKMELVEGELGRFAMIRGEEPTQTYNRLKTLVNKIRSYGIYGSTRWTDHDVVCLMLRSFTVLDPHLVNNIRENPRYTKMTPEEILGKFVSGRMMIKEARYVDDALNGPINEPQPLALKATRSNETLPSKVAQIEAAGLNDEEMALIIKRFKTALKGRKGQPSKTKTKGKRSCFKCGKLGHFIANCPDNDSDQDQGNKREKKKNYKKAKGEAHLGKEWDSNCSSSDSDNEGLAATAFNKSSLFPNERHTCLMAREKKVCTRNTTYASSSEDESSDEDEIDYSCLFKGLDRTKVDKINELIDALNDKNRLLEKQEDLLYEEHDKFVEAQKSHALEVKRNEMLSCELSSCHETISNLRSINDDLNAKLEIASKSTSCVENDVICNRCKDFDIDACSEHIASIAKLNDEIASLNDQLKTSKSEFDKLKFARDAYTIGRHPSIKDGLGFKREVKNLTSHKASISTKEKGKAPMASNAKKNHAFMYHDRKFSGNVHDDRSCNAYNAFDSHAMFASSSSYMHGRNVFRRNVVHHMPRRNVVNIPRKVNEPSTIYHACDASFAICGKDRKVYASGGSSWIIDSGCTNHMTGEKKMFTSYVKNKDSQDSIIFGDGNQGKVKGLGKIAISNEHSISNVFLVESLGYNLLSVSQLCNMGYNCLFTNVDVSVFRRSDGSLSFKGVLDGKLYVVDFAKEEAGLDACLIAKTSMGWLWHRHLAHVGMKNLHKLLKGEHVIGLTNVTFEKDRPCAACQAGKQVGGAHHSKNVMTTSRPLELLHMDLFGPVAYLSIGGSKYGLVIVDDFSRFTWVFFLQDKSETQGTLKRFLRRAQNEFELKVKKIRSDNGSEFKNLQVEEFLEEEGIKHEFSAPYTPQQNGVVERKNRTLIDMARTMLGEFKTPEYFWSEAVNTACHAINRVYLHRLLKKTSYELLTGNKPNVSYFRVFGSKCYILVKKGRNSKFAPKAVEGFLLGYDSNTKAYRVFNKSSGLVEVSSDVVFDETNGSPREQVVDLDDVDEEDVPTAAIRTMAIGDVRPQEQKEQDQPSSSTMVHPLTQDDEQVHQQEACNEGGAQDDHMMEEETQPAPPTQVRAMIQRDHPVDQILGDISKGVTTRSRLVNFCEHYSFVSSIEPFRVEEALLDPDWVLAMQEELNNFKRNEVWTLVPCPKQNVVGTKWVFRNKQDEHGVVTRNKARLVAKGYAQVAGLDFEETFAPVARLESIRILLAYAAHHSFRLFQMDVKSAFLNGPIKEEVYVEQPPGFEDEWYPDHVCKLSKALYGLKQAPRAWYECLRDFLIANAFKVGKVDPTLFTKTCDGDLFVCQIYVDDIIFGSTNKKSCEEFSRVMTQKFEMSMMGELNYFLGFQVKQLKNGTFISQTKYTQDLLKWFGMKDAKPAKTPMGTDGHTDLNKGGKSVDQKAYRSMIGSLLYLCASRSDIMLSVCMCARFQSDPKECHLVAVKRILRYLVATPCFRLWYPKGSTFDLIGYSDSDYAGCKVDRKSTSGTCQFLGRSLVSWNSKKQTSVALSTAEAEYVAAGQCCTQLLWMRQTLRDFGYNLSKVPLLCDNESAIRMAENPVEHSRTKHIDIRHHFLRDHQQKGDIEVFHVSTENQLADIFTKPLDEKTFCRLRNFGEAMGFLGQDSSRFGI

SEQ ID NO: 10268 - protein, 1107 aa, Zea mays
  unsure (1)..(1107): unsure at all Xaa locations
  Clone ID: TF_ZM4986.C2.o2.fg.pep
MDPKGKGMVINDKEKESFVNEPNNDKPTDSGSGHKRKDGRKKKTRRIKEIVYYDSDESSSSQKDDDDYDRRKTIHKNAQATTVLLASLCRDEYHKVSGLDNAKQIWDTLKISHEGNDVTLLTKMELVEGELGRFAMIRGEEPTQTYNRLKTLINKIRSYGSTRWTDHDVVCLMLRSFTVLDPHLVNNIRENPRYTKMSPEEVLGKLVSGRMMIKEARYVDDALNGPINEPQPLALKATRSMEALPSRVAQFEAAGLNDEEMALIIKRFKTVLKGRKGQPSKTKAKGKRSCFKCGKLGHFIANCPDNESDQEKGNKREKKKHYKKAKGEAHIGKEWDSDCSSSDSDNEGLAATAFNKSSLFPXERHTCLMAREKKXILLEKQEDLLYEEHDKFVEAQKSLALEIKRNEMLSSELSSCHETIAKLKSFNDDLNAKLEVASKSNSCVEIVETCNRCKDFDIDTCSDHLVSISKLNDELASLNAQLKTSKNEFDKLKFARDAYTIGRHPSIKDGLGYKREAKNLTSHKAPISAKEKGKAPMASSVQKNHAFMYHDRRQSRNAYRSCNAYNVFDSHAMFASSSSYMHDKNVGRRNVIHNMPRKNVVNIPRKVYASGGSSWIIDSGCTNHMTGEKKMFTSYVKNKDSQDSIIFGDGNQGKVKGLVESLGYNLLSVSQLCNMGYNCLFTNVDVSVFRRCDGSLAFKGVLDGKLYLVDFAKGEAGLDACLIAKTSMGWLWHRRLAHVGMKNLHKLLKGEHVIGLTNVQFEKDRPCAACQAGKQVGGAHHSKNVMTTSRPLELLHMDLFGPVAYLSIGGSKYGLVIVDDFSRFTWVFFLQDKSETQGTLKRFLRRAQNEFELKVKKIRSDNGSEFKNLQVEEFLDEEGIKHEFSAPYTPQQNGVVERKNRTLIDMARTMLGEFKTPECFWSEAVNTACHAINRVYLHRLLKKTSYELLTGNKPNVSYFRVFGSKCYILVKKGRNSKFAPKAVEGFLLGYDSNTKAYRVFNKSSGLVEVSSDVVFDETNGSPREQVVDLDDVDEEDVPTAAMRTMAIGDVRPQEQVEQDQPSSSTMVHPPTQDDEQVHQKEVCDQGGAQDDHVMEEEAQPAPPTEST

SEQ ID NO: 10269 - protein, 707 aa, Zea mays
  Clone ID: TF_ZM4986.C3.o1.fg.pep
MDPKGKGIVINDKEKESFVNEPKDDKSNDSGSGHRRKDGKKKKTRRIKEIVYYDSDESTSSHKDDDYDKHKTVNSYFSFDYSRIPHSSNAHLLPIPLGKPPHFDGEDYGFWSHKMRTHLFSLHPRIWEIVESGMKFDSSDSPSFINEQIHKNAQATTVLLASLCRDEYHKVSGLDNAKQIWDTLKISHEGNDVTLLTKMELVEGELGRFAMIRGEEPTQTYNRLKILINKIRSYGSTRWTDHDVVRLMLRSFTVLDPHLMNNIRGNPRYTKMTPEEVLGKFVSGRMMIKEARYVDDALNGPINEPQPLALKATKSKEALPSRVAQIEAAELNDEEMALIIKRFKTALKGRKGQPSKTKAKGKRSCFKCGKLGHFIANCPDNDSDQDQGNKREKKKNYKKAKGEAHLGKEWDSDCSSSDSDNEGLAATAFNKSSLFPNERHTCLMAREKVITRNDITYDSSSDDESSDDEIDYSSLFKGLDKNKIDKINELIDALNEKDRLLEKQEDLLYDEHDKFIEAQKSYALEVKRNEVLSSELSSCHENIATLKSVNDDLNAKLEVASKSTSCVEIVETCTRCKDLNVDACSKHLVSISKLNDEVASLNAQLKASKSEFDKLKFARDAYTIGRHPSIKDGLGFKREAKNLTSHKAPIPAKEKGKAPIATSAKKNHAFLYHDRRQTRNAYRSYNAYDDFSHAMFASSSSYVHDRN

SEQ ID NO: 10270 - protein, 1573 aa, Zea mays
  unsure (1)..(1573): unsure at all Xaa locations
  Clone ID: TF_ZM4988.C1.o3.fg.pep
MDPKGKGMVINDKEKETFVNELNDDKPTDSGSSHKRKDGRKKKTRRIKEIVYYDSDESSSSQKDDDDHDRRKTVNSNFSFDYSRIPHSSNTQLLPIPLGKPPHFDGEDYGFWSHKMRTHLFSLHPSIWEIVESGMKFDSSDSPVFINEQIHKNAQATTVLLASLCRDEYHKVSGLDNAKQIWDTLKISHEGNDVTLLTKMELVEGELGRFAMIRGEEPTQTYNRLKTLINKIRSYGSTQWTDHDVVRLMLRSFTVLDPHLVNNIRENPRYTKMSPEEVLGKFVSGRMMIKEARYVDDALNGPINEPQPLALKATRSKEALPSKVAQIEAAGLNDEEMALIIKRFKTVLKGRKGQPSKTKAKGKRSCFKCGKLGHFIANCPDNDSDQDQGNKREKKKNYKKAKGEAHLGKEWDSDCSSSDSDNEGLATTAFNKSSLFPNEHHTCLMAREKKVSTPNTSTYASSSEDESSDDDEIDYSCLFKGLDRTKVDKINELIDALNDRNILLEKQEDLLYEEHDKFVEAQKSLALEIKRNEMLSSELSSCHETIAKLKIFNDDLNAKLEVVSKSNSCVEIVETCNRCKDFDIDACSDHLVSISKLNEELASLNAQLKTSKNEFDKLKFARDAYTIGRHPSIKDGLGYKREAKNLTSHKAPISAKEKGKAPMASSVQKNHAFMYHDRRQSRNAYRSCNAYNVFDSHAMFASSSSYVHDRNVGRRNAIHNLPRRNVVNVPRKVYASGGSSWIIDSGCTNHMTGEKKMFTSYVKNKDSQDSIIFGDGNQGKDKSETQGTLKRFLGRAQNEFELKVKKIRSDNGSEFKNFQVEEFLEEEGIKHEFSAPYTPQQNGVVERKNRTLIDMARTMLGEFKTPERFWSEAVNTACHAINRVYLHRLLKKTSYELLTGNKPNVSYFRVFGSKCYILVKKGRNSKFAPKAVEGFLLGYDSNTKAYRVFNKSSGLVEVSSDVVFDETNGSPREQVVDCDDVDEEDVPTAAIRTMAIGEVRPQEQDERDQPSSSTMVHPPTEDDEQVPQVEALDQGGAQDDQVMEEEAQLAPLTQVRAMIQRDHPVDQILGDISKGVTTRSRLVNFCEHYSFVSSIEPFRVEEALLDPDWVLAMQEELNNFKRNEVWTLVPRPKQNVXWVFRNKQDEHGVMTRNKARLVAKGYAQVXRLYQMDVKSAFLNGPIKEEVYVEQPPGFEDERYPDHVCKLSKALYGLKQAPRAWYECLRDFLIVNAFKVGKADPTLFTKTCDGDLFVCQIYVDDIIFGSTNQKSCEEFSRVMMQKFEMSMMGELNYFLGFQVKQLKDGTFISQTKYTLDLLKRFGMKDAKPAKTPVGTDGHTDLNKGGKSVDQKAYRSMIGSLLYLCASRPDIMLSVCMCARFQSDPKECHLVAVKRILRYLVATPCFGLWYPKGSTFDLVGYSDSDYAGCKVDRKSTSGTCQFLGRSLVSWNSKKQTSVALSTVEAEYVAAGQCCAQLLWMRQTLRDFGYNLSKVPLLCDNESAIRMAENPVEHSRTKHIDIRHHFLRDHQQKGDIEVFHVSTENQLADIFTKPLDEKTFCRLRSELNVLDSRNLD

SEQ ID NO: 10271 - protein, 434 aa, Zea mays
  Clone ID: TF_ZM4989.C9.o3.fg.pep
MDPKGKGMVVNNNEKESIFNEPKDDKPTDSVSSHKHKDGKKKKTRRIKEIVYYDSDESSSSQKDDDYEKKKTVNSNFSFDYSRIPQSTNAHLLSIPLGKPPHFDGEDYGFWSHKMRSHLFSLHPSIWEIVESGVHFDSTDSPMFINEQIHKNAQATTVLLASLCRDEYHKVSGLDNAKQIWDTLKISHEGNDVTMLTKMELVEGELGRFAMIRGEEPTQTYNRLKTLVNKIRSYGSTRWTDHDVVRLMLRSFTVLDPHLVNNIRESPSGRMMIKEARYVDDALNGPINEPQPLALKATRSKETLPSKVAQIEAVGLNDEEMALIIKRFKTALKGRKGQPSKTKTKGKRSCFKCGKLGHFIANCPDNDSDQDQGNKREKKKNYKKAKGEAHLGKEWDSDCSSSDSDNEGLAATAFNKSSLFPNERHTCLMAREKK

SEQ ID NO: 10272 - protein, 1742 aa, Zea mays
  Clone ID: TF_ZM4990.C4.o2.fg.pep
MDPKGKGIVINDKERESFVNEPRDDKSNDSSSGHRRKDGKKKKTRRIKEIVYYDSDESTSSQKDEDNDYKQKTVNSNFSFDYSRIPQSSNSHLLSIPLGKPPHFDGEDYGFWSHKMRSHLFSLHPSIWEIVESGMKFDSSDSPVIINEQIHRNAQATTVLLASLCREEYNKVSGLDNAKQIWDTLKISHEGNDVTMLTKMELVEGELGRFAMIRGEEPTQTYNRLKTLVNKIRSYGSTRWTDHDVVRLMLRSFTILDPHLVNNIRENPRYTKMSPEEILGKFVSGRMMIKEARYVDDALNGPIHEPQPVALKATRSKEALPSKVAQVEAAGLNNEEMALIIKRFKTALKGRKGQPSKTKAKGKRSCFKCGKLGHFIANCPDNDSDQDQGNKREKKKHYKKAKGEAHLGKEWDSDCSSSNSDNEGLAATAFNKSTLFPNERHTCLMASEKKVCTRNSTYASSSEDESSDEDEVDYSCLFKGLDRTKVDKINELIDALNEKNMLLEKQEDLLYEEHDKFIEAQKSYALEVKRNELLSFELSTCHETISTLKGVNNDLNAKLEVANKSNSCVEHVAICSRCKDFDINACSEHLVSISKLNDELASLNAQLKTSKSDFDKLKFARDAYTVGRHPSIKDGLGFKREAKNLTSHKAPIPAKEKGKAPMATSTKKNHAFLYHDRRQSRSAYRGYNAYDDFDSHHMIASSSSYMHGRNMSRRNAIHHVPRKNVSHASRKVVNEPSTIYCALNASFAIRRKDKKIVARKLGAKCKGDKTCIWVPKDICTNLVGPNMSWVYASGGSSWIIDSGCTNHMTGEKKMFTSYVKNKDSQDSIIFGDGNQGKVKGLDVSVFRRSDGSLAFKGVLDGKLYLVDFAKEEAGLDACLIAKTSMGWLWHRRLAHVGMKNLHKLLKGEHVIGLTNVQFEKDRPCAACQAGKQVGGSHHTKNVMTTSRPLEMLHMDLFGPVAYLSIGGSKYGLVIVDDFSRFTWVFFLQDKSETQGTLKRFLRRAQNEFELKVKKIRSDNGSEFKNLQVEEFLEEEGIKHEFSAPYTPQQNGVVERKNRTLIDMARTMLGEFKTPECFWTEAVNTACHAINRVYLHRLLKKTSYELLTGNKPNVSYFRVFGSKCYILVKKGRNSKFAPKAVEGFLLGYDSNTKAYRVFNKSSGLVEVSSDVVFDETNGSPREQVVDLDDVDEEDVPTAAMRTMAIGDVRPQEHLERDQPSSSTMVHPPTQDDEQPFRVEEALLDPDWVLAMQEELNNFKRNEVWTLVPRPKQNVVGTKWVFRNKQDEHGVVTRNKARLVAKGYAQVAGLDFEETFAPVARLESIRILLAYAAHHSFRLYQMDVKSAFLNGPIKEEVYVEQPPGFEDERYPDHVCKLSKALYGLKQAPRAWYECLRDFLIANAFKVGKADPTLFTKTCDGDLFVCQIYVDDIIFGSTNKKSCEEFSRVMTQKFEMSMMGELNYFLGFQVKQLKDGTFISQTKYTQDLLKRFGMKDAKPAKTPMGTDGHTDLNKGGKSVDQKAYRSMIGSLLYLCASRPDIMLSVCMCARFQSDPKECHLVAVKRILRYLVATPCLGLWYPKGSTFDLIGYSDSDYAGCKVDRKSTSGTCQFLGRSLVSWNSKKQTSVALSTAEAEYVAAGQCCAQLLWMRQTLRDFSYNLSKVPLLCDNESAIRMAENPVEHSRTKHIDIRHHFLRDHQQKGDIEVFHVSTENQLADIFTKPLDEKTFCRLRSELNVLDSRNLD

SEQ ID NO: 10273 - protein, 1502 aa, Zea mays
  Clone ID: TF_ZM5007.C1.o5.fg.pep
MDPKGKGIVINDKEKESLVNEPKDDKPTDSGSGHKRKDGKKKKTRRIKEIVYYDSDESSSSQKDDDDYEKKKTVNSNFSFDYSRIPQSTNAHLLSIPLGKPPHFDGEDYGFWSHKMRSHLFSLHPSIWEIVENGMHFDSSDSPMFINEQIHKNAQATTVLLASLCRDEYHKVSGLGNAKQIWDTLKISHEGNDVTMLTKMELVEGELGRFAMIRGEEPTQTYNRLKTLVNKIRSYGSTRWTDHDVVRLMLRSFTVLDPHLVNNIRENPRYTKMTPEEILGKFVSGRMMIKEARYVDDALNGPINEPQPLALKATRSKEALPIKVAQIEAAGLNDEEMALIIKRFKTALKGRKGQPSKIKTKGKRSCFKCGKLGHFIANCPDNDSDQDQGIKREKKKNYKKAKGEAHLGKEWDSDCSSSDFDNEGLAATAFNKSSLFPNERHTCLMAREKKVCTQNSTYASSSEDESSDEDEIDYSCLFKGLDRTKVDKINELIDALNDKNRLLEKQEDLLYEEHDKFVEAQKSHALEVKRNEMLSCELSSCHETISSLRSINDDLNAKLETASKSTSCVKIVETCNRCKDIDIDACSEHIASIAKLNDEVASLNAQLKTSKSEFDKLKFARDAYTIGRHPSIKDGLGFKREVKNLTSHKASISIKEKGKAPMVSNAKKNHAFMYHDRKFSRNVHDDRSCNAYNAFDFHAMFASSSSYMHASGGSSWIIDSGCTNHMTGEKKMFTSYVKNKDSQDSIIFGDGNQGKDKSETQGTLKRFLRRAQNEFELKRKNRTLIDMARTMLGEFKTPECFWSEAVNTACHAINRVYLHRLLKKTSYELLTGNKPNVSYFRVFGSKCYILVKKGRNSKFAPKVVEGFLLGYDSNTKAYRVFNKSSGLVEASSDVVFDETNGSPREQVVDLDDVDEEDVPTAAIRTMEIGEVRPREQNERDQPSSSTMVHPPTQDDEQVHQQEACDQGGAQDDHVMEEEAQPAPPTQVRAMIQRNHPVDQILGDISKGVTTRSRLVNFCEHYSFVSSIEPFRVEEALLDPDWVLAMQEELNNFKRNEVWTLVPRPKQNVVGTKWVFRNKQDEHGVVTRNKARLVAKGYAQVAGLDFEETFAPVARLESIRILLAYAAHHSFRLYQMDVESAFLNGPIKEEVYVEQPPGFEDERYPDHVCKLSKALYGLKQAPRAWYECLRDFLIANAFKVGKADPTLFTKTCNGDLFVCQIYVDDIIFGSTNKKSCEEFSRVMTQKFEMSMMGELNYFLGFQVKQLKDGTFISQTKYTQDLLKRFGMKDAKPAKTPMGTDGHTDLNKGGKSVDQKAYRSMIGSLLYLCASRPDIMLSVCMCARFQSDPKECHLVAVKRILRYLVATPYFGLWYPKGSTFDLIGYLDSDYAGCKAEYVAAGQCCAQLLWMRQTLRDFGYNLSKVPLLCDNESAIRMAENPVEHSRTKHIDIRHHFLRDHQQKGDIEVFHVSSENQLADIFTKPLDEKTFCRLRSELNVAPKILF

SEQ ID NO: 10274 - protein, 671 aa, Zea mays
  Clone ID: TF_ZM5054.C3.o1.fg.pep
MDPKGKGIVINDKEKESFVNEPRDDKSNDSGSGHKRKDGKKKKTRRIKEIVYYDSDESSSSQKDDDHDKQKTVNSNFSFDYSRIPYSSNAHLLPIPLGKPPHFDGENYGFWSHKMRTHLFSLHPSIWEIVESGMKFDSSDSPSFINEQIHKNAQATTVLLASLCRDEYNKVSGLDNAKQIWDTLKISHEGNDVTLLTKTELVEGELGRFAMIRGEEPTQTYNRLKTLINKIRSYGSTRWTDHDVVRLMLRSFTVLDPHLVNNIRENPRYTKMSPEEVLGKFVSGRMMIKEARYVDDALNGPINEPQPFALKATRNKEALPSKVAQIEAAGLNDEEMALIIKRFKTVLKGRNGQPSKTKTKGKRSCFKCGKLGHFIANCPDNESDQEKGNKREKKKHYKKAKGEAHIGKEWDSDCSSSDSDNEGLAATAFNKSALFPNERHTCLMAKEKKVSTRNSTYASSSGDDSSDDDEIDYSSLFKGLDRITIGKINELIDALNEKDKLLEKQEDLLYEEHDKFLEAQKSHALEVKRNEMLTCELSSCHETISKLKSINDELNAKIEIASKSTTCVENVVICNRCKDFDIDACSEHIASIAKLNNEVASLNAQLKTSKSEFDKLKFARDAYTIGRHPSIKDGLGFKREAKNLTTHKTPISTKEKGKAPMANSVKKNHAF

SEQ ID NO: 10275 - protein, 369 aa, Zea mays
  Clone ID: TF_ZM5059.C8.o5.fg.pep
MDPKGKGIVINDKEKESFVNEPKDDKPTDSGSGNRRKEGKKKKTRRIKEIVYYDDNDESTSSQKDDDHNDYERGKPEARYVDDALNGPINEPQPLALKATRSKEALPSKVAQFEAAGLNDEEMALIIKRFKTALKGHKGQPSKTKTKGKRSCFKCGKLGHFIANCPDNDSDQEKGNKREKKKNYKKAKGEAHIGKEWDSDCSSSDSDNEGLAATAFNKSSLFPNEHHTCLMAKEKKGRRRCSPPTSKMRIPMIQLYSVMGTKARISLKPKGPSNASSGELKMKVKKIRSDNRSEFKNLQVEEFLEEEGIKHEFSAPYTPQQNGVVERKNRTLIDMARTMLGEFKTPECFWSEAVNTACHAINRVVGDHN

SEQ ID NO: 10276 - protein, 611 aa, Zea mays
  Clone ID: TF_ZM5066.C9.o1.fg.pep
MDPKGKGMVVDNNEKESIFNEPKNDKSTDLGSSHKRKDGKKKKKTRRIKEIVYYDSDESSSSQKDDDNDYRKTVNSNFSFDYSRIPHSSNSHLLSIPLGKPPHFDGEDYGFWSHKMRRHLFSLHPSIWEIVENGMKFDSSDSPMFINEQIHKNAQATTVLLASLCRDEYNKVSGLDNAKQIWDTLKISHEGNDVTLLTKTELVEAELGRFAMIRGEEPTQTYNRLKTLINKIRSYGSTRWTDHDVVRLMLRSFTILDPHLVNNIRENPRYTKMSPEEVLGKFVSGRMMIKEARYVDDALNGPINEPQPLALKATRSKEALPSKVAQIEAAGLNDEEMALIIKRFKTSLKGRKGQSSKTKAKGKRSCFKCGKLGHFIANCPDNDSDQDEGNKREKKKHYKKAKGEAHIGKEWDSDCSSSDSDHEGLAATAFNKSSLFPNERHTCLMAREKKVSTRDSTYASSSDNESSDDDDIDYSCLFKGLDRSKIDKINELIDALNEKDKLLEKQEDLLYEEHDKFVEAQRSHALEVKRNEMLSCELSSCHETISKLRSINDDMNAKLEIANKSNSCVEHVMSCTRCKDFDIDACSEHLVSISKLKDELASLNAQLKTSK

SEQ ID NO: 10277 - protein, 1497 aa, Zea mays
  Clone ID: TF_ZmC119_1202.pep
MNPPNPPPGGVDPLVAAQMAVMQQMADTMADMRAQMQQERQEMRQEREDIRQELRQERDEIRQERRAQQQQLQQQMQQQQQQQQVPLPPPPPPVPPRDKHREFMSHKPPTFASSPDPLDADDWLKSIEKMLNIAQCTDREKVLYASGRLTGPAADWWDSYTAAHDAADTITWAEFSTQFRNYHIPAGMIKIKKKEFLSLKQGNMSVSEYRDKFIQLSRYAPEEVAEDERKQEHFIEGLNGPLQYALVAHTFPSFQRLLDKALAIEHKRIQLGDLKRKAISQGQGSSSVRPRYSSPQGTPTRPGGPRPVQQSPLRTPPPRQATPTGTPTKFAGQSPGTQCFKCGKTGHYANVCPQRIATTPAQNKQQTPGKGYSIARVNQVSIDDTPDGGDLVIGMFYVNAIPATILFDSGATHSFMSARYANTNEIPLLNMRKPMIVITPKGPVEANQMTRRLTLTIMGREFGATAIILESSSIDLILGMSWLRKAKAVIACGRGTVELTTTKGERFQVNIAVTSSSMRAMFFMPEEFVGDNIRVVRDFPDVFPEELPGMPPEREVEFVIDLLPGTAPISKRPYRMSVEELKELKKQLTELQEAGYIRPSSSPWGAPVLFVQKKDGSQRMCVDYRSLNDVTVKNKYPLPRIEDLFDQMRGARVFSKIDLRSGYHQMKIRPSDIPKTAFSTRYGLYEFTVMSFGLTNAPAYFMNLMNKVFMEYLDRFVVVFIDDILIYSKNESDHEQHLRLVLQKLRDNQLYAKFSKCEFWIDRVPFLGHIISNGGIAVDPAKVKEIMEWRVPTTVTEIRSFLGLAGYYRRFIEGFSKIAKPMTSLLEKGREFKWDEKCQESFDQLKERLMSPPVLIMPDLQKGFDIYCDACGQGLGCVLMQDGHVIAYASRQLRKHELNYPTHDLELAAVVHALKIWRHYIMGTKCQVYTDHKSLKYIFTQKDLNLRQRRWLELIKDYDLEIHYHPGKANLVADALSRKEHVHSAFVAQLPDELAKDFERLNLGIVTHTEGVTIKLEPTLEQEIRKGQIGDAKIQEIKDLITEGRGPEFTEDEQGTIWFKNRICVPDIESLRETILKEAHDSVYSIHPGSTKMYQDLKQKYWWYGLKRDVAAHVAMCDVCQRVKAEHQRPAGLLHPLKIPEWKWEEIGMDFIVGLPRTPAGYDSIWVIVDRLTKVAHFIPVRTNYTGAKLAELYMTRIVCLHGVPKKIVSDRGSQFTSRFWKKLHESLDTKLNFSSAYHPQTDGQTERTNQVLEDMLRACALKHGGSWEKSLPYAEFSYNNSYQASLKMSPFEALYGRRCRTPLYWDQTGERQFFGPELIQEAEEQVRMIRENLRIAQSRQKSYADNRRRLLEFKEGDQVYLKVSPLRGMRRFKVKGKLSPRFIGPFLILKRVGEVAYQLELPDHLADVHDVFHVSQLKKCLRVPEEQLPTEDLNVQDDLTYAEYPIKILDTLTRVTRNKVIKMCKVQWSHHSEDEATWEREEELRIDFPHLFPRSP

SEQ ID NO: 10278 - protein, 1494 aa, Zea mays
  Clone ID: TF_ZmC119_1226.pep
MDPPNPPPGGVDPLVAAQMAVMQQMADTMADMRAQMQQERQEMRQEREDIRQELRQERDEIRQERRAQQQQQQQQQQQQVPLPPPPPPVPPRDKHREFMSHKPPTFASSPDPLDADDWLKSVEKMLNIAQCTDREKVLYASGRLTGPAADWWDSYTAAHDAADTITWAEFSTQFRNYHIPAGMIKIKKKEFLSLKQGGMSVSEYRDKFIQLSRYAPEEVAEDERKQEHFIEGLNGPLQYALVAHTFPSFQRLLDKALAIEHKRVQLGDLKRKAISQAQGSSIVRPRYSSPQGTPTRPGGPRPVPQSPLRTPPPRQATPTGTPTKFAGQSPGTQCFKCGKMGHYANVCPQRIATTPVQNKQQTPGTGKGYSIAKVNQVSVDATPDGGDLVLGMFYVNAIPATILFDSGATHSFMSARYANTNEIPLLNMRKPLIVITPKGPVEANQMTRRLTLTIMGREFGATAIILESSSIDLILGMSWLRKAKAVIACGRGTVELTTTKGERFQVNIAVTSSSMRAMFFMPEEFVGDNIRVVRDFPDVFPEELPGMPPDREVEFVIDLLPGTAPISKRPYRMSVEELKELKKQLTELQEAGYIRPSSSPWGAPVLFVQKKDGSQRMCVDYRSLNDVTVKNKYPLPRIEDLFDQMRGARVFSKIDLRSGYHQMRIRPSDIPKTAFSTRYGLYEFTVMSFGLTNAPAYFMNLMNKVFMEYLDRFVVVFIDDILIYSQSESDHEEHLRMVLQKLRDNQLYAKFSKCEFWIGEVPFLGHIISNGGIAVDPAKVKEIMEWRVPTTVTEIRSFLGLAGYYRRFIEGFSKIAKPMTSLLEKGKEFKWDEKCQDSFDLLKKRLMSPPVLVMPDLQKGFDIYCDACGQGLGCVLMQEGHVIAYASRQLRKHELNYPTHDLELAAVVHALKIWRHYIMGTKCQVYTDHKSLKYIFTQKDLNLRQRRWLELIKDYDLEIHYHPGKANLVADALSRKEHVHSAIVAQLPDEIVEDFRRLNLGIVAHTEGVTIDVEPTLEQEIRKGQIGDAKIKEIKDLITEGRVPEFTEDEQGTVWFKDRMCVPDIKSLRETILKEAHDSDYSIHPGSTKMYQDLKRKYWWYGLKRDVAAHVAMCDVCQRVKAEHQRPAGLLHPLKIPEWKWEEIGMDFITGLPRTQKGYDAIWVIVDRLTKVAHFIPVKTTYKGSQLAELYMARIVCLHGVPKKIVSDRGSQFTSRFWRSFHENMSTKLNFSTAYHPQTDGQTERTNQVLEDMLRACALQHGGSWDKSLPYAEFSYNNSYQASLKMSPFEALYGRKCRTPLYWDQTGERQFFGPELIQEAEEQVRIIRENLRVAQTRQKSYADNRRRPLEFEEGDYVYLKVSPLRGMRRFKVKGKLSPRYIGPFLIFRRVGEMAYQLELPDSLSDVHNVFHVSQLKKCLRVPEEQLPLEELSVQGDLTYTEYPIKILDTLTRVTRNKVIKMCKVQWSHHSEDEATWEREEELRIDFPHLFSSSS

SEQ ID NO: 10279 - protein, 934 aa, Zea mays
  Clone ID: TF_ZmC10872_3.pep
MSGELAKKEMETGNKPATSHGKASSGESRNKEKKREKKKEKKTSSHKSHRSGDKIKKMRKVVYYETDTSSPSTFGSDAPSITSKRHERKKFSKIPLHYPHTSRHTPLLSVPLGKPPTFDGEDYARWSDLMKFHLTSLHKSIWNVVEFGAQEPSVGDEDYDEDEVAQIEHFNSQATTILLASLSREEYNKVQGLKNAKEVWDVLKTAHEGDELTKITKRETIEGELGRFRLRQGEEPQDMYNRLKTLVNQVRNLGSKKWDDHEVVKVILRSLIFLNPTQVQLIRGNPRYTLMTPEEVIENFVSFEFMIKGSRKINELDGPSMSEAQPVAFKATEEKKEESTSSRTPIDASKLDNEEMVLVIKSFHQILKQRRGKDYKPRSKKVCYKCGKPGHFIAKCPISSDSDRGDDKKGRRKEKKRYYKKKGGDTHVCREWDSDESSSDSSSDEDAANIAVTKGLLFPNVGHKCLMAKDGKKKKVKSKSSTRYESSSDENASDEEDNLRTLFANLNMQQKEKLNELISAIHEKDDLLDSQEDFLIKENKKHVKVKNTYALEVEKCEKLSSELSTCHETIDNLRNENSNLLAKVDSIACNVSIPNLRNDNDDLLAKIEELNISFVSLRKENEKLIAKAKDFDVCNVTISDLRDKNDILRAKIVELNSCKPSTSIVEHTTICTTCRDVNIDAIHDHMALIKQQNDHIAKLDAKIAEHDLENEKFKFARSMLYRGRRPGIKDGIGFQQGGNVKLNAPPKKLSNFVKGKAPMPQDNEGYILYPVGYPEDKIRKIHSRKSHSGPNHAFMYKGETSSSRQPTRAKLPKKKIPNASNEHSFSFKTFDASYVLTNKSGKVYASGGSSWIIDSGCTNHMIGEKKMFSSYEKNQDPQRAITFGDGNQGLVKGLGKIAISPGHWMLPNTLPTKLMQHKKWNRERKYCKIWQHLP

SEQ ID NO: 10280 - protein, 1029 aa, Zea mays
  Clone ID: TF_ZmC119_1222.pep
MPPRTRLTARKSTGPIGVPRHQLAPRHESSSSGSNDPIGDLEARVSRLQAALQQRTDAWVADGDRINELRRDIRHLQDQLADRDLALDWAVQSRLLMCAKEARAQARIKELSSTVDDLQVYCNTLHEEVHVLYSQLHPSEPAPPAEAEAGPSHVAGRALGGELDLFEPPPSLRTRAQDASGTSGGRDVTPNPPPVPPTLAEAIATLVNATADNTRFLRVMAGQQQLQQQAGRGFQQGPRETTYLDFSETRPPLFIKAEDPLEADEWIRVIEQKFGLLRCSEVQKPLFAAQQLRGPASTWWGNFVAIQPDNHQITWNEFKAAFREHYIPEGVLHMKQEEFMKLKQGGDTVNQYLNKFNHLSQYAIDQVNTDLKKKNCFMRGLNDRMQRKMAACIDLTYGKAVSTALSVEAKYGNSGKTKGFGGERPNQGQAKKPRFVIRPSTQNRPFSRPPSFPFKQPIIIRPNNAPTTPKQPGAPGTRFPALPSSSTGCFNCGKSGHFIKDCPYPRQNQSNASQGSGNSAPGKGSTSGKNTKKTGRVYYMQVATTPEGEPVMMGTFPVASHPAIILFDSGASHTFISKKFVEQHHIAYHESKEGFKIHSPGGHIYTKEVAYGVPVTMAGRNFPANMIVLKGQDIDVILGMNWLTQHKAILNTEFRTVRLSYNQEEILLTLPATNPAKTSGRVYEAIVPEIKNIPVVCEFLDVFPEDLPGLPRERDVEFVIELKPELKIQLQDLLNKGFIRPSSSPWGCPAIFVKKKDQTLRMCVDYRPLNEVTIKNKYPLPRIDILFDQLTGARVFSKIDLRSGYHQIRIRPEDIPKTAFTTRYGLFEYLVMSFGLTNAPAHFTYLMNSVFMPELDKFVVVFIDDILIYSKNEEDHAQHLRIVLTRLREHQLYAKFSKCAFWLEEIQFLGHVLSAKGIAVDPIKVKDILEWKPPTTVHQVRSFLGLAGYYRRFIPDFSKLVKPITSLLKNHTKFNWSSRCNEAFEQLKVLLTSAPILAQPDIEKPFDVYCDASGSSLGYVLMQEGVDLL

SEQ ID NO: 10281 - protein, 1610 aa, Zea mays
  Clone ID: TF_ZmC119_1413.pep
MPPRTRLTARKSTGPIGVPRHQLAPQHESSSSGSNDPIGDLEARVSRLQAALQHRTDAWVADGDRINELRRDIRHLQDQLADRDLALDWAVQSRLLMCAKEARAQARVKELSSTVDNLQVYCNTLHEEVHILYSQLHPSEPAPPAEAQAGPSHVAGRALGGELDLFEPPPSLSNVKWKVFSGTLCLFQMFLPQMPTRTRGQDAAGTSGGRDVTPNPPPVPPTLAEAIAALVNATADNTRFLREMAGQQQLQQQAGRGFQQGPRETTYLDFSETRPPLFVKAEDPLEADEWIRVIEQKFGLLRCSEVQKPLFAAQQLRGPASTWWGNFVAIQPDNHQITWNEFKAAFREHYIPEGVLHMKQEEFMKLKQGGDTVNQYLNKFNHLSQYAIDQVNTDLKKRNCFMRGLNDRMQRKMAACIDLTYGKAVSTALSVEAKYANSGKTKGFSGDRPNQGQAKKPRFVIRPSNQNRPFSRPPSFPFKQPIIIRPNNAPTTPKQSGAPGTRFPALPSSSTGCFNCGKSGHFIKDCPYPRQNQTNNQQGSGNSAPGKGSTSGKNTRKTGRVYYTQVATTPEGEPVMMGTFPVASHPAIILFDSGASHTFISKTFVEQHHIACHESKEGFKIHSPGGHIYTKEVAYGVPVTMAGRNFPANMIVLKGQDIDVILGMNWLTQYKAILNTEFRTVRLSYNQEEILLTLPATNPAKASGRVYEAMVPEIKNIPVVCEFPDVFPEDLPGLPPERDVEFVIELKPGTAPISRRSYRMPPNELAELKIQLQDLLNKGFIRPSSSPWGCPAIFVKKKDQTLRMCVDYRPLNEVTIKNKYPLPRIDILFDQLTGARVFSKIDLRSGYHQIRIRPEDIPKTAFTTRYGLFEYLVMSFGLTNAPAHFTYLMNSVFMPELDKFVVVFIDDILIYSKNEEDHAQHLRIVLTRLREHQLYAKFSKCAFWLEEIQFLGHVLSAKGIAVDPSKVKDILEWKPPTTVHQVRSFLGLAGYYRRFISDFSKLVKPITSLLKNDTKFNWSSKCNEAFEQLKTLLTTAPVLAQPDITKPFDVYCDASGSGLGCVLMQEGRVIAYASRQLRRHEEHYPTHDLELAAVVHALKIWRHYLLGNICHIYTDHKSLKYIFTQSELNMRQRRWLELIKDYELEIHYHPGKANVVADALSRKTSCHCLMAKIFENTLCQEMEKLNLGIIQQGTLNQLRLESIILQRIIDAQKDNLGMKHIREKIRAGTAKCFKEDDQGVIWFKNRIVVPKNEELRQQILDEAHLSRYSIHPGSTKMYQDLKQHYWWTKMKIEIARYVAKCDTCRRVKAIHMKTAGPLQSLSIPTWKWEDISMDFIVGLPRTAKGYDSIWVIVDRLTKIAHFLPVKTDHPVVVYAQLYIACILSLHGVPKTIVSVRGPQFVSKFWSELQKFLGTKLLHSSAYHPQTSGQTERVNQILEDMLQACVLEFPQKWDECLPLAEFSYNNSYQESIKMAPFEALYGRRCRTPLNWSEPEERWFFRPNMVKETKEKVQRIIHNLKEAQARQKNYADKRRQPLVFQVNDHVYLKVSPMKGVNRFGVKGKLAPEYIGLFLILERYRLVAYRLQLPETLSTVHNVFHVSQLKKCLRVPD

SEQ ID NO: 10282 - protein, 430 aa, Zea mays
  Clone ID: TF_ZmC119_1839.pep
GQNKITRNGRGAVARVECTLRGKRLDGGVSVLSVRKRQIFVASVQRWYPKTSTKTRAAEGRPPIKNFLLSIWGGVFASHGSSSGSNDPIGDLEAQVDQLRAELRHRNDLWVADGERTNELRTEIHHLQDQLVDQDLALDWAVNSRSPAWAKEARARACVEELSSAVDNLQPAGHQITWDEFKLAFREHYIPEGVLHMKQEEFMKLKQGGDTVTQYLNKFNHLYQYAIDQVNTDIKKRNCFMRGLNDRMQRKMATCIDLTYGRAVSTALAVEAKYAGSGKSKGIGGDRPNQGPEKRQKLVIQPFNPNCSSLHPPSFPFKQPVFIRPTAAPTSTNQSGAPGTRFPALPSSSTGCFNCGKSGHFIKDCPYPRQNQSNNQQSSGSSKGNAATNTAAKNTRKTRRIYYTQVATTPEGEPVMMGTFLRAPRGGVNR

SEQ ID NO: 10283 - protein, 1658 aa, Zea mays
  Clone ID: TF_ZmC119_769.pep
MPPRTRLTARKSTGPIGVPRHQLAPRHESSSSGSNDPIGDLEARVSRLQAALQHRTDAWVADGDRINELRRDIRHLQDQLADRDLALDWAVQSRLLMCAKEARAQARVKELSSTVDNLQVYCNTLHEEVHILYSQLHPSEPAPPAEAEAGPSHVAGRALGGELDLFEPPPSLRTRAQDAAGTSGGRDVTPNPPPVPPTLAEAIAALVNATADNTRFLREMAGQQQLHQQAGRGFQQGPRETTYLDFSETRPPLFIKAEDPLEADEWIRVIEQKFGLLRCSEVQKPLFAAQQLRGPASTWWGNFVAIQPDNHQITWNEFKAAFHEHYIPEGVLHMKQEEFMKLKQGGDTVNQYLNKFNHLSQYAIDQVNTDLKKKNCFMRGLNDRMQRKMAACIDLTYGKAVSTALSVEAKYANSGKTKGFGGERPNQGQAKKPRFVIRPSNQNRPFSRPPSFPFKQPIIIRPNNTPTTPKQPGAPGTRFPALPSSSTGCFNCGKSGHFIKDCPYPRQNQSNASQGSGNSAPGKGSTSGKNTKKTGRVYYTQVATTPEGEPVMMGTFPVASHPAIILFDSGASHTFISKKFVEQHHIAYHESKEGFKIHSPGGHIFTKEVAYGVPVIMAGRNFPANMIVLKGQDIDVILGMNWLTQYKAILNTEFRTVRLSYNQEEILLTLPATNPAKTSGRVYEAIVPEIKNIPVVCEFPDVFPEDLPGLPPERDVEFVIELKPGTAPISRRSYRMPPNELAELKTQLQDLLNKGFIRPSSSPWGCPAIFVKKKDQTLRMCVDYRPLNEVTIKNKYPLPRIDILFDQLTGARVFSKIDLRSGYHQIRIRPEDIPKTAFTTRYGLFEYLVMSFGLTNAPAHFTYLMNSVFMPELDKFVVVFIDDILIYSKNEEDHAQHLRIVLTRLREHQLYAKFSKCAFWLEEIQFLGHVLSAKGIAVDPSKVKDILEWKPPTTVHQVRSFLGLAGYYRRFIPDFSKLVKPITSLLKNDTKFNWSSKCNEAFEQLKTLLTTAPVLAQPDITKPFDVYCDASGSGLGCVLMQEGRVIAYASRQLRRHEEHYPTHDLELAAVVHALKIWRHYLLGNICHIYTDHKSLKYIFTQSELNMRQRRWLELIKDYELEIHYHPGKANVVADALSRKVACHCLMAKTSENTLCQEMEKLNLGIIQQGTLNQLRLESIILQRIIDAQKDNLGMKHIREKIRAGTAKCFKEDDQGVIWFKNRIVVPKNEELRQQILDEAHLSRYSIHPGSTKMYQDLKQHYWWTKMKIEIARYVAKCDTCRRVKAIHMKTAGPLQSLSIPTWKWEDISMDFIVGLPRTAKGYDSIWVIVDRLTKIAHFLPVKTNSPVTVYAQLYIARILSLHGVPKTIVSDRGPQFVAKFWEALHNSLGTKLLHSSAYHPQTSGQTERVNQILEDMLRACVLDFSPKWDECLPLAEFSYNNSYQESIKMAPFEALYGRRCRTPLNWSEPGERYFFRPDMVKEVEEKVQRIIHNMKKAQARQKSYADKRRMPLYFLEGDYVYLKVSPMKGVSRFGVKGKLAPRYIGPFLILERYGPVAYRLQLPETLSAVHNVFHVSQLKKCLRVPDRTVEVTDVVLEPDLTYSEHPLRVLDQKDRVTRRKTLKFYKIQWNQHSEDEATWETQDFLDKNFPGFLASCKL

SEQ ID NO: 10284 - protein, 1696 aa, Zea mays
  Clone ID: TF_ZmC119_785.pep
MLRILLITFSSLEKMPPRTRLTARKSTGPIGVPRHQLAPRHESSSSGSNDPIGDLEARVSRLQAALQHRTDAWVADGDRINELRRDIRHLQDQLADRDLALDWAVQSRLLMCAKEARAQARVNELSSTVDNLQVYCNTLHEEVHILYSQLHPSEPAPPAEAEAGPSHVAGRALGGELDLFEPPPSLSNVKWKVFSGTLCLLQMILPQMPTRTRGQDAAGTSGGRDVTPNPPPVPPTLAEAIAALVNATADNTRFLREMAGQQQLQQQAGRGFQQGPRETTYLDFSETRPPLFIKAEDPLEADEWIRVIEQKFGLLRCSEVQKPLFAAQQLRGPASTWWGNFVAIQPDNHQITWNEFKAAFREHYIPEGVLHMKQEEFMKLKQGGDTVNQYLNKFNHLSQYAIDQVNTDLKKKNCFMRGLNDRMQRKMAACIDLTYGKAVSTALSVEAKYANSGKTKGFGGERPNQGQAKKPRFVIRPSTQNRPFSRPPSFPFKQPIIIRPNNAPTTPKQPGAPGTRFPALPSSSTGCFNCGKSGHFIKDCPYPRQNQSNASQGSGNSAPGKGSTSGKNTKKTGRVYYTQVATTPEGEPVMMGTFPVASHPAIILFDSGASHTFISKKFVEQHHIAYHESKEGFKIHSPGGHIYTKEVAYGVPVTMVGQNFPANMIVLKGQDIDVILGMNWLTQYKAILNTELRTVRLSYNQEEIFLTLPATNPAKASGRVYEAIVPEIKNIPVVCEFPDVFPEDLPGLPPEREVEFVIELKPGTAPISRRSYRMPPNELAELKIQLQDLLNKGFIRPSSSPWGCPAIFVKKKDQTLRMCVDYRPLNEVTIKNKYPLPRIDILFDQLTGERVFSKIDLRSGYHQIRIRPEDIPKTAFTTRYGLFEYLVMSFGLTNAPAHFTYLMNSVFMPELDKFVVVFIDDILIYSKNEEDHAQHLRIVLTRLREHQLYAKFSKCAFWLEEIQFLGHVLSAKGIAVDPSKVKDILEWKPPTTVHQVRSFLGLAGYYRRFIPDFSKLVKPITSLLKNDIKFNWSSKCNEAFEQLKTLLTTAPVLAQPDITKPFDVYCDASGSGLGCVLMQEGRVIAYASRQLRRHEEHYPTHDLELAAVVHALKIWRHYLLGNICHIYTDHKSLKYIFTQSELNMRQRRWLELIKDYELEIHYHPGKANVVADALSRKTSCHCLMAKIFENTLCQEMEKLNLGIIQQGTLNQLRLESIILQRIIDAQKDNLGMKHIREKIRAGTAKCFKEDDQGVIWFKNRIVVPKNEELRQQILDEAHLSRYSIHPGSTKMYQDLKQHYWWTKMKIEIARYVAKCDTCRRVKAIHMKTAGPLQSLSIPTWKWEDISMDFIVGLPRTAKGYDSIWVIVDRLTKIAHFLPVKTNSPVTVYAQLYIARILSLHGVPKTIVSDRGPQFVSKFWEELHKSLGTKLLHSSAYHPQTSGQTERVNQILEDMLRACVLDFSLKWDECLPLAEFSYNNSYQESIKMAPFEALYGRRCRTPLNWSEPGERYFFRPDMVKEVEEKVQRIIHNMKKAQARQKSYADKRRMPLYFLEGDYVYLKVSPMKGVSRFGVKGKLAPRYIGPFLILERYGLVAYRLQLPETLSAVHNVFHVSQLKKCLRVPDRTVEVTDVVLEPDLTYSEHPIRVLDQKDRVTRRKTLKFYKIQWNQHSEDEATWETQDFLNKNFPGFLASCKL

SEQ ID NO: 10285 - protein, 553 aa, Zea mays
  Clone ID: TF_ZmC119_832.pep
MPPRTRLTARKSTGPIGVPRHQLAPRHESSSSGSNDPIGDLEARVSRLQAALQHRTDAWVADGDRINELRRDIRHLQDQLADRDLALDWAVQSRLLMCAKEARAQARVKELSSTVDNLQVYCNTLHEEVHILYSQLHPSELAPPAEAEAGPSHVAGRALGGELDLFEPPPSLRTRAQDAAGTSGGRDVTPNPPPVPPTLAEAIAALVNATADNTRFLREMAGQQQLQQQAGRGFQQGPCETTYLDFSETRPPLFIKAEDPLEADEWIRVIEQKFGLLRCSEVQKPLFAAQQLRGPASTWWGNFVAIQPDNHQITWNEFKAAFREHYIPEGVLHMKQEEFMKLKQGGDTVNQYLNKFNHLSQYAIDQVNTDLKKKNCFMRGLNDRMQRKMAACIDLTYGKAVSTALSVEAKYANSGKTKGFGGERPNQGQAKKPRFVIRPSNQNRPFSRPPSFPFKQPIIIRPNNAPTTPKQPGAPGTRFPALPSSSTGCFNCGKSGHFIKDCPYPRQNQSNASQGSGNSAPGKGSTSGKNTKKTGRVYYTQVATTPEGEPVMM

SEQ ID NO: 10286 - protein, 904 aa, Zea mays
  unsure (1)..(904): unsure at all Xaa locations
  Clone ID: TF_ZmC3310_2.pep
VPSIGDEDYDEDKVAQIEHFNSQATTILLASLSREEYNKVQGLKSAKEVWDVLKTAHEGDELTKITKRETIEGELGHFRLRQGEEPQDMYNRLKTLVNQVRNLGSKKWDDHEVVKVILRSLIFLNLTQVQLIRGNPRYTLMTHEEVIGNFVSFEFMIKGSRKINELDGPSTSEAQSVAFKATEEKKEESTPSRTPIDASKLDNEEMALVIKSFRQILKQRRGKDYKPRSKKVCYKCGKPGHFIAKCPISSDRGDDKKGRRKEKKKYYKKKGGNAHVCREWDSDESSSDSFDDEDAANIAITKGLLFPNVGHKCLMAKDGKKKKVKSKSSTRYESSSDNNASDEEDNLRTLFANLNMQQKEKLNELISAIHEKDDLLDSQEDFLIKENKKHVKVKNAYSLEVEKCEKLSRKCALGSFLSILVIECQHKCLNVNLCPWMNKVQIKSKGALTIPNLRNDNDNLIAKIEELNITLASLRNENEKLLAKAKELDVCNATISDLRSKNDMLHAKVEELNVYKPSTSIVSHVSICTRCRDVNIDAIHDHIAMIKQQKDHIAKLDAKIAEHELENEKFKFARSMLYSGRRPGIKDVIGFQQGGNVKLNAPKRLSNFVKGKAPMPQDNEGYILYPAGYPEDKIRRIHAKKTHPISHHAFIYKNEASSSRRSTHVKMPKKKSPIASNNHNISFKTFDASYVLTNKXGKVVAKYVGGKHKGSKTCVWVPKVLVSNAKGPKTIWVYASGGSSWIIDSGCTNHMTGEKKMFSSYEKNEDPQRAITFGDGNQSLEGLDKIAISPDHSISNVFLVDSLDYNLLSVSQLCQMGYNCLFTDVGVTVFRRSDDSIAFKGVLEGQLYLVDFDRAKLDTCLIAKTSPCWLWHRRLVHVGMKNLHKLLKGEHILGLTNVHFEKDR

SEQ ID NO: 10287 - protein, 549 aa, Zea mays
  unsure (1)..(549): unsure at all Xaa locations
  Clone ID: TF_ZmC7465_22.pep
MSGDHAKKEMETGEKPTTSHGSTSSEESRTKRKEKKDSSKRKEKKSSSSHHKEKKEKSSSHKPHRKGDKHKRMRKVVYYETDTSSTSTSDSDAPSVTSKRQERKKYRDENYDEDEVAQIEHFNSQATTILLASLSREEYNKVQGLKNAKEIWDLLKTAHEGDELTKITKRETIEGELGRFRLRKGEEPQHMYNRLKTLVNQVRNLGSVKWDDHEVVKVILRSLIFLNPTQVQLIRGNPRYTKMTPEEVIGNFVSFECMIEGSRKINELDDATTSEAQPVAFKATEEKKEESTPSRQPIDASKLDNEEMALVIKSFRQILKQRRGKDYKSRSKKVCYKCGKPGHFIAKCPISSDSDRGDDKKGRRKEKKRYYKKKGGDAHICREWDSDESSSDSSDDEDAANIAVTKGLLFPNVGHKCLMAKDGKRKKXESSTDSSSDEDAANIAVTKGLLFPNVGHKCLMAKDGKRKKVKSRSSTKYETSSDEDDASNEEDNLRVLFANLNMEQKEKLNELISAIHEKDDLLDSQEDFLIKENKKHVKVKNAYALESTC

SEQ ID NO: 10288 - protein, 342 aa, Zea mays
  Clone ID: TF_ZmC7465_26.pep
METGDKPTTSHGSTSSEESRTKRKEKKKSSSNKGKEKKSSSHHKEKKEKSSSHKPHRSGDKHKRMRKVVYYETDTSSTSTSGSDAPSVTSKRQERDEDYDTDEVAQIEHFNSQATTILLASLSKEEYNKVQGLKNAKEIWDLLKTAHEGDELTKITKRETIEGELGRFRLRQGEEPQDMYNRLKTLVNQERNLGSKKWDDHEVVKVILRALIFLNPTQVQLIRGNPRYPLMTPEEVIENFVSFECMIKGSKKINELDEPSTSEAQPVAFKATEEKKEESTPSRQPIDASKLDNEEMALIIKSFRQILKQRRGKDYKPRSKKVCYKCGKPGHFIAKCPISSDS

SEQ ID NO: 10289 - protein, 896 aa, Zea mays
  Clone ID: TF_ZmC951_305.pep
MSGDHTKREMETGDKPTTSQGSTSSEESRTKRKEKKKDSSKRKEKRSSSSRHKEKKEKSSSHKSHRKGDKHKRMRKVVYYETDTSSTSTSDSDAPSVTSKRQERKKFSKIPSHYSRTSRHTPLLSVPLGKPPTFDGEDYARWSDLMKFHLTSLHKSIWNVVEFGAQVPSIGDEDYDTDEVAQIEHINSQATTILLASLSKEEYNKVQGLKNAKEIWDLLKTAHEGDELTKITKRETIEGELGRFRLRQGEEPQGMYNRLKTLVNQVRNLGSKKWDDHEVVKVILRSLIFLNPTQVQLIRGNPRYTLMTPEEVIGNFVSFEYMIKGSKKINELDEPSTSEAQPVAFKATEEKKEESTPSRQPIDASKLDNEEMALIIKSFRQILKQRRGKDYKPRSKKVCYKCGKPGHFIAKCPISSDSDRGNDKKGKRREKKKYYKKKGGDAHVCREWDSDESSTESSSDEDAANIAVTKGLLFPNIGHKCLMAKDGKRKKVKSKSSTKYESSSDDNASDEENNLRTLFADLNMQQKEKLNELISAIHEKDDLLDSQEDFLIKENKKHVKVKNAYALEVEKCNKLSSKLSTCHDTIDNLRNENARLIAKVDSHVCDVSIPNLRNDNDDLLAKIKELNDSLDSLRVENENLIAKAKDFDVCNTTISDLRTKNDMLHAKVVELKSCKPSTSTVEHTSICTRCRDVDINAIHDHMTLIKQQNDHIALLDAKIAEHNLENEKFKFARSMLYNGRRPGIKDGIGFQRGDNVKLNAPPKNLSNFVKGKAPMPQDNEGYILYPAGYPESKIRRTHSRKSHSGPNHAFMYKGETSSSRQPTRAKLPKKKTPNASNDHSISFKTFDASYVLTDKSGKVVAKFVGGKHKGSKTCVWVPKVLVSNAKVWGIDIPWAH

SEQ ID NO: 10290 - protein, 1676 aa, Zea mays
  Clone ID: TF_ZmC951_312.pep
MSGDHAKKEMETGEKPTTSQGSTSSEESRTKRKEKKKISSNKGKEKKSSSHHKEKKEKSSSHKPHRSKDKQKRMRKVVYYETDTSSTSTSGSDAPSVTSKRQERKKFSKIPLHYPRISKHAPLLSVPLGKPPTFDGEDYARWSDLMRFHLTSLHKSIWDVVEFGAQVPSVGDKDYDEDEVAQIEHFNSQATTILLASLSREEYNKVQGLKSAKEVWDVLKTAHEGDELTKITKRETIEGELGRFRLRKGEEPQHMYNRLKTLVNQVRNLGSVKWDDHEMVKVILRSLIFLNPTQVQLIRGNPRYTKMTPEEVIGNFVSFECMIEGSRKINELDDPSTSEAQPVAFKATEEKKEEATPTRQPIDASKLDNEEMALVIKSFRQILKQRRGKDYKSRSKKVCYKCGKPGHFIAKCPISSDSDRGDDKKGRRKEKKRYYKKKGGDAHVCREWDSDESSSDSSDDEDAANIAVTKGLLFPNVGHKCLMAKDVKRKKVKSNSSTKYESSSDDNASDEEDNLRTLFANLNIEQKEKLNELISAIHEKDDLLDSQEDCLIKENKKHVKVKKAYALEVEKCEKLSCELSTCREMIDNLRNENASLNAKVDSHVCNVSIPNPRDNNDNLLARIEELNISLASLKVENEDLIAKAKELDVCNATISNLRDKNDILHAKIVELNSCKPSTSIVEHVSICTRCRDVDINAIYDHMALIKQQNDHIAKLDAKIAEHNLENEKFKFARSMLYNGRRPGIKDGIGFQRGDNVKISAPPKRLSNFVKGKAPMPQDNEGYILYPAGYPESKIRRIHSRKSHSGPNHAFMYKGETSSSRQPTHAKLPRKKTPIASNEHSISFKTFDASYVLTNKSGKVVAKYVGGKHKGSKTCVWVPKVLVSNAKGPKTIWVYASGGSSWILDSGCTNHMTGEKKMFSSYEKNQDPQRAITFGDGNQGLVKDYNLLSVSQLCQMGYNCLFTDIGVTVFRRSDDSIAFKGVLEGQLYLVDFDRAELDTCLIAKTNMGWLWHRRLAHVGMKNLHKLLKGEHILGLTNVHFEKDREKSQTQETLKGFLRRAQNEFGLRIKKIRSDNGTEFKNSQIEGFLEEEGIKHEFSSPYTPQQNGVVERKNRTLLDMARTMLDEYKTSDRFWAEAVNTACYAINRLYLHRILKKTSYELLTGKKPNISYFRVFGSKCFILVKRGRKSKFAPKTVEGFFLGYDSNTRAYRVFNKSTGLVEVSCDVVFDETNGSQVEQVDLDEIGEEEAPCIALRNMSIGDVCPKESEEPPNAQDQPSSSTQVSPPTQNEDEAQVDEVEDQANEPPQDNGNDQGGDANEEDKEEEEQRPPHPRVHQAIQRDHPVDTILGDIHKGVTTRSRVAHFCEHYSFVSSIEPHRVEEALQDSDWVVAMQEELNNFTRNEVWHLVPRPNQNVVGTKWVFRNKQDEHGVVTRNKARLVAKGYSQVEGLDFGETYAPVARLESIRILLAYATYHGFKLYQMDVKSAFLNGPIKEEVYVEQPPGFEDSEYPNHVYKLSKALYGLKQAPRAWYECLRDFLIANGFKVGKADPTLFTKTLENDLFVCQIYVDDIIFGSTNESTCEEFSRIMTQKFEMSMMGELKYFLGFQVKQLQEGTFISQTKYTQDILTKFGMKDAKPIKTPMGTNGHLDLDTGGEDSTSRALMVPFLAIHAKKGEK

SEQ ID NO: 10291 - protein, 1552 aa, Zea mays
  Clone ID: TF_ZmC951_325.pep
MSGDHAKKEMETGEKPTTSNEKALSGESRNKEKKKEKKKEKKTSSHKSHRSGDKIKKMRKVVYYETDTSSPSTSGSDAPSMTSKRHERKKFSKIPLHYPRTSKHTPLLSVSLGKPPTFDGEDYARWSDLMKFHLTSLHKSIWNVVEFGAQVPSIGDEDYDEDEVAQIEHFNSQATTILLTSLSREEYNKVQGLKSAKEVWDVLKTAHEGDELTKITKRETIEGELGRFRLRQGEEPQDMYNRLKTLVNQVRNLESKKWDDHEVVKVILRSLIFLNPTQVQLIRGNPRYTLMTPEEVIGNFVSFEFMIKGSRKINELDGPSTSEAQPVAFKATEEKKEEPTPSRTPIDASKLDNEEMALVIKSFRQILKQRRGKDYKPRSKKVCYKCGKPGHFIAKCPISSDRGDDKKGRRKEKKRYYKKKGGDAHVCREWDSDESSSDSSDDEDAANIAVTKGLLFPNVGHKCLMAKDGKKKKVKSKSSTRYESSSDENASDEEDNLRTLFVNLNIQQKEKLNELISAIHEKDDLLDSQEDFLIKENKKHVKIKNAYALEVEKCEKLSSELSTCHETIDNLRNENANLLAKVDSNVCDTSIPNLKNDNDDWLAKIEELNISLASLRIENEKLLAKAKDFDVCNATISDLRTKNDILHAKHTSICTRCRDVDVNVIHDHMTLIKQQNDHIAKLDARIAEHDLENEKFKFTRSMLYRGRRPGIKDGIGFQQGGNVKLNAPPKKLSNFVKGKTPMPQDNEGYILYPAGYPESKIRRIHSRKSHSGPNHAFIYKGETSSSRQPTHAKLPKKKTPSASNEHDISFKTLDASYVLTNKSGKVVAKYVGGKHKGSKTCVWVPKVLVSNAKGPKTIWVYASGGSSWIIDSRCTNHMTGEKKMFSSYEKNQDPQRAITFEDGNQGLVKGVTFFRRSDDSVAFKGVLEGQLYLVDFDRAELDTCLIAKTNMGWLWHRRLAHVGMKNLHKLLKGEHILGLTNVHFEKDRICSACQAGKQVGAHHPHKNIMTTDRPLELLHMDLFGPIAYISIDGSKYCLVIVDDYSRFTWVFFLQEKSHTQETLKGFLRRAQNEFGLRIKKIRSDNGTEFKNSQIEGFLEEEGIKHEFSSPYTPQQNGVVERKNRTLLDMARTMLDEYKTSDRFWAEAVNTACYAINRLYLHRILKKTSYELLTGKKPNISYFRVFGSKCFILVKRGRKSKFAPKTVEGFLLGYDSNTRAYRVFNKSSRQVEVSCDVVFDETNGSQVEQVDLDEIGIEEAPCIALRNMSIGDVCPKESEEPPNAQDQPSSSTQASPPTQNEDEAQVDKGEDQANEPPQDDDNDQGGDANDQDKEDEEPRPPHPRVHQAIQRDHPVDTILGDIHKGVTTRSRVAHFCEHYSFVSSIEPHRVEEALQDSDWVVAMQEELNNFTRNEVWHLVPRPNQNVVGTKWVFRNKQDEHGVVTRNKARLVAKGYSQVEGLDFSETYAPVARLESIQILLAYATYHGFKLYQMDVKSAFLNGPIKEEVYVEQPPGFEDSEYPNHVYKLSKALYELKQAPRAWYECDSRLEGGG

SEQ ID NO: 10292 - protein, 1622 aa, Zea mays
  unsure (1)..(1622): unsure at all Xaa locations
  Clone ID: TF_ZmC951_330.pep
MSGEHAKKEMETDDKPATSHGKASSEESRKKGKGKEKKASSHKSHRSGDKKKKMRKVVYYETDTSSPSTSGSDAPSVTSKRHERKKFSKIPLHYPRTSRHTPLLSVPLGKPPTFDGEDYARWSDLMKFHLTSLHKSIWNVVEFGAQVPSVGDEDYDEDEVAQIEHFNSQATTILLASLSREEYNKVQGLKSAKEVWDVLKTAHEGDELTKITKRETIEGELGRFRLRQGEEPQDMYNRLKTLVNQVRNLGSKKWDDHEVVKVILRSLIFLNPTQVQLIRGNPRYTLMTPEEVIRNFVSFEFMIKGSRKINELDGPSTSEAQPVAFKVTEEKKEESTPSRTHIDASKLDNEEMALVIKSFRQILKQRRGKDYKPRSKKVCYKCGKPGHFIAKCPISSDSDRGDDKKGRRKEKKRYYKKKGGDAHVCREWDSDESSSDSSDDEDGANIAVTKGLLFPNVGHKXCLMAKDGKKKKXKLNELISAIHEKDDLLDSQEDFLIKENKKHVKVTNDYALEVEKCEKLSSELSTCHETIDNLRNENSNLLAKVDYIACNVSIPNLRNDNDDLLAKIEELNISLASLRIENEKLLAKAKELDVCNISISDLRDKNNILRAKIVELNSCKPSTSTVEHTSICTRCRDVDINAIHDHMALIKQQNDHIAKLDAKIAEHELENKNFKFARSMLYSGRRPGIKDGIGFQKGDNVKLNAPPKKLSNFVKGKAPMPQDNEGYILYPVGYPESKIRRIHSRKSHSGPNHAFMYKGETSSSRQPTRAKLPKKKTPSASNDHDISFKTFDASYVLTNKSGKVYASGGSSWIIDSGCTNHMTGDKKMFSYEKNQDPQRAITFGDGNQGVTVFRRSDDSIAFKGVLEGQLYLVDFYRAELDTCLIAKTNMGWLWHRRLAHVGMKNLHKLLKGEHILRLTNVHFEKDRICSACQAGKQVGAHHPHKNIMTTDMPLELLHMDLFGPIAYISIGGSKYCLVIVDDYSRFTWVFFLQEKSHTQETLKGFLRRAQNEFGLRIKKIRSDNGTEFKNSQIEGFLEEEGIKHELSSPYTPQQNGAVERKNRTLLDMARTMLDEYKNSDRFWAEAVNTACYAINRLYLHRILKKTSYELLTGKKPNISYFRVFGSKCFILVKRGRKSKFAPKTVEGFLLGYDSNTKAYRVFNKSSGQVEVSCDVVFDETNGSQVEQVDLDEIGDEEAPCIALRSMSIGDVCPKESKEPPNAQDQPSSSTQACPPTQNEDEAQVDEGEDQTNEPPQDDGNDQGGDANDQDKEDDEPRPPHPRVHQAIQRDHPVDTILGDIHKGVTTRSRVAHFCEHYSFISSIEPHRVEEALQDSDWVVAMQEELNNFTRNEQDEHGVVTRNKARLVAKGYSQVEGLDFGETYAPVARLESIRILLAYATYHGFKLYQMDLKSAFLNGPIKEEVYVEQPPGFEDSEYPNHVYKLSKALYGLKQAPRAWYECLRDFLITNGFKVGKVDPTLFTKTLENDLFVCQIYVDDIIFGSTNESTCEEFSRIMTRKFEMSMMGELKYFLGFQVKQLQEGTFLSQTKYTQDILSKFGMKDAKPIKTPMGTNGHLDLDTEGNSVDQKGERIILRALMTPFLAIHAKGGESISPKQKDRTTI

SEQ ID NO: 10293 - protein, 1374 aa, Zea mays
  unsure (1)..(1374): unsure at all Xaa locations
  Clone ID: TF_ZmC951_332.pep
MSGDHAKKMVIGDDKSATSHGKAPSRESANKKKDGSPSRIRSHKSGEKKKKMKKVVYYETDSSLPSTSGSDTASVTSKRQERKKCSTIRRDEDYDEDEVAQIVHFNSQATTILLTSLSREEYNKTAHEGDAVTKITKRETIEGELGRFRLRQGEEPQEMYNRLKTLVNQVRNLGSKKWDDHEMVKATEEKKEGSTSSRLPIDASKLDNEEMALIIKSFRQILKQRRGKDYKSRSKKVCYKCGKPGHFIAKCPISSDSDRGDDKKGKRREKKRYYEKKGGDAHVCREWNSDENSSDSSSDEDAANIAVTKGLLFPXVGHKCLMAKDGKRKXDEDNSCDEEDNLRALFANLNMQQKEKLNELISSIHEKDELLDSQEDFLIKENKKHVKVKNAYALELEKCEKLSSELSTCHDIIANLRNENAKIIAKIDSNVCDVSIPNLRDDNVSLLAKIEELNVSLASLRNENEKLIAKAKNLDVCNITISNLRNENDILHANIVELKSCKPSTSTVEHVFICTRCRDINVDAIHDHLALIKKQNNHIAQLNAKLNEHDLENEKFKFARSMLYSGRCLGIKDGIGFQKGDNVKLNXPPKRLSNFVKGKAPMPQDNEGXYASGGSSWIIDSGCTNHMTGEKKMFSSYEKNQDPQQAITFGDGNQGVTVFRRSDDSVAFKGVLEGQLYLVDFDRAELDTCLIAKTNMGWLWHRRLAHVGMKNLHKLLKGEHILGLTNVHFEKDRVCSACQTGKQVGVHHPHKNIMTTDRPLELLHMDLFGPIAYISIGGSKYCLVIVDDYSRFTWVFFLQEKSHTQETLKGFLRRAQNEFDLRIKKIRSDNGTEFKNSQIEGFLEEEGIKHEFSSPYMPQQNGVVNRNNRTLLDMARTMLDEYKTSDRFWAEAVNTACYAINRLYLHRILKKTSYELLTGKKPNVSYFRVFGSKCFILVKRGRKSKFAPKTVEGFLLGYDSNTRAYRVFNKSTGLVEVSCDIVFDETNGSQVEQIDLDELDDEEAPCVALRNMSIGVVCPKESEEPPQAQDQPSSSMQASPPTQDEDEAQNDEGEDQEVEPPQEESNDQGGDAHDQDEEDEQVQRPPHPRVHQAIQRDHPVNTILGDIQKGVITRSRVAHFCEHYSFVSSIEPHKVEEALQDSDWVVAMQEELNNFTRNELYQMDVKSAFLNGPIKEEVYVEQPPGFEDSEYPNHVYKLSKALYGLKQAPRAWYECLRDFLITNGFKVGKADPTLFTKTLENGLFVCQIYVDDIIFGSTNESTCEEFSRIMTQKFEMSMMGELKYFLGFQVKQLQEGTFISQTKYIQDISNKFGTKDAKPIKTPMGTNGHLDLDTGGKSVDQKKEHIGDLPVLGKVSGVLGFKEAKFHSSFYCQS

SEQ ID NO: 10294 - protein, 1699 aa, Zea mays
  unsure (1)..(1699): unsure at all Xaa locations
  Clone ID: TF_ZmC951_334.pep
MSGELAKREMETGDKPATSHGSTSSEESRNKRKEKKNSSNKGKGKEKKSSSHKSDRRGDKHKRMRKVVYYETNSSSPSTSDSDAPSVTSKRQERKKYSKIPLRYPHVSKRTPLLSVPLGKPPVFDGGDYNMWSDKMRHHLTSLHTSIWNVVEFGVQVPSVGDEDHDSDEAAQIHHFNSQATTILLASLSREEYNKVQGLKSVKEIWDVLKTAHEGDEVTKITKRETIEGELGRFMLHQGEDPQAMYNRLKTLVNQVRNLGSEKWDDHEMVKVILRSLVFLNPTQVQLIRDDPRYKLMSPEEVIGKFVSFELMIKGSKKIIEQGTSFTPEAQPVAFKATEEKKEESTSSRQPIDASKLDNEEMALIIKSFRQILKQRRGKDYKPRSKKVCYKCGKPGHFIAKCPISSDSDRGDDKKGKRREKKRYYKKKGGDAHVCREWDSDESSTDSSSDEDTANIAVTKGLLFPNVGHKCLTAKDGKRKKVKSKSSTKYESSSDEEDSLRTLFANLNMEQKEKLNELISIIHEKDDLLDSQEDFLIKENKKHVKVKNAYALEVEKCEKLSSELSTCHETINNLRNENVKLIAKVDSHVCNASTSNPRDDNVDLLARIDELNVSLASLRIENEKLLAKAKDFNVCNITISNLRSENDILHAKVVELKSCKPSTSTVEYTAICTRCRDVDVNAIHDHMALIKQQNDHIAKLDAKIAEHNLENEKFKFARSMLYNGRRPGIKDGIGLQRGDNVKINAPPKRLSNFVKGKAPIPQDNEGYILYPSGYPESKIRRIHSTKSHSGPNHAFMYKGEKSSSRQPTHAKLPKRKTPSASNDHDISFKTFDASYVLTNKSGKVVAKFVGGKYKGSKTCVWVPKVLVSNAKGPKTVWVYASGGSSWIIDSGCTNHMTGEKEMFSSYEKNQDPQRAITFGDGNQCVVKGLGVTVFRRSDDSIAFKGVLEGQLYLVDFDRAELDTCLIAKTNMGWLWHHRLAHAGMKNLHKLLKGEHILGLTNVHFEKDREKSQTQETLKGFLRRAQNEFDLRIKKIRSDNGTEFKNSQIEGFLEEXGIKHEFSSPYTPQQNXFWAEAVNTACYAINRLYLHRILKKTSYELLTGRKSKFAPKTVEGFLLGYDSNTRTYRVFNKSSGQVEVSCDVVFDETNGSQVEQVDLDEIGDEEAPCTALRNMSIGDVCPNESEESPNAQDQPSSSTQASPPTQNEDEGGDANDQDKEDEEQRPPHPRVHQAIQRDHPVDTILGDIHKGVTTRSRVAHFCEHYSFVSSIEPHRVEEALQDSDWVVAMQEELNNFTRNEVWHLVPRPNQNVVGTKWVFRNKKDEHGVVTRNKARLVAKGYSQVEGLDFGETYAPVARLKSIRILLAYATYHGFKLYKMDVKSAFLNGPIKEEVYVEQPPGFEDSEYPNHVYKLSKALYGLKQAPRAWYECLRDFLITNGFKVRKADPTLFTKTLDNDLFVCQIYVDDIIFGSTNESTCEEFSRIMTQKFEMSMMGELKYFLGFQVKQHQEGTFLSQTKYTQDILSKFGMKDAKPIKTPMGTNGHLDLDEGGVKGSHLANKKTKYWVQQKSKGTTEGTSGMAHRTVRCATGQCPVHQRTPSRTRHLRENPEALRYNSPDCPVYTGQCPVLQGRAALELASFGNSQRLVRYNSPDMSGVHRTVRCDIETTDTSAPTATCSALNARQHAQKSDPPMLAHRTL

SEQ ID NO: 10295 - protein, 1785 aa, Zea mays
  Clone ID: TF_ZmC951_337.pep
MSGDHAKKEMETGEKPTTSYGSTSSEESRTKRREKKKSSSNKGKEKKSSSHHKEKKEKSSSHKPHRKGDKHKRMRKVVYYETDTSSTSTSDSDAPSVTSKRQERKKYSKIPLRYPRISKHTPLLSVPLGKPPTFDGEDYARWSDLMQFHLISLHKGIWDVVEFGVQVPSIGDENYDEDEVAQIEHFNSQAATILLASLSKEEYNKVQGLKNAKEIWDVLKTAHEGDELTKITKRETIEGELGRFRLHKGEEPQHMYNRLKTLVNQVRNLGSKKWDDHEVVNVILRSLIFLNPTQVQLIRGNPRYTKMTPEEVIGHFVSFECMIEGSRKINELGDPSEAQPVAFKATEEKKEESTPSRQPIDASKLDNEEMALVIKSFRQILKQRRGKDYKSRSKKVCYKCGKPGHFIAKCPISSDSDRGDDKKGRRKEKKRYYKKKGGDAHVCREWDSDESSSDSSDDEDAANIAVTKGLLFPNVGHKCLMAKDGKKKKVKSNSSTKYESSSDDNASDEEDNLRILFANLNMEQKEKLNELISAIHEKDDLLDSQEDCLIKENKKHVKVKKAYALEVEKCEKLSSELSTCREMIDNLRNENAILNAKVDSHVCNVSIPNLRDDNIDLLAKIDELNASLASLRLENENLIAKAKNFDVCNATISDLRTKNEMLHAKVVELKSCKPSTSNLEHVSICTKCRDIDVNAILDHMALIKQQNDHIAKLDAKIAEHNLENEKFKFARSILYNGRRPGIKDGIGFQRGDNVKLNAPPKNLSNFVKGKAPMPQDNEGYILYPAGYPESKIRKIHSRKSHSGPNHAFMYKGETSSSRQPTRAKLPRKKISNASNEHSIAFKTFDASYVLTNKSGKVVAKFVGNKHKGSKTCVWVPKVLVSNAKGPKTVWVYASGGSSWILDSGCTNHMTGEKRMFSSYEKNQDPQRAITFGDGNQGVTVFRRSDDSIAFKGVLEGQLYLVDFDRAELDTCLIAKTNMGWLWHRRLAHVGMKNLHKLLKGEHILGLTNVHFEKDRICSACQAGKQVGVHHPHKNIMMTDRPLELLHMDLFGPIAYISIGGSKYCLEKSQTQETLKGFLRQAQNEFALRIKKIRSDNGTEFKNSQIESFLEEEGIKHEFSSPYTPQQNGVVERKNRTLLDMARTMLDEYKTPDRFWAEAVNTACYAINRLYLHRILKKTSYELLTGKKPNISYFRVFGSKCFILIKRGRKSKFAPKTVEGFLLGYDSNTRAYRVFNKSTGLVEVSCDVVFDETNGSQVEQVDLDEIGEEQAPCIALRNMSIGDVCPKESEEPPSTQDQPSSSMQASPPTQNEDEAQNDEEQNQEDKPPQDDSNDQGGDTNDQEQEDEEEPRPPHPRVHQAIQRDHPVDTILGDIHKGVTTRSRVAHFCEHYSFVSSIEPHRVEEALQDSDWVVAMQEELNNFTRNEVWHLVPRPNQNVVGTKWVFRNKQDEHGVVTRNKARLVAKGYSQVEGLDFGETYAPVARLESIRILLAYATYHGFKLYQMDVKSAFLNGPIKEEVYVEQPPGFEDSEYPNHVYRLSKALYGLKQAPRAWYECLRDFLIANGFKVGKADPTLFTKTLENDLFVCQIYVDDIIFGSTNESTCEEFSRIMTQKFEMSMMGELKYFLGFQVKQLQEGTFISQTKYTQDILAKFGMKDAKPIKTPMGTNGHLDLDTGGKSVDQKSISNQVIGILKGNWSLRRRKRLPLRNSYFAITPSNSLFFGGEMSIKEKDFILEGESKSSKAKGPDLVFGIILTHFLMTKGEEITSRALMIPFLAIHAKKGEK

SEQ ID NO: 10296 - protein, 1712 aa, Zea mays
  Clone ID: TF_ZmC951_339.pep
MSGELAKKEMETGDKPATSHGKASSGESHNKEKKKEKKKEKKTSSHKSHQSGDKIKKMRKVVYYETDTSSPSTSGSDAPSITSKRHERKKFSKIPLHYPRTSRHTPLLSVPLGKPPTFDGEDYARWSDLMKFHLTSLHKSIWNVVEFGAQVPSVGDEDYDEDEVAQIEHFNSQATTILLASLSREEYNKVQGLKSAKEVWDVLKTAHEGDELTKITKRETIEGELGRFRLRQGEEPQDMYNRLKTLVNQVRNLGSKKWDDHEVVKVILRSLIFLNPTQVQLIRGNPRYTLMTPKEVIRNFVSFEFMIQGSRKINELDGPSTSEAQPIAFKATEEKKEESTPSRTPIDASKLDNEEMALVIKSFRQILKQRRGKDYKPRSKKVCYKCGKPGHFIAKCPISSDSDRGDDKKGRRKEKKMYYKKKGGDAHVCREWDSDESSSDSSDDEDAANIAITKGLLFPNVGHKRLMAKDGKKKKVKSKSSTRYESSSDENASDEEDNLRTLFANLNMQQKEKLNELISAIHEKDDLLDTQEDFLIKENKKHVKVKNAYALEVEKCEKLSSELSSCHETIDNLRNENTKLLAKVDSNACNVLIPNPRNDNDDLLAMIEELNISLASLRNENEKLIAKAKDFDVCNATISDLRDKNDILHSKIVELNSCKSSTSTVEHTTICTRCRDVNIDAIHDHMALIKQQNDHIAKLDAKIAEHNLENEKFKFARSMLYSGRRPGIKDDIGFQQGGNVKINAPPKKLSNFVKGKAPMPQDNEGHILYPAGYSESKIRRIHSRKSHSGPNHAFMYKGETSSSRQQTHAKLPKKKTPSASNEHNFSFKTFDASYILTNKSGKIVAKYVGGKQKGSKTCVWVPKVLISNAKGPKTIWVYASGGSSWIIDSGCTNHMTGEKKLFSSYEKNQDPQRAITFGDGNQDSLDYNLPSVSQLCQMGYNCLFTDEKSHTQETLKGFLRRAQNEFGLRIKKIRSDNGTEFKNSQIEGFLEEEGIKHEFSSPYMPQQNGVVERKNRTLLDMARTMLDEYKTSDRFWAEAVNTACYAINRLYLHRILKKTLYELLTGKKPNISYFRVFGSKCFILIKRGRKSKFAPKTVEGFLLGYDSNTRAYRVFNKSTGQVEVSCDVVFDETNGSQVEQVDLDEIGDEEAPCIALRNMSIGDVCPKESQEPPNAQDQPSSSTQASPPTQNEDDAQVDEGEDQANKPPQDDDNNQGGDVNEQDKEDEEQRPPHPRVHQAIQRDHPVDTILGDIHKGVTTRSRVAHFCEHYSFVSSIEPHRIEEALQDSDWVVAMQEELNNFTRNEVWHLVPRRNQNVVGTKWVFRNKQDEHGVVTRNKARLVAKGYSQVEGLDFDETYAPVARLESIHILLAYATYHGFKLYQMDVKSAFLNGPIKEEVYVEQPPGFEDSEYPNHVYKLSKALYGLKQAPRAWYECLRDFLITNGFKVGKADPTLFTKTVANDLFVCQIYVDDIIFGSTNKSTCEEFSRIMIQKFEMSMMGELRYFLGFQIKQLQDGTFISQTKYIQDILKKFGMKDAKPIKTPMGTNGHLDLDTGGYSDANWAGCKIDRKSTSRICQFLGRSLGSWASKKQNSVALSTAEAEYIAAGHYCVQLLWMRQTLRDYGYKLSKVPLLCDNESAIRMTENPVEHSRTKHIDIQYHFLRDHQQRGDIKIAYINTKDQLADIFTKPLDEKTFCKLRNELNILDSRNFD

SEQ ID NO: 10297 - protein, 1927 aa, Zea mays
  Clone ID: TF_ZmC951_344.pep
MSGDHAKKEMETGEKPTTSYGSTSSEESRTKRREKKKSSSNKGKEKKSSSHHKEKKEKSSSHKPHRKGDKHKRMRKVVYYETDTSSTSTSDSDAPSVTSKRQERKKYSKIPLRYPRISKHTPLLSVPLGKPPTFDGEDYARWSDLMRFHLISLHKSIWDVVEFGAQVPSVGDENYDEDEAAQIEHFNSQATTILLASLSKEEYNKVQGLKNAKEIWDVLKTAHEGDELTKITKRETIEGELGRFRLHKGEEPQHMYNRLKTLVNQVRNLGSKKWDDHEVVNVILRSLIFLNPTQVQLIRGNPRYTKMTPEEVIGHFVSFECMIEGSRKINELGDSSEAQPVAFKATEEKKEEATPSRQPIDASKLDNEEMALVIKSFRQILKQRRGKDYKSRSKKVCYKCGKPGHFIAKCPISSDSDRGDDKKGRRKEKKRYYKKKGGDAHVCREWDSDESSSDSSDDEDAANIAVTKGLLFPNVGHKCLMAKDGKKKKVKSKSSTKYESSSDDNASDEEDNLRSLFANLNIAQKEKLNELVSAIHEKDDLLDSQEDCLIKENKKHVKVKKAYALEVEKCEKLSSELSTCREMIDNLRNENTSLNAKVDSHVCNVSIPNPRDNNDDLLARIEELNISLASLRLENESLIAKAKDFDVCKVTIANLRDKNDILHAKIVELNSCKPSTSIVEHVSICTRCRNVDIDAIHDHMALIKQQNDHIAKLDAKIAEHNLENEKFKFARSMLYNGRRPGIKDGIGFQRGDNVKLNAPPKNLSNFVKGKAPMPQDNEGYILYPASYPESKIRRIHSRKSHSGPNHAFMYKGETSSSRQPTRAKLPKKKIPNASNEHSISFKTFDASYVLTNKSGKVVAKFVGGKHKGSKACVWVPKVLVSNAKGPKTVWVYASGGSSWILDSGCTNHMTGEKRMFSSYEKNKDPQRAITFGDGNQGLVKGVTVFRRSDDSIAFKGVLEGQLYLVDFNRAELDTCLIAKTNMGWLWHRRLAHVGMKNLHKLLKGEHILGLTNVHFEKDRICSACQAGKQVGVHHPHKNIMTTDRPLELLHMDLFGPIAYISIGGSKYCLVIVDDYSRFTWVFFLQEKSQTQETLKGFLRRAQNEFGLRIKKIRSDNGTEFKNSQIEGFLEEEGIKHEFSSPYTPQQNGVVERKNRTLLDMARTMLDEYKTPDRFWAESVNTACYAINRLYLHRILKKTSYELLTGKKPNISYFRVFGSKCFILIKRGRKSKFAPKTVEGFLLGYDSNTRAYRVFNKSTGLVEVSCDVVFDETNGSQVEQVDLDEIGEEQAPCIALRNMSIGDVCPKESEEPPSTQDQPSSSMQASPPTQNEDEAQNDEEQNQEDEPPQDDSNDQGGDTNDQEKEDEEEPRPPHPRVHQAIQRDHPVDTILGDIHKGVTTRSRVAHFCEHYSFVSSIEPHRVEEALQDSDWVVAMQEELNNFTRNEVWHLVPRPNQNVVGTKWVFRNKQDEHGVVTRNKARLVAKGYSQVEGLDFGETYAPVARLESIRILLAYATYHGFKLYQMDVKSAFLNGPIKEEVYVEQPPGFEDSEYPNHVYRLSKALYGLKQAPRAWYECLRDFLIANGFKVGKADPTLFTKTLDNDLFVCQIYVDDIIFGSTNESTCEEFSRIMTQKFEMSMMGELKYFLGFQVKQLQEGTFISQTKYTQDILAKFGMKDARPIKTPMGTNGHLDLDTGGKSVDQKVYRSMIGSLLYLCASRPDIMLSVCMCARFQSDPKESHLTAVKRILRYLAYTPKFGLWYPRGSTFDLIGYSDADWAGCKINRKSTSGTCQFLGRSLVSWASKKQNSVALSTAEAEYIAAGHCCAQLLWMRQTLRDYGYKLTKVPLLCDNESAIKMADNPVEHSRTKHIAIRYHFLRDHQQKGDIEISYINTKDQLADIFTKPLDEQSFTRLRHELNILDSRNFFC

SEQ ID NO: 10298 - protein, 1411 aa, Zea mays
  unsure (1)..(1411): unsure at all Xaa locations
  Clone ID: TF_ZmC951_345.pep
MSGDHAKKEMKTGDKPTTSHEKASSEESHNKGKGKEKKASSHKSHQSGDKKKKMRKVVYYETDTSSPSTSGSDAPSITSKSHERKKFSKIPLRYPRISKHTPLLSVPLGKPSTFDGEDYARWSDLMKFHLTSLHKSIWNVVEFGAQVPSVGDEDYDEDEVAQIEHFNSQATTILLASLSREEYNNVQGLKRAKEVWDVLKTAHEGDELTKITKRETIEGELGRFRLHKGEEPQDMYNRLKTLVNQVRNLGSKKWDDHEMVKVILRSLIFLNPTQVQLIRGNPRYILMTLAEVIGNFVSFEYMIKGSKKINELDDPSTSEAQTVAFKATEEKKEESTSSRQPIDASKLDNEEMALVIKSFRQILKQRRGKDYKPRSKKVCYKCGKPGHFIAKCPISSDSDRGDDKKGRRKEKKKYYKKKGGDAHVCREWDSDESSSDSSSDEDAANIAINKGLLFPNVGHKCLMAKDGKKKKVKSKSSTRYESSSDDNASDEEDNLRTLFANLNMQQKEKLNELISAIHEKDDLLDAQEDFLIKENKKHVKVKKCLRSRSRKCEKLSSELSTCHETIDNLRNENANLLAKVDSNVCDVSIPNLRNNNDNLLAKIEELNITLASLRNENKKLLAKAKELDVCNASIFDLRSKNDILHAKVVELKSCKPSTSTTEHVTICTRCRDVDINAIHDHMALIKQQNDHIAKLDAKIAEHELENEKFKFARSMLYRGRRPGIKDGIGFQQGGNVKLNAPPKKLSNFVKGKAPMPQDNEGYILYPVGYPESKIRRIHSRKSHYGPNHAFKYKGETSSSRQPTRAKLPKKKTPSASNEHSISFKTFDASYVLTNKSGKVYASGGSSWIIDSGCTNHMTGEKRMFSSYEKNEDPQRAITFGDEKSQTQETLKGLLRRAQNEFGLRIKKIRSENGMEFNNSQIEGFLEDEGMKHELSSPYTPQQNGVVERKNRNLLDMARTMLDEYKTPDRFWAEAINTACYSINRLYLHQILKKTSYELLTSKKPNVSYFKFFGSKCFILVKRCRKSKFASKTVEGFLLGYDSNTRAYRVFNKSTGLVEVSCDIVFDETNGYQVEQVDLDELDDEEVPCVALRNMSIGDVCPKESEEPTQAQDQPSSSNQASPTEDEDQAQDNEDEHQEDEPPQEEDKDQGGDEVDQDKKDDQEIQGQRSRHPRVHQAIQRDHPINSILGDIHKGXVENALRDSDLVLTMKEELXNFTRNEWVFCNEQDEHGVVTRNKARLVAKGYSQVEGLDFGETYAPVARLESIRILLAYATFHGFKLYQMDVKSVFLNGSIKEEVYVEQPPGFEDSEYPNHVYKLSKTLYGLKQAPRPWYECLRDFLITNGFKVEKADPTLFTKTIAKDLFVCQIYVDDIIFGSTNKSTCEEFSGIMIQKFEMSMMRELKYFLGFQVK

SEQ ID NO: 10299 - protein, 1713 aa, Zea mays
  Clone ID: TF_ZmC951_350.pep
MSGDHAKKEMETGEKPTTSYGSTSSEESRTKRREKKKSSSNKGKEKKSSSHHKEKKEKSSSHKPHRKGDKHKRMRKVVYYETDTSSTSTSDSDAPSVTSKRQERKKYSKIPLRYPRISKHTPLLSVPLGKPPTFDGEDYARWSDLMRFHLTSLHKSIWDVVEFGAQVPSVGDEDYDEDEVAQIEHFNSQATTILLASLSKEEYNKVQGLKNAKEIWDVLKTAHEGDELTKITKRETIEGELGRFRLLKGEEPQHMYNRLKTLVNQVRNLGSKKWDDHEVEVIGHFVSFECMIEGSRKINELGDSSEAQPVAFKATEEKKEEATPSRQPIDASKLDNEEMALVIKSFRQILKQRRGKDYKSRSKKVCYKCGKPGHFIAKCPISSDSDRGDDKKGRRKEKKKYYKKKGGDAHVCREWDSDKSSSDSSDDEDAANIAVTKGLLFPNVGHKCLMAKDGKKKKVKSNSSTKYESSSDDNASDEEDSLRSLFANLNIAQKEKLNELVSAIHEKDDLLDSQEDCLIKENKKHVKVKKAYALEVEKCEKLSSELSTCREMIDNLRNENASLNAKVDSHVCNVSIPNSRDNNDELLARIEELNISLASLRLENENLIAKAKDFDVCKVTIADLRDKNDILHAKIVELNSCKPSTSTIEHVTICTRCRDINVDAIHDHMILIKQQNDHIAKLDAKIAEHNLENEKFKFARSMLYNGRRPGIKDGIGYQRGDNVKLSAPPKRLSNFVKGKAPMPQDNEGYILYPAGYPEDKIRKIHSRKSHSGPNHAFMYKGETSRSRQPTHAKLPRKKTTNASNDHAISFKTFDASYVLTSKSGKVYASGGSSWILDSGCTNHMTGEKRMFSSYEKNQDPQRAITFGDGNQGVTVFRRSDDSIAFKGVLEGQLYLVDFDRAELDTCLIAKTNMGWLWHRRLAHVGMKNLHKLLKGEHILGLTNVHFEKDRICSACQAGKQVGVHHPRKNIMTTDRPLELLHMDLFGPIAYISIGGSKYCLEKSQTQETLKGFLRRAQNEFGLRIKKIRSDNGKEFKNSQIEGFLEEEGIKHEFSSPYTPQQNGVVERKNRTLLDMARTMLDEYKTPDRFWAEAVNTACYAINRLYLHRILKKTSYELLTGKKPNISYFRVFGSKCFILIKRGRKSKFAPKTVEGFLLGYDSNTRAYRVFNKSTGLVEVSCDVAFDETNGSQVEQMDLDEIGEEQAPCIALRNMSIGDVCPKESEEPPSTQDQPSSPMQASPPTQNEDEAQNDEEQNQEDEPPQDDSNDQGGDTNDQEKEDEEEPRPPHPRVHQAIQRDHPVDTILGDIYKGVTTRSRVAHFCEHYSFVSSIEPHRVEEALQDSDWVVAMQEELNNFTRNEVWHLVPRPNQNVVGTKWVFRNKQDEHGVVTRNKARLVAKGYSQVEGLDFGETYAPVARLESIRILLAYATYHGFKLYQMDVKSAFLNGPIKEEVYVEQPPGFEDSEYPNHVYRLSKALYGLKQAPRAWYECLRDFLIANGFKVGKADPTLFTKTLEKDLFVCQIYVDDIIFGSTNESTCEEFSRIMTQKFEMSMMGELKYFLGFQVKQLQEGTFISQAKYTQDILAKFGMKDAKPIKTPMGTNGHLDLDTGGKSVDQKIIPDRRSFLEKQAKRGPSGLLRRTVRDIGIPLGQNQCKNTSFHYRLSGGKAKTVRALARTVRPQARTVRSPLIYRGGPSAPGGRTVRAQQKRSNG

SEQ ID NO: 10300 - protein, 2485 aa, Zea mays
  Clone ID: TF_ZmC951_351.pep
MSGDHAKKEMETGEKPTTSHGSTSSEESRTKRKEKKKSSSNKGKEKKSSSHHKEKKERSSSHKPHRRGDKHKRMRKVVYYETDTSSTSTSGSDAPSVTSKRQERKKFSKIPLHYPRISKNAPLLSVPLGKPPTFDGEDYARWSDLMRFHLTSLHKSIWDVVEFGAQVPSVGDKDYDEDEVAQIEHFNSQATTILLASLSREEYNKVQGLKSAKEVWDVLKTAHEGDELTKITKRETIEGELGRFRLRKGEEPQHMYNRLKTLVNQVRNLGSTKWDDHEMVKVILRSLIFLNPTQVQLIRGNPRYTKMTPEEVIGNFVSFECMIEGSRKINELDDPSTSEAQPVAFKATEEKKEEATPSRQPIDASKLDNEEMALVIKSFRQILKQRRGKDYKSRSKKVCYKCGKPGHFIAKCPISSDSDRGDDKKGRRKEKKKYYKKKGGDAHVCREWDSDESSSDSSDDEDAANIAVTKGLLFPNVGHKCLMAKDGKRKKVKSNSSTKYESSSDDNDSDEEDNLRVLFANLNMEQKEKLNELISAIHEKDDLLDSQEDCLIKENKKHVKVKKAYALEVEKCEKLSSELSTCREMIDNLRNENASLNAKVDSHVCIVSTSNPKDNNDDLLARIEELNISLASLRVENKILIAKAKDYDVCKVTISDLRDKNDILHAKIVELNSCKPSTSIVEHVSICTRCRDVDVNAIHDHMALIKQQNDHIAKLDAKIAEHNLENEKFKFARSMLYNGRRPGIKDGIGFQRGDNVKINAPPKNLSNFVKGKAPMPQDNEGYILYPAGYPESKIRKIHSRKSHSGPNHAFMYKGETSSSRQPTRAKLPRKKTPNASNDHAISFKTFDASYMLTNKSGKVYASGGSSWILDSGCTNHMTGEKKMFSSYEKNQDPQRAITFGDGNQGVTVFRRSDDSIAFKGVLEGQLYLVDFDRAELDTCLTAKTNMGWLWHRRLAHVGMKNLHKLLKGEHILGLTNVHFEKDRICSACQAGKQVGAHHPHKNIMTTDRPLELLHMDLFGPIAYISIGGSKYCLVIVDDYSRFTWVFFLQDKSHTQETLKGFLRRAQNEFGLRIKKIRSDNGTEFKNSQIEVERKNRTLLDMARTMLDEYKTPDRFWAEAVNTACYAINRLYLHRILKKTSYELLTGKKPNISYFRVFGSKCFILVKRGRKSKFAPKTVEGLLLGYDSNTRAYRVFNKSTGLVEVSCDVVFDETNGSQVEQVDLDEIGEEQAPCIALRNMSIGDVCPKEFEEPPNTQDQPSSSTQASPPTHDEDEAQVDEGEDQKDEPPQDDGNDQGGDANDEDKEDEQPRPPHPRVHQAIQRDHPVDTILGDIHKGVTTRSRVAHFCEHYSFVSSIEPHRVEEALQDSDWVVAMQEELNNFTRNEVWHLVPRPNQNVVGTKWVFRNKQDEHGVVTRNKARLVAKGYSQVEGLDFGETYAPVARLESIRILLAYATYHGFKLYQMDVKSAFLNGPIKEEVYVEQPPGFEDSKYPNHVYKLSKALYGLKQAPRAWYECLRDFLIANGFKVGKADPTLFTKTLDNDLFEFSRIMTQKFEMSMMGELKYFLGFQVKQLQEGTFICQTKYTQDILTKFGMKDAKPIKTPMGTNGHLDLNTGGKSVDQKATFNSDRGDDKKGKRREKKKYYKKKGGDAHVCREWDSDESSTESSSDEDAANIAVTKGLLFPNVGHKCLMAKDGKRKKVKSKSSTKYESSSDDNASDEENNLRTLFANLNMEQKEKLNELISAIHEKDDLLDSQEDFLIKENKKHVEKCEKLSSELSTCHDTITNLRNENASLNAKVDSHVCNVSIPNLRNDNDDLLAKIEELNISLASLRVENENLIAKAKELDVCNVTISDLRDNNDILRAKIVELNSCKPSTSSVEHVSICTRCRDVDINAIHDHMTLIKQQNDHIAILDAKIAEHNLENEKFKFARSMLYNGRHPGIKDGIGYQRGDNVKLSAPPKRLSNFVKGKAPMPQDNEGYILYPAGYPESKIRKIHSRKSHSGPNHAFMYKGETSSSRQPTRAKLPKKKTPSASNEHDISFKTFDASYVLTNKSGKVYASGGSSWILDSGCTNHMTGEKKMFSSYEKNQDSQRAITFGDGNQGVTVFRRSDDSIAFKGVLEGQLYLEKSQTQETLKGFLRRAQNEFGLRIKKIRSDNGTEFKNSQIEGFLEEEGIKHEFSSPYTPQQNGVVERKNRTLLDMARTMLDEYKTPDRFWAEARGRKSKFAPKTVEGFLLGYDSNTRAYRVFNKSSGLVEVSCNVVFDETNGSQVEQVDLDEIGEEQAPCIALRNMSIGDVCPKEFEEPPNTQDQPSSSTQASPPTQNEDEAQVDEGEDQRDEPPQDNGNDQGGDASDQDKEDEQPRPPHPRVHQAIQRDHPVDTILGDIHKGVTTRSRVAHFCEHYSFVSSIEPHRIEEALQDSDWVMAMQEELNNFLRNEVWHLVPRPNQNVVGTKWVFRNKQDEHGVVTRNKARLVAKGYSQVE

SEQ ID NO: 10301 - protein, 1927 aa, Zea mays
  Clone ID: TF_ZmC951_359.pep
MSGDHAKKEMETGEKPTTSHGSTSSEESRTKRREKKKSSSNKGKEKKSSSHHKEKKEKSSSHKPHRSGDKQKRMRKVVYYETDTSSTSTFDSDAPSVTSKRQERKKFSKIPLHYSRISKHAPLLSVPLGKPPTFDGEDYARWSDLMRFHLTSLHKSIWDVVEFGAQVPSVGDKDYDEDEVAQIENFNSQATTILLASLSREEYNKVQGLKSAKEVWDVLKTAHEGDELTKITKRETIEGELGRFRLRKGEEPQHMYNRLKTLVNQVRNLGSTKWDDHEMVKVILRSLIFLNPTQVQLIRGNPRYTKMTAEEVIGNFVSFECMIEGSRKINELDDPSTSEAQPVAFKATEEKKEEATPSRQPIDASKLDNEEMALVIKSFRQILKQRRGKDYKSRSKKVCYKCGKPGHFIAKCPISSDSDRGDDKKGRRKEKKRYYKKKGGDAHVCREWDSDESSSDSSDDEDAAHIAVTKGLLFPNVGHKCLMAKDDKKKVKSKSSTKYESSSDDNASDEEDNLRTLFANLNMQQKEKLNELISAIHEKDDLLDTQEDFLIKENKKHVKVKNAYALEMEKCEKLSSELSTCHETIDNLRNENANLLAKVDSHVCDASIPNLRNDNDDLLAKIKEMNDSLASLRNENEKLLAKAKDFDVCNATISDLRSKNEILHAKVVELKSCKPSTSTVEHTSICTRCRDVNIDAIHDHMTLIKQQNDHIAKLDAKIAEHNLENEKFKFARSMLYNGRRPGIKDGIGFQRGDNVKLSAPPKRLSNFVKGKAPMPQDNEGYILYPAGYPEDKIRKIHSKKSHSGSNHAFMYKSETSSSRQPTRAKLPKKKIPNASNEHSISFKTFDASYVLTNKSGKVVAKYVGGKHKGSKTCVWVPKILVSNAKGPKTIWVYASGGSSWILDSGCTNHMTGEKKMFSSYEKNKDPQRAITFGDGNQGLVKGVTVFRRSDDSIAFKGVLEGQLYLVDFDRAELDTCLIAKTNMGWLWHRRLAHVGMKNLHKLLKGEHILGLTNVHFEKDRTCSACQAGKQVGAHHPHKNIMTTDRPLELLHMDLFGPIAYISIGGSKYCLVIVDDYSRFTWVFFLQEKSQTQETLKGFLRRAQNEFGLRIKKIRSDNGTEFKNSQIEGFLEEEGIKHEFSSPYTPQQNGVVERKNRTLLDMARTMLDEYKTSDRFWAEAVNTACYAINRLYLHRILKKTSYELLTGKKPNISYFRVFGSKCFILVKRGRKSKFAPKTVEGFLLGYDSNTRAYRIFNKSTGLVEVSCDVVFDETNGSQVEQVDLDEIGIEEVPCIALRNMSIGDVCPKESEEPPKAQDQPSSSMQASPPTQNEEEAQVDEEEDQSNEPPQDDGIDQGGDANDQDKEDEEQRPPHPRVHQAIQRDHPVDTILGDIHKGVTTRSRVAHFCEHYSFVSSIEPHRVEEALQDSDWVVAMQEELNNFTRNEVWHLVPRPNQNVVGTKWVFRNKQDEHGVVTRNKARLVAKGYSQVEGLDFGETYAPVARLESIRILLAYATYHGFKLYQMDVKSVFLNGPIKEEVYVEQPPGFEDSEYPNHVYKLSKALYGLKQAPRAWYECLRDFLIANGFKVGKADPTLFTKTLENDLFVCQIYVDDIIFGSTNESTCEEFSRIMTQKFEMSMMGELKYFLGFQVKQLQEGTFISQTKYTQDILNKFGMKDAKPIKTPMGTNGHLDLDTGGKSVDQKVYRSMIGSLLYLCASRPDIMLSVCMCARFQSDPKESHLTAVKRILRYLAYTPKFGLWYPRGSTFDLIGYSDADWAGCKINRKSTSGTCQFLGRSLVSWASKKQNSVALSTAEAEYIAAGHCCAQLLWMRQTLRDYGYKLTKVPLLCDNESAIKMADNPVEHSRTKHIAIQYHFLRDHQQKGDIEISYINTKDQLADIFTKPLDEQTFTKLRHELNILDSRNFFC

SEQ ID NO: 10302 - protein, 1892 aa, Zea mays
  Clone ID: TF_ZmC951_364.pep
MSGDHAKKEMETGEKPTTSHGSTSSEESRTKRREKKKSSSIKGKEKKSSSHHKEKKEKSSSHKPHRKGDKHKRMRKVVYYETDTSSTSTSDSDAPSVTSKRQERKKYSKIPLRYPRISKHTPLLSVPLGKPPTFDGEDYARWSDLMRFHLTSLHKSIWDVVEFGAQVPSVGDENYDEDESAKEIWDVLKTAHEGDELTKITKRETIEGELGRFRLRKGEEPQHMYNRLKTLVNQVRNLGSKKWDDHEVVNVILRSLIFLNPTQVQLIRGNPRYTKMTPEEVIGHFVSFECMIEGSRKINELGDPSEAQPVAFKATEEKKEESTPSRQPIDASKLDNEEMALVIKSFCQILKQRRGKDYKSRSKKVCYKCGKPGHFIAKCPISSDSDRGDDKKGRRKEKKRYYKKKGGDAHVCREWDSDESSSDSSDDEDAANIAVTKGLLFPNVGHKCLMAKDDKKKKVKSNSSTKYESSSDDNASDEEDNLRSLFANLNVAQKEKLNELVSAIHEKDDLLDSQEDCLIKENKKHVKVKKAYALEVEKCEKLSSELSTCREMIDNLRNENASLNAKVDSHVCNVSIPNPRDNNDDLLARIEELNISLASLRLENESLIAKAKDFDVCKVTIANLRDKNDILHAKIVELNSCKPSTSIVEHVSICTRCRNVDIDAIHDHMALIKQQNDHIAKLDAKIAEHNLENEKFKFARSMLYNGRRPGIKDGIGFQRGDNVKLNAPPKNLSNFVKGKAPMPQDNEGYILYPAGYPESKIRKIHSRKSHSGPNHAFMYKGETSSSRQPTRAKLPRKKISNASNEHSISFKTFDASYVLTNKTGKVVAKFVGGKHKGSKTCVWVPKVLVSNAKGPKTVWVYASGGSSWILDSGCTNHMTGEKRMFSSYEKNKDPQRAITFGDGNQGVTVFRRSDDSIAFKGVLEGQLYLVDFDRAELDTCLIAKTNMGWLWHRRLAHVGMKNLHKLLKGEHILGLTNVHFEKDRICSACQAGKQVGVHHPHKNIMTTDRPLELLHMDLFGPIAYISIDGSKYCLVIVDDYSRFTWVFFLQEKSQTQETLKGFLRRAQNEFALRIKKIRSDNGTEFKNSQIESFLEEEGIKHEFSSPYTPQQNGVVERKNRTLLDMARTMLDEYKTPDRFWAEAVNTACYAINRLYLHRILKKTSYELLTGKKPNISYFRVFGSKCFILVKRGRKSKFAPKTVEGFLLGYDSNTRAYRVFNKSTGLVEVSCDVVFDETNGSQVEQVDLDEIGEEQAPCIALRNMSIGDVCPRESEEPPNAQDQPSSSKQASPPTQNEDEAQVDEGQNQEDEPPQDDGNDPGGDAIDQEKEDEEEPRPPHPRVHQAIQRDHPVDTILGDIHKGVTTRSRVAHFCEHYSFVSSIEPHRVEEALQDSDWVVAMQEELNNFTRNEVWHLVPRPNQNVVGTKWVFRNKQDEHGVVTRNKARLVAKGYSQVEGLDFGETYAPVARLESIRILLAYATYHGFKLYQMDVKSAFLNGPIKEEVYVEQPPGFEDSEYPNHVYRLSKALYGLKQAPRAWYECLRDFLIANGFKVGKADPTLFTKTLENDLFVCQIYVDDIIFGSTNESTCEEFSRIMTQKFEMSMMGELKYFLGFQVKQLQEGTFICQTKYTQDILTKFGMKDAKPIKTPMGTNGHLDLDTGGKSVDQKVYRSMIGSLLYLCASRPDIMLSVCLCARFQSDPKESHLTAVKRILRYLAYTPKFGLWYPRGSTFDLIGYSDADWAGCKINRKSTSGTCQFLGRSLVSWASKKQNSVALSTAEAEYIAAGHCCAQLLWMRQTLRDYGYKLTKVPLLCDNESAIKMADNPVEHSRTKHIAIRYHFLRDHQQKGDIEISYINTKDQLADIFTKPLDEQSFTRLRHELNILDSRNFFC

SEQ ID NO: 10303 - protein, 1923 aa, Zea mays
  Clone ID: TF_ZmC951_366.pep
MSGDHAKKEMETGEKPTTSQGSTSSEESHTKRKEKKKDSSKRKEKKSSSSHHKEKKEKSSSHKPHRRGDKHKRMRKVVYYETDTSSTSTSDSDAPSVTSKRQERKKYSKIPLRYPGISKHTPLLSVPLGKPPTFDGEDYARWSDLMRFHLISLHKSIWDVVEFGAQVPSVGDENYDEDEVAQIEHFNSQATTILLASLSREEYNKVQGLKSAKEIWDVLKTAHEGDELTKITKRETIEGELGRFRLRKGEEPQHMYNRLKTLVNQVRNLGSKKWDDHEVVNVILRSLIFLNPTQVQLIRGNPRYTKMTPEEVIGHFVSFECMIEGSRKINELGDPSEAQPVAFKATEEKKEESTPSRQPIDASKLDNEEMALVIKSFRQILKQRRGKDYKSRSKKVCYKCGKPGHFIAKCPISSDSDRGDDKKGRRKEKKRYYKKKGGDAHVCREWDSDESSSDSSDDEDAANIAVTKGLLFPNVGHKCLMAKDGKKKKVKSNSSTKYESSSDDNASDEEDNLCSLFANLNIAQKEKLNELVSAIHEKDDLLDAQEDCLIKENKKHVKVKNAYALEVEKCQKLSSELSTCREMIDNLRNENAILNAKVDSHVCNISIPNLRDDNVDLLAKIDELNVSLASLRLENEDLIAKAKDFDICKVTISDLSDKNDILHAKIVELNSCKPSTSIVEHVSICTRCRDVDIHAIHDHMALIKQQNDHIAKLDAKIAEHNLENEKFKFARSMLYNGRRPGIKDGIGFQRGDNVKINAPPKNLSNFVKGKAPMPQDNEGYILYPAGYPESKIRRIHSRKSHSGPNHAFMYKGETSSSRQPTRAKLPRKKTPNASNDHAISFKTFDASYVLTNKSGKVVAKFVGGKHKGSKTCVWVPKVLVSNAKGPKTVWVYASGGSSWILDSGCTNHMTGEKRMFSSYEKNQDPQRAITFGDGNQGVTVFRRSDDSIAFKGVLEGQLYLVDFDRAELDTCLIAKTNIGWLWHRRLAHVGMKNLHKLLKGEHILGLTNVHFEKDRICSACQAGKQVGVHHPHKNIMTTDRPLELLHMDLFGPIAYISIGGSKYCLVIVDDYSRFTWVFFLQEKSQTQETLKGFLRRAQNEFGLRIKKIRSDNGTEFKNSQIEGFLEEEGIKHEFSSPYTPQQNGVVERKNRTLLDMARTMLDEYKTPDRFWAEAVNTACYAINRLYLHRILKKTSYELLTGKKPNISYFRVFGSKCFILVKRGRKSKFAPKTVEGFLLGYDSNTRAYRVFNKSTGLVEVSCDVVFDETNGSQVEQVNLDEIGDEEAPCIALRNMSIGDVCPKESEESPNTQDQPSSSTQASPPTQNEDETQVDEGQNQEDEPPQDDGNDQGGDANDQEKEDEEEPRPPHPRVHQAIQRDHPVDTILGDIHKGVTTRSRVAHFCEHYSFVSSIEPHRIEEALQDSDWVVAMQEELNNFTRNEVWHLVPRPNQNVVGTKWVFRNKQDEHGVVTRNKARLVAKGYSQVEGLDFGETYAPVARLESIRILLAYATYHGFKLYQMDVKSAFLNGPIKEEVYVEQPPGFEDSEYPNHVYRLSKALYGLKQAPRAWYECLRDFLISNGFKVGKADPTLFTKTLENDLFVCQIYVDDIIFGSTNESTCEEFSRIMTQKFEISMMGELKYFLGFQVKQLQEGTFICQTKYTQDILTKFGMKDAKPIKTPMGTNGHLDLDTGGKSVDQKVYRSMIGSLLYLCASRPDIMLSVCMCARFQSDPKESHLTAVKRILRYLAYTPKFGLWYPRGSTFDLIGYSDADWAGCKINRKSTSGTCQFLGRSLVSWASKKQNSVALSTAEAEYIAAGHCCAQLLWMRQTLRDYGYKLTKVPLLCDNESAIKMADNPVEHSRTKHIAIRYHFLRDHQQKGDIEISYINTKDQLADIFTKPLDEQSFTKLRHELNILDSRNFFC

SEQ ID NO: 10304 - protein, 936 aa, Zea mays
  Clone ID: TF_ZmC951_372.pep
MSGDHAKKEMVTGEKPTTSHGKASSEESRNKGKGKEKKPSSHKSHRSGDKKKKMRKVVYYETDTSSPSTSGSDAPSITSKRHERKKFSKIPLRYPRTPRHTPLLSVPLGKPPTFDGEDYARWSDLMRFHLTSLHKSIWDVVEFGVQVPSVGDEDYDEDEVAQIEHFNSQATTILLASLSREEYNKVQGLKSAKEVWDVLKTAHEGDELTKITKRETIEGELGRFRLRQGEEPQDMYNRLKTLVNQVRNLGSKKWDDHEMVKVILRSLVFLNPTQVQLIHGNPRYTLMTPEEVIGNFVSFEFMIKGSRKINELDGPSTSEAQPVAFKATEEKEESTSSRTPIDASKLDNEEMALQRRGKDYKPRSKKVCYKCGKPGHFIAKCPISSDSDRGNDKKGRRKEKNKYYKKKGGDAHVCREWDSDESSSDSSSDEDATNIAINKGLLFPNVGHKCLMAKDDKKKKVKSKSSTKYETSSDDNASDEEDNLCTLFANLNMQQKEKLNELISVIHEKDDLLDTQEDFLIKENKKHVKVKNAYALEVEKCEKLSSELSICNETIDNLRNENASLNAKVDSNVCNVLIPNLKDDNVDLLAKIEELNVTLASLRIENEKLIAKAKELDICNASISDLRSKNDILHAKVVELKTCKPSTSTVEHTTICTRCRDVNIDAIHDHMALIKQQNDHIAKLDAKIAEHDLENEKFKFARTMLYRGRRPGIKDGIGFQQGDNSRSDRRHSTAPLASLTEGQRRLRHSDCSATRQSESDRQSGLAKGTTANSAPPDPRARTRAKTRKTANSAPPDPRARTRAKTRKTANSAPPDPRARTRAKTRKTANSAPPDPRARTRAKTRKTANSAPPDPRARTRAKTRKTANSAPPDPRARTRAKTRKTANSAPPDPRARTRAKTRKTANSAPPDPRARTRAKTRKTTKLRSARPQGSDSG

SEQ ID NO: 10305 - protein, 1307 aa, Zea mays
  Clone ID: TF_ZmC951_395.pep
MSGDHAKKEMETGEKPTTSQGSTSSEESRTKRKEKKKISSNKGKEKKSSSHHKEKKEKSSSHKPHRSKDKQKRMRKVVYYETDTSSTSTSGSDAPSVTSKRQERKKFSKIPLHYPRISKHAPLLSVPLGKPPTFDGEDYARWSDLMRFHLTSLHKSIWDVVEFGAQVPSVGDKDYDEDEVAQIEHFNSQATTILLAFLSREEYNKVQGLKSAKEVWDVLKTAHEGDELTKITKRETIEGELGRFRLRKGEEPQHMYNRLKTLVNQVRNLGSVKWDDHEVVKVILRSLIFLNPTQVQLIRGNPRYTKMTPEEVIGNFVSFECMIEGSRKINELDDPSTSEAQPVAFKATEEKKEEATPTRQPIDASKLDNEEMALVIKSFRQILKQRRGKDYKSRSKKVCYKCGKPGHFIAKCPITSDSDRGDDKKGRRKEKKRYYKKKGGDAHVCREWDSGESSSDSSDDEDAANIAVTKGLLFPNVGHKCLMAKDGKRKKVKSNSSTKYESSSDDNASDEEDNLRSLFANLNIAQKEKLNELVSAIHEKDDLLDSQEDCLIKENKKHVKVKRAYALEIEKCEKLSSELSTCREMIDNLRNENASLNAKVDSHVCNISTSNPRDDNVDLHARIDELNASLASLRIENEKLLAKAKDFDVCKTTISDLRDKNDILHAKIVELNSCKPSTSIVEHVSICTRCRDVDVNAIHDHMALIKQQNDHIAKLDAKIAEHNLENEKFKFARSMLYNGRRPGIKEGIGFQKGDNVKINAPPKKLSNFVKGKAPMPQDNEGYILYPAGYPESKIRRIHSRKSHSGPNHAFMYKGETSSSRQPTHAKLPRKKTPSASNDHNISFKTFDASYVLTNKSGKVYASGGSSWILDSGCTNHMTGEKKMFSSYEKNQDPQRAITFGDGNQGLVKGVTVFRRSDDSIAFKGVLEGQLYLVDFDRAELDTCLIAKTNMGWLWHHRLAHVGMKNLHKLLKGEHILGLTNVHFEKDRICSACQAGKQVGTHHPHKNIMTTDRPLELLHMDLFGPIAYISIGGSKYCLVIVDDYSRFTWVFFLQEKSQTQETLKGFLRRAQNEFALRIKKIRSDNGTEFKNSQIEGFLEEEGIKHEFSSPYTPQQNGVVERKNRTLLDMARTMLDEYKTSDRFWAEAVNTACYAINRLYLHRILKKTSYELLTGKKPNISYFRVFGSKCFILVKRGRKSKFAPKTVEGFLLGYDSNTRAYRVFNKSSGQVEVSCDVVFDETNGSQVEQVDLDEIGDEEAPCIALRNMSIGDVCPKESEEPPNAQDQPSSSMQASPPTQNEDEAQIDEE

SEQ ID NO: 10306 - protein, 1071 aa, Zea mays
  Clone ID: TF_ZmC951_399.pep
MVTGDKPTTSHGKASSEESHNKGKGKEKKSSSHKSHRSGDKKKKMMKVVYYETDTSSPSTSGSNAPSVTSKRHERKKFSKIPLRYPRIPKHTPLLSVPLGKPPTFDGEDYARWSDLMRFHLTSLHKSIWDVVEFGVQVPSVGYEDYDEDEEAQIEHFNSQATTILLGSLSREEYNKVQGLKSAKEVWDVLKTAHEGDELTKITKRETIEGELGRFRLRQGEEPQDMYNRLKTLVNQVRNLGSKKWDDHEMVKVILRSLVFLNPTQVQLICGNPRYTLMTPEEVIGNFATEEKKEESTSSRTPIDASKLDNEEMTLIIKSFRQILKQRRGKDYKPRSKKVCYKCGKPGHFIAKCPISSDRGDDKKGRRKEKKKYYTKKGDDAHVCREWDSDESSTDSSSDEDAANIAVTKGLLFPNVSHKCLMAKDGKRKKVKSRSSTKYETSSDEDNASNEEDNLRILFANLNMQQKEKLNELISAIHEKDDLLDTQEDFLIKENKKHVKVKNAYALEVEKCEKLSSELSTCHETIDNLRNENASLIAKVDSNACNVSIPNLRDDNVDLLAKIEELNISLASFRIENEKLLAKAKELDVCNASISDLRSKNDILHAKVVELKSCKPSTSIVEHTSICTRCRDINVDAIHDHMALIKQQNDHIAQLNAKINEHDLENEKFKFARSMLYNGRRSGIKDDIGFQKGDNVKLNAPPKKLSNFVKGKAPMPQDNEGYILYPVGYLESKIRRIHSRKSHSGPNHAFMYKGETSSSRQSTHAKLPKKKTPSASNNHNISFKTFDASYVLTNKSGKVYASGGSSWVIDSGCTNHMTWEKEMFSSYEKNQDPQRAITFGDGNQGVTVFRRSDDSIAFKGVLEGQLYLVDFDRAELDTCLIAKTNMGWLWHLRLAHVGMKNLHKLLKGEHILGLTNVHFEKDRICSACQAGKQVGAHHPHKNIMTTDRPLELLHMDLFGAIAYISIGRSKYCLVIVDDYSRFTWVFFLQEKSYTQETLKGFLRQAQNEFDLRIKKIRSDNGTEFKSSQIEGFLEEEGIKHEFSSPYTPQQNGVVERKNRALIPIESLLEGG

SEQ ID NO: 10307 - protein, 1215 aa, Zea mays
  Clone ID: TF_ZmC951_408.pep
MRKVVYYETDTSSPSTSGSDASSITSKRHERKKFSKIPLRYPRIPKHTPLLSIPLGKPPMFDGEDYARWSDLMRFHLSSLHKSIWDVVEFGVQVPSVGDEDYDEDEVAQIQHFNSQASTILLASLSREEYNKVQGLKGAKEIWDTLKTAHEGDEVTKITKRETIEGELGRFRLRQGEEPQDMYNRLKTLVNQVRNLGSKKWDDHEMVKVILRSLVFLNPTHVQLIRGNPRYTLMTPEEVIGNFVSFELMIKGSKKINELDGPSTSEAQPVAFKTTEEKKEESTPSRTPIDASKLDNEEMALIIKSFRQILKQRRGKDYKPRSKKVCYKCGKPGHFIAKCPISSDSDRGDDKKGRRKEKKKYYKKKGGDAHVCREWDSDESSTDSSSDEDAANISVTKGLLFPNVGHKCLMAKDDKKKKVKSRSSTKYETSSDEDDASNEEDNLRILFANLNMQQKEKLNELISAIHEKDDLLDTQEDFLIKENKKHVKVKNAYALEVEKCEKLSSELSTCHETIDNLRNENANLLAKVDSNVCDVSIPNLRNDNDDLLAKIEELNISLASLRIENGKLLAKAKELDVCNITISDLRDKNDILCAKIVELNSCKPSTSTTEHVTICTRCRDVDVNAIHDHLSMIKQQNDHIAKLDAKIAEHELENKKFKFARSMLYNGRRPGIKDGIGFQRGGNVKLNAPPKKLSNFVKGKAPMPQDNEGYILYPAGYPESKIRRIHSRKSHSGPNHAFMYKGETSSSRQPTRAKLPKKKTPSASNDHDISFKTFDASYVLTNKSGKVYASGGSSWIIDSGYTIHMTGEKKMFSSYEKNQDPQRAITFGDGNQGVTVFRRSDDSITFKGVLEGQLYLEKSHTQETLKGFLRRAQNEFGLRIKKIRSDNGTEFKNSQIEGFLEEEGIKHEFSSPYTPQQNGVVERKNRTLLDMARTMLDEYKTSDRFWAEAVNTACYAINRLYLHRILKKTSYELLTGKKPNISYFIVFGSKCFILVKRGRKSKFAPKTVEGFLLGYNSNTRAYRVFNKSSGLVEVSCDVVFDETNGSQVEQVYLDEIGDEEAPCIALRNMSIGDVCPKESEEPPNAQDQPSSSTQASPPTQNENEAQVDEGEDQENEPPQDDDNDQGGDANDQDKEDEEPRPPHPRVHQAIQRDHLIDTILGDIHKGVTTRSRVAHFCEHYSFVSSIEPHRVEEALQDSDWVVAMQEELNNFTRNK

SEQ ID NO: 10308 - protein, 1662 aa, Zea mays
  Clone ID: TF_ZmC951_410.pep
KKEIVTGGDKSTSHGKAPSGESDNKMKGSPSHAKSHRSGDKKKKMKKVVYYETDSSSSSTSGSDTPYVTSKRHERKKFSKPPIFDGEDYYMLSDKMRHHLTSLHASIWNVVKIGVQVPSPGDKDYDSDKVAQIRHFNSQATAIILASLSREEYNKVQGLKSAKEIWDVLKTAHEGDEVTKITKRETIEGELGCFMLNQGEDLQAMYNRLKTLVNQVRNLGSTKWDDHEMFKVILRSLVFLNPTQVQLIRGDPRYKLMSPEEVIGKIVSFELMIKGSKKIIEQGTTSTSEVQPVAFKATEEEKKDSTPSSVPIDASKLDNEEMALIIKSFRQILKQRRGKDYKPRSKKVCYKCGKPGHFIAKCPISSDSDRGDDKRGKKKEKKRYYKKKGGDAHVCREWDSDESSTDSSDDEDAANITINKGLLFPNVGHKCLMAKDDKKKKVKSRSSTKYATSSDEDNSSDDEDNLLTLFANLNMQQKEKLNELISAIHEKDELLDSQEDFLIKENKKYVKRCMGSDQLRGKWVTRLVGKALHFMNSHLWCDKVKNAYAQEVEKCEKLTSELSICHDTISNLRIENANLIAKVEKSNICDDSIINLRNDNASLIAKIDKLNASLASLKIINEQLIAKAKDLNVCNDAITNLRDENAILHARIVELNDCKPSTSMIDHVSICTRYRDVNVDAIHDHLALIKQQNDHIATLTAKINEHDLENEKFKFARSMLYSGRRPDINDGIGFQQGDNVKLNAPPKRLSNFVKGKAPMPQDNEGYILYPAGYPEDKIRRIHAKKTHYVSHHAFIYKNEASSSRRSTHVKMPKMKSPIASNDHNISFKTFDASYVLTNKSGKVYASGGSSWIIDSGCTNHMTGEKRMFSSYEKNQDPQRAITFGDGNQGVTVFRRSDDSVAFKGVLEGQLYLVDFNRAELDTCLIAKTNMGWLWHRRLAHVGMKNLHKLLKGEHILELTNVHFEKDRICSACQAGKQVGVHHPHKNIMTTDRPLELLHMDLFGQIAYISIGGRKSQTQETLKGFLRRAQNEFGLRIKKIRSDNGMEFKNSQIEGFLEEEGINHEFSSPYTPQQNGVVERKNRTLLDMARTMLDEYKTSDRFWVEAVNTACYAINRLYLHRILKKTSYELLTGKKPNVSYFRVFGSKCFILVKRGRKSKFAPKAVEGFLLGYDSNTRAYRVFNKSTGLVEVSFDIVFDETNGSQVGQVDLDELDEEEALCVALTNMSIGDVCPKESEEPPQAQDRPSSSTQASPPTQDEDQAQDDENEDQEDEPSQKESNDQGGDDNDQDKEDEQDPRPPHPRPHRVEDALKDLDWVLAMQEDLNNFTRNELYQMDVKNAFLNGPIKEEVYVEQPPGFEDSEYPNHVYKLSKALYGLKQAPRAWYECLRDFLITNGFKVGKVDPTLFTKTIAKDLFVCQIYVNDNIFGSTNKSTCEEFSRIMVQKFEMSMMGELKYFLGFQVKQLQESTFISQTKYIQDILTKFGMKDAKPIKTPMGTNGHLDLDTGGYSDADWAVCKIDRKSTSGTCQFLGRSLVSWASKKQNSVALSTAEAEYIAAGHCCAQLLWMRQTLRDYGYKFSKVPLLCDNESAIRMADNPVEHSRTKHIAIQYHFLRDHQQRRDIEIAYINTKDQLADIFTKPLDEKTFTKLRNELNILDSRNFD

SEQ ID NO: 10309 - protein, 1575 aa, Zea mays
  Clone ID: TF_ZmC951_433.pep
MSGDHAKKEMVTGEKPATSHGKALSGESYNKGKGKEKESPSHNSRRSGDKKKKMRKVVYYETDTSSPSTSGSDTPSVTSKRHERKKFSKIPLRYPRIPKHTPLLSVPLGKPPTFDGEDYARWSDLMRFHLTSLHKSIWDVVEFGVQTAHEGDEVTKITKWETIEGELGRFRLRQGEEPQDMYNRLKTLVNQVRNLGSKKWDNHEMVKVIGNFVSFELLIKGSKKINELDGPSTSEAQPVAFRATEEKKEESTSSRQPIDASKLDNEEMALVIKSFRQILKQRRGKDYKSRSKKVCYKCGKPGHFIAKCPISSDSDRGDDKKGRRKEKKRYYKKKGGDAHVCREWDFDESTTDSSSDEDAANIAINKGLLFPNVGHKCLMAKDGKKKKVKSKSSTKYESSSDDNASDEEDNLRTLFANLNMQQKEKLNELISAIHEKDELLDTQEDFLIKENKKHVNVKNAYALEVEKCEKLTSELSTCHDLIANLRNENANLIAKVDSNDCDVSTPNLRNDNVDLLAKIEELNISLASLRIENEKLLAKAKELDVCNASISDLRSKNDILHAKVVELKSCKPSTSTVEHTSICARCKDINVDAIHDHLALIKKQNYHIAQLNAKISEHDLEDEKFKFARSMLYSGRRPGIKDGIGFQKGDNVKLNAPPKRLSNFVKGKAPMPQDNEGYILYPAGYPESKIRRIHSRKSHSGPNHAFIYKGETSSSRQSTHAKLPKKKTPKASNDSNISFKTFDASYVLTNKSGKVYASGGSSWIIDSGCTNHMSGEKEMFSSYKKNQDPQRAITFGDGNQDVGVTVFRRSDDSIAFKGVLEGQLYLVDFDRAELDTCLIAKTNMGWLWHRRLAHVGMKNLHKLLKGEHILGLTNVHFEKDRICSACQAGKQVGVHHPHKNIMTTDRPLELLHMDLFGPIAYISIGGKTLKGFLRRAQNEFGLRIKKIRSDNRTEFKNSQIEGFLEEEGIKHEFSSPYTPQQNGVVERKNRTLLDMARTMLDEYKTLDRFWAEAVNTACYAINRLYLHRILKKTSYELLTGKKPNISYFRVFGSKCFILVKRGRKSKFAPKTVEGFLLGYDSNTRAYRVFNKSTGQVEVSYDVVFDETNGSQVEQVDLDEIGIEEALCIALRNMSIGDVCPKESEEPPNAQDQPSFSTQASPPTQNEDEAQVDEIEDQANEPPQDDGNDQGGDANDQDKEDEEQRPPHPRVHQAIQRDHPVDTILGDIHKGVTTRSRVAHFCEHYSFVSSIEPHRVEEALQDSDWVVAMQEELNNFTRNEVWHLVPHPNQNVVGTKWVFRNKQDEHGVVTRNKARLVAKGYSQVEGLDFGETYAPVARLESIRILLAYATYHGFKLYQMDVKSAFLNGPIKEEVYVEQPSDFEDSEYPNHVYKVSKALYGLKQAPRAWYECLRDFLITNGFKVGKADPTLFTKTLENDLFVCQIYVDGIIFGSTNESTCEEFSRIMTQKFEMSMMGELKYFLGFQVKQLQEGTFLSQTKYTQDILSKFGMKDAKPIKTPMGTNGHLDLDEGGKSVDQKVISNQVIGVLKGNWSLRRRQRLPLRNSSFTVAPSHSPS

SEQ ID NO: 10310 - protein, 1689 aa, Zea mays
  unsure (1)..(1689): unsure at all Xaa locations
  Clone ID: TF_ZmC951_439.pep
MSGDHAKKEMVIGGNKPTSPAKATSHGKAPSKESGNKKKKGSPSRIRTHKSGEKKKMKKVVYYETDSSSPSTSGSDAASITSKRQERKKYSKIPLRYPRIPRHTPLLSVPLGKPPTFDGEDYSRWSDMMRYHLTSLHKSIWDVVEFGVQVPTVGDEDYDEDEVAQIEHFNSQATTILLTSLSREEYNKVQGLKSAKEIWDVLKIVHEGDEVTKITKRETIERELSRFMLHQGEEPQTMYNQLKTLMNQVRNLGSTKWDDHEMVKVILRSLVFLNPTQVQLIRGDPRYKLMSPEEVIGKFVSFELMIKGSKKIIEQGAPSTPEVQPVAFKATEEKKEECTSSRLPIDASKLDNEEMALIIKSFRQILKQRRGKDYKPRSKKVCYKCGKPGHFIAKCPISSDSDRGDDKKGKRREKKKYYKKKGGDAHVCWEWDSDESSIDSSDEDAANIAVNKGLLFPNVGHKCLMAKDGKKKKVKSKSSTKYTTSRDEDNSSDDEDNLLTLFANINMQQKEKLNELISAIHEKDELLDSQEDFLIKENKKHVKTKNAYALEVEKCEKLTSKLSTCHNVISNLRDENAKLIAKVEKLDICDDSIISLRNDNASLITKIDNLNASLSSLKIANEKLIAKAKDLNVCNVSISNLRDENAILHAKIVDLNTCKPSTSIVEHVTICTRCRDINVDTIQDHLALIKKQNDHIAQLSAKIDEHDLENENFKFARSMLYSGRRPGIKDGIGFQQGDNVKLNTPPKRLSNFVRXKAPMAQDNEGYILYPVGYPEHKIRRIHSRKSHSGSHHAFMYKSXYASGGSSWITDSGCTNHMTREKRMFSSYEKNHDLQRAITFGDGNQAHVGMKNLHKLLKGEHILGLTDVHFEKDREKSQTQETLKGFLRRAQNEFGLRIKKIRSDNGTEFKNSQIEGFLEEEGIKHEFSSSYTPQQNGVVERKNRTLLDMARTMLDEYKTSDRFWAEAVNTACYAINRLYLHRILKKTSYELLTGKKPNVSYFRVFGSKCFILVKRGRKSKFAPKVVEGFLLGYDSNTRAYRVFNKSTGLVEVSCDILFDETNGSQVEQVDLDELDDEEASCVALRNMSIGDVCPKESEEPPHAQDQPSSSMQASPPTQDEDQAQDDENGDQEEPPQEEDNDQGGDVDDQDKEDDEGPRPPQPSVHHAIQRDHPVNTILGDIHKGVTTRSRVAHFCEHYSFVSSIEPYRVEDALRDSDWVLAMQEELNNFTRNEVWHLVPHPNQNVVGTKWVFRNKQDEHGVVTRNKARLVAKGYSQVEGLDFGETYAPVARLESIHILLAYATYHGFKLYQMDVKSAFLNGPIKEEVYVEQPPGFEDSEYPNHVYKLSKALYGLKQAPRAWYECLRDFLITNGFKVGKADPTLFTKTIANDLFICQIYVDDIIFGSTNKSTCEEFSRIMIQKFEMSMMGELKYFLGFQVKQLQKGTFISQTKYIQDILTKFGMKDAKPIKPPMGTNGHLDLDTGDIMLSVCMCARFQADPKEVHLRAMKRILRYLVHTPKFGIWYPKGYTFDLIGYSDADWGGCKIDRKSTSGTCQFLGRSLVSWTSKKQNSGALSTAEAEYITAGHCCAQLLWMRQTLRDYGYKLTKVSLLCDNESAIRMADNPVEHSRTKHIAIRYHFLRDHQQRGDIEIAYVSTKEQLADIFTKPLDEKTFIKLRNELNILDSRKFD

SEQ ID NO: 10311 - protein, 1553 aa, Zea mays
  unsure (1)..(1553): unsure at all Xaa locations
  Clone ID: TF_ZmC951_446.pep
MSGDHAKKEMETDEKPTTSNENALSGESRNKEKRKEKKKEKKTSSHKSHRSGDKIKKMRKVVYYETDTSSPSTSGSDAPSITSKRHERKKFSKIPLHYPRTSRHTPLLFIPLGKPPVFDGEDYNMWSDKMRHHLTSLHTSIWNVVEFGVQVPSVGDEDYDSDEVAQIHHFNSQATTTLLASLSREEYNKVQGLKSAKEIWDVLKTAHEGDEVTKITKWETIEGELGRFMLHQGEDPQAMYNRLKTLVNQVRNLGSXKWDDHEMVKIXLMSPEEVIGKFVSFELIIKGSKKIIEQGTSYTPEAQPVAFKATEEKKEESTSSRQPIDASKLDNEEMALIIKSFRQILKQRRGKDYKPRSKKVCYKCGKPGHFIAKCPISSDSDRGDDKKGRRKEKKRYYKKKGGDAHVCREWDSNESSSDSSDDEDATNIAVTKGLLFPNVGHKCLMAKDGKRKKVKSKSSTKYESSSDDNASDEEDNLRTLFANLNMEQKEKLNELISAIHEKDDLLDSQEDFLIKENKKHVKVKNAYALEVEKCEKLSSELSTCHDTIANLRNENAKLITKVDSHVCNVSTFNPRDDNVDLLARIDELNVSLASLRIENEKLLAKAKDFDVCNITISNLRNENDILHAKVVELKSCKPSTSIVEHVSICTRCRDVDIDAIHDHMSLIKQQNDHIAKLDAKIAEHNLENEKFKFARSMLYNGTRPGIKDGIGFHRGDNVKLNAPPKRLSNFVKGKAPMPQDNEGYILYPAGYPESKIRRIHSRKSHSGPNHAFMYKGETSSXRQPTHAKLPKRKTPSASNDXYASGGSSWIIDSGCTNHMTGEKKMFSSYEKNKDPQRAITFGDGNQGVTVFRRSDDSIAFKGVLEGQLYLVDFDRAELDICLIAKTNMGWLWHRRLAHVGMKNLHKLLKGEHILGLTNVHFEKDREKSQTQETLKGFLRQAQNEFGLRIKKIRSDNGTEFKNSQIEGFLEEEGIKHEFSSPYTPQQNGVVERKNRTLLDMARTMLDEYKTSDRFWAEAVNTACYAINRVFGSKCFILVKRGRKSKFAPKTVEGFLLGYDSNTRAYRVFNKSSGLVEVSCDVVFDETNGSQVEQVDLDEIGDEEAPCIALRNMSIGDDEAQVDEVEDQANEPPQDDDNDQGGDANDQDKEDEEQRPPHPRVHQAIQQDHPVDTILGDIHKGVTTRSRVAHFCEHYSFVSSIEPHRVEEALQDSDWVVAMQEELNNFTRNEWVFRNKQDEHGVVTRNKARLVAKGYSQVEGLDFGETYAPVARLESIRILLAYATYHGFKLYQMDVKSAFLNGPIKEEVYVEQPPDFEDSEYPNHVYKLSKALXYWLKQAPRAWYECLRDFLITNGFKVGKADPTLFTKTIKNDLFVCQIYVDDIIFVSTNKSICEEFSRIMIQKFEMSMMGELKYFLGFQVKQLQEGTFISQTKYIQDILTKFGMKDAKLIKTPMGTNGHLDLDTRVIELKGKWSIRQRRRFHSTPLVFAGAKGSQQTNTKIKERVQNKEQSQTEGNPGLTHRIVRCATGQCPVHQGGFTRTCQPREFGEAAPL

SEQ ID NO: 10312 - protein, 1645 aa, Zea mays
  Clone ID: TF_ZmC951_448.pep
MSGEHAKKEMETGEKPATSHGKASSEESRNKKKGKDKKASSHKSHRSGDKKKKMRKVVYYETDTSSPSTSGSDAPSITSKRHERKKFSKIPLHYPRTSRHTPLLSVPLGKPPTFDCEDYARWSDLMKFHLTSLHKSIWNVVEFGAQVPSVGDEDYDEDEVAQIEHFNSQATTILLASLSREEYNKVQGLKSAKEVWDVLKTAHEGDELTKITKRETIEGELGRFRLRQGEEPQDMYNRLKTLVNQVRNLGSKKWDDHEVVKVILRSLIFLNPTQVQLIRGNPRYTLMTPEEVIENFVSFEFMIKGSRKINELDGPSTSEAQPVAFKATEEKEEESTLSRTPIDASKLDNEEMALVIKSFRQILKQRRGKDYKPRSKKVCYKCGKPGHFIAKCPISSDSDRGDDKKGRRKEKKRYYKKKGGDAHVCREWDSDESSSDSSDDEDAANIAITKGLLFPNVGHKFLMAKYGKKKKVKSKSSTRYESSSDDNASDEEDNLRTLFANLNMQQKEKLNELISAIHEKDDLLDSQEDFLIKENKKHVKVKNAYALEVEKCEKLSSELSTCHETIDNLRNENANLLAKVDSNICNVSISNLRNDNDDLLAKIEELNMSLASLRMENEKLLAKAKNFDVCNTTISDLRTKNDILHAKVVELKSCKPSTSTAEHTSICTRCRDVDVNAIHDHMALIKQQNDHIAKLDAKIAEHDLENENFKFARSMLYKGRHPGIEDGIGFQQGGNVKINAPPKKLSNFVKGKAPMPQDNEGYILYPAGYPENKIRRIHSRKSHSGPNHAFMYKGETSSSRQPTRAKLPKKKTPNASNDHSISFKTFDASYVLTNKSGKVVAKYVGGKHKGSKTCVWVPKVLVSNAKGPKTIWIYASGGSSWIIDSGCTNHMTGEKKMFSSYEKNQDPQRVITFGDGNQGVTVFRRSDDSIAFKGVLEGQLYLVDFDRAELDTCLIAKTNMGWLWHRRLAHVGMKNLHKLLKGEHILGLTNVHFEKDRICSACQAGKQVGAHHPHKNIMTTDRPLELLHMDLFGPIAYISIDGSKYCLVIVDDYSRFTWVFFLQEKSHTQETLKGFLRQAQNEFGLRIKKIRSDNGAKFKNSQIEGFLEEEGIKHEFSSPYMPQQNGVVERKNRTLLDMARTMLDEYKTSDRFWAEAVNTACYAINRVFGSKCFILIKRGRKSKFAPKTVEGFLLGYDSNTRAYRVFNKSSGLVEVSCDVVFDETNSSQVEQVDLDEIGGEEAPCIALRNMSIEDVCPKESEEPPNAQDQPSSSTQASPPTQNEDEAQVDAVENQANEPPQDDDNDQGGDANDQDKEDEEQRPPHPRVHQAIQRDHPVDTILGDIHKGVTTRSRVAHFFPRPNQNVVGTKWVFRNKQDEHGVVTRNKARLVAKGYSQVEGLDFGETYAPVARLESIRILLAYATYHGFKLYQMDVKSAFLNGPIKEEVYVEQPPGFEDSEYPNHVYKLSKALYGLKQAPRAWYGCLRDFLIDNGFKVGKADPTLFTKTLENDLFVCQIYVDDIIFGSTNESTCEEFSRIMTQKFEMSMMGELKYFLGFQVKQLQEGTFLSQTKYTQDILSKFGMKDAKPIKTPMGTNGLLDLDEGGKSVDQKGERVILRALMTPFLAIHAKGGENISPKQKDRTTT

SEQ ID NO: 10313 - protein, 1888 aa, Zea mays
  Clone ID: TF_ZmC951_449.pep
MSGDHAKKEMETGEKPTTSYGSTSSEESRTKRREKKKSSSNKGKEKKSSSHHKEKKEKSSSHKPHRKGDKHKRMRKVVYYETDTSSTSTSDSDAPSVTSKRQERKKYSKIPLRYPRISKHTPLLSVPLGKPPTFDGEDYARWSDLMRFHLISLHKSIWDVVEFGAQVPSVGDENYDEDEVAQIEHFNSQATTILLASLSKEEYNKVQGLKNAKEIWDVLKTAHEGDELTKITKRETIEGELGRFRLQKGEEPQHMYNRLKTLVNQVRNLGSKKWDDHEVVNVILRSLIFLNPTQVQLIRGNPRYTKMTPEEVIGHFVSFECMIEGSRKINELGDSSEAQPVAFKATEEKKEEATPSRQPIDASKLDNEEMALVIKSFRQILKQRRGKDYKSRSKKVCYKCGKPGHFIAKCPISSDSDRGDDKKGRRKEKKRYYKKKGGDAHVCREWDSDESSSDSSDDEDAANIAVTKGLLFPNVGHKCLMAKDGKKKVKSKSSTKYESSSDDNASDEEDNLRSLFANLNIAQKEKLNELVSAIHEKDDLLDSQEDCLIKENKKHVKVKKAYALEVEKCEKLSSELSTCREIIDNLRNENAILNAKVDSHVCDVSISTPRDNNDDLLARIEELNISLASLRVENEKLITKAKELDVCNVTISDLRTKNDMLHAKVVELKSCKPSTSIVEHVSICTRCRNVDIDAIHDHMILIKQQNDHIAKLDAKIAEHNLENEKFKFARSMLYNGRRPGIKDGIGFQRGDNVKLNAPPKNLSNFVKGKAPMPQDNEGYILYPAGYPENKIRKIHSRKSHSSPNHAFMYKGETSSSRQPTHAKLPKKKIPNASNDHAISFKTFDASYVLTNKSGKVYASGGSSWILDSGCTNHMTGEKKMFSSYEKNLDPQRAITFGDGNQGVTVFRRSDDSIAFKGLLEGQLYLVDFNRAELNTCLIAKTNMGWLWHRRLAHVGMKNLHKLLKGEHILGLTNVHFEKDRICSACQAGKQVGVHHPHKNIKTTDRPLELLHMDLFGPIAYISIGGSKYCLVIVDDYSRFTWVFFLQEKSQTQETLKGFLRRAQNEFGLRIKKIRSDNGTEFKNSQIEGFLEEEGIKHEFSSPYTPQQNGVVERKNRTLLDMARTMLDEYKTPDRFWAEAVNTACYAINRLYLHRILKKTSYELLTGKKPNISYFRVFGSKCFILIKRGRKSKFAPKTVEGFLLGYDSNTRAYRVFNKSTGLVEVSCDVVFDETNGSQVEQVDLDEIGEEQAPCIALRNMSIGDVCPKESEEPPSTQDQPSSSMQASPPTQNEDEAQNDEEQNQEDEPPQDDSNDQGGDTNDQEKEDEEEPRPPHPRVHQAIQRDHPVDTILGDIHKGVTTRSRVAHFCEHYSFVSSIEPHRVEEALQDSDWVVAMQEELNNFTRNEVWHLVPRPNQNVVGTKWVFRNKQDEHGVVTRNKARLVAKGYSQVEGLDFGETYAPVARLESIRILLAYATYHGFKLYQMDVKSAFLNGPIKEEVYVEQPPGFEDSEYPNHVYRLSKALYGLKQAPRAWYECLRDFLIANGFKVGKADPTLFTKTLENDLFVCQIYVDDIIFGSTNESTCEEFSRIMTQKFEMSMMGELKYFLGFQVKQLQEGTFISQTKYTQDILTKFGMKDAKPIKTPMGTNGHLDLDTGGKSVDQKVYRSMIGSLLYLCASRPDIMLSVCMCARFQSDPKESHLTVVKRILRYLAYTPKFGLWYPRGSTFDLIGYSDADWAGCKINRKSTSGTCQFLGRSLVSWASKKQNSVALSTAEAEYIAAGHCCAQLLWMRQTLRDYGYKLTKVPLLCDNESAIKMADNPVEHSRTKHIAIRYHFLRDHQQKGDIEISYINTKDQLADIFTKPLDEQSFTRLRHELNILDSRNFFC

SEQ ID NO: 10314 - protein, 1868 aa, Zea mays
  Clone ID: TF_ZmC951_450.pep
MSGDHAKKEMETGERPTTSHGSTSSEESRIKRKEKKKSSSNKGKEKKSSSHHKERREKSSSHKPRRSGDKHKRMRKVVYYETDTSSTSTSGSDAASVTSKRQERKKYSKIPLHYLRISKHTPLLSVPLGKPPTFDGEDYARWSDLMRFHLTSLHKSIWDVVEFGAQVPSVGDEGYDEDEVAQIEHFNSQATTILLASLSREEYNKVQGLKNAKEIWDLLKTAHEGDELTKITKRETIEGELGRFRLHKGEEPQHMYNRLKTLVNQVRNLGSVKWDDHEVVKVILRSLIFLNPTQVQLIRGNPRYTKMTPEEVIENFVSFECMIEGSRKINELDDATTSEAQPVAFKATEEKKEESTPSRQPIDASKLDNEEMALVIKSFRQILKQRKGKDYKSRSKKVCYKCGKPGHFIAKCPISSDSDRGDDKKGRRKEKKRYYKKKGGDAHICREWDSDESSSDSSDDEDAANIAVTKGLLFPNVGHKCLMAKDGKRKKVKSNSSTKYESSSDDNASDEEDNLRSLFANLNIAQKEKLNELVSAIHEKDDLLDSQEDCLIKENKKHVKVKKAYALEIEKCEKLSNELSTCREMIDNLRNENASLNTKVDSHVCNIPNPRNNNDDLLARIEELNISLASLKIENEKLLTKAKDLDICNATISDLRTKNDMLQAKVVELKSCKPSTSIVEHVSICTRCRDVNIDAIHDHMALIKQQNDHIAKLDAKIAEHNLENEKFKFARSMLYNGRRPGIKDGIGYQRGDNVKLNAPPKNLSNFVKGKAPMPQDNEGYILYPAGYPESKIRRIHSRKSHSGPNHAFMYKGETSSSRQPTRAKLPKKTPIASNEHNISFKTFDASYVLTNKSGKIVAKYVGGKHKGSKTCVWVPKVLVSNAKGPKTIWVYASGGSSWILDSGCTNHMTGEKKMFSSYEKNQDPQRAITFGDGNQGVTVFRRSDDSIAFKGVLEGQLYLVDFDRAELDTCLIAKTNMGWLWHRRLAHVGMKNLHKLLKGEHILGLTNVHFEKDRICSACQAGKQVGAHHPHKNIMTTDRPLELLHMDLFGPIAYISIGGSKYCLVIVDDYSRFTWVFFLQEKSQTQETLKGFLRRAQNEFGLRIKKIRSDNGTEFKNSQIEGFLEEEGIKHEFSSPYTPQQNGVVERKNRTLLDMARTMLDEYKTPDRFWAEAVNTACYAINRLYLHRILKKTSYELLTGKKPNISYFRVFGSKCFILVKRGRKSKFAPKTVEGFLLGYDSNTRAYRVFNKSTGLVEVSCDVVFDETNGSQVEQVDLDEIGNEEAPCIALRNMSIGDVCPKESEKPPSAQDQPSSSMQASPPTQNEDEAQDVEQEDHEDEPPQHDGNDQGRDTNDQEKEDEEELRLPHPRVHQAIQRDHPVDTILGDIHKGVTTRSRVAHFCEHYSFVSSIEPHRVEEALQDSDWVVAMQEELNNFTRNEVWHIVPRPNQNVVGTKWVFHNKQDEHGVATRNKARLVAKGYSQVEDLDFDETYAPIARLESIHILLSYATYHGFKLYQMDVKSAFLNGPINKEVYVEQPPGFKDNLFVCQIYVDDIIFGSTNKSTCEEFSRIMIQKFEMSMMGELKNFLGFQIKQLQEGTFISQTKYIQDILKKFGMKDGKPIKTPMGTNGHLDLDTGGKSVDQKVYRSMIGSLLYLCASRPDIMLSVCMCARFQADPKEVHLRVVKRIMRYLVYTPKFGLWYPKGSTFDLIGYFDADWTRCKIDRKSTSGTCQFLGRSLVSWASKKQNSIALSTAEAEYIAIGHCCAQLLWMRQTLRDYGYKLRKVPLQCDNESAIRMAYNPVEHSRTKHIYIQHHCLRDHQQNGDIEIAYVSTKEQLTDIFTKPLDEKTFSKLRNELNIHDSWNFD

SEQ ID NO: 10315 - protein, 1737 aa, Zea mays
  Clone ID: TF_ZmC951_451.pep
MSGEHANKEMETGDKPTTSHGKASSEESRKKGKGKEKKASSHKSHQSGDKKKKMRKVVYYETDTSSPSTSGFDAPSVTSKRHERKKFSKIPLHYPRTSRHTPLLSVPLGKSPTFDGEDYARWSDLMKFHLTSLHKSIWNVVEFGAQVPSVGDEDYDEDEVAQIEHFNSQATTILLASLSREEYNKVQGLKSAKEVWDVLKTAHEGDELTKITKRETIEGELGRFRLRKGEEPQDMYNRLKTLVNQVCNLESKKWDDHEMVKVILRSLIFLNPTQVQLIRGNPRYTLMTPEEVIGNFVSFEYMIKGSKKINELDDPSTSEAQPVAFKATEEKKEESTPSRQPIDASKLDNEEMTLVIKSFRQILKQRRGKDYKPRSKKVCYKCGKPGHFIAKCPISSDSDRGDDKKGRRKEKKKYYKKKGGDAHVCREWDSDESSSDSSDDEDAANIAINKGLLFPNVDHKCLMAKDDKKKKVKSKSSTRYESSSDDNASDEEDNLRTLFANINMQQKEKLNELISAIHEKDDLLDSQEDFLIKENKKHVKVKNAYALEVEKCEKLSSELSTCHETIDNLRNENANLLAKVDSNVCNVSIPNLRNDNDNLLAKIEELNITLASLRNENKNLLAKAKELDVCNITISDLRSKNDILHAKVVELKSCKPSTSTIEHTSICTRCRDVDINAIHDHMALIKQQNDHIAKLDAKIAEHELENEKFKFARSMLYSGRRPGIKDGIGFQKGDNVKLNAPPKKLSNFVKGKSLMAQDNEGYILYAAGYPESKIRRIHTRKSHSCPNHAFMYKGETSSSRQPTRAKLPKKKTPSASNDHDISFKTFDASYVLTNKSGKVVAKYVGGKHKGSKTCVWVPKVLVSNAKGPKTIWVYASEGSSWIIDSRCTNHMTGEKKMFSSYEKNQDPQRAITFGDGNQGVTVFRRSDDSVAFKGVLEGQLYLVDFDRAELDTCLIAKTNMGWLWHRRLAHVGMKNLHKLLKGEHILGLTNVHFEKDRICSACQAGKQVGAHHPHKNIMTTDRPLELLHMDLFGLIAYISIGGSKYCLVIVDDYSRFTWVFFLQEKSHTQETLKGFLRRAQNEFGLRIKKIRSDNGTEFKNSQHEGFLEEEGIKHEFSSPYTPQQNGVVERKNITLLDMARTMLDEYKTTDRFWAEAVNTACYAINRLYLHRILKKTSYELLTGKKPNISYFRVFGSKCFILVKRGRKSKFAPKTVEGFLLGYDSNTRAYRVFNKSSGQDEVSCDVVFDETNSSQVEQVDLDEIGDEEALCIALRNMSIGDVCPKESEEPPNAQDQPSSSTQASPPTQNEDEAQVDEGEDQANEPPQDDGNDQGGDANDQDKEDEEPRLPHPRVHQAIQRDHPVDTILGDIHKGVTTRSHVAHFCKHYSFVSSIEPHRVEEALQDSDWVVAMQEELNNFTRNEVWHLVPRPNQNVLGTKWVFRNKQDEHGVVTRNKARLVAKGYSQVEGLDFGETYAPVARLESIRILLAYATYHGFKLYQMDVKSAFLNGPIKEEVYVEQPPGFEDSEYPNHVYKLSKTLYGLKQAPRAWYECLRDFLIDNGFKVGKVDPTLFTKTLENDLFVCQIYVDDIIFGSTNESTCEEFSRIMTQKIEMSMMGELKYFLGFQVKQLQEGTFLSQTKYTQDILNKFGMKDAKPIKTPMGTNGHLDLDTEGAKGSHLANKKTKKWVQQKEQWITEGTPGLAHRTVWCATGQCPVHQGTPSQTLHLREIPGALAL

SEQ ID NO: 10316 - protein, 1627 aa, Zea mays
  Clone ID: TF_ZM3542.C1.o1.fg.pep
MPPRTRLTARKSTGPIGVPRHQLAPRHESSSSGSNDSIGDLEARVSRLQAALQHRTDAWVADEDRINELRRDIRHLQDQLADRDLALDWAVQSRLLACAKEARAQAQIKELSSTVDNLNVKWKVSLAHYVYFKCYLPQMSTRTRGQDAAGTSGGRDVTPNPPPVPPTLAEAIAALVNATADNTRFLREKAGQQQFQQQAGRGYQQGPRETTYLDFSETHPPLFIKAEDPLEADEWIRVIEQKFGLLRCSETQKPLFAAQQLRGPASTWWGNFVATQPVNHQVTWEEFKAAFREHYIPEGVLHMKQEEFMKLKQGGDTVNQYLNKFNHLSQYAIDQVNTDLKKKNCFMRGLNDRLQRKMAACIDLTYGKAVSTALSVEAKYASSGKNKGFGGERPNQGQAKKQQFVIRPSSQNHTFSRPPLFPFKQPIIIRPNNTPTTPNQPGAPGTRFPALPSSSTGCFNCGKSGHFIKDCPYPKQNQSNAPQGSGRSAQPKGNIVGKNTKKTGRVYYTQVATTPEGEPVMMGTFPVASHPAIILFDSGASHTFISKKFVEQHHIACHESKEGFKIHSPGGHIFTREVAYEVPVTMAGRNFPANMIVLKGQDIDVILGMNWLTQHKAILNTELRTVRLSYNQEEILLSLPVTNPAKASGRIYEAIVPEIKNIPVVCEFPDVFPEDLPGLPPERDVECVIELKPGTTPISRRSYRMPPNELAELKIQLQDLLNKGFIRPSSSPWGCPAIFVKKKDKTLRMCVDYRPLNEVTIKNKYPLPRIDILFDQLTGARVFSKIDLRSGYHQIRIRPKDIPKTAFTTRYGLFEYLIMSFGLTNAPAHFTYLMNSVFMPELDKFMVVFIDDILIYSKNEEDHAQHLRIVLTHLREHQLYAKFSKCAFWLEEIQFLGHVLSAKGIAVDPSKVKDILEWKPPTTVHQVRSFLGLAGYYRRFIPDFSKLVKPITSLLKNDIKFNWSSKCNEAFEQLKALLTTAPVLAQPDITKPFDVYCDASGSGLGCVLMQEGRIIAYASRQLRRHEEHYPTHDLELAAVVHALKIWRHYLLGNICHIYTDHKSLKYIFTQSELNMRQRRWLELIKDYELEIHYHPGKANVVADALSRKTSCHCLMVKTSENTLCQEMEKLNLGIIQQGTLNQLKLESIILQRIIDAQKDNLGMKHIREKIRAGVAKCFKEDDQGVIWFKNRIVVPKNEELRQQILDEAHLSRYSIHPGSTKMYQDLKQHYWWTKMKIEIARYVAKCDTCRRVKAIHMKTAGPLQSLPIPTRKWEDISMDFIVGLPRTAKGYDSIWVIVDRLTKIAHFLPVRAKYTVATYAALYIGRIISLHGIPKTIVSDRGPQFVSKFWEELHKSLGTKLLHSSAYHPQTSGQTERVNQILEDMLRACVLDFSQKWDECLPLAEFSYNNSYQESIKMAPFEALYGRRCRTPLNWSEPGERYFFRPDMVKEVEEKVHKIIHNMKKAQTRQKSYADRRRQPLCFLVGDYVYLKVSPMKGVSRFGVKGKLAPRYIGPFLVIEQCGPVAYRLQLPETLSAVHNVFHVSQLKKCLRVPDRTIEVTDVVLEPDLTYSKHPIRVLDQKDRVTRRKTLKFYKIQWNQHSEDEATWETQDFLNKNFPGFLASCNL

SEQ ID NO: 10317 - protein, 512 aa, Zea mays
  Clone ID: TF_ZM3655.C3.o1.fg.pep
MSGDHAKKEMETGEKPTTSQGSTSSEESRTKRREKKKSSSIKGKEKKSSSHHKEKKEKSYSHKPHRKGDKHKRMRKVVYYETDTSSTSTSDSDAPSVTSKRQERKKYIQLIRGNPRYTKMTPEEVIGHFVSFECMIEGSRKINELGERSEAQPVAFKATEEKKEESTPSRQPIDASKLDNEEMALVIKSFRQILKQRRGKDYKSRSKKVCYKCGKPGHFIAKCPISSDSDRGDDKKGRRKEKKRYYKKKGGDAHVCREWDSDESSSDSSDDEDAANIAVTKGLLFPNVGHKCLMAKDGKKKKEKSQTQETLKGFLRRAQNEFALRIKKIRSDNGTEFKNSQIESFLEEEGIKHEFSSPYTPQQNGVVERKNRTLLDMARTMLDEYKTPDRFWAEAVNTACYAINRLYLHRILKKTSYELLTGNPKSLQMHKINRPPPCKHLHQLKMRMRLKLMKGKIKKMSHLKMMTMIKGEMQMIKRRRMRKNQDRHTQESTKQSNEITPSTPSSATFIRG

SEQ ID NO: 10318 - protein, 1519 aa, Zea mays
  Clone ID: TF_ZM3971.C1.o1.fg.pep
MALVIKSFRQILKQRRGKDYKSRSKKVCYKCGKPGHFIAKCPISSDSDRGDDKKGRRKEKKRYYKKKGGDAHVCREWDSDESSSDSSDDEDAANIAVTKGLLFPNIGHKCLMAKDGKRKKVKSRSSTKYETSSDENASDEEDNLRILFANLNMEQKEKLNELISAIHEKDDLLDSQEDCLIKENKKHVKVKNAYALEIEKCEKLSSELSTCREMIDNLRNENANLNTKVDSHVCNVSIPNPKDNNDDLLSRIEELNISLASLRVENENLIAKAKELDVCNATISNLRDKNDILHAKIVELNSCKPSTSIVEHVSICTRCRDVDVNAIHDHMALIKQQNDHIAKLDAKIAEHNLENEKFKFARSMLYSGRRPGIKDGIGFQRGDNVKLSAPPKRLSNFVKGKAPMPQDNEGYILYPAGYPESKIRRTHSRKSHSGPNHAFMYKGETSSSRQPTRAKLPRKKTPSASNDHDISFNTFDASYVLTNKSGKVYASGGSSWILDSGCTNHMTGEKKMFSSYEKNQDPQRAITFGDGNQGVTVFRRSDDSIAFKGVLEGQLYLVDFDRAELDTCLIAKTNMGWLWHRRLAHVGMKNLHKLLKGEHILGLTNVHFEKDRICSACQAGKQVGSHHPHKNIMTTDRPLELLHMDLFGPIAYISIGGSKYCLVIVDDYSRFTWVFFLQEKSQTQETLKGFLRRAQNEFGLRIKKIRSDNGTEFKNSQIESFLEEEGIKHEFSSPYTPQQNGVVERKNRTLLDMARTMLDEYKTSDRFWAEAVNTACYTINRLYLHQILKKTSYELLTGKKPNISYFRIFGSKCFILVKRGRKTKFAPKTVEGFLLGYDSNTRAYRVFNKSTGLVEVSCDVVFDETNGSQVEQVDLDEIGDEEAPCIALRNMSIGDVCPKESKESPRAQDQTFSSMQASPPTQNEEEAQVDEEEDQSSEPPQDDGIDQGGDVNDQDKEDEEQRPPHPRVHQAIQRDHPVDTILGDIHKGVTTRSRIAHFCEHYSFVSSIEPHRVEEALQDSDWLVAMQEELNNFTRNEVWHLVPRPNQNVVGTKWVFRNKQDEHGVVTRNKARLVAKGYSQVEGLDFGETYAPVARLESIRILLAYATYHGFKLYQMDVKSAFLNGPIKEEVYVEQPLGFEDSEYPNHVYKLSKALYGLKQAPRAWYECLRDFLIANGFKVGKADPTLFTKTLENDLFVCQIYVDDIIFGSTNESTCEEFSRIMTQKFEMSMMGELKYFLGFQVKQLQEGTFISQTKYTQDILTKFGMKDAKPIKTPMGTNGHLDLDTGGKSVDQKEYRSMIGSLLYLCASRPDIMLSVCMCARFQANPKEAHLTAVKRILRYLAYTPKFGLWYPRGSTFDLIGYSDADWAGCKINRKSTSGTCQFLGRSLVSWASKKQNSVALSTAEAEYIAAGHCCAQLLWMRQTLRDYGYKLTKVPLLCDNESAIKMADNPVEHSRTKHIAIRYHFLRDHQQKGDIEISYINTKDQLADIFTKPLDEQSFTKLRHELNILDSRNFFC

SEQ ID NO: 10319 - protein, 1923 aa, Zea mays
  Clone ID: TF_ZM3976.C13.o1.fg.pep
MSGDHAKKEMETGEKPTTSHGSTSSEESRTKRKEKKKDSSKRKEKKSSSSHHQEKKEKSSSHKPHRKGDKHKRMRKVVYYETDTSSTSTSDSDAPSVTSKRQERKKYSKIPLHYPRISKHTPLLSVPLGKPPTFDGEDYARWSDLMRFHLISLHKSIWDVVEFGAQVPSVGDENYDEDEVAQIEHFNSQATTILLASLSREEYNKVQGLKSAKEIWDVLKTAHEGDELTKITKRETIEGELGRFRLRKGEEPQHMYNRLKTLVNQVRNLGSKKWDDHEVVNVILRSLIFLNPTQVQLIRGNPRYTKMTPEEVIGHFVSFECMIEGSRKINELGDPSEAQPVAFKATEEKKEESTPSRQPIDASKLDNEEMALVIKSFRQILKQRRGKDYKSRSKKVCYKCGKPGHFIAKCPISSDSDRGDDKKGRRKERKRYYKKKGGDAHVCREWDSDESSSDSSDDEDAANIAVTKGLLFPNVGHKCLMAKDGKRKKVKSNSSTKYESSSDDNASDEEDNLRSLFANLNIAQKEKLNELVSAIHEKDDLLDSQEDCLIKENKKHVKVKKAYALEVEKCEKLSSELSTCREMIDNLRNENASLNAKVDSHVCNVSIPNPRDNNDDLLARIEELNISLASLRLENESLIAKAKDFDVCKVTIANLRDKNDILHAKIVELNSCKPSTSIVEHVSICTRCRNVDIDAIHDHMALIKQQNDHIAKLDAKIAEHNLENEKFKFARSMLYNGRRPGIKDGIGFQRGDNVKLNAPPKNLSNFVKGKAPMPQDNEGYILYPAGYPESKIRKIHSRKSHSGPNHAFMYKGETSSSRQPTRAKLPRKKISNASNEHSISFKTFDASYVLTNKSGKVVAKFVGGKHKGSKTCVWVPKVLVSNAKGPKTVWVYASGGSSWILDSGCTNHMTGEKRMFSSYEKNKDPQRAITFGDGNQGVTVFRRSDDSIAFKGVLEGQLYLVDFDRAELDTCLIAKTNMGWLWHRRLAHVGMKNLHKLLKGEHILGLTNVHFEKDRICSACQAGKQVGVHHPHKNIMTTDRPLELLHMDLFGPIAYISIGGSKYCLVIVDDYSRFTWVFFLQEKSQTQETLKGFLRRAQNEFALRIKKIRSDNGTEFKNSQIESFLEEEGIKHEFSSPYTPQQNGVVERKNRTLLDMARTMLDEYKTPDRFWAEAVNTACYAINRLYLHRILKKTSYELLTGKKPNISYFRVFGSKCFILVKRGRKSKFAPKTVEGFLLGYDSNTRAYRVFNKSTGLVEVSCDVVFDETNGSQVEQVDLDEIGEEQAPCIALRNMSIGDVCPRESEEPPNAQDQPSSSMQASPPTQNEDEAQVDEGQNQEDEPPQDDGNNPGGDAIDQEKEDEEEPRPPHPRVHQAIQRDHPVDTILGDIHKGVTTRSRVAHFCEHYSFVSSIEPHRIEEALQDSDWVVAMQEELNNFTRNEVWHLVPRPNQNVVGTKWVFRNKQDEHGVVTRNKARLVAKGYSQVEGLDFGETYAPVARLESIRILLAYATYHGFKLYQMDVKSAFLNGPIKEEVYVEQPPGFEDSEYPNHVYRLSKALYGLKQAPRAWYECLRDFLIANGFKVGKADPTLFTKTLEKDLFVCQIYVDDIIFGSTNESTCEEFSRIMTQKFEMSMMGELKYFLGFQVKQLQEGTFISQTKYTQDILTKFGMKDAKPIKTPMGTNGHLDLDTGGKSVDQKVYRSMIGSLLYLCASRPDIMLSVCMCARFQSDPKESHLTAVKRILRYLAYTPKFGLWYPRGSTFDLIGYSDADWAGCKINRKSTSGTCQFLGRSLVSWASKKQNSVALSTAEAEYIAAGHCCAQLLWMRQTLRDYGYKLTKVPLLCDNESAIKMADNPVEHSRTKHIAIRYHFLRDHQQKGDIEISYINTKDQLADIFTKPLDEQSFTRLRHELNILDSRNFFC

SEQ ID NO: 10320 - protein, 1442 aa, Zea mays
  Clone ID: TF_ZM4318.C3.o1.fg.pep
MVNQRQGPNNRNQRGQQAPPPPPPPNPNMEQFIAAQMQILQGLTAVVQQLQQNQQNQQPQQQQYAPPARDKHRDFMSHHPPTFSHAVEPLDADDWLKVIGKKLDITQCNDREKVLYASGRLEGAASDWWDAFTAAHPNADTITWQEFQENFRAHHIPSGIMKLKKKEFLSLTQGNMSVSEYRDRFTQLSRYAPEEVDTDEKRQERFLEGLIGPLNYQLQSHTFPNFQTLLNKAIGLESKRKELSDHKRKFQGQSSRNTRPNNAQGSQFCSGNQGGNNYQVQRSGQQGQRNNQSQNQQRSNPQTNQRSGGNSQNRQGGTNNTQARNNAPVQPNGCFKCGELGHYANNCPRRNQQTPQKGNNQRNDQNTPARGSAQNKTPQNQSRGRVNHVTAESVPEDADIVYGIDFTVDPVVLGSNGIDVILGCNWLKSCDGVIQCANGTIMLTSPQGERIQVNIDKSTDEKGKTVINHLEEKPLENIKVVCEYPDVFPEELPGMPPDRDIEFSIELVPGIAPISKRPYRMDVKDLVELKKQIEELLEKGFIRPSSSPWGAPVLFVNKKDGSRRMCVDYRSLNEVTIKNKYPLPRIEDLFDQMKGAKIFSKVDLRSGYHQLKIRAEDVPKTAFTTRYGLYEFLVMSFGLTNAPAYFMNLMNKVFMEYLDQFVVVFIDDILIYSPNEEAHEDHLRLVLQKLRDNQLYAKFSKCDFWLKEVAFLGHIVTNGGIKVDPGKIREILDWKQPKDASKIRSFLGLAGYYRRFIEGFSKLVKPLTSLLEKGKEFKWDEACQNCFEELKKRLTTAPILVMPDIHKGFDVYCDASHLGLGCVLMQEGKVIAYASRQLRKHEKNYPTHDLELAAVVHALKIWRHYMIGNKCKIFTDHKSLKYIFTQKELNLRQRRWLELIKDYDLEIQYHPGKANVVADALSRKGQVNNITTHLMSQELCWEMERLNLGFLNNVEATVMEVESTLEEEIRKGQESDEKIKEIKTLISMGKAPDFTEDEQGTIWFKKRICVPEIEHLRQLILREAHDSAYSIHPGSTKMYQDLKEKYWWYGLKRDVATHVALCDVCQRVKAEHQRPAGLLQPLKVPEWKWEEISMDFIVGLPRTRDGYDSIWVIVDRLTKVAHFIPVKTTHSGAQLAELYMSRIVCLHGVPKKIVSDRGTQFTSLFWKRLHESMDTKLNFSSAYHPQTDGQTERTNQVLEDMLRACALKHGRSWDKSLPYAEFSYNNSYQASLKMAPFEALYGRKCRTPLYWNQTGESQVFGPEILQEAEKQVQIIRENLKTAQSRQKSYADNRRRELMFEVGDFVYLKVSPMRGMKRFKVKGKLSPRYIGPFKILERKGEVAYQLELPDRLSDVHDVFHVSQLKKCLRVPKEQLPMEELIVNEDLTYSEYPVRILETSRRITRSKVINMCKVQWSHHSEDEATWEREDELIAEFPQLFSESS

SEQ ID NO: 10321 - protein, 1665 aa, Zea mays
  Clone ID: TF_ZM4330.C4.o1.fg.pep
MSGDHAKKEMETGEKPTTSNGSTSSEESRTKRREKKKNSSNKGKEKKSSSHHKEKKEKSSSHKPHRSGDKQKRMRKVVYYETDTSSTSTSGSDTPSVTSKRQERKKFSKIPLHYPRISKHASLLSVPLGKPPTFDGEDYARWSDLMRFHLTSLHKSIWDVVEFGAQVPSVGDKDYDEDEVAQIEHFNSQATTILLASLSREEYNKVQGLKSAKEVWDVLKTAHEGDELTKITKRETIEGELGRFRLRKGEEPQHMYNRLKTLENQVRNLGSKKWDDHEVVNVILRSLIFLNPTQVQLIRGNPRYTKMTPEEVIGHFVSFECMIEGSRKINELGDPSEAQPVAFKATEEKKEVSTPSRQPIDASKLDNEEMALVIKSFRQILKQRRGKDYKSRSKKVCYKCGKPGHFIAKCPISSDSDRGDDKKGRRKEKKRYYKKKGGDAHVCREWDSDESSSDSSDNEDAANIAVTKGLLFPNVGHKCLMAKDGKRKKVRSNSSTKYESSSDDNASDEEDSLRSLFANLNIAQKEKLNELVSAIHEKDDLLDSQEDLLIKENKKHVKVKKSYALEIEKCEKLSSELSTCREMIDNLKNENASLNAKVDSHVCNVSIPNPRDNNDDLLARIEELNISLASLKVENESLIAKAKDFDVCKVTISDLRDKNDILHAKIVKLNSCKLSTSIVEHVTICTRCRDIDINAIHDHMTLIKQQNDHIAKLDAKIAEHNLENEKFKFARSMLYNGRHPGIKDGIGFQRGDNVKISAPPKRLSNFVKGKAPMPQDNEGYILYPAGYPESKIRKIHSRKSHSGPNHAFMYKGETSSSRQPTHAKLPRKKTPNASNDHAISFKTFDASYVLTNKSGKVVAKFVGGKHKGSKTCVWVPKVLVSNAKGPKTVWVYASGGSSWILDSGCTNHMTGEKRMFSSYEKNQDPQRAITFGDGNQGVTVFRRSDDSIAFKGVLEGQLYLVDFDRAELDTCLIAKTNLGWLWHRRLAHVGMKNLHKLLKGEHIIGLTNVHFEKDREKSQTQETLKGFLRRAQNEFGLRIKKIRSDNGTEFKNSQIEGFLEEEGIKHEFSSPYTPQQNGVVERKNRTLLDMARTMLDEYKTSDRFWAEAVNTACYAINRLYLHRILKKTSYELLIGKKPNISYFRVFGSKCFILVKRGRKSKFAPKTVEGFLLGYDSNTRAYRVFNKSTGLVEVSCDVVFDETNGSQVEQVDLDEIGDEEAPCIALRNMSIGDVCPKESEESPNTQDQPSSSTLATPPTQNENEAQVDEVEDQANEPPQDDGNDQGGDANDQDKEDEEQRPPHPRVHQAIQRDHPVDTILGDIHKGVTTRSRVAHFCEHYSFVSSIEPHRVEEALQDSDWVVAMQEELNNFTRNEVWHLVPRPNQNVVGTKWVFRNKQDEHGVVTRNKARLVAKGYSQVEGLDFGETYAPVARLESIRILLAYATYHGFKLYQMDVKSAFLNGPIKEEVYVEQPPGFEDSEYPNHIYKLSKALYGLKQAPRAWYECLRDFLIANGFKVGKADPTLFTKTLENDLFVCQIYVDDIIFGSTNESTCEEFSRIMTQKFEMSMMGELKYFLGFQVKQLQEGTFISQTKYTQGILNKFGMKDAKPIKTPMGTNGHLDLDTGGEETTSRALMIPFLAIHAKKGEKGAQSKRTAPPPISKTQC

SEQ ID NO: 10322 - protein, 960 aa, Zea mays
  Clone ID: TF_ZM4333.C1.o1.fg.pep
MSGDHAKKEMETGEKPTTSNGSTSSEESRTKRREKKKNSSNKGKEKKSSSHHKEKKEKSSSHKPHRSGDKQKRMRKVVYYETDTSSTSTSGSDTPSVTSKRQERKKFSKIPLHYPRISKHASLLSVPLGKPPTFDGEDYARWSDLMRFHLTSLHKSIWDVVEFGAQVPSVGDKDYDEDEVAQIEHFNSQATTILLASLSREEYNKVQGLKSAKEVWDVLKTAHEGDELTKITKRETIEGELGRFRLRKGEEPQHMYNRLKTLENQVRNLGSKKWDDHEVVNVILRSLIFLNPTQVQLIRGNPRYTKMTPEEVIGHFVSFECMIEGSRKINELGDPSEAQPVAFKATEEKKEVSTPSRQPIDASKLDNEEMALVIKSFRQILKQRRGKDYKSRSKKVCYKCGKPGHFIAKCPISSDSDRGDDKKGRRKEKKRYYKKKGGDAHVCREWDSDESSSDSSDNEDAANIAVTKGLLFPNVGHKCLMAKDGKRKKVRSNSSTKYESSSDDNASDEEDSLRSLFANLNIAQKEKLNELVSAIHEKDDLLDSQEDLLIKENKKHVKVKKSYALEIEKCEKLSSELSTCREMIDNLKNENASLNAKVDSHVCNVSIPNPRDNNDDLLARIEELNISLASLKVENESLIAKAKDFDVCKVTISDLRDKNDILHAKIVKLNSCKLSTSIVEHVTICTRCRDIDINAIHDHMTLIKQQNDHIAKLDAKIAEHNLENEKFKFARSMLYNGRHPGIKDGIGFQRGDNVKISAPPKRLSNFVKGKAPMPQDNEGYILYPAGYPESKIRKIHSRKSHSGPNHAFMYKGETSSSRQPTHAKLPRKKTPNASNDHAISFKTFDASYVLTNKSGKVVAKFVGGKHKGSKTCVWVPKVLVSNAKGPKTVWVYASGGSSWILDSGCTNHMTGEKRMFSSYEKNQDPQRAITFGDGNQGVTVFRRSDDSIAFKGVLEGQLYL

SEQ ID NO: 10323 - protein, 252 aa, Zea mays
  Clone ID: TF_ZM4336.C2.o2.fg.pep
MSGDHAKKDMVTGEKPATSHGKAPSGESHNKKKEELPPHKSHRSGDKKKKMKKVVYYETDSSSPSTSGSDAPSVTSKRHACKKFSSKKIIEQDTSSTREAQPVAFKALEEKKEESTSSRLPIDASKLDNEEMTLIIKIFRQILKQRKGKDYKPRSKKVCYKCGKPGHFIAKCPISSDSDRGDDKRGKKKEKKRYYKKKGGDAHVCREWDSDESSTNSSSDEDTANIAINKGLLFSNVGHKCLMAKDGKKKKK

SEQ ID NO: 10324 - protein, 1070 aa, Zea mays
  Clone ID: TF_ZM4353.C2.o6.fg.pep
MKAAAVEVMTPIGDLEARVSRLQTALQHRTDAWVADGDRINELRRDIRHLQDQLADRDLALDWVVQSRLLMCAKEARAQARIKELSSTVDNLQMPTRTRGQDAAGTSGGRDVTPNPPPVPPTLAEAIAALVNATADNTRFLREMAGQQQFQQQAGRGYPQGPRETTYLDFSETRPPLFVKAEDPLEADEWIRVIEQKFGLLRCSETQKSLFAAQQLRGPASTWWGNFVAIQPVNHQVTWDEFKAAFREHYIPEGVLHMKQEEFMKLQQGGDTVNQYLNKFNHLSQYAIDQVNTDLKKKNCFMRGLNDRLQRKMATCIDLTYGKAVSTALSVEAKYTNSGKNKGFGGERPSQGQAKKQRFVIRPSNQNRTFSRPPSFPFKQPIIIRPNNNPTTPNQPGARGTRFPALPSSSTGCFNCGKSGHFIKDCPYPRQNQSNASQGSGKSAQSKGNAMGKNTKKTGRVYYTQVATTPEGEPVMMGTFPVASHPAIILFDSGASHTFISKKFVEKHHIAYHESKEGFKIHSPGGHIYTREVAYGVPVTMAERNFPTNMIVLKGQDIDVILGMNWLTQHKAILNTELRTVRLSYNQEKILLTLLATNPAKTSGRVYEAIVPEIKNIPVVCEFPDVFPEDLPGLPPERDVEFVIELKPGTAPISRRSYRMPPNELAELKIQYQDLLNKGFIRPSSSPWGCPAIFVKKKDQTLRMCVDYRPLNEVTIKNKYPLPRIDILFDQLTGARVFSKIDLRSGYHQICIRPEDIPKTAFTTRYGLFEYLVMSFGLTNAPAHFTYLMNSVFMPELDKFVVVFIDDILIYSKNEEDHAQHLRIVLTRLREHQLYAKFSKCAFWLEEIQFLGHVLSAKGIAVDPSKVKDILEWKPPTTVHQVRSFLGLAGYYRRFIPDFSKLVKPITSLLKNDIKFNWSSKCNEAFEQLKTLLTTAPVLAQPDITKPFDVYCDASGSGLSCVLMQEGRVIAYASRQLRRHEEHYPTHDLELAAVVHALKIWRHYLLGNICHIYTDHKSLKYIFTQSELNMRQRRWLELIKDYELEIHYHPGKANVVADALSRKTSCHCLM

SEQ ID NO: 10325 - protein, 1825 aa, Zea mays
  Clone ID: TF_ZM4401.C1.o4.fg.pep
MSGDHAKKEMETGEKPTTSHGSTSSEESRTKRKEKKKDSSKRKGKKSSSSHHKEKKEKSSSHKPHRKGDKHKRMRKVVYYETDTSSTSTSDSDVPSVTSKRQERKKYSKIPLHYPRISKHTPLLSVPLGKPPTFDGEDYARWSDLMRFHLISLHKSIWDVVEFGAQVPSVGDENYDEDEVAQIEHFNSQATTILLASLSREEYNKVQGLKSAKEIWDVLKTAHEGDELTKITKRETIEGELGRFRLRKGEEPQHMYNRLKTLVNQVRNLGSKKWDDHEVVNVILRSLIFLNPTQVQLIRGNPRYTKMTPEEVIGHFVSFECMIEGSRKINELGDPSEAQPVAFKATEEKKEESTPSRQPIDASKLDNEEMALVIKSFRQILKQRRGKDYKSRSKKVCYKCGKPGHFIAKCPISSDSDRGDDKKGRRKEKKRYYKKKGGDAHVCREWDSDESSSDSSDDEDAANIAVTKGLLFPNVGHKCLMAKDGKKKKVKSNSSTKYESSSDDNASDEEDNLRSLFANLNIAQKEKLNELVSAIHEKDDLLDAQEDCLIKENKKHVNVKNAYALEVEKCQKLSSELSTCREMIDNLRNENAILNAKVDSHVCNVSIPNLRDDNVDLLAKIDELNVSLASLRLENEDLIAKAKDFDVCKVTISDLRDKNDILHAKIVELNSCKPSTSIVEHVSICTRCRNIDINAIHDHMALIKQQNDHIAKLDAKIAEHNLENEKFKFARSMLYNGRRPGIKDGIGFQRGDNVKISAPPKRLSNFVKGKAPMPQDNEGYILYPAGYPENKIRKIHSRKSHSGPNHAFIYKGETSSSRQPTRAKLPRKKTPNASNDHAISFKTFDASYMLTNKSGKVVAKFVGGKHKGSKTCVWVPKVLVSNAKGPKTVWVYASGGSSWILDSECTNHLTGEKRMFSSYEKNQDPQRAITFGDGNQGVTVFRRSDDSIAFKGVLEGQLYLVDFDRAELDTCLIAKTNMGWLWHRRLAHVGMKNLHKLLKGEHILGLTNVHFEKDRVCSACQAGKQVGAHHPHKNIMTTDRPLELLHMDLFGPIAYISIGGKKSQTQETLKGFLRRAQNEFGLRIKKIRSDNGTEFKNSQIEGFLEEEGIKHEFSSPYTPQQNGVVERKNRTLLDMARTMLDEYKTSDRFWAEAVNTACYSINRLYLHRILKKTSYELLTGKKPNISYFRVFGSKCFILVKRGRKSKFAPKTVEGFLLGYDSNTRAYRVFNKSSGLVEVSCDVVFDETNGSQVEQVDLDEIGEEQAPCIALRNMSIGDVCPKESEEPPIAQDQPSSSMQASPPTENEDEAQVDEVEDQANEPPQDDSNDQGGDTNEEDKEDEEQRPPHPRVHQAIQRDHPVNTILGDIHKGVTTRSRVAHFCEHYSFVSSIEPHRVEEALQDSDWVVAMQEELNNFTRNEVWHLVPRPNQNVVGTKWVFRNKQDEHGVVTRNKARLVAKGYSQVEGLDFGETYAPVARLESIRILLAYATYHGFKLYQMDVKSAFLNGPIKEEVYVEQPPGFEDSEYPNHVYKLSKALYGLKQAPRAWYECLRDFLIANGFKVGKADPTLFTKTLNNDLFVCQIYVDDIIFGSTNESTCEEFSRIMTQKFEMSMMGELKYFLGFQVKQLQEGTFISQTKYTQDILTKFGMKDAKPIKTPMGTNGHLDLDTGGKSVDQKIIPDRRSFLEKQAKRGPSGLLRRTVRDMGIPLGQNQCKNSSFHYRLSGGKAKTVRALARTVRPQARTVRSPLIYRGGPSGPGSRTVRAQQNGPTARKWLVAINTTPTTSIHFIQAFQPSTFNTRASNPFQDTFKASISPSFTIEKRDH

SEQ ID NO: 10326 - protein, 603 aa, Zea mays
  Clone ID: TF_ZM4404.C2.o1.fg.pep
MSGEFAKKEMETGDKPTTSHGKASSEESRNKEKKREKKKEKKTSSHKSHRSGDKIKKMRKVVYYETDTSSPSTSGSDAPSITSKRHERKKFSKIPLRYLRITKHTPLLSVPLGKPPTFDGEDYARWSDLMRFHLTSLHKSIWDVVEFGAQHFNSQATTILLASLSREEYNKVEGLKGAKEVWDVLKTAHEGDELTKITKRETIEGELGRFRLRQGEEPQDMYNRLKTLVNQVRNLGSKKWDDHEVVKVILRSLIFLNPTQVQLIRGNPRYTLMTSEEVIGNFVSFEFMIKGSRKINELDGPSTSEAQPVAFKATKDKKEEYTPSRTPIDASKLDNEEMALVIKSFRQILKQRRGKDYKPRSKKVCYKCGKPGHFIAKCPISSDSDKGDDKKGRRKEKKRYYKKKGGDTHVCREWDSDESSSDSSDDEDAANIAVTKGLFFPNVGHKCVMAKDGKKKKVKSKSSTRYESSSDENASDEEDNLRTLFANLNMQQKEKLNELISAIHEKDDLLDSQEDFLIKKNKKHVKVKNAYALEVEKCEKLSSELSTCHETIDNLRNENVSLNAKVVSHVCDVLIPNPRNNDDDLLARIKELNTSLASLRSEK

SEQ ID NO: 10327 - protein, 1927 aa, Zea mays
  Clone ID: TF_ZM4404.C5.o1.fg.pep
MSGDHAKKEMETGEKPTTSQGSTSSEESRTKRREKKNISSNKGKEKKSSSHHKEKKEKSSSHKPHRSKDKQKRMRKVVYYETDTSSTSTSGSDTPSVTSKRQERKKFSKIPLHYPRISKHAPLLSVPLGKPPTFDGEDYARWSDFMRFHLTSLHKSIWDIVEFGAQVPSVGDKDYDEDEVAQIEHFNSQATTILLASLSREEYNKVQGLKSAKEVWDVLKTAHEGDELTKITKRETIEGELGRFRLRKGEEPQHMYNRLKTLVNQVRNLGSIKWDDHEMVKVILRSLIFLNPTQVQLIRGNPRYTKMTPEEVIGHFVSFECMIEGSRKINELDDPSTSEAQPVAFKATEDKKEEATPSRQPIDASKLDNEEMALVIKSFRQILKQRRGKDYKSRSKKVCYKCGKPGHFIAKCPISSDSDRGDDKKGRRKEKKRYYKKKGGDAHVCREWDSDESSSNSSSDEDAANIAVTKGLLFPNVGHKCLMAKDGKRKKVKSNSSTKYESSSDDNASDEEDNLRTLFANLNMEQKEKLNELISAIHEKDDLLDSQEDCLIKENKKHVKVKKAYALEIEKCEKLSSELSTCREMIDNLRHENASLNAKVDSHVCNVSIPNPRDNNNDLLARIEELNISLASLRNENENLLAKAKDFDVCKVTISDLRDKNNILHAKIVELNSCKPSTSIVEHISICTRCRDIDVNAIHDHMSLIKQQNDHIAKLDAKIAEHNLEDEKFKFARSMLYNGRRPSIKDGIGFQRGDNVKLNAPPKRLSNFVKGKAPMPQDNEGYILYPAGYPESKIRRIHSRKSHSGPNHAFMYKGETSSSRQPTRAKLPKKTPNTSNDHNISFKTFDASYVLTNKSGKIVAKYVGGKHKGSKTCVWVPKVLVSNAKGPKTIWVYASGGSSWILDSGCTNHMTGEKKMFSSYEKNQDPQRAITFGDGNQGLVKGVTVFRRSDDSIAFKGVLEGQLYLVDFDRAELDTCLIAKTNMGWLWHRRLAHVGMKNLHKLLKGEHILGLTNVHFEKDRICSACQAGKQVGAHHPHKNIMTTDRPLELLHMDLFGPIAYISIGGSKYCLVVVDDYSRFTWVFFLQEKSQTQETLKGFLRRAQNEFGLRIKKIRSDNGTEFKNSQIEGFLEEEGIKHEFSSPYTPQQNGVVERKNRTLLDMARTMLDEYKTSDRFWAEAVNTACYAMNRLYLHRILKKTSYELLIGKKPNISYFRVFGSKCFILVKRGRKSKFAPKTVEGFLLGYDSNTRAYRVFNKSTGLVEVSCDVVFDETNGSQVEQVDLDEIGEEEAPCIALRNMSIGDVCPKESEEPPNAQDQPSSSTQASPPTQDEDEAQVDEVEDQANEPPQDNGNNQGGDANEEDKAEEEQRPPHPRVHQAIQRDHPVDTILGDIHKGVTTRSRVAHFCEHYSFVSSIEPHRVEEALQDSDWVVAMQEELNNFTRNEVWHLVPRPNQNVVGTKWVFRNKQDEHGVVTRNKARLVAKGYSQVEGLDFGETYAPVARLESIRILLAYATYHGFKLYQMDVKSAFLNGPIKEEVYVEQPPGFEDSEYPNHVYKLSKALYGLKQAPRAWYECLRDFLIANGFKVGKADPTLFTKTLENDLFVCQIYVDDIIFGSTNESTCEEFSRIMTQKFEMSMMGELKYFLGFQVKQLQEGTFISQTKYTQDILTKFGMKDAKPIKTPMGTNGHLDLDTGGKSVDQKVYRSMIGSLLYLCASRPDIMLSVCMCARFQADPKEAHLTAVKRILRYLAYTPKFGLWYPRGSTFDLIGYSDADWAGCKINRKSTSGTCQFLGRSLVSWASKKQNSVALSTAEAEYIAAGHCCVQLLWMRQTLRDYGYKLTKVPLLCDNESAIKMADNPVEHSRTKHIAIRYHFLRDHQQKGDIEISYINTKDQLADIFTKPLDEQSFNKLRHELNILDSRNFFC

SEQ ID NO: 10328 - protein, 830 aa, Zea mays
  Clone ID: TF_ZM4442.C1.o1.fg.pep
MSGDHSKKEMETGDKPTTSHEKASSEESRNKGKGKEKKASSHKSHRSGDKKKKMRKVVYYETDTSSPSTSSSDAPSITSKRHERKKFSKIPLRYPRIPRHTPLLSVPLGKPPTFDGEDYARWSDLMKFHLTSLHKSIWNVVEFGAQVPSVGDEDYDEDEVAQIEHFNSQATTILLASLSREEYNKVQGLKSAKEVWDMLKTAHEGDELTKITKRETIEGELGRFRLRQGEEPQDMYNRLKTLVNQVRNLGSKKWDDHEMVKVILRSLIFLNPTQVQLIRGNPRYTLMTPEEVIGNFVSFEFMIKGLKKINELDVPSTSEAQPVAFKATEEKKESTSSRTPIDASKLDNEEMALVIKSFRQILKQRRGKDYKPRSKKVCYKCGKPGHFIAKCPISSDSDRGDGKKGRRKEKKKYYKKKGGDAHVCREWDSNESSTDSSSDEDAANISVTKGLLFPNVGHKCLMAKDGKKKKVKSKSSTRYESSSDDNASDEEDNLRTLFANLNMQQKEKLNKLISAIHEKDDLLDTQEDFLIKENKKHVKVKNAYALEVEKCKKLSSELSTCHETIDNLRNENGNLLAKVDSNVCDVSIPNLRNDNVDLLAKIEELNISLASLRNENEKLLAKAKDIDVCNASISDLRDKNDILRAKIVELNSCKPSTSTTEHVTICTRCRDINIDAIHDHMALIKQQNDHIAKLDAKIAEHDLENEKFKFARSMLYRGRRPGIKDDIGFQQGGNVKLNAPPKKLSNFVKGKAPMPQDNEGYILYPAGYHESKIRRIHSRKSHSGPNHAFMYKGEASSSRQSTHAKLPKKKTPSASNEHSISFKTFDASMF

SEQ ID NO: 10329 - protein, 1096 aa, Zea mays
  Clone ID: TF_ZM4496.C2.o4.fg.pep
MSGAHAKKEMVTGEKPATSHRKAPSRESGNKREESPPRVKSHRSGDKKKKMKKVVYYETDSLSPSTSGSDAPSVTSKRHERKKFSKIPLRYPRISKRTYLLSVLLGKPPVFNGENYCMWSEKMRHHLTSLHASIWDIVEFAAQEPSVGDEGYDSDEVAQIRHFNSQATTILLASLSREEYNKVQGLKSAKEIWDILKTAHEGDEVTKITKRETIEEELGQFMLHQGEEPQAMYNRLKTLVNQVRNLRSTKWDDHEMVKVILRSLVFLNPTQVQLIRGDPRYKLMSPEEVIGKFVQPVALKVMEEKKEESTSSRLPIDASKLDNEEMALIIKIFRQILNQRRGKDYKPRSKKVCYKCGKPGHFIAKCPISSDSDRGTNKKGRRKEKKKYYKKKGGDAHVCREWDSDEGSTDSSSDEDAANITVNKGLLFPNVGHKCLMAKDGKKKVYASGGSSWIIDSGCTNHMTGEKKMFSSYEKNHDPQRAITFVDEKSQTQETLKGFLRRAQNEFGLRIKKIRSDNGTEFKNSQIEGFLENEGIKHEFSSHYTPQQNGVVERKNRTLLDMARTMLDEYKTSNRFWAEAANTACYAINRLYLHRILKKTSYELLTGKKPNVSYFRVFGSKCFILVKRGRKSKFAPKAVEGFLLDYDSNTRAYRVFNKSTRLVEVSCDNVFDETNGSQVEQVDLDELDDEEAPCVALRNMSIGDVCPKESEDPPHAQDQPSSSNQASPPTQDEDQAQDDENKDQEESPLEEDNDQGRDANDQDKEDDEGPRPPHPRVHQAIQRDHPVNSILGDIHKGVTTRSRVAHFCEHYSFVSSIEPYRVEDALRDSDWVLAMQVELNNFTRNEVWHLVPRPNQNVLGTKWVFRNKQDEHGVVTRNKARLVAKGYSQVEGLDFGETYAPVVRLESIRILHAYATYHGFKLYQMDMKSAFLNGPIKEEVYVEQPPSFEDKFSRIMVQKFEMSMMGELKYFLGFQVKQLQEGTFISQTKYIQDILTKFGMKDAKPIKTPMGTNGHLDLDTGGKSVDQKVYRSMIGSLLYLCASRPDIMLSVCMCARFQVDPKEVHLRAMKRILRYLVHTPKFGLWYPKGSTFDLIG

SEQ ID NO: 10330 - protein, 1297 aa, Zea mays
  unsure (1)..(1297): unsure at all Xaa locations
  Clone ID: TF_ZM4496.C6.o2.fg.pep
MATSHGKAPSKESDAKGREESPSCVKSHRSGDKKKKIKKVVYYKTDSSSPSTSGSNAPSVTSKRHERKKFRDEGYDSDEVAQIRHFDSQETTILLASLCREEYNKVQGLKSAKEIWDVLKTAHEGDEVTKITKRETIEGEFGRFILNQGEEPQAMYNRLKTLVNQVRNLGSTKWDDHEMVKVILRSLVFRNPTQVQLICGDPRYKLMSPEELDNEQMALIIKSFRQILKQRKGKDYKPCSKKVCYKCGKPGHFIAKCPISSDSDRGDDKRGKKKEKKRYYKKKAAMPTVSSSPNVGHKCIMAKDDKKKKVQARTTPKYTTSNDEGSSSDNEDNLLSLFANLNMQQKEKLNELISAIHEKDELLDSQEEFLIKENKKHVKELSICHDTISNLRDENNSLIAKVEKSKVCHDSIDNLRNENASLFAKIDKLNESIASLKTENDKLISKAKDLNVCNIYISNLRNENAILHTKIDELNACKPSTSTVGHVTICTRCGDINVDAIHDHLALIKQQNDHIAQLTAKINEHEIENEKFKFARSMLYNGRRPGIKDGIGFQQGSNGKAPMAQDNEGYILYPAGYPEHKIRRIHAKKSHSISHHAFMYKNEASSSRHSTHVKMPKKKTPTASNEPNASSKTFDAPYVLTNKSGKVVAKYVGGNTRAPRLVFGYPRNNRTLLDMARTMLDEYKTSDQFWVEAINTACYSINRLYLHRILKKTSYELLTSKKPNVSYFRVFGSKCFILFKRGRKSKFAPKVVEGFLLGYDSNTRAYRVFNKSTGLVEVSCYIMFDETNGSQVEQVDLDELDDEEAPCVALRNMSIGDVCPKESKXPTQAQDQPSSSNQASPQTQDKDQAQDNEDEDQXDEPPQEEDNDQGGDDNDQDKEDDQNXGTKWVFRNKQDEHGVVTRNKARLVAKGYSQVEGLDFGETYAPVARLESICILLAYATHHGFKLYQMDVKSAFLNGPIKEEVYVEQPPGFEDSEYPNHVYKLSKALYGLKQAPRAWYECLRDFLITNGFKLKYFLGFQVKQLQEGTFISQTKYIEDILTKFRMKDAKPIKTPMGTNGHLDLDMGGKSVDQKVYRSMIGSLLYLCAYRPDIMLSVCMCARFQADPKEVHLRSMKRIMRYLVYTPKFGLWYPKGSTFDLKGYSDVDWVGCKIDRKSTSETCQFLGRSLVSWASKKQNSVALSTAEAEYIAAGHCCAQLLWVRQTLRDYGYKLSKVPLLCDNESAICIADNPVEHSRIKHIDIRYHFLRDHQQRGDIEIAYVSTKEQLADIFTKPLDEKTFTKLRNELNILDSRNFD

SEQ ID NO: 10331 - protein, 957 aa, Zea mays
  Clone ID: TF_ZM4547.C1.o1.fg.pep
MSGDHAKKEMETGEKPTTSHVSTSSEESRTKRKEKKKISSNKGKEKKSSSHHKEKKEKSSSHKPRRSGDKQKRMRKVVYYETDTSSTSTSDSDAPSVTSKRQERKKFSKIPLHYPRISKHAPLLSVPLGKPPTFDGEDYARWSDLMRFHLTSLHKSIWDVVEFGAQVPSVGDKDYDEDEVAQIEHFNSQATTILLASLSREEYNKVQGLKSAKEVWDVLKTAHEGDELTKITKRETIEGELGRFRLRKGEEPQHMYNRLKTLVNQVRNLGSVKWDDHEMVKVILRSLIFLNPTQVQLIRGNPRYTKMTPEEVIGHFVSFECMIEGSRKINELDDPSTSEAQPVAFKATEEKKEESTPSRQPIDASKLDNEEMALVIKSFRQILKQRRGKDYKSCSKKVCYKCGKPGHFIAKCPISSDSDRGDDKKGRRKEKKKYYKKKGGDAHVCREWDSDESSSDSSDDEDAANIAVTKGLLFPNVGHKCLMAKDGKRKKVKSNSSTKYESSSDDNNSDEEDNLRVLFANLNMEQKEKLNELISAIHEKDDLLDSQEDCLIKENKKHVKVKKAYALEVEKCEKLSSELSTCREMIDNLRNENASLNTKVDSHVCIVSTSNPRDNNDDLLARIEKLNTSLASLRVENDNLIPKAKDFDVCNVTISDLRDKNDILRAKIVELNSCKPSTSTIEHVSICDRCRDIDVNAIHDHMSLIKQQNDHIAKLDAKIAEHNLENEKFKFARSMLYNGRRPGIKDGIGFQRGDNDKLNAPPKNLSNFVKDKAPMPQDNEGYILYPAGYPESKIRKIHSRKSHSGPNHAFMYKGETSSSRQPTRAKLPRKKTPNASNDHTISFKTFDASYVLTNKSGKIVAKFVGGKHKGSKACVWVPKDIVSNAKGPKTVWVYASGGSSWILDSGCTNHMTGEKKMFSSYEKNQDPQRAITFGDGNQGVTVFRRSDDSIAFKGVLE

SEQ ID NO: 10332 - protein, 946 aa, Zea mays
  Clone ID: TF_ZM4553.C2.o1.fg.pep
MATCIDLTYGKAVSTALSVEAKYASSGKNKGFGGERPNQGQAKKQRFVIRPSSQNRTFSRPPSFPFKQPIIIRPNNTPTTPNQPGAPGTRFPALPSSSTGCFNCGKSGHFIKDCPYPRQNQSNAPQGSRRSAQPKGNAVGKNTKKTGRVYYTQVATTPEGEPVMMGTFPVASHPAIILFDSGASHTFISKKFVEQHHLACHESKEGFKIHSPGGHIFTREVAYEVPVTMAGQNFPANMIVLKGQDIDVILGMNWLTQHKAILNTKLRTVRLSYNQEEILLSLPATNPAKTSGRVYEAIVPEIKNIPVVCEFPDVFPEDLPGLPPERDVEFVIELKPGTAPISRRSYRMPPNELAELKIQLQDLLNKGFIRPSSSPWGCPAIFVKKKDQTLRMCVDYRPLNEVTIKNKYPLPRIDILFDQLTGARVFSKIDLRSGYHQIRIRPEDIPKTAFTTRYGLFEYLVMSFGLTNAPAHFTYLMNSVFMPELDKFVVVCIDDILIYSKNEEDHAQHLRIVLTRLREHQLYAKFSKCAFWLEEIQFLGHVLSAKGIAVDPSKVKDILEWKPPTTVHQVRSFLGLAGYYRRFIPDFSKLVKPITSLLKNDIKFNWSSKCNEAFEQLKTLLTTAPVLAQPDITKPFDVYCDASGSGLGCVLMQEGRVIAYASRQLRRHEEHYPTHDLELAAVVHALKIWRHYLLGNICHIYTDHKSLKYIFTQSELNMRQRRWLELIKDYELEIHYHPGKANVVADALSRKTSCHCLMVKTSENTLCQEMEKLNLGIIQQGTLNQLKLESIILQRIIDAQKDNLGDYVYLKVSPMKGVSRFGVKGKIAPRYIGPFLVLEQCGPMAYRLQLPETLSAVHNVFHVSQLKKCLRVLDRTVEVTDVVLKPDLTYSEHPIRVLDQKDRVTRRKTLKFYKIQWNQHSEDEATWETQDFLDKNFPGFLASCKL

SEQ ID NO: 10333 - protein, 1537 aa, Zea mays
  Clone ID: TF_ZM4555.C2.o1.fg.pep
KQRRGKDYKSRSKKVCYKCGKPGHFIAKCPISSDSDRGDDKKGRRKEKKRYYKKKGGDAHVCREWDSDESSSDSSDDEDAANIAVTKGLLFPNVGHKCLMAKDGKKKVKSKSSTKYESSSDDNASDEEDNLRSLFANLNIAQKEKLNELVSAIHEKDDLLDSQEDYLIKENKKHVKVKNAYALEVEKCNKLSSELSMCHDTIANLRNENAKLIAKVDSHVCIDPRNDNVDLLARIDELNVSIASLRNENEKLIAKAKDIDVCNATISDLRTKNDMLHAKVVELKSCKPSTSNVEHISICTRCRDINVDAIHDHLALIKKQNDHIAQLNAKIREHDSENEKFKLARSMLYNGRRPGIKDGIGFQRRDNVKLNAPPKNLSNFVKGKAPMPQDNEGYILYPAGYPESKIRKIHSRKSHSGPNHAYMYKDETSSSRQPTHAKLPRKKISNASNEHSISFKTFDASYVLTNKSGKVVAKFVGGKHKGSKTCVWVPKVLVSNAKGPKTVWVYASGGSSWILDSGCTNHMTGEKRMFSSYEKNQDPQRAITFGDGNQGVTVFRRSDDSIAFKGVLEGQLYLVDFDRAELDTCLIAKTNMGWLWHRRLAHVGMKNLHKLLKGEHILGLTNVHFEKDRICSACQAGKQVGTHHPHKNIMTTDRPLELLHMDLFGPIAYISIGGSKYCLVIVDDYSRFTWVFFLQEKSQTQETLKGFLRRAQNEFGLRIKKIRSDNGTEFKNSQIEGFLEEEGIKHEFSSPYTPQQNGVVERKNRTLLDMARTMLDEYKTPDRFWAEAVNTACYAINRLYLHRILKKTSYELLTGKKPNISYFRVFGSKCFILIKRGRKSKFAPKTVEGFLLGYDSNTRAYRVFNKSTGLVEVSCDVVFDETNGSQVEQVDLDEVGEEQAPCIALRNMSIGDVCPRESEEPPNAQDQPSSSMQASPPTQNEDEAQVDEGQNQEDEPPQDNGNDQGGDANDQEKEDEEEPRPPHPRVHQAIQRDHPVDTILGDIHKGVTTRSRVAHFCEHYSFVSSIEPHRVEEALQDSDWVVAMQEQLNNFTRNEVWHLVPRPNQNVVGTKWVFRNKQDEHGVVTRNKARLVAKGYSQVEGLDFGETYAPVARLESIRILLAYATYHGFKLYQMDVKSAFLNGPIKEEVYVEQPPGFEDSEYPNHVYRLSKALYGLKQAPRAWYECLRDFLIANGFKVGKADPTLFTKTLENDLFVCQIYVDDIIFGSTNETTCEEFSRIMTQKFEMSMMGELKYFLGFQVKQLQEGTFISQTKYTQDILAKFGMKDAKPIKTPMGTNGHLDLDTGGKSVDQKVYRSMIGSLLYLCASRPDIMLSVCMCARFQSDPKESHLTAVKRILRYLAYTPKFGLWYPRGSTFDLIGYSDADWAGCKINRKSTSGTCQFLGRSLVSWASKKQNSVALSTAEAEYIAAGHCCAQLLWMRQTLRDYGYKLTKVPLLCDNESAIKMADNPVEHSRTKHIAIRYHFLRDHQQKGDIEISYINTKDQLADIFTKPLDEQSFTRLRHELNILDSRNFFC

SEQ ID NO: 10334 - protein, 1608 aa, Zea mays
  unsure (1)..(1608): unsure at all Xaa locations
  Clone ID: TF_ZM4576.C2.o1.fg.pep
TSGVSHWDTLKTAHKGDEVTKITKRETIEGELGRFQLRQGEEPQDMYNRLKTLVNQVRNLGSKKWDDHEMVKEVIGNFVSFKLMIKGSKKINELDGPSTSEAQPVTFKAMEEKKEESTSSRQPIDASKLDNEEMALIIKSFHQILKQRRGKDYKPRSKKVCYKCGKPGHFIAKCPISSDSDRGDDKKGRRKEKNRYYKKKGGDAHVCREWDSDKSSSDSSFDEDAANIAVTKGLLFPNVGHKCLMAKVSKKKKVKSRSSTKYETSSDEDDASNEEDNLRILFANLNMQQKEKLNELISAIHEKDDLLDTQEDFLIKENKKHVKVKNAYALEVEKCEKLSSELSTCHETIDKLRNENANLLAKVDSNVCDVSIPNLRNDNDDLLDKIEELNISLASLRIENEKLLTKAKELDVCNITISDLRDKNDILRAKIVELNSCKPSTSTTEHVTICTRCRDVDVNAIHDHLSMIKQQNDHIAKLDAKIAEHELENEKFKFARSMLYNGRRPGIKDGVGFQQGGNVKLNAPPKKLSNFVKGKAPMPQDNEGYILYPAGYPESKIRRIHSRKSHSGSNHAFMYKGXYASGGSSWIIDSGCTNHMTGEKKMFSSYEKNXRPQRAITFGDGNQGVTVFRRSDDSVAFKGVLEGQLYLVDFDRAELDTCLIAKTNMGWLWHRRLAHVGMKNLHKLLKGEHILGLTNVHFEKDRICSACQAGKQVGAHHPHKNIMTTDRPLELLHMDLFGPIAYISIGGSKYCLVIVDDYSRFTWVFFLQEKSHTQETLKGFLRQAQNEFGLRIKKIRSDNGTEFKNSQIEGFLEEEGIKHEFSSPYTPQQNGVVERKNRTLLDMARTMLDEYKTSDRFWAEAVNTACYAINRLYLHRILKKTSYELLTGKKPKISYFRVFGSKCFILIKRGRKSKFAPKTVEGFLLGYDSNTRAYRVFNKSSGQVEVSCDVVFDETHGSQVEQVDLDEIGDEEALCITLRNMSIGDVCPKESEEPPNAQDQPSSSTQASPPTQNEDEAQVDEGEDQRDEPPQDDDNDQGGDANDQDKEDEELRPPHPRVHQAIQRDHPVDTILGDIHKGVTTRSCVAHFCEHYSFVSSIEPHRVEEALQDSDWVVAMQEELNNFTRNEVWHLVPRPNQNVVGTKLVFRNKQDEHGVVTRNKARLVAKGYSQVEGLDFGETYAPVARLESIRILLAYATYHGFKLYQMDVKSAFLNGPIKEEVYVEQPPGFEDSEYPNYVYKLSKALYGLKQAPRAWYECLRDFLITNGFKVGKADPTLFTKTLDNDLFVCQIYVDDIIFGSTNESTCEEFSRIMTQKFEMSMMAELKYFLEFQVKQLQEGTFISQTKYTQDILSKFGMKDAKPIKTPMGTNGHLDLDREGKSVDQKVYRSMIGSLLYLCASRPDIMLSVCMCARFQADPKEAHLTAVKRILRYLVHTPKFGLWYPRGSTFDLIGYSDADWAGCKINRKITSGTCQFLGRSLVSWVSKKQNSVSLSTAEAEYITAGHCCAQLLWMRQTLRDYGYKLTKVRLLCDNESAIRMADNPVEHSRTKHIAILYHFLRDHQQKGDIEIAYINTKEQLADIFTKPLDEQTFNKLRHELNILDSRNFF

SEQ ID NO: 10335 - protein, 1018 aa, Zea mays
  unsure (1)..(1018): unsure at all Xaa locations
  Clone ID: TF_ZM4589.C1.o2.fg.pep
MSGDHAKKEMETGEKPTTSNEKALSGESHNKEKRKEKKKEKKTSSHKSHRSGDKIKKMRKVVYYETDTSSPSTSGSDAPSITSKRHERKKFSKIPLHYPRTSRHTPLLSIPLGKPPTFDGEDYARWSDLMKFHLTSLHKSIWNVVEFGAQVPSVGDEDYDEDEVAQIEHFNSQATSILLASLSREEYNKVQGLKSAKEVWDMLKTAHEGDELTKITKRETIEGELGRFRLRQGEEPQDMYNRLKTLVNQVRNLGSKKWDDHEVVKVILRSLIFLNPTQVQLIRGNPRYTLMTLEEVIGNFMSFEFMIKGSRKINELDSPSTSEAQSVAFKATEEKKEESTPSRQPIDASKLDNEEMALVIKSFRQILKQRKGKDYKPRSKKVCYKCGKPGHFIAKCPISSDSDRGDDKKGRRKEKKRYYKKKGGDAHVCREWDSDESSSDSSDDEDTANIAVTKGLLFPNVGHKCLMAKDGKKKVKSKSSTRYESSSDENASDEEDNLRTLFANLNMQQKEKLNELISAIHEKDDLLDSQEDFLIKENKKHVKVKNAYALEVEKCEKLSSELSTCHETIDNLRNVNSNLLAKVDSNICNVSIPNLRNNNDDLLAKIEELNISLASLRDENEKLLAKAKDFDVCNTTISDLRSRNDILHAKVVELKSCKPSTSTIEHTSICTRCRDVNIDAIHDHMALIKQQNDHIAQLNAKINEHDLENEKFKFARSMLYSGRHPGIKDGIGFQKGDNVKLNAPPKKLSNFVKGKAPMPQDNEGYILYPAGYPESKIRRIHSRKSHSGPNHAFMYKGETSSSKQPTRAKLPKRKTPSASNEHSFSFKTFDAPYVLTNKSSKVVAKYVGGKHKGSKTCVWVPKVLVSNAKGPKTIWVYASGGSSWIIDSGCTNHMTGEKKMFSSYEKNQDPXRAITFGDGNQXNMGWLWHRRLAHVGMKNLHKLLKGEHILGLTNVHFEKDRICSACQAGKQVGVHHPHKNIMTTDRPLELLHMDLFGPIAYISEREMCPWVISKYFGD

SEQ ID NO: 10336 - protein, 1414 aa, Zea mays
  Clone ID: TF_ZM4623.C5.o1.fg.pep
MSGEHAKKEMETGDKPTTSHGKATSQESRNKGKGKEKKASSHKSHRSGDKKKKMRKVVYYETDTSSPSTSGSDAPSITSKRHERKKFRDEDYDEDEVAQIEHFNSQATTILLASLSREEYNKVQGLKSAKEVWDVLKTAHEGDELTKITKRETIEGELGRFRLRKGEEPQDMYNWLKTLVNQVRNLGSKKWDDHEMVKEVIENFVSFEYMIKGLKKINELDDPSTSEAQSIAFKATEEKKEESTSSRQPIDASKLDNEEMALVIKSFRQILKQRRGKDYKPRSKKVCYKCGKPGHFIAKCPISSDSDRGDDKKGRRKEKKKYYKKKGGDAHVCREWDSDKSSTDSSSDEDAANIAITKGLLFPNVGHKCLMVKDGKKKKVKSKSSTRYESSSDDNASDEEDNLRTLFANLNMQQKEKLNELISAIHEKDDLLDTQEDFLIKENKKHVKVKNAYALEVEKCEKLSSELSTCHETIDNLRSENADLLAKVDSNVCNVSIPNLGNDNDDLLAKIEELNISLASLRIENEKLIAKAKELDVCNVTNSDLRDKNDILHAKIVELNSCKPSTSIIEHTTICTRCRDVNIDAIHDHMALIKQQNDHIAKLDAKIAEHDLENEKFKFARSMLYRGRRPGIKDGIGFQQGGNVKLNAPPKKLSNFVKGKAPMPQDNEGYILYPAGYPEDKIRRIHSRKSHSGPNHAFIYKGETSSSRQPTRAKLPEKKTPSASNDHDISFKTFDASYVLTNKSGKVYASGGSSWVIESGCTNHMTGEKKMFSSYEKNQDPQRAITFGDGNQGLTNVHFEKDRICSACQAGKQVGTHHPHKNIMTTDRPLELLHMDLFGPIAYISIGGKKSHTQETLKGFLRRAQNEFGLRIKKIRSDNGTEFKNSQIEGFLEEEGIKHEFSSPYTPQQNGVVERKNRTLLDMARTMLDEYKTLDRFWAEAVNTACYAINRVFGSKCFILVKRGRKSKFAPKTIEGFLLVYDSNTRAYRVFNKSSGQVEVSCDVVFDETNGSHVEQVDLDEIGVEEAPCIALRNMSIGDVCPKESEEPPNAQDQPSSSTQASPPTQNEDEAQVDEGQDQEDEPPQDDGNDQGGDANDQDKEDEEPRPPHPRVHQAIQRDHPVDTILGDIHKGVTTRSRVAHFCEHYSFVSSIEPHRVEEALQDSDWVVAMQEELNNFTRNEVWHLVPRLNQNVVGTKWVCRNKQDEHGVVTRNKARLVAKGYYQVEGLDFGETYAPVARLESIRILLAYATYHGFKLYQMDVKSAFLNGPIKEEVYVEQPLGFEDKFSRIMTQKFEMSMMGELKYFLGFQVKQLQEGTFISQTKYTQNILNKFGMKDAKPIKTPMGTNGHLDLDTGGKSVDQKKEHIGDLPVLGKILGVLGFKEAIFRSSFNHRSRVYCRRPLLRAIALDEANP

SEQ ID NO: 10337 - protein, 1769 aa, Zea mays
  Clone ID: TF_ZM4628.C5.o1.fg.pep
MSGDHAKKEMETGEKPTTSRGSTSSEESRTKRKDKKKDSSKRKEKKSSSSHHQEKKEKSSSHKPHRKGDKHKRMRKVVYYETDTSSTSTSDSDAPSVTSKRQERKKYSKIPLRYPRISKHTPLLSVPLGKPPTFDGEDYARWSDLMRFHLTSLHKSIWNVVEFGAQVPSVGDEDYDEDEVAQIEHFNSQATTILLASLSKEEYNKVQGLKSAKEIWDLLKTAHEGDELTKITKRETIEGELGRFRLRKGEEPQHMYNRLKTLVNQARNLGSVKWDDHEVVKVILRSLIFLNPTQVQLIRGNPRYTKMTPEEVIGNFVSFECMIEGSRKINELDDATTSEAQPVAFKATEEKKEESTPSRQPIDASKLDNEEMALVIKSFRQILKQRRGKDHKSRSKKVCYKCGKPGHFIAKCPISSDSDRGDDKKGRRKEKKRYYKKKGGDAHVCREWDSDESSSDFSDDEDAANIAVTKGLLFPNVGHKCLMAKDGKKKVKSKSSTKYESSSDDNASDEEDNLCSLFANLNIAQKEKLNELVSAIHEKDDLLDSQEDCLIKENKKHVKVKKAYALEIEKCEKLSSELSTCREMIDNLRNENAILNAKVDSHVCNVSIPNLRDDNVDLLAKIDELNVSLTSLRIENEKLLAKAKDFDVCNTTISDLRTKNDILHAKVVELKSCKPSTSIVEHVSICTRCRDVDVNAIHDHMALIKQQNDHIAKLDAKIAEHNLENEKFKFARSMLYNGRRSGIKDGIGYQRGDNVKLNAPPKNLSNFVKGKAPMPQDNEGYILYPAGYPESKIRRIHSRKSHSGPNHAFMYKGETSSSRQPTRAKLPKKTPIASNKHNISFKTFDASYVLTNKSGKIVAKYVGGKHKGSKTCVWVPKVLVSNAKGPKTIWVYASGGSSWILDSGCTNHMTGEKRMFSSYEKNQDPQRAITFGDGNQGVTVFRRSDDSIAFKGVLEGQLYLVDFDRAELDTCLIAKTNLGWLWHRRLAHVGMKNLHKLLKGEHILGLTNVHFEKDRICSACQAGKQVGAHHPHKNIMTTDRPLELLHMDLFGPIAYISIGGSKYCLEKSQTQETLKGFLRRAQHEFGLRIKKIRSDNGTEFKNSQIEGFLEEEGIKHEFSSPYTPQQNGVVERKHRTLLDMARTMLDEYKTPDRFWAEAVNTACYAINRLYLHRILKKTSYELLTGKKPNISYFKVFGSKCFILVKRGRKSKFAPKTVEGFLLGYDSNTRAYRVFNKSTGLVEVSCDVVFDETNGSQVEQVDLDEIGNEEAPCIALRNMSIGDVCPKESEEPPNAQDQPSSSMQASPPTQNEDEAQVDEGQNQEDEPPQDNGNDQGGDENNQEKEDEEEPRPPHPRVHQAIQRDHPVDTILGDIHKGVTTRSRVAHFCEHYSFVSSIEPHRVEEALQDSDWVVAMQEELNNFTRNEVWHLVPRPNQNVVGTKWVFRNKQDEHGVVTRNKARLVAKGYSQVEGLDFGETYAPVARLESIRILLAYATYHGFKLYQMDVKSAFLNGPIKEEVYVEQPPGFEDSEYPNHVYRLSKALYGLKQAPRAWYECLRDFLITNGFKVGKADPTLFTKTLDNDLFVCQIYVDDIIFGSTNESTCEEFSRIMTKKFEMSMMGELKYFLGFQVKQLQEGTFISQTKYTQDILSKFGMNDAKPIKTPMGTNGHLDLDTGGKSVDQKSISNQVIGILKGNWSLRRRQRLPLRNSSFAITPTISLFFGGEMSIKEKDFVFGIILTHLFMTKEKDSTKRALMIPFLAIHAKKGEK

SEQ ID NO: 10338 - protein, 1703 aa, Zea mays
  Clone ID: TF_ZM4635.C5.o5.fg.pep
MSGDHAKKEMETGDKPTTSHGKASSEESRNKGKGKEKKSSSHKSHRSGNNKKKMRKMVYYETDTSSPSTSGSNAPSITSKRHERKKFSKTPLHYPRIPKHTPLLSVSLGKPPTFDGEDYARWSDLMRFHLTSLHKSIWDIVEFGVQVPSVGDEDYDEDEVAQIQHFNSQASTILLASLSREEYNKVQGLKGAKKIWDTLKTSHEGDEVTKITKRETIEGELDRFRLRQGEEPQDMYNRLKTLVNQVRNLRSKKWDDHEIVKVILRSLVFLNPTQVQLIRGNPRYTLRTPEEVIGNFVSFELMIKGSKKINELDGPSTSEAQPVAFKATEEKKEESTSSRTPIDASKLDNEEMALIIKSFRQILKQRRGKNYKPCSKKVCYKCGKPGHFIAKCPISNDSDRGDDKKGRRKEKKKYYKKKGDDAHVCREWDSDESSSDSSSDEDAANIAVTKGLLFPNVSHKCLMAKDGKKKKVKSRSSTKYETSSDEDNASNEEDNLRILFANLNMQQKEKLNELISVIHEKDDLLDTQEDFLIKENKKHVKVKNAYALEVEKYEKLSSELSTCHETIDNLRNNNAKLIAKVDSNACNVSIPNPRNDNVDLLAKIEELNISLASLRDENKKLLAKAKELDVCNASISDLRSKNDILHAKVVELKSCKPSTSIVEHTSICTRCRDINVDAIHDHLALIKKQNDHIAQLNAKISEHDLENEKFKFARSMLYSGRRPSIKDGIGFQKGDNVKLNAPPKRLSNFVKGKAPMPQDNEGYILYPAGYPESKIRRIHSRKSHSGPNHAFMYKGETSSSRQPTRAKLPKKKTPSASNDHSISFKTFDASYVLTNKSGKVYASGGSSWIIDSGCTNHMTGEKKMFSSYEKNQDPQRAITFGDGNQGLVKGATVFRRSDDSIAFKGVLEGQLYLVDFDRAELDTCLITKTNMGWLWHRRLAHVGMKNLHKLLKGEHILGLTNVHFEKDRICSACQAGKQVGVHHPHKNIMTTDRPLEILHMDLFGPIAYISIGGSKYCLVIVDDYSRFTWVFFLQEKSHTQETLKGFLRRAQNEFGLRIKKIRSDNGTEFKNSQIEGFLEEEGIKHEFSSPYTPQQNGVVERKNRTLLDMARTMLDEYKTSDRFWAEAVNTACYAINRVFGSKCFILVKRGRKSKFAPKTVEGFLLGYDSNTRAYRVFNKSSGQVEVSCDVVFDETNGSQVEQVDLDEIGDEEAPCIALRNMSIGDVCPKESEEPPNAQDQPSFSTQASPPTQNEDGAQVDEERDQNDEPPQDDDNDQGGDANDQDKEDEEPRPPHPRVHQAIQRDHPVDTILGDIHKGVTTRSCVAHFCEHYSFVSSIEPPRVEEALQDSNWVVAMQEELNNFTSNEVWHLVPRPNQNVVGTKWVFHNKQDEHGVVTRNKARLVAKGYSQVEGLDFGETYAPVARLESIHILLAYATYHGFKPYQMDVKSAFLSGPIKEKVYVEQPPGFEDSEYPNHVYKLSKALYGLKQAPRAWYECLRDFLITNGFKVGKADPTLFTKTLDNDLFVCQIYVDDIIFGSTNESTCEEFSRIMTQKFEMSMMGELKYFLGFQVKQLQEGTFISQTKYTQDILSKFGMKDAKPIKTPMGTNGHLDLDTEGAKGSQKANKKTKKRVQQKGARDNRSAPWSGAPDCPVCHRTVSGAPPDNDRCTRELQVEFNTFENSQRHSAIIHRTVRCPRGERL

SEQ ID NO: 10339 - protein, 1649 aa, Zea mays
  Clone ID: TF_ZM4646.C5.o1.fg.pep
MPPRTRLTARKSTGPIGVPRHQLAPRHESSSSGSNDPIGDLEARDQLADRDLALDWAVQSRLLMCAKEARAQARVKELSSTVDDLQVYCNTLHEEVHVLYSQLHPSEPAPPAEAEAGPSHVAGRALGGELDLFEPPPSLSNVKWKVFSGTLCLPQMFLPQMPTRTRAQDAAGTSGGRDVTPNPPPVPPTLAEAIAALVNATADNTRFLREMAGQQQLQQQAGRGFQQGPRETTYLDFSETRPPLFIKAEDPLEADEWIRVIEQKFGLLRCSEVQKPLFAAQQLRGPASTWWGNFVAIQPDNHQVTWNEFKAAFREHYIPEGVLHMKQEEFMKLQQGGDTVTQYLNKFNHLSQYAIDQVNTDLKKKNCFMRGLNDRMQRKMAACIDLTYGKAVSTALSVEAKYANSGKTKGFGGERPNQGQAKKPRFVIRPSSQNRPFSRPPSFPFKQPIIIRPNNAPTTPKQPGAPGTRFPVLPSSSTGCFNCGKSGHFIKDCPYPRQNQANNQQGSGNSAPGKGSTPGKNTKKTGRVYYTQVATTPEGEPVMMGTFPVASHPAIILFDSGASHTFISKTFVEQHHIAYHESKEGFKIHSPGGHIFTKEVAYGVPVTMAGRNFPANMIVLKGQDIDVILGMNWLTQYKAILNTEFRTVRLSYNQEEILLTLPATNPAKASGRVYEAIVPEIKNIPVVCEFPDVFPEDLPGLPPERDVEFVIELKPGTAPISRRSYRMPPNELAELKTQLQDLLNKGFIRPSSSPWGCPAIFVKKKDQTLRMCVDYRPLNEVTIKNKYPLPRIDILFDQLTGARVFSKIDLRSGYHQIRIRPEDIPKTAFTTRYGLFEYLVMSFGLTNAPAHFTYLMNSVFMPELDKFVVVFIDDILIYSKNEEDHAQHLRIVLTRLREHQLYAKFSKCAFWLEEIQFLGHVLSAKGIAVDPSKVKDILEWKPPTTVHQVRSFLGLAGYYRRFIPDFSKLVKPITSLLKNDIKFNWSSKCNEAFEQLKTLLTTAPVLAQPDITKPFDVYCDASGSGLGYVLMQEGRVIAYASRQLRRHEEHYPTHDLELAAVVHALKIWRHYLLGNICHIYTDHKSLKYIFTQSELNMRQRRWLELIKDYELEIHYHPGKANVVADALSRKVACHCLMAKTFENTLCQEMEKLNLGIIQQGTLNQLKLESIILQRIIDAQKDNLGMKHIREKVKAGTAKCFKEDDQGVIWFKNRIVVPKNEELHQQILDEAHLSRYSIHPGSTKMYQDLKQHYWWTKMKIEIARYVAKCDTCRRVKAIHMKTAGPLQSLPIPTWKWEDISMDFIVGLPRTAKGYDSIWVIVDRLTKIAHFLPVKVTYTIATYAALYIARILSLHGVPKTIVSDRGPQFVSKFWEELHKFLGTKLLHSSAYHPQTSGQTERVNQILEDMLRACVLDFSPKWDECLPLAEFSYNNSYQESIKMAPFEALYGRRCRTPLNWSEPGERYFFRPDMVKEVEEKVHRIIHNMKKAQARQKSYADRRRQPLCFLVDDYVYLKVSPMKGISRFGIKGKLAPRYIGPFLVLEQCGPVAYRLQLPETLSAVHNVFHVSQLKKCLRVPDRTVEVADVVLEPDLTYSEHPIRVLDQKDRVTRRKTLKFYKIQWNQHSEDEATWETQDFLDKNFPGFLASCKL

SEQ ID NO: 10340 - protein, 905 aa, Zea mays
  Clone ID: TF_ZM4678.C5.o1.fg.pep
MSGDHAKKEMGTGEKPITSHGEAPSGESYNKGKGKEKESPSHKSRRSGDKKKKMRKVVYYETDSSSPSTTGSDTPSVTSKRHERKKFSKIPLRYPRIPKHTPLLSVPLGKPPTFDGEDYARWSDMMRYHLTSLHKSIWDVVEFGVHVPSVGDEDYDEDEVAQIVHFNSQATTILLTSLSREEYNKVQGLKSAKEIWDVLKTAHEGDEVTKITKRETIEGELGRFRLRQGEEPQEMYNRLKTLVNQVRNLGNKKWDDHEMVKVILRSLVFLNPTQVQLIRGNPRYTLMSPEEVIGNFVSFELMIKGSKKINELDGPFTAEAQPVAFKATEEKKEESTSSRQPIDASKLDNEKMTLIIKSFRQILKQRRGKDYKSRSKKVCYKCGKPGHFIAKCPISSDSDRGDDKKGRRKEKKRYYKKKGGDAHVCQEWDSDESSTDSSSDEDAANIAVTKGLLFPNVGHKCLMAKDDKRKKVKSRSSTKYETSSDEDNASDEEDNLCTLFANLNMQQKEKLNELISAIHEKDDLLDTQEDFLIKENKKHVKVKNTYALEVEKCEKLSNELSTCHDTIANLRNENDKLIAKVDSNICDDSISNLRDDKANLLAKIEKLNDSLASLRNENEKLIAKAKDFDVCNVTISNLRSENDILHAKVVELKFCKPSTSTVEHTSICTRCRDINIDAIHDHMALIKQQNDHIAKLDAKIAEHDLENEKFKFARSMLYSGRRPGIKDGIDFQKGDNVKLNAPPKRLSNFVKGKAPMPQDNEGYILYPAGYPESKIRRIHSRKSHSGPNHAFVYKGETSSSRQSTRAKLPKRKTPTASNGHNISFKTFDASYVLTNKSGKVYASGGSSWIIDSGCTNHMTGEKKMFSSYKKNQDPQRAITFGDGNQGLVKGLGKIAISPHYTTVDL

SEQ ID NO: 10341 - protein, 1877 aa, Zea mays
  Clone ID: TF_ZM4683.C2.o1.fg.pep
MSGDHTKKEMETGEKPTTSYGSTSSEESRTKRREKKKSSSNKGKEKKSSSHHKEKKEKSSSHKPHRKGDKHKRMRKVVYYETDTSSTSTSDSDAPSVTSKRQERKKYSKIPLRYPRISKHTPLLSVPLGKPPTFDGEDYARWSDLMQFHLISLHKGIWDVVEFGVQVPSIGDENYDEDEVAQIEHFNSQATTILLASLSKEEYNKVQGLKNAKEIWDVLKTAHEGDELTKITKRETIEGELGRFRLHKGEEPQHMYNRLKTLVNQVRNLGSKKWDDHEVVNVILRSLIFLNPTQVQLIRGNPRYTKMTPEEVIGHFVSFECMIEGSRKINELGDPSEAQPVAFKATEERKEESTPSRQPIDASKLDNEEMALVIKSFRQILKQRRGKDYKSRSKKVCYKCGKPGHFIAKCPISSDSDRGDDKKGRRKEKKRYYKKKGGDAHVCREWDSDESSSDSSDDEDAANIAVTKRLLFPNVGHKCLMAKDGKKKKVKSNSSTKYESSSDDNASDEEDNLRILFANLNMEQKEKLNELISAIHEKDDLLDSQEDCLIKENKKHVKVKKAYALEVEKCEKLSSELSTCREMIDNLRNENAILNAKVDSHVCNVSIPNLRDDNIDLLAKIDELNASLASLRLENENLIAKAKNFDVCNATISDLRTKNEIKIDAKIAEHNLENEKFKFARSMLYNGRRPGIKDGIGFQRGDNVKLNTPPKNLSNFVKGKAPMPQDNEGYILYPAGYPESKIRKTHSRKSHSGPNHAFMYKGETSSSRQPTRAKLPRKKISNASNEHSISFKTFDASYVLTNKSGKVVAKFVGGKHKGSKTCVWVPKVLVSNAKGPKTVWVYASGGSSWILDSGCTNHMTGEKRMFSSYEKNQDPQRAITFGDGNQGLVKGVTVFRRSDDSIAFKGVLEGQLYLVDFDRAELDTCLIAKTNMGWLWHRRLAHVGMKNLHKLLKGEHILGLTNVHFEKDRICSACQAGKQVGTHHPHKNIMTTDRPLELLHMDLFGPIAYISIGGSKYCLVIVDDYSRFTWVFFLQEKSQTQETLKGFLRRAQNEFALRIKKIRSDNGTEFKNSQIEGFLEEEGIKHEFSSPYTPQQNGVVERKNRTLLDMARTMLDEYKTPDRFWAEAVNTACYAINRLYLHRILKKTSYELLTGKKPNISYFRVFGSKCFILIKRGRKSKFAPKTVEGFLLGYDSNTRAYRVFNKSTGLVEVSCDVVFDETNGSQVEQVDLDEIGEEQAPCIALRNMSIGDVCPKESEEPPSTQDQPSSSMQASPPTQNEDEAQNDEEQNQEDEPPQDDSNDQGGYTNDQEKEDEEEPRPPHPRVHQAIQRDHPVDTILGDIHKGVTTRSRVAHFCEHYSFVSSIEPHRVEEALQDSDWVVAMQEELNNFTRNEVWHLVPRPNQNVVGTKWVFRNKQDEHGVVTRNKARLVAKGYSQVEGLDFGETYAPVARLESIRILLAYATYHGFKLYQMDVKSAFLNGPIKEEVYVEQPPGFEDSEYPNHVYRLSKALYGLKQAPRAWYECLRDFLIANGFKVGKADPTLFTKTLEKDLFVCQIYVDDIIFGSTNESTCEEFSRIMTQKFEMSMMGELKYFLGFQVKQLQEGTFICQTKYTQDILTKFGMKDAKPIKTPMGTNGHLDLDTGGKSVDQKVYRSMIGSLLYLCASRPDIMLSVCMCARFQSDPKESHLTAVKRILRYLAYTPKFGLWYPRGSTFDLIGYSDADWAGCKINRKSTSGTCQFLGRSLVSWASKKQNSVALSTAEAEYIAAGHCCAQLLWMRQTLRDYGYKLTKVPLLCDNESAIKMADNPVEHSRTKHIAIRYHFLRDHQQKGDIEISYINTKDQLADIFTKPLDEQSFTRLRHELNILDSRNFFC

SEQ ID NO: 10342 - protein, 2413 aa, Zea mays
  Clone ID: TF_ZM4782.C1.o2.fg.pep
MSGEHAKKEMETGDKPATSHGKASSEESRNKKKGKEKKASSHKSHRSGDKKKKMRKVVYYETDTSSLSTSGSDAPSITSNRHERKKFSKIPLHYPRTSRHTPLLSVPLGKPPTFDGEDYARWSDLMKFHLTSLHKSIWNVVEFGAQVPSVGDEDYDDDEVAQIEHFNSQATTILLASLSREEYNKVQGLKSAKEVWDVLNTAHEGDELTKITKRETIEGELGRFRLRQWEEPQDMYNRLKTLVNQVRNLGSKKWDDHEVVKVILRSLIFLNPTQVQLIRGNPRYTLMTPEELIGNFVSFEFMIKGSRKINELDGPSTSEAQPVAFKVMKEKKEVSTPSRTPIDASKLDNEEMTLVIKSFRQILKQWRGKDYKPRSKKVCYKCGKPGHFIAKCPISSDSDRGDDKKGRRKEKKRYYKKKGGDAHVCREWDSDESSSDSSDDEDAANIAVTKGLLFPNVGHKCLMAKDGKKKKVKSKSSTRYESSSDDNASDEEDNLHTLFANLNMQQKEKLNELISAIYEKDDLLDSQEDFLIKENKKHVKVKNAYALEVEKCEKLSSELSTCHETVDNLRNENSNLLTKVDSVACNVSIPNLRNDNDDLLAKIEELNMSLASLRIENEKLLAKAKELDVCNATISDLRSRNDILHAKVVQLKSCKPSTSTVEHTTICTRCRDVDINAIHDHMALLKQQNDHIAKLDAKIAEHELENEKFKYARSMLYSGRRPGIKDGIGFQKGDNVKLNAPPKKLSNFVKGKAPMPQDNEGYILYPASYPKSKIRRIHSRKSHSGPNHAFMYKGETSSSRQPTRAKLPKKKTPSASNGHNISFKTFDASYVLTNKSGKVVAKYVGSKHKGSKTCVWVPKVLVSNAKGPKTIWVYASGGSSWIIDSGCTNHMTGEKKMFSSYEKNQDPQRAITFGDGNQGVTVFRRSDDSIAFKGVLEGQLYLVDFDRAELDTCLIAKTNMGWLWHRRLAHVGMKNLHKLLKGEHILGLTNVHFEKDRICSACQTGKQVGAHHPHKNIMTTDRPLELLHMDLFGPIAYISIGGSKYCLVIVDDYSSFTWVFFLQENSHTQETLKGFLRRAQNEFGLRIKKIRSDNGTEFKNSQIEGFLEEEGIKHEFSSPYTPQQNGVVERKNRTLLDMARTMLDEYKTSDRFWAEAVNTSCYAINRLYLHRILKKTSYELLTGKKPNISYFRVFDSKCFILVKRGRKSKFAPKTVEGFLLGYDSNTRAYRVFNKSTGQVEVSCDVVFDETNGSQVEQVDLDEIGDEEAPCIALRNISIGDVCPKESKEPPNAQDQPSSSTQASPPTQNKDEAQIDEGEDQANEPPQDDDNDQGGDANDQDKEDEEPWPPHPRPHRVEEALQDSDWVVAMQEELNNFTRNEVWHLVPRPNQNVVGTKWVFRNKQDEHGVVTRNKARLVAKGYSQVEGLDFGETYAPVARLESIRILLAYATYHGFKLYQMDVKSAFLNGPIKEEVYVEQPPGFEDSEYPNHVYKLSKALYGLKQAPRAWYECLRDFLITNGFKVRKADPTLFTKTLENDLFVCQIYVDDIIFGSTNESTCEEFSRIMTQKFEMSMMGELKYFLGFQVKQLQEGTFLSQTKYTQDILSKFGMKDAKPIKTPMGTNGHLDLDEGAHRARSPPSPRRLPRPQSLLNLPPQGAGGSAAASGGGGRRGRRAGAAAGARLRAGLPGDGSQIRPLSPLTERIQGTTRSCPRPFACFVVLSSPRGDPTYEQEVFLATRCGRRMLDLSRFRDRDRARCRDWCFAAFVLAYATYLDDRLKERMQDRGAGGASPGKWHVDGDPVGMACQVAEAWELVPRGRLVKESAAMYCELTEVMVVLLDRFADLGTPACVRVHSIFTSTAWNLGMLSSRFTDRTAWNLDSALTTVETLASAAICGIVHSIIGGQPLLIVGVAEPTIIMYTYIYNFAKNQPNLGEKMFLPWATWVYIWTAVMLFLMAIFNVAAILNKFTRFAGELFVMLITVLFMQEAIKGMVGEFSAPNAWQRSLIADYGVPLMVILWTSLSYSLPSRIPSGVPRRLFTPLPWEPKSLQHWTVAKDLFSVPTVHIFLAIVPATMVAGLYFFDHTVASQMSQQKEFNLKNPSAYHYDILVLSLTLLRKKMVQTAKEGMMNNATSSEVYVKMQDVFIKMDHGGDTVSAHKEPKDLKDAIIPEGNGSGTVPEVFDPEKHVDAYLPVRVNEQRVSNLLQSLLIAGCIRVTPLIQKIPTSVLWGYFAYMSIDSLPRNQFWERIQLLFITPQRRYKVLEGAHASFMESVPFNTICTFTLFQLIYLLIVFGMTWIPVAGILLPLLFFFFLIIIRQHFIPKYFDPSHLRELDAAEYEELKGFTPDPSVCEDESVRSGDAQPGYASEILEEFTTHRGELKRRNSTFHDGRLLQLNSVKMTRELSRVPSWLT

SEQ ID NO: 10343 - protein, 956 aa, Zea mays
  Clone ID: TF_ZM4824.C1.o1.fg.pep
MSGDHAKKEMETGEKPTTSQGSTSSEESRTKRKEKKKISSNKGKEKKSSSHHKEKKEKSSSHKPRRSGDKQKRMRKVVYYETDTSSTSTSGSDAPSVTSKRQERKKFSKIPLHYSRISKHAPLLSVPLGKPPTFDGEDYARWSDLMRFHLTSLHKSIWDVVEFGAQVPSVGDKDYDEDEVAQIEHFNSQATTILLASLSREEYNKVQGLKNAKEVWDVLKTAHEGDELTKITKRETIEGELGRFRLRKGEEPQHMYNRLKTLVNQVRNLGSVKWDDHEMVKVILRSLIFLNPTQVQLIRGNPRYTKMTPEEVIGNFVSFECMIEGSRKINELDEPTTSEAQPVALKATEEKKEEATPSRQPIDASKLDNEEMVLVIKSFRQILKQRRGKDYKSRSKKVCYKCGKPGHFIAKCPISSDSDRGDDKKGRRREKKRYYKKKGDDAHVCREWDSDESSSDSSDDEDAANIAVTKGLLFPNVGHKCLMAKDDKRKKVKSNSSTKYESSSDDNASDEEDNLRSLFANLNIAQKEKLNELVSAIHEKDDLLDSQEDLLIKENKKHVKVKKAYALEIEKCEKLSSELSTCREMIDNLKHENASLNAKVDLHVCNVSIPNPRDNNDDLLARIEELNISLASLRVENESLIAKAKELDVCNTTISDLRDKNDILHAKIVELNSCKPSTSIVEHVSICTRCRDIDVNAIHDHMSLIKQQNDHIAKLDAKIAEHNLEDEKFKFARSMLYNGRRPGIKDGIGFQRGDIVKLSAPPKRLSNFVKGKAPMPQDTEGYILYPAGYPESKIRRIHSRKSHSGPNHAFMYKGETSSSRQPTRAKLPKKTPNASNDHNISFKTFDASYVLTNKSGKVVAKYVGGKHKGSKTCVWVPKVLVSNAKGPKTIWVYASGGSSWILDSGCTNHMTGEKRMFSSYEKNQDPQRAITFGDGNQGLVKGVTVFRRSDDSIAFK

SEQ ID NO: 10344 - protein, 1926 aa, Zea mays
  Clone ID: TF_ZM4868.C2.o1.fg.pep
MSGDHAKKEMETGEKPTTSHGSTSSEESRTKRREKKKSSSNKGKEKKSSSHHKEKKEKSSSHKPHRKGDKHKRMRKVVYYETDTSSTSTSDSDAPSVTSKRQERKKYSKIPLRYPRISKHTPLLSVPLGKPPTLDGEDYARWSDLMRFHLTSLHKSIWDVVEFGAQVPSVGDEDYDEDEVAQIEHFNSQATTILLASLSKEEYNKVQGLKSAKEIWDVLKTAHEGDELTKITKRETIEGELGRFRLHKGEEPQHMYNRLKTLVNQVRNLGSKKWDDHEVVNVILRSLIFLNPTQVQLIRGNPRYTKMTPEEVIGHFVSFECMIEGSRKINELGDSSEAQPVAFKATEEKKEEATPSRQPIDTSKLDNEEMALVIKSFRQILKQRRGKDYKSRSKKVCYKCGKPGHFIAKCPISSDSDRGDDKKGRRKEKKRYYKKKGGDAHVCREWDSDESSSDSSDDEDAANIAVTKGLLFPNVDHKCLMAKDGKKKVKSKSSTKYESSSDDNASDEEDNLRSLFANLNIAQKEKLNELVSAIHEKDDLLDSQEDCLIKENKKHVKVKKAYALEIEKCEKLSSELSTCREMIDNLRNENAILNAKVDSHVCNVSIPNLRNDNVDLLAKIDELNVSLASLRNENEKLLAKAKDFDVCNTTISDLRDKNDILHAKIVELNSCKPSTSIVEHVSICTRCRDVDINAIHDHMALIKQQNDHIAKLDAKIAEHNLENEKFKFARSMLYNGRRPGIKDGIGFQRGDNVKISAPPKRLSNFVKGKAPMPQDNEGYILYPAGYPESKIRKIHSRKSHSGPNHAFMYKGETSSSRQPTRAKLPRKKTPNASNDHDISFKTFDASYVLTNKSGKVVAKYVGGKHKGSKTCVWVPKVLVSNAKGPKTIWVYASGGSSWILDSGCTNHMTGEKRMFSSYEKNQDPQRAITFGDGNQGLVKGVTVFRRSDDSIAFKGVLEGQLYLVDFDRAELDTCLIAKTNMGWLWHRRLAHVGMKNLHKLLKGEHILGLTNVHFEKDRICSACQAGKQVGSHHPHKNIMTTDRPLELLHMDLFGPIAYISIGGSKYCLVIVDDYSRFTWVFFLQEKSQTQETLKGFLRRAQNEFDLRIKKIRSDNGTEFKNSQIEGFLEEEGIKHEFSSPYTPQQNGVVERKNRTLLDMARTMLDEYKTSDRFWAEAVNTACYAINRLYLHRILKKTSYELLTGKKPNISYFRVFGSKCFILVKRGRKSKFAPKTVEGFLLGYDSNTRAYRVFNKSTGLVEVSCDVVFDEANGSQVEQVDLDEIGEEEAPCIALRNMSIGDVCPKESEEPPNAQDQPSSSMQASPPTQDQEEAQVDEEKDQSNEPPQDDGNDQGGDTNDQDKEDEEEPRPPHPRVHQAIQRDHPVDTILGDIHKGVTTRSRVAHFCEHYSFVSSIEPNRVEEALQDSDWVVAMQEELNNFTRNEVWHLVPRPNQNVVGTKWVFRNKQDEHGVVTRNKARLVAKGYSQVEGLDFGETYAPVARLESIRILLAYATYHGFKLYQMDVKSAFLNGPIKEEVYVEQPPGFEDSEYPNHVYRLSKALYGLKQAPRAWYECLRDFLIANGFKVGKADPTLFTKTLENDLFVCQIYVDDIIFGSTNESTCEEFSRIMTQKFEMSMMGELKYFLGFQVKQLQEGTFISQTKYTQDILSKFGMKDAKPIKTPMGTNGHLDLDTGGKSVDQKVYRSMIGSLLYLCASRPDIMLSVCMCARFQSDPKESHLTAVKRILRYLTYTPKFGLWYPRGSTFDLIGYSDADWAGCKINRKSTSGTCQFLGRSLVSWASKKQNSVALSTAEAEYIAAGHCCAQLLWMRQTLRDYGYKLTKVHLLCDNESAIKMADNPVEHSRTKHIAIRYHFLRDHQQKGDIEISYINTKDQLADIFTKPLDEQTFTRLRHELNILDSRNFFC

SEQ ID NO: 10345 - protein, 598 aa, Zea mays
  Clone ID: TF_ZM4871.C2.o2.fg.pep
MAGNQFQQHGRRAPPQGPRETSYLDFSETRPPLFVKAEDPLEADEWIRVIEQKFGLIRCTETQKSLFVAQQLRGPASTWWGNFVAIQPARHQVTWDEFKLAFREHYIPEGVLHMKQEEFIRLKQGGDTVMQYLNKFNHLSQYAIDQVNTDLKKKNCFMRGLNDWLQRKMATYLDLTYSRAVSTALAVEAKNTGQGKSKGFGGDRSNQGPEKRTRLVIRPFNQNHSSPRPPSYPFKQPVFIRPTTAPASTNQLSAPGARFPAHPSSSTGCFNCGKSGHFIKDCPYPKLNKFNNQQNSGTSNQGKGNMANNSVGKNVKKTGRIYYTQVATTPEGEPIMMDLPGLPLERDVEFVINLKPDTAPISRRSYWMPPNELAELKMKLQDLMEKGFIRPSSSPWGCPTIFVKKKDQTLRMCVDYRPLNEEIQFLGHVLSANGIAVDPSKVKDILEWKPPTTVHQVRSFLGLAGYYRRFIPDFSKIVKLITSLLKNDTKFNWSSRCNEAFEQLKGFKGCHLQAGLITVVMSKLCQRESGGGKPNFLLAWFPKTLAIAPKIWQLIGLLGTANLSSSLSGTIIRGTLKTPNSQLVTPISIKLQRPDGYD

SEQ ID NO: 10346 - protein, 447 aa, Zea mays
  Clone ID: TF_ZM4889.C5.o1.fg.pep
MTPEEVIGNFVSFEFMIKGSRKINELDGPSTSEAQPVAFKATEEKKEESTPSRTPIDASKLDNEEMTLVIKSFRQILKQRRGKDYKPRSKKVCYKCGKPGHFIAKCPISSDSDRGDDKKGRRKEKKRYYKKKGGDAHVCREWDSNESSSYSSSDEDAANIAVTKGLLFPNVGHKCLMAKDGKKKKVYASRGSSWIIDSGCTNHMTGEKKMFSSYEKNQDPQRAITFGDGNQDSLDYNLLSVSQLCQMGYNYLFTDEKSHTQETLKGFLRRAQNEFGLRIKKIRSDNGTEFKNLQIEGFLEEEGIKHEFSSPYTPQQNGVVERKNRTLLDMARTMLDEYKTSDRFWAEAVNTACYAINRNRKSLQMHKINHPPPRKHLHQLKMRMRLKLMKEKIKQMSHLKMTAMIKGEMQMSKTRRMKNQDRHTQESTKQSNEITPSTPSSATFIRE

SEQ ID NO: 10347 - protein, 1572 aa, Zea mays
  Clone ID: TF_ZM4891.C1.o15.fg.pep
MRRVKAIRNKSTTKDEVTNSRAKEEDMTKRKKSVDHVAIENRERMMLQYALSVALNGVFTMHTLESLFLSRVRKRQIFVAFAPRWYQMRKNKTEVREDSVLHLGSFAYNLSGGVCASLGLYNITTLHSLLALVYCNTLHEEVHILYSQLHPSEPPHPAEAEAGPSHVAGCALGGELDLFEPPPSLRCRPGLEDRTQPELLGGRDVTPNPPPVPPTLAEAIAALVNATADNTRFLREMAGQQQFQQQAGRGYPQGPRETTYLDFSETRPPLFVKAEDPLEADEWIRVIEQKFGLLCCSETQKPLFAAQQLRGPASTWWGNFVAIQPVNHQYAIDQVNTDLKKKNCFMRGLNDRLQRKMATCIDLTYGKAISTALSVEAKYANSGKNKGFGGERPNQGQAKKQQFVIRPSNQNRPFSRPPSFPFKQPIIIRPNNTPTTPNQPGAPGTRFPALPSSSTGCFNCGKSGHFIKDCPYPRQNQSNASQGSGKSAQPKGNAVGKKYKEDGACILHSSGYYTGRRASDDGKKFVEQHHIAYHESKEGFKIHSPGGHIYTREVAYGVPVTMAGRNFPANMIVLKGQDIDVILGMNWLTQHKAILNTELRTVRLSYNQEEILLTLPATNPAKASGRVYEAIVPEIKNIPVVCEFPDVFPEDLPGLPPERDVEFVIELKLGTAPISRRSYRMPPNELAELKIQLQDLLNKGFIRPSSSPWGCPAIFVKKKDQTLRMCVDYRPLNEVTIKNKYPLPRIDILFDQLTGARVFSKIDLRSGYHQIRIRPEDIPKTAFTTRYGLFEYLVMSFGLTNAPAHFTYLMNSVFMPELDKFVVVFIDDILIYSKNEEDHAQHLRIVLTRLREHQLYAKFSKCAFWLEEIQFLGHVLSAKGIAVDPSKVKDILEWKPPTTVHQVRSFLGLAGYYRRFIPDFSKLVKPITSLLKNDIKFNWSSKCNEAFAQLKTLLTTAPVLAQPDITKPFDVYCDASGSGLGCVLMQEGRVIVYASRQLRRHGEHYPTHDLELAAVSELNMRQTRWLELIKDYELEIHYHPGKANVVADALSRKTSCHCLMAKTSENTLCQEMEKLNLGILQQGTLNQLKLESIILQRIIDAQKDNLGMKHIREKIRAGVAKCFKEDDQGVIWFKNRIVVPKNEELRQQILDEAHLSRYSIHPGSTKMYQDLKQHYWWTKMKIEIARYVARCDTCKRVKAIHMKTAGPLQSLPIPTWKWEDISMDFIVGLPRTAKGYDSIWVIVDRLTKIAHFLPVRAKYTVATYAALYIDRILSLHGIPKTIVSDRGPQFVSKFWEELHKSLGTKLLHSSAYHPQTSGQTERVNQILEDMLRACVLDFSQKWDECLPLAEFSYNNSYQESIKMAPFEALYGRQCRTPLNWSEPGERYFFRPDMVKEVEEKVQRIIHNMKKAQTRQKSYADRRRQPLCFLVDDYVYLKVSPMKGVSCFGVKGKLAPRYIGPFLVIEQCGPVAYRLQLPETLSAVHNVFHVSQLKKCLRVPDRTVEVTDVVLEPDLTYSEHPIRVLDQKDRVTRRKTLKFYKIQWNQHSEDEATWETQDFLNKNFPGFLASCKL

SEQ ID NO: 10348 - protein, 1540 aa, Zea mays
  Clone ID: TF_ZM4893.C6.o6.fg.pep
MPPRTRLTARKSTGPIGVPRHQLAPRHESSSSGSNDPIGDLEARDQLADRDLALDWAVQSRLLMCAKEVRAQARVKELSSTVDNLQMPIRTRGQDAAGTSGGRDVTPNPPPVPPTLAEAIAALVNATADNTRFLREMAGQQQFQQQAGRGYPQGPRVTTYLDFSETRPPLFVKAEDPLEADEWIRVIEQKFGLLRCSETQKPLFAAQQLRGPASTWWGNFMAIQPDNHQVTWDEFKAAFREHYIPEGVLHMKQEEFMKLQQGGDTVNQYLNKFNHLSQYAIDQVNTDLKKKNCFMRGLNDRLQRKMATCIDLTYGKAVSMALSVEAKYTNSGKNKGFGAYHYPPNNTPTTPKQPGAPGTRFPALPSSSTGCFNCGKSGHFIKDCPYPRQNQSNASQGSGKSAQPKGNAVGKNTKKTGRIYYTQVATTPEGEPVMMGTFPVASHPAIILFDSGASHTFISKKFVEQHHIAYHESKEGFKIHSPGGHIYTKEVAYGVPVTMAERNFPANMIVLKGQDIDVILGMNWLTQHKAILNTELRTVRLSYNQEEILLTLPATNPAKASGRVYEAIVPEIKNIPVVREFPDVFPEDLPGLPPERDVEFVIELKPGTAPISRRSYRMPPNELAELKIQLQDLLNKGFIRPSSSPWGCPAIFVKKKDQTLRMCVDYRPLNEVTIKNKYPLPRIDILFDQLTGARVFSKIDLRSGYHQIRIRPEDIPKTAFTTRYGLFEYLVMSFGLTNAPAHFTYLMNSVFMPELDKFVVVFIDDILIYSKNEEDHAQHLRIVLTRLREHQLYAKFSKCAFWLEEIQFLGHVLSAKGIAVDPSKVKDILEWKPPTTVHQVRSFLGLAGYYRRFIPDFSKLVKPITSLLKNDIKFNWSSKCNEAFEQLKTLLTTAPVLAQPDITKSFDVYCDASGSGLGCVLMQEGRVIAYASRQLRRHEEHYPTHDLELAAVVHALKIWRHYLLGNICHIYTDHKSLKYIFTQSELNMRQRRWLELIKDYELEIHYHPGKANVVADALSRKTSCHCLMAKTSENTLCQEMEKLNLGIIQQGTLNQLKLESIILQRIIDAQKDNLGMKHIREKIKAGVAKCFKEDDQGVIWFKNRIVVPKNEELRQQILDEAHLSRYSIHPGSTKMYQDLKQHYWWTKMKIEIARYVAKCDTCRRVKAIHMKTAGPLQSLPIPTWKWEDISMDFIVGLPRTAKGYDSIWVIVDRLTKIAHFLPVKVTYTIATYAALYIARILSLHGVPKTIVSDRGPQFVAKFWEALHNSLGTKLLHSSAYHPQTSGQTERVNQILEDMLRACVLDFSPKWDECLPLAEFSYNNSYQESIKMAPFEALYGRRCRTPLNWSEPGERYFFRPDMVKEVEEKVQKIVHNMKKAQARQKSYADRRRQPLCFLVDDYVYLKVSPMKGISRFGVKGKLAPRYIGPFLVLEQCGPVAYRLQLPETLSAVHNVFHVSQLKKCLRVPDRTVEVTDVVLEPDLTYSEHHIRVLDQKDRVTRRKTLKFYKIQWNQHSEDEATWETQDFLDKNFPGFLASCKL

SEQ ID NO: 10349 - protein, 1869 aa, Zea mays
  Clone ID: TF_ZM4903.C4.o1.fg.pep
MSGDHAKKEMETGEKPTTSHGSTSSEESRTKRKEKKKSSSNKGKEKKSSSHHKEKKERSSSHKPHRRGDKHKRMRKVVYYETDTSSASTSNSDAPSVTSKRQERKKFSKIPLHYPRISKNAHLLSVPLGKPPTFDGEDYARWSDLMRFHLTSLHKSIWDVVEFGAQVPSVGDKDYDEDEVAQIEHFNSQATTILLASLSREEYNKVQGLKSAKEVWDVLKTAHEGDELTKITKRETIEGELGRFRLRKGEEPQHMYNRLKTLVNQVRNLGSVKWDDHEMVKIYTKMTPEEVIGNFVSFECMIEGSRKINELDDSTTSEAQPVAFKATEEKKEEATPSRQPIDASKLDNEEMALVIKSFRQILKQRRGKDYKPRSKKVCYKCGKPGHFIAKCPISSDSDRGDDKKGRRKEKKKYYKKKGGDAHVCREWDSDESSSDSSDDEDAANIAVTKGLLFPNVGHKCLMAKDGKRKKVKSNSSTKYESSSDDNDSDEEDNLRVLFANLNMEQKEKLNDLISAIHEKDDLLDSQEDCLIKENKKHVKVKKAYALEVEKCEKLSSELSTCREMIDNLRNENASLNAKIDSHVCIVSTFNPKNNNDDLLAKIEELNISLASLRVENDNLITKAKDYDVCKVTISDLRDKNDILHAKIVELNSCKPSTSIVEHVSICTRCRDVDVNAIHDHMALIKQQNDHIAKLDAKIAEHNLENEKFKFARSMLYNGRRPGIKDGIGFQKGDNDKLNAPPKNLSNFVKGKAPMPQDNEGYILYPAGYPESKIRKIHSRKSHSGPNHAFMYKGETSSSRQPTRAKLPRKKTPNASNDHDISFKTFDASYVLTNKSGKVYASGGSSWILDSGCTNHMTGEKKMFSSYEKNQDPQRAITFGDGNQGVTVFRRSDDSIAFKGVLEDQLYLVDFDRAELDTCLIAKTNMGWLWHRRLAHVGMKNLHKLLKGEHILGLTNVHFEKDRICSACQAGKQVGTQHPHKNIMTTDRPLELLHMDLFGPIVYISIGGSKYCLVIVDDYSRFTWVFFLQEKSQTQETLKGFLRRAQNEFGLRIKKIRSDNGTEFKNSQIEGFLEEEGIKHEFSSPYTPQQNGVVERKNRTLLDMARTMLDEYKTSDRFWAEAVNTACYAINRLYLHRILKKTSYELLTGKKPNISYFRVFGSKCFILVKRGRKSKFAPKTVEGFLLGYDSNTRAYRVFNKSTGLVEVSCDVVFDETNGSQVEQVDLDEIGEEQAPCIALRNMSIGDVCPKESEEPPHAQDQPSSSTLASPPTQNEDEAQVDEVEDQANEPPQDDDNNQGGDANDQDKEDEEQKPPHPRVHQAIQRDHPVDTILGDIHKGVTTRSRVAHFCEHYSFVSSIEPHRVEEALQDSDWVVAMQEELNNFTRNEVWHLVPRPNQNVVGTKWVFRNKQDEHGVVTRNKARLVAKGYSQVEGLDFGETYAPVARLESIRILLAYATYHGFKLYQMDVKSAFLNGPIKEEVYVEQPPGFENSEYPNHVYKLSKALYGLKQAPRAWYECLRDFLIANGFKVGKADPTLFTKTLKNDLFVCQIYVDDIIFGSTNESTCEEFSRIMTQKFEMSMMGELKYFLGFQVKQLQEGTFISQTKYTQDILNKFGMKDAKPIKTPMGTNGHLDLDTGGKSVDQKVYRSMIGSLLYLCASRPDIMLSVCMCARFQSDPKESHLTAVKRILRYLAYSPKFGLWYPRGSTFDLIGYSDADWAGCKINRKSTSGTCQFLGRSLVSWASKKQNSVALSTAEAEYIAAGHCCAQLLWMRQTLRDYGYKLTKVPLLCDIESAIKMADNPVEHSRTKHIAIRYHFLRDRQQKGDIEISYINTKDQLADIFTKPLDEQTFTKLRHELNILDSRNFFC

SEQ ID NO: 10350 - protein, 1921 aa, Zea mays
  Clone ID: TF_ZM4904.C2.o1.fg.pep
MSGDHAKKEMETGEKPTTSQGSTSSEESRTKRKEKKKISSNKGKEKKSSSHHKEKKEKSSSHKPHRSGDKHKRMRKVVYYETDTSSPSTSGSDAASVTSKRQERKKYSKIPLRYPRISKHTPLLSVPLGKPPTFDGEDYARWSDLMRFHLTSLHKGIWDVVEFGAQVPSVGDQDYDEDEVAQIEHFNSQATTILLASLSREEYNKVQGLKNAKEVWDVLKTAHEGDELTKITKRETIEGELGRFRLHKGEEPQHMYNRLKTLVNQVRNLGSKKWDDHEVVNVILRSLIFLNPTQVQLIRGNPRYTKMTPEEVIGHFVSFECMIEGSRKINELGDPSEAQPVAFKATEEKKEESTPSRQPIDASKLDNEEMALVIKSFRQILKQRRGKDYKSRSKKVCYKCGKPGHFIAKCPISSDSDRGDDKKGRRKEKKRYYKKKGGDAHVCREWDSDESSSDSSDDEDAANIAVTKGLLFPNVGHKCLMAKDGKKKVKSKSSTKYESSSDDNASDEEDNLRSLFANLNIAQKEKLNELVSAIHEKDDLLDSQEDCLIKENKKHVKVKKAYALEIEKCEKLSSELSTCREMIDNLRNENAILNAKVDSHVCNVSIPNLRDDNVDLLAKIDELNVSLASLRLENENLIAKAKDFDVCKVTISNLKDKNDILHAKIVELDSCKPSTSTIEHVTICARCRDIDVNAIHDHIILIKQQNDHIAKLDAKIAEHNLENEKFKFARSMLYNGRRPGIKDGIGFQRGDNVKISAPPKRLSNFVKGKAPMPQDNEGYILYPAGYPEDKIRKIHSRKSHSGPNHAFMYKGETSSSRQPTRAKLPRKKTPNASNDHAISFKTFDASYVLTNKSGKVVAKFVGGKHKGSKTCVWVPKVLVSNAKGPKTVWVYASGGSSWILDSGCTNHMTGEKRMFSSYEKNQDPQRAITFGDGNQGVTVFRRSDDSIAFKGVLEGQLYLVDFDRAELDTCLIAKTNMGWLWHRRLAHVGMKNLHKLLKGEHILGLTNVHFEKDRICSACQAGKQVGTHHPHKNIMTTDRPLELLHMDLFGPIAYISISGSKYCLVIVDDYSRFTWVFFLQEKSQTQETLKGFLRRAQNEFGLRIKKIRSDNGTEFKNSQIESFLEEEGIKHEFSSPYTPQQNGVVERKNRTLLDMARTMLDEYKTSDRFWAEAVNTACYAINRLYLHRILKKTSYELLTSKKPNISYFRVFGSKCFILVKRGRKSKFAPKTVEGFLLGYDSNTRAYRVFNKSTGLVEVSCDVVFDETNGSQVEQVDLDEIGEEQAPCIALRNMSIGDVCPKESEEPPKAQDQPSSSTQASPPTQNEDETQVDEVEDQANEPPQDIGNDQGGDANEEDKEEEEQRPPHPRVHQAIQRDHPVDTILGDIHKGVTTRSRVAHFCEHYSFVSSIEPHRVEEALQDSDWVVAMQEELNNFTRNEVWHLVPRPNQNVVGTKWVFRNKQDEHGVVTRNKARLVVKGYSQVEGLDFGETYAPVARLESIRILLAYATYHGFKLYQMDVKSAFLNGPIKEEVYVEQPPGFEDSKYPNHVYKLSKALYGLKQAPRAWYECLRDFLIANGFKVGKADPTLFTKTLENDLFVCQIYVDDIIFGSTNESTCEEFSRIMTQKFEMSMMGELKYFLGFQVKQLQEGTFISQTKYTQDILNKFGMKDAKPIKTPMGTNGHLDLDTGGKSVDQKVYRSMIGSLLYLCASRPDIMLSVCMCARFQADPKEAHLTVVKRILRYLAYTPKFGLWYPKGSTFNLIGYSDADWAGCKINRKSTSGTCQFLGRSLVSWASKKQNSVALSTAEAEYIVAGHCCAQLLWMRQTLRDYGYKLTKVPLLCDNESAIKMADNPVEHSRTKHIAIRYHFLRDHQQKGDIEISYINTKDQLADIFTKPLDEQSFNKLRHELNILDSRNFFC

SEQ ID NO: 10351 - protein, 1600 aa, Zea mays
  Clone ID: TF_ZM4920.C3.o16.fg.pep
METGDKSTTSHEKASSEESRNKGKGKEKKSSSHKSHRSGDKKKKMRKVVYYETDTSSPSTSGSDAPSITSKRHERKKFSKIPLRYPRISKHTPLLSVPLGKPPTFDGEDYARWSDLMRFHLTSLHKSIWDVVEFGVQVPSVGDKDYDEDEVAQIQHFNPQASTILLASLSREEYNKVQGLKGAKEIWDTLKTAHEGDEVTKITKRETIEGELGRFRLRQGEEPQDMYNRLKTLVNQVRNLGSKKWDDHEMVKVILRSLVFLNPTQVQLIRGNPRYTLMTPEEVIGNFVSFELMIKGSKKINELDGPSTSEAQPVAFKATEEKKEESTPCRTPIDASKLDNEEMALVIKSFRQILKQRRGKDYKPRSKKVCYKCGKPGHFIAKCPISSDSDRGDDKKGRIKEKKKYYKKKGGDAHVCREWDSDESSSDSSSDEDAANIAINKGLLFPNIGHKCLMTKDGKKKKVKSKSSTKYESSGDDNASDEEDNLRTLFANLNMQQKEKLNELISAIHEKDDLLDTQEDFLIKENKKHVKVKNAYALEVEKCEKLISELSTCHDIINNLKNENASLIAKVDSNACNISIPNLRNDNVDLLAKIEELNISLDSLRIENEKLIAKAKELDVCNASISDLRSKNDILHAKVVELKSSKPSTSTVEHTSICTRCRDVDIDAIHDHMVLIKQQNDHIAKLDAKIVEHELENEKFKFARSMLYSGRRPGIKDGIGFQQGGNVKLNAPPKRLSNFVKGKAPMPQDNEGYILYPAGYPESKIRRIHSRKSHFGPNHAFMYKGETSSSRQPTQAKLPKKKTPSASNDHDISFKTFDASYVLTNKSGKVYASGGSSWIIDSGCTNHMTGEKKMFPSYEKNQDPQRAITFEDGNQGVTVFRRSDDSVAFKGVLEGQLYLVDFDRAELDTCLIAKTNMGWLWHRRLAHVGMKNLHKLLKGEHILGLTNVHFEKDRICSACQAGKQVGVHHPHKNMMMTDRPLELLHMDLFGPIAYISIGGSKYCLVIVDDYSRFTWVFFLYDKSHTQETLKGFLRRAQNEFGLRIKKIRSDNGTEFKNSQIEGFLEEEGIKHEFSSPYTPQQNGVVERKNRTLLDMARTMLDEYKTSDRFWAEAVNTACYAINRLYLHRILKKTSYELLTGKKPNISYFRVFGSKCFILVKRGRKSKFAPKTVEGFLLGYDSNTRAYRVFNKSTGQVEVSCDVVFDETNGSQIEQVDLDDIGDEEAPCITLRNMSIGDVCPKQYEEPPNAQDQPSSSTQASPSTRNEDEAQVDEGEEQRDEPPKDDGNDQGGDANNQDKEDEEPRPPHPRVHEAIQRDHLVDTILGDIHKGVTTRSRVAHFCEHYSFVSSIEPHRVEEALQDSDWVVAMQEELNNFTRNEVWHLVPRPNQNVVGTKWVFRNKQDEHGVVTRNKARLVAKGYSQVEGFDFGETYAPVARLESIRILLAYATYHGFKLYQMDVKSAFLNGPIKEEVYVEQPPGFEDSEYPNHVYKLSKALYGLKQAPRAWYECLRDFLITNGFKVGKADPTLFTKTLENDLFVCQIYVDDIIFGSTNESTCEEFSRIMTQKFEMPMMGELKYFLGFQVKQLQEGTFISQTKYT

SEQ ID NO: 10352 - protein, 1687 aa, Zea mays
  Clone ID: TF_ZM4923.C3.o1.fg.pep
METGEKPTTSHGSTSSEESRTKRKEKKNISSNKGKEKKSSSHHKEKKEKSSSLKPHRSGNKQKRMRKVVYYETDTSSTSTSDSDVPSVTSKRQERKKFSKIPLHYPRISKHAPLLSVPLGKPPTFDGEDYARWSDLMRFHLTSLHKSIWDVVEFGAQVPSVGDKDYDEDEVAQIEHFNSQATTILLASLSREEYNKVQGLKSAKEVWDVLKTAHEGDELTKITKRETIEGELGRFRLRKGEEPQHMYNRLKTLVNQVRNLGSVKWDDHEMVKVILRSLIFLNPTQVQLIRGNPRYTKMTPEEVIGHFSFRQILKQRRGKDYKSRSKKVCYKCGKPGHFIAKCPISSDSDRGDDKKGRRKEKKRYYKKKGGDAHICREWDSDESSSDSSDDEDAANIAVTKGLLFPNVGHKCLMAKDGKRKKVKSRSSTKYETSSDENASDEEDNLRTLFANLNMEQKEKLNELISAIHEKDDLLDSQEDCLIKENKKHVKVKNAYALEIEKCEKLSSELSTCREMIDNLRNENASLNAKVDSHVCNVSIPNPRDNNDDLFARIEELNISLASLRVENENLIAKAKELDVCKVTISDLRDKNDILHAKIVELNSCKPSTSTIEHVTICTRCRDIDVNAIHDHMALIKQQNDHIAKLDAKIAEHNLENEKFKFARSMLYNGRRPGIKDGIGFQRGDNVKLSASPKRLSNFVKGKTPMPQDNEGYILYPAGYPESKIKKIHSRKSHSGSNHAFMYKSETSSSRQPTRATLPKKKIASASNEHDISFKTFDASYVLTNKSGKVVAKYVGGKHKGSKTCVWVPKVLVSNAKGPKTIWDYASGGSSWILDSGCTNHMTGEKRMFSSYEKNQDPQRAITFGDGNQDYNLLSVSQLCQMGYNCLFTDIGVTVFRRSDDSIAFKGVLEGQLYLVDFDRAELDTCLIAKTNMGWLWHRRLAHVGMKNLHKLLKGEHILGLTNVHFEKDRICSACQAGKQVGTHHPHKNIMTTDRPLELLHMDLFGPIAYISIGGSKYCLVIVDDYSRFTWVFFLQEKSQTQETLKGFLRRAQNEFGLRIKKIRSDNGTEFKNSQIEGFLEEEGIKHEFSSPYTPQQNGVVERKNRTLLDMARTMLDEYKTSDRFWAEAVNTACYAINRLYLHRILKKTSYELLTDCRRFLLGYDSNTRAYRVFNKSTGLVEVSCDVVFDETNGSQVEQVDLDEIDEEEAPCIALRNMSIGDVCPKESEEPSNTQDQPSSSMQASPPTQNEDEAQIDEGQVQEDEPPQDDGNDQGGDANDQEKEDEQEPMPPHPRVHQAIQRDHPVDTILGDIHKGVTTRSRVAHFCEHYSFVSSIEPHRVEEALQDSDWVVAMQEELNNFTRNEVWHLVPRPNQNVVGTKWVFRNKQDEHGVVTRNKARLVAKGYSQVEGLDFGETYAPVARLESIRILLAYATYHGFKLYQMDVKSAFLNGPIKEEVYVEQPPGFEDCEYPNHVYKLSKALYGLKQAPRAWYECLRDFLIANGFKVGKADPTLFTKTLENDLFVCQIYVDDIIFGSTNESTCEEFSRIMTQKFEMSMMGELKYFLGFQFKQLQEGTFISQTKYTQDILTKFGMKDAKPIKTPMGTNGHLDLDTGGKSVDQKEEHIGDLPVLGKILGVLGFKEAKFGRSFHRRSRVYCRRPLLRAIALDEANPAGLRLQINQSPFAM

SEQ ID NO: 10353 - protein, 1895 aa, Zea mays
  Clone ID: TF_ZM4930.C2.o1.fg.pep
MSGDHAKKEMETGEKPTTSHGSTSSEESRTKRREKKKSSSNKGKEKKSSSHHKEKKERSSSHKPHRSGDKQKRMRKVVYYETDTSSTSTSDSDAPSITSKRQERKKFSKIPLHYPRISKHAPLLSVPLGKPPTFDGEDYAMWSDLMRFHLTSFHKSIWDVVEFGAQVPSVGDKDYDEDEVAQIEHFNSQATTILLASLSREEYNKVQGLKSAKEVWDVLKTAHEGDELTKITKRETIEGELGRFRLRKGEEPQHMYNRLKTLVNQVRNLGSVKWDDHEMVKVILRSLIFLNPTQVQLIRGNPRYTKMTPEEVIGHFVSFECMIEGSRKINELDDPSTSEAQPVAFKATEDKKEESTPSRQPIDASKLDNEEMALVIKSFRQILKQRRGKDYKSRSKKVCYKCGKPGHFIAKCPISSDSDRGDDKKGRRKEKKRYYKKKGGDAHVCREWDSDESSSDSSDDEDAANIAVTKGLLFPNVGHKCLMAKDGKRKKVKSRSSTKYETSSDENASDEEDNLRTLFANLNIAQKEKLNELVSAIHEKDDLLDSQEDLLIKENKKHVKVKNAYALEIEKCEKLSSELSTCREMIDNLRNENASLNTKVNSHVCNVSTSNPKDNNDDLLARIEELNISLASLRIENENLIAKAKDFDVCKVAISDLRDKNDILHAKIVELNSCKPSTSIVEHVSICTRCRDVDINAIHDHMALIKQQNDHIAKLDAKIAEHNLENEKFKFARSMLYNGRRPGIKDGIGFQKGDNVKNNAPPKRLSNFVKGKAPMPQDNEGYILYPAGYPESKIRRIHSRKSHSGPNHAFMYKGETSSSRQPTYAKLPRKKIPNASNDHNISFKTFDASYVLTNKSGKVYASGGSSWILDSGCTNHMTGEKKMFSSYEKNQDPQRAITFGDGNQGLVKGVTVFRRSDDSIAFKGVLEGQLYLVVFDRAELDTCLIAKTNMGWLWHRRLAHVGMKNLHKLLKGEHILGLTNVHFEKDRICSACQAGKQVGSHHPHKNIMTTDRPLELLHMDLFGPIACISIGGSKYYLVIVDDYSRFTWVFFLQEKSQTQETLKGFLRRAQNEFGLRIKKIRSDNGTEFKNSQIEGFLEEEGIKHEFSSPYTPQQNGVVERKNRTLLDMARTMLDEYKTPDRFWAEAVNTACYAINRLYLHRILKKTSYELLTGKKPNISYFRVFGSKCFILVKRGRKSKFAPKTVEGFLLGYDSNTRAYRVFNKSSGLVEVSCDVVFDETNGSQVEQVDLDEIGEKQAPCIALRNMSIGDVCPKESEEPPHTQDQPSSSTLASPPTQNENEAQVDEEEDQSNEPPQDDGNDQGGDANNQEKEDKQEPRPPHPRVHQAIQRDHPVDTILGDIHKGVTTRSRVAHFCEHYSFVSSIEPHRIEEALQDSDWVVAMQEELNNFTRNEVWHLVPRPNQNVVGTKWVFRNKQDEHGVVTRNKARLVAKGYSQVEGLDFGETYAPVARLESIRILLAYATYHGFKLYQMDVKSAFLNGPIKEEVYVEQPPGFEDSEYPNHVYKLSKALYGLKQAPRAWYECLRDFLIDNGFKVGKADPTLFTKTLENDLFVCQIYVDDIIFGSTNESTCEEFSRIMTQKFEMSMMGELKYFLGFQVKQLQEGTFISQTKYTQDILNKFGMKDAKPIKTPMGTNGHLDLDTGGKSVDQKVYRSMIGSLLYLCASRPDIMLSVCMCARFQADPKEAHLTAVKRILRYLAYTPKFGLWYPRGSTFDLIGYSDADWAGCKINRKSTSGTCQFLGRSLVSWASKKQNSVALSTAEAEYIAAGHCCAQLLWMRQTLRDYGYKLTKVPLLCDNESAIKMADNPVEHSRTKHIAIRYHFLRDHQQKGDIEISYINTKDQLADIFTKPLDEQSFNKLRHELNILDSRNFFC

SEQ ID NO: 10354 - protein, 250 aa, Zea mays
  Clone ID: TF_ZM4932.C2.o20.fg.pep
MSGAHAKKEMVTGEKPATSHGKAPSGESGNKKREESPPRVKLHRSGDKKKMKKVVYYETNSSSPSTSNFDTPSVTSKRHERKKFSSKQIIERDATSTPEVQPVTFKAMEEKKEESSSSRLPIDTSKIDNEEMALIIKSFRQILKQRKGRDYKPRSKKVCYKCGKPGHFIAKCPISSDSDRGDDKRGKKEKKRYYKKKDGDAHICREWDSNESSTDSSSDEDAANIAVNKGLLFRNVGHKCLMAKEGKKKP

SEQ ID NO: 10355 - protein, 933 aa, Zea mays
  Clone ID: TF_ZM4948.C2.o1.fg.pep
MKKVVYYETDSSSPSTSGSDAPSVTSKRRERKKFSKIPLRYPRISKRTPLLSVPLGKPPVFDGEDYCMWSDKMRHHLTSLHASIWDIIEFGTQEYNKVQGLKSAKEIWNVLKTAHEGDQVTKITKRETIEGKLGRFILNQGEEPEAMYKRLKTLVNQVRNLRSTKWDDHEMVKVILRSLVFCNPTQVQLIRGDPRYKLMSPEEVIGKFVSFELMIKGSKQIIEQGGTSTPEVQPVAFKATEEKKEESTSSRLPIDASKLNNEEMALIIKSFRQILKQRTGKDYKPRSKKVCYKCGKPGHFIAKCPISSDSDRDNNKRGKKKEKKRYYKKKGGDAHVCREWDSDESSTDSSSDEDATKITVNKGLLFPNVGHRCLMTKDNKKKKVKSRASSKYTTSSDEGNSSEDEDDLLNVFANLNMQQKEKLNELIGAIHEKDELLDSQEEFLIKENKKHVKVKNAYAQEVEKNENLTKELSICHDKISNLRNENGNLFAKVEKSNVCHDSIVNLKNDNASLIAKIGKLNESISSLKIENASLISKAKDLNVCNASISNLRNENAILHAKIDELNVSKPSTSIVDHVSICMRCRDINVDAIHDHLALIKQQNDHIAQLTSKINEHEIENEKNKFARSMLYNRRRPGIKDGIGFQQGDNVKLNAPKRLSNFVKGKAPMAQDNEGYILYPVGYPEHKIRRIHAKKSHSISHHAFMYKNEASRTFDASYVLTNKSGKVVAKYVGGKHKGSKSCVWVPKVYESGGSSWIIDSGCTNHMTGEKRMFSSYEKTMIPKELSHSGMEIKEKSQIQETLKGFLRRTQNEFGLRIKKIRNDNGTEFKNSQIEGFLEDEGIKHEFSSPYTPQQNGVVERKNRTLLDMARTMLDDYKTPDRFWAEAINAACYSINRLYLHRILKKTSYELLTGKKSNVSYFRVFGSESRLEGGE

SEQ ID NO: 10356 - protein, 2768 aa, Zea mays
  Clone ID: TF_ZM4949.C2.o4.fg.pep
MSGDHAKKEMETGEKPTTSHGSTSSEESRTKRKEKKKSSSNKGKEKKSSSHHKEKKERSSSHKPHRRGDKHKRMRKVVYYETDTSSTSTSGSDAPSVTSKRQERKKFSKIPLHYPRISKNAPLLSVPLGKPPTFDGEDYARWSDLMRFHLTSLHKSIWDVVEFGAQVPSVGDKDYDEDEVAQIEHFNSQATTILLASLSREEYNKVQGLKSAKEVWDVLKTAHEGDELTKITKRETIEGELGRFRLRKGEEPQHMYNRLKTLVNQVRNLGSTKWDDHEMVKVILRSLIFLNPTQVQLIRGNPRYTKMTPEEVIGNFVSFECMIEGSRKINELDDPSTSEAQPVAFKATEEKKEEATPSRQPIDASKLDNEEMALVIKSFRQILKQRRGKDYKSRSKKVCYKCGKPGHFIAKCPISSDSDRGDDKKGRRKEKKKYYKKKGGDAHVCREWDSDESSSDSSDDEDAANIAVTKGLLFPNVGHKCLMAKDGKRKKVKSNSSTKYESSSDDNDSDEEDNLRVLFANLNMEQKEKLNELISAIHEKDDLLDSQEDCLIKENKKHVKVKKAYALEVEKCEKLSSELSTCREMIDNLRNENASLNAKVDSHVCIVSTSNPKDNNDDLLARIEELNISLASLRVENKILIAKAKDYDVCKVTISDLRDKNDILHAKIVELNSCKPSTSIVEHVSICTRCRDVDVNAIHDHMALIKQQNDHIAKLDAKIAEHNLENEKFKFARSMLYNGRRPGIKDGIGFQRGDNVKINAPPKNLSNFVKGKAPMPQDNEGYILYPAGYPESKIRKIHSRKSHSGPNHAFMYKGETSSSRQPTRAKLPRKKTPNASNDHAISFKTFDASYMLTNKSGKVYASGGSSWILDSGCTNHMTGEKKMFSSYEKNQDPQRAITFGDGNQGVTVFRRSDDSIAFKGVLEGQLYLVDFDRAELDTCLTAKTNMGWLWHRRLAHVGMKNLHKLLKGEHILGLTNVHFEKDRICSACQAGKQVGAHHPHKNIMTTDRPLELLHMDLFGPIAYISIGGSKYCLVIVDDYSRFTWVFFLQDKSHTQETLKGFLRRAQNEFGLRIKKIRSDNGTEFKNSQIEVERKNRTLLDMARTMLDEYKTPDRFWAEAVNTACYAINRLYLHRILKKTSYELLTGKKPNISYFRVFGSKCFILVKRGRKSKFAPKTVEGLLLGYDSNTRAYRVFNKSTGLVEVSCDVVFDETNGSQVEQVDLDEIGEEQAPCIALRNMSIGDVCPKEFEEPPNTQDQPSSSTQASPPTHDEDEAQVDEGEDQKDEPPQDDGNDQGGDANDEDKEDEQPRPPHPRVHQAIQRDHPVDTILGDIHKGVTTRSRVAHFCEHYSFVSSIEPHRVEEALQDSDWVVAMQEELNNFTRNEVWHLVPRPNQNVVGTKWVFRNKQDEHGVVTRNKARLVAKGYSQVEGLDFGETYAPVARLESIRILLAYATYHGFKLYQMDVKSAFLNGPIKEEVYVEQPPGFEDSKYPNHVYKLSKALYGLKQAPRAWYECLRDFLIANGFKVGKADPTLFTKTLDNDLFEFSRIMTQKFEMSMMGELKYFLGFQVKQLQEGTFICQTKYTQDILTKFGMKDAKPIKTPMGTNGHLDLNTGGKSVDQKATFNSDRGDDKKGKRREKKKYYKKKGGDAHVCREWDSDESSTESSSDEDAANIAVTKGLLFPNVGHKCLMAKDGKRKKVKSKSSTKYESSSDDNASDEENNLRTLFANLNMEQKEKLNELISAIHEKDDLLDSQEDFLIKENKKHVEKCEKLSSELSTCHDTITNLRNENASLNAKVDSHVCNVSIPNLRNDNDDLLAKIEELNISLASLRVENENLIAKAKELDVCNVTISDLRDNNDILRAKIVELNSCKPSTSSVEHVSFCTRCRDVDINAIHDHMTLIKQQNDHIAILDAKIAEHNLENEKFKFARSMLYNGRHPGIKDGIGYQRGDNVKLSAPPKRLSNFVKGKAPMPQDNEGYILYPAGYPESKIRKIHSRKSHSGPNHAFMYKGETSSSRQPTRAKLPKKKTPSASNEHDISFKTFDASYVLTNKSGKVYASGGSSWILDSGCTNHMTGEKKMFSSYEKNQDSQRAITFGDGNQGVTVFRRSDDSIAFKGVLEGQLYLEKSQTQETLKGFLRRAQNEFGLRIKKIRSDNGTEFKNSQIEGFLEEEGIKHEFSSPYTPQQNGVVERKNRTLLDMARTMLDEYKTPDRFWAEARGRKSKFAPKTVEGFLLGYDSNTRAYRVFNKSSGLVEVSCNVVFDETNGSQVEQVDLDEIGEEQAPCIALRNMSIGDVCPKEFEEPPNTQDQPSSSTQASPPTQNEDEAQVDEGEDQRDEPPQDNGNDQGGDASDQDKEDEQPRPPHPRVHQAIQRDHPVDTILGDIHKGVTTRSRVAHFCEHYSFVSSIEPHRIEEALQDSDWVMAMQEELNNFLRNEVWHLVPRPNQNVVGTKWVFRNKQDEHGVVTRNKARLVAKGYSQVEGLDFGETYAPVARLESIRILLAYATYHGSKLYQMDVKSAFLNGPIKEEVYVEQPPGFEDSEYPNHVYRLSKALYGLKQAPRAWYECLRDFLIANGFKVGKADPTLFTKTLDNDLFVCQIYVDDIIFGSTNESTCEEFSRIMTQKFEMSMMGELKYFLGFQVKQLQEGTFICQTKYTQDILTKFGMKDAKPIKTPMGTNGHLDLNKGGQVRTVRALAADRPHHQDDPRTGPMQKSKSALWTVRRKRADRLGPRADRPASGADRPARTVRTRQADRPRSAEWSNG

SEQ ID NO: 10357 - protein, 1188 aa, Zea mays
  Clone ID: TF_ZM4960.C1.o10.fg.pep
MSGNHAKKEMETGDKPATSHGKVSSEESRNKKKGKEKKASSHKSHRSGDKKKKMRKVVYYETDTSSPSTSGSDAPSITSKRHERKKFSKIPLHYPRTSRHTTLLSVPLGKPPTFDGEDYARWSDLMKFHLTSLHKSIWNVVEFGAHVPSVGDEDYDEDEVAQIEHFNSQATTILIASLSREEYNKVQGLKSAKEVWDVLKTAHEGDELTKITKRETIEGELGRFRLCQGEEPQDMYNRLKTLVNQVRNLGSKKWDDHEVVKVILRSLIFLNPTQVQLLHGNPRYTLMTPEEVIGNFVSFEFMIKGSRKINELDSPSTSDAQPVAFKATEEKKEESTPSRTPIDTSKLDNEEMTLVIKSFRQILKQRRGKYYKPRSKKVCYKCGKPGHFIAKCPISSDSDRGDDKKGRRKEKKRYYKKKGGDAHVCREWDSDESSSDSSDDEDTANIAVTKGLLFPNVGHKCLMAKDGKKKKVKSKSSTRYESSSDDNASDEEDNLRTLFANLNMQQKEKLNELISAIHEKDDLLDSQEDFLIKENKKHVKVKNAYSLEVEKCEKLSSELSTCHETIDNLRNENANLLAKVDSIACNISISNPRNDNDDLLARIEELNISLASLRDENEKLLAKAKELDVCNVTISDLRTKNDILHAKVVELKSCKPSTSTVEHTTICTRCRDVDINAIHDHMALIKQQNDHIAKLDAKIAEHEIENEKFKFARSMLYNGRGHGIKDGIGFQQGGNVYASGGSSWIIDSGCTNYMTGEKKMFSSYEKNQDPQRAITFGDGNQGIIVFRRSDDSIAFKGVLEGQLYLVDFDRAELDTCLIAKTNMGWLWHRRLAHVGMKNLHKLLKGEHILGLTNVHFEKDRICSACQAGKQVGAHHPHKNIMTTDRPLELLHMDLFGPIAYKSIDGSKYCLVIVDDYSRFTWVFFLQEKSHTQETLKGFLRRAQNEFGLRIKKIRSDNGTKFKNSQIEGFLEEEGIKHEFSSPYTPQQNGVVERKNRTLLDMARTMFDEYKTSDRFWAEAVNTACYAINRLYLHRILKKTSYELLTGKNPNISYFRVFGSKCFILIKRGRNYKFAPKTVEGFLLGYDSNTRAYRVFNKSSRQVEVSCDVVFDETNGSQVEQVDLDEIGDEEAPCIALRNMSIGDVCPKESKEPPNAQDQPSSSTQASPPTQNEDEAQVDEGEDQANEPS

SEQ ID NO: 10358 - protein, 1468 aa, Zea mays
  unsure (1)..(1468): unsure at all Xaa locations
  Clone ID: TF_ZM4981.C2.o9.fg.pep
MSGDHAKKEMETGEKPTTSHRKASSEESRKKGKGKEKKASSHKSHRSGDKIKKMRKVVYYETDTSSPSTFGSDAPSVTSKRHERKKFSKIPLRYPRISKHTPLLFVPLGKPPTFDGEDYARWSDLMRFHLTSLHKSIWDVVEFGVQVPSVGDEDFDVDEVAQIEHFNSQATTILLASLSREEYNKVQGLKSAKEVWDVLKTAHEGDELTKITKRETIEGELGRFRLRQGEEPQDMYNRLKTLVNQVRNLGSKKWDDHEVVKVILRSLIFLNPTQVQLIRGNPRYTLMTPEEVIGNFVSFEFMIKGSRKINELDDPSTSEAQPVAFKATEEKKESTPSRTPIDASKLDNEEMALVVKSFRQILKQRRGKDYKPRSKKVCYKCGKPGHFIAKCPISSDSDRGDDKKGRRKEKKRYYKKKGGDAHVCREWDSDESSSDSSDDEDAANIAVTKGFLFANVGHKCLMAKDGKKKKVKSKSSTRYESSSDDNASDEEDNLRTLFANLNMQQKEKLNELISAIHEKDDLLDSQEDFLIKENKQHVKGKALMPQDNEGYILYPAGYPESKIRRIHSRKSHSGPNHAFMYKGKTSSSRQPTRAKLPKKKTPNASNDHDISFKTFDASYVLTNKSGKVYASGGSSWIIDSGCTNHMTGEKKMFSSYEKNQNPQRAITFGDGNQGVTVFRRSDDSIAFKGVLEGQLYLVDFDRAKLDTCLIANTNMGWLWHRRLAHVGMKNLHKLLKGEHILGLTNVHFEKDRICSACQAGKQVGAHHPHKNIMTTDRPLELLHMDLFGPIAYISIGGKTLKGFLRRAQNEFDLRIKKIRSDNGTEFKNSQIEGFLEEESIKHEFSSPYTPQQNGVVERKNRTLLDMARTMLDEYKTSDRFWAEAVNTACYAINRLYLHRILKKTSYELLTGKKPNISYFRVFGSKCFILVKRGRKSKFAPKTVEGFLLGYDSNTRAYRVFNKSSGQVEVSCDVVFDETNGSQVEQVDLDEIGDEEAPCIALRNMSIGDVCPKESEEPPNAQDQPSSSTQASPPTQNEDEAQMDEGEDQANEPPQDDGNDQGGDANEQDKEDEEQRPPHPRVHQAIQQDHPVDTILGDIHKGXVEEALQDSDWVMAMQEELNNFTRKXGTKWVFRNKQDEHGVVTRNKARLVAKGYSQVEGLDFGETYAPVARLESIRILLAYATYHGFKLYQMDMKSAFLNGPIKEEVYVEQPPGFEDSEYPNHVYKLSKALYGLKQAPRAWYECLRDFLITNGFKVGKADPTLFTKTLENDLFVCQIYVDDIIFGSTNESTCEEFSRIMTQKFEMSMMGELKYFLGFQVKQLQEGTFLSQTKYTQDILSKFGMKDAKPIKTPMGTNGHLDLDEGGKSVDQKGRCQRFIYNYTKSTVRNTVDYSGQEKLFEKTGQARTVRALAVDRPQHQDDPRTEPMQKSKSVLRTVRRKSKDRLRPRADRPVGKEPKNPKVTGSEK

SEQ ID NO: 10359 - protein, 1614 aa, Zea mays
  Clone ID: TF_ZM4990.C2.o4.fg.pep
MSGDHAKKEMETGEKPTTSHGSTSSEESRTKRKEKKKISSNKGKEKKSSSHHKEKKEKSSSHKPRRSGDKQKRMRKVVYYETDTSSTSTSDSDAPSVTSKRQERKKFSKIPLHYPRISKHAPLLSVPLGKPPTFDGEDYARWSDLMRFHLTSLHKSIWDVVEFGAQVPSVGDKDYDEDEVAQIEHFNSQATTILLASLSREEYNKVQGLKSAKEVWDVLKTAHEGDELTKITKRETIEGELGRFRLRKGEEPQHMYNRLKTLVNQVRNLGSVKWDDHEMVKVILRSLIFLNPTQVQLIRGNTRYTKMTPEEVIGNFVSFECMIEGSRKINELDDPSTSEAQPVAFKATEEKKEEATPTRQPIDASKLDNEEMALVIKSFRQILKQRRGKDYKSHSKKVCYKCGKPGHFIAKCPISSDSDRGDDKKGRRKEKKRYYKKKGGDAHVCREWDSDESSSDSSDDEDAANIAVTKGLLFPNVGHRCLMAKDGKRKKVKSNSSTKYESSSDDNASDEEDNLRSLFANLNIAQKEKLNELVSAIHEKDDLLDSQEDLLIKENKKHVKVKKAYALEIEKCEKLSSELSTCREMIDNLRNENASLNTKVDSHVCNVSTSNPRDNNVDLLARIDELNASLASLRIENEKLLAKAKDFDVCNATISDLRTKNDMLHAKVVELKSCKPSTSIVEHVSICTRCRDINIDAIHDHMALIKQQNDHIAKLDAKIAKHNLENEKFKFARSMLYNGRRPGIKDGIGFQRGDNVKISAPPKRLSNFVKGKAPMPQDNEGYILYPAGYPESKIRRIHSRKSHSGPNHAFMGSSWILDSGCTNHMTGEKKMFSSYEKNQDPQRAITFGDGNQGVTVFRRSDDSIAFKGVLEGQLYLVDFERAELDTCLIAKTNMGWLWHRRLAHVGMKNLHKLLKGEHILGLTNVHFEKDRICSACQAGKQVGSHHPHKNIMTTDRPLELLHMDLFGPIAYISIGGSKYCLVIVDDYSRFTWVFFLQEKSQTQETLKGFLRRAQNEFSLRIKKIRSDNGTEFKNSQIEGFLEEEGIKHEFSSPYTPQQNGVVERKNRTLLDMARTMLDEYKTSDRFWAEAVNTACYAINRLYLHRILKKTSYELLTGKKPNISYFRVFGSKCFILVKRGRKSKFAPKTVEGFLLGYDSNTRAYRVFNKSSGQVEVSCDVVFDETNGSQVEQVDLDEIGIEEAPCIALRNMSIGDVCPKESEEPPNAQDQPSSSTQASPPTQNEDEAQVDEEEDQSNEPPQDDGIDQGGDANNQDKEDEEQRPPHPRVHQAIQRDHPVDTILGDIHKGVTTRSRVAHFCEHYSFVSSIEPHRIEEALLDSDWVVAMQEELNNFTRNEVWHLVPRPNQNVVGTKWVFRNKQDEHGVVTRNKARLVAKGYSQVEGLDFGETYAPVARLESIRILLAYATYHGFKLYQMDVKSAFLNGPIKEEVYVEQPPGFEDSEYPNHVYKLSKALYGLKQAPRAWYECLRDFLIANGFKVGKADPTLFTKTLENDLFVCQIYVDDIIFGSTNESTCEEFSRIMTQKFKMSMMGELKYFLGFQVKQLQEGTFISQTKYTQDILNKFGMKDAKPIKTPMGTNGHLDLDTGGHTVNDL

SEQ ID NO: 10360 - protein, 1681 aa, Zea mays
  Clone ID: TF_ZM4995.C3.o9.fg.pep
MSRELAKKEMKTDDKPATSHGKASSEESRNKKKGKEKKASSHKSHRSGDKKKKMRKVVYYETDTSSPSTSGSDAPSITSKRHERKKFSKIPLHYPRTSRHTQLLSVPLGKLPTFDGEDYARWSDLMKFHLTSLHKSIWNVVEFGAQVPSVGDEDYDEDEVAQIEHFNSQATTILLASLSREEYNKVQGLKSAKEVWDVLKTAHEGDELTKITKREMIEGELGRFRLLQGEEPQDMYNRLKTLVNQVRNLGSKKWDDHEMVKVILRSLIFLNPTQVQLIRGNPRYTLMTPEEVIVNFVSFEFMIKGSRKINELDGPSTSEAQPVAFKATEEKKEESTPSRQPIDASKLDNEEMALVIKSSRQILKQRRGKDYKPRSKKVCYKCGKPGHFIAKCPISSDRGDDKKGRRKEKRYYKKKGGGAHVCREWDSDESSSDSSDDEDAANIAVTKGLLFPNVGHKCLMAKDDKKKKVKSKSSTRYESSSDDYASDEEDNLRTLFANLNMQQKEKLNELISAIHEKDDLLDTQEDFLIKENKKHVKVKNAYALEVEKCEKLSSELSTCHETIDNLRNENANLLAKVESNVCNVSIPNDNIELLSKIEELNISLASLRIENKKLIARAKDFDVCNVTISDLRDKNDILCAKIVELNSCKPSTSTVEHTSICTRCRDVDIDAIHDHMVLIKQQNDHIAKLDAKIAEHEIENEKFKFARSMLYSGRRPGIKNGIGFQQGGNVKLNAPPKKLSNFVKGKAPMPQDNEGYILYPAGYPESKIRRIHSRKSHSGPNHAFMYKGETSSSRQPTRAKLPKRKTPSASNDHDISFKTFDASYVLTNKSGKVYASGGSSWVIDSGCTNHMTGEKKMFSSYEKNQDSQRAITFGDGNQGVTVFRRSDDSIAFKGVLEGQLYLVNFDRVELDTCLIAKTNMSWLWHRRLAHVGMKNLHKLLKGEHILGLTNVHFEKDRICSACQAGKQVGAHHPHKNIMTTDRPLELLHMDLFSPIAYISISGSKCYLVIVDDYSRFTWVFFLQEKSHTQETLKGFLRRAQNEFGLRIKKIRSDNGTEFKNSQIEGFLEEEGIKHEFSSPYTPQQNGAVERKNRTLLDMARTMLDEYKTSDRFWAEAVNTACYAINRLYLHRILKKTSYELFTGKKPNISYFRVFGSKCFILLKRGRKSKFAPKTVEGFLLGYDSNTRAYRVFNKSSGQVEVSCDVVFDETNGSQVEQVDLDEKGTCPLGMVCPKESEEPPNAQDQPSSSTQASPPTQNEDEAQVDEGEDQANEPPQDDDNDQGGDANYLDKEDEEARPPHPRVHQAIQRDHPVDTILGDIHKGVTTRSRVAHFCEHYSFVSSIEPHRIEEALQDLDWVVAMQEELNNFTRNEVWHLVPRPNQNVVGTKWVFRNKQDEHGVVTRNKARLVAKGYSQVEGLDFGETYAPVARLESIRILLAYATYHGFKLYQMDVKSAFLNGPIKEEVYVEQPPGFEDSEYPNHVYKLSKALYGLKQAPRAWYECLRDFLITNGFKVGKADPTLFTKTLENDLFVCQIYVDDIIFGSTNESTCEEFSRIMTQKFEMSMMGELKYFLGFQVKQLQEGTFLSQTKYTQDILSKFGIKDAKPIKTPMGTNGHLDLDEGGKPVDQKKEHIGDLPVLRKILGVLGFKEAKFRSSFNRRSRVYCRRILLRAIALDEANP

SEQ ID NO: 10361 - protein, 587 aa, Zea mays
  Clone ID: TF_ZM5003.C1.o1.fg.pep
METGDKPTTSHGKASSEESRKKGKGKEKKASSHKSHQSGDKKKKMRKVVYYETDTSSPSTSGSDAPSVTSKRHERKKFRDEDYDEDEVAQIEHFNSQATTILLASLSREEYNKVQGLKSAKEVWDVLKTAHEGDELTKITKRETIEGELGRFRLRKGEETQDMYNRLKTLVNQVRNLGSKKWDDHEMVKVILRSLIFLNPTQVQLIRGNPRYTLMTPEEVIGNFVSFEYMIKGSKKINELDDPSTSEAQPVAFKATEEKKEESTSSRQPIDASKLDNEEMALVIKSFRQILKQRSGKDYKPRSKKVCYKCGKPGHFIAKCPISSVSDRGDDKKGRRKERKKYYKNKGGDTHVCREWDSDESSSDSSSKEDVANIAVTKGLLFPNVGHKCLMAKDGKKKKVYASGGSSWIIDSGCTNHMTGEKKMFSSYEKNQDPQRAITFGDGNQGVTVFRRSDDSVAFKGVLEGQLYLVDFDRAELDTCLIAKTNMGWLWHRRLAHVGMKNFHKLLKGEHILGLTNVHFEKDGICSACQAGKQVGAHHPHKNIMTTDRPLELLHMDLFGPIAYISIDERKISYPRDIKGILETGSK

SEQ ID NO: 10362 - protein, 1615 aa, Zea mays
  Clone ID: TF_ZM5004.C2.o7.fg.pep
MSGDHAKKEMETDEKPTTSNGSTSSEESRTKRREKKKSSSNKEKEKKSSSHHKEKKEKSSSHKPHRSGDKQKRMRKVVYYETDTSSTSTSGSDAPSVTSKRQERKKFSKIPLHYPRISKHAPLLSVPLGKPPTFDGEDYARWSDLMRFHLSSLHKSIWDVVEFGAQVPSVGDKDYDEDEVAQIEHFNSQATTILLASLSREEYNKVQGLKSAKEVWDVLKTAHEGDELTKITKRETIEGELGRFRLRKGEEPQHMYNRLKTLVNQVRNLGSIKWDDHEVVKVILRSLIFLNPTQVQLIRGSRKINELDDPTTSKAQPVAFKATEEKKEESTPSRQPIDASKLDNEEMALVIKSFRQILKQRRGKDYKSRSKKVCYKCGKPGHFIAKCPISSDSDRGDDKKGRRKEKKRYYKKKGGDAHVCREWDSDESSSDSSDDEDAANIAVTKGLLFPNVGHKCLMAKDGKRKKVKSNSSTKYESSSDDNASDEEDNLRSLFANLNIAQKEKLNELVSAIREKDDILDSQEDLLIKENKKHVKVKKAYALEIEKCEKLSSELSTCCEMIDNLKHENARLNAKNISLASLRVENENLIAKAKDFDVCKVTISDLRDKNDILHAKIVELNSCKPSTSTVEHTSICTRCRDVNIDAIHDHITLIKQQNDHIAKLDAKIAEHNLENEKFKFARSMLYSGRRPGIKDGIGFQRGDNVKLSAPPKRLSNFVKGKAPMPQDNEGYILYPAGYPESKIRRIHSRKSHSGPNHAFMYKGETSSSRQPTRAKLTKKTPSASNEHSLSFKTFDASYVLTNKSGKVYASGGSSWILDSGCTNHMTGEKKMFSSYEKNQDPQRAITFGDGNQGLVKGVTVFRRSDDSIAFKGVLEGQLYLVDFDRAELDTCLIAKTNMGWLWHRRLAHVGMKNLHKLLKGEHILGLTNVHFEKDREKSQTQETLKGFLRRAQNEFGLRIKKIRSDNGTEFKNSQIESFLEEEGIKHEFSSPYTPQQNGVVERKNRTLLDMARTMLDEYKTSDRFWAEAVNTACYAINRLYLHRILKKTSYELLTGKKPNISYFRVFGSKCFILVKRGRKSKFAPKTVEGFLLGYDSNTRAYRVFNKSTGLVEVSCDVVFDETNGSQVEQVDLDEIGIEEAPCIAIRNMSIVDVCPKEFEEPPNAQDQPSSSMQASPPTQNEEEAQVDEEEDQSNEPTQDDGIDQGGDANDQDKEDEEQRPPHPRVHQAIQRDHPIDTILGDIHKGVTTRSRVAHFCEHYSFVSSIEPHRVEEALQDSDWVVAMQEELNNFTRNEVWHLVPRPNQNVVGTKWVFRNKQDEHGVVTRNKARLVAKGYSQVEGLDFGETYAPVARLESIRILLAYATYHGFKLYQMDVKSAFLNGPIKEEVYVEQPPGFEDSEYPNHVYKLSKALYGLKQAPRAWYECLRDFLIANGFKVGKADPTLFTKTLKNDLFVCQIYVDDIIFGSTNESTCEEFSRIMTQKFEMSMMGEFKYFLGFQVKQLQEGTFISQTKYTQDILNKFGMKDAKPIKTPMGTNGHLDLDTGGKSVDQKSISNQVIGVLKGNWSLRRRQRLPLRNSSFADASSLSPFLGEKSMSIKEKDFVFGGQSKSPWQKN

SEQ ID NO: 10363 - protein, 1490 aa, Zea mays
  Clone ID: TF_ZM5010.C1.o3.fg.pep
MSGDHAKKEMETGEKPTTSHGSTSSEESRTKRKEKKKSSSNKGKEKKSSSHHKEKKEKSSSHKSHRKGDKHKRMRKVVYYETDTSSTSTSDSDAPSVTSKRQERKKFSKIPLHYPRISKHAPLLSVPLGKPPTFDGEDYARWSDLMRFHLTSLHKSIWDVVEFGAQVPSVGDEDYDEDEVAQIEHFNSQATTILLASLSREEYNKVQGLKSAKEVWDVLKTAHEGDELTKITKRETIEGELGRFRLRKGEEPQHMYNRLKTLVNQVRNLGSKKWDDHEMVKVILRSLIFLNPTQVQLIRGNPRYTKMTPEEVIGNSVSFECMIEGSRKINELDEPTTSEAQPVAFKATKEKKEESTPSRQPIDASKLDNEEMALVIKSFRQILKQWKGKDYKSRSKKVCYKCGKPGHFIAKCPISSDSDRGDDKKGRRKEKKKYYKKKGGDAHVCREWDSDESSSDSSDDEDAANIAVTKGLLFPNVGHKCLMAKDGKRKKVKSNSSTKYESSSDDNASDEEDNLCTLFVNLNMQQKEKLNELISAIHEKDDLLDSQEDFLIKENKKHVKVKNAYALEVEKCQKLSIELSTCHETIDNLRNENANLLAKVDSHVCNVSIPNPRDNNDDLLARIEELNISLASLRLENENLIAKAKDFDVCKITISDLRDKNDILHAKIVELNSCKPSTSTVEHTSICTRCRDVNIDAIHDHMTLIKQQNDHIAKLDAKIAEHNLENENFKFARSMLYNGRRPGIKDGIGFQRGDNVKLSAPPKRLSNFVKGKAPMPQDNEGYILYPAGYPEDKIRRIHSRKSHSGPNHAFMYKGETSSSRQPTRAKLPRKKTPSASNDHDISFKTFDASYVLTNKSGKVYASGGSSWILDSGCTNHMTGEKKMFSSYEKNQDPQRAITFGDGNQGVTVFRRSDDSIAFKGVLEGQLYLEKSQTQETLKGFLRRAQNEFGLRIKKIRSDNGTEFKNSQIEGFLEEEGIKHEFSSPYTPQQNGVVERKNRTLLDMARTMLDEYKTSDRFWAEAVNTACYAINRLYLHRILKKTSYELLTEQVDLDEIGEEEAPCIALRNMSIGDVCPKESEEPPNAQDQPSSSTQASPPTQNEDEAQVDEVEDQANEPPQDDDNDQGGDANDQDKEDEEPRPPHPRVHQAIQRDHPVDTILGDIHKGVTTRSRVAHFCEHYSFVSSIEPHRVEEALQDSDWVVAMQEELNNFTRNEQDEHGVVTRNKARLVAKGYSQVEGLDFGETYAPVARLESIRILLAYATYHGFKLYQMDVKSAFLNGPIKEEVYVEQPPGFEDSEYPNHVYKLSKALYGLKQALRAWYECLRDFLIANGFKVGKADPTLFTKTLENDLFVCQIYVDDIIFGSTNESTCEEFSRIMAQKFEMSMMGELKYFLGFQVKQLQEGTFISQTKYTQDILNKFGMKDAKPIKTPMGTTGIHLIPVGQKPTGISIYRRELLNSRRFRAYSRRFSAARRPLSGIRLSPSAADGNY

SEQ ID NO: 10364 - protein, 1731 aa, Zea mays
  Clone ID: TF_ZM5012.C1.o12.fg.pep
MSGDHAKKEMDTGDKPATSLEKASSGESRNKGKGKEKKPSSHKLHRSGDKKKKMRKVVYYETDTSSPSTSGSGAPSITSKRHERKKFSKIPLHYPRTSRHTPLLSVPLGKPLTFDGEDYARWSDLMKFHLTSLHKSIWNVVEFGAQVPSIGDEDYDEDEVAQIEHFNSQATTILLASLSREEYNKVQGLKSAKEVWDVLKTAHEGDELTKITKRETIEGELGRFRLRKGEEPQDMYNRLKTLVNQVCNLGSKKWDDHEMIKVILRSLIFLNPTQVQLIRGNPRYTLMTLEEVIRNFVSFEYMIKGSKKINELDDPSTSEAQPVAFKATEEKKEESTLSRQPIDASKLDNEEMALVIKSFRQILKQRRGKDYKPRSKKVCYKCGKPGHFIAKCPISSDSDRGDDKKGRRKEKKKYYKKKGGDAHVCREWDSDESSSDSSDDEDAANIAVTKGLLFPNVGHKCLMAKDGKNKKVKSKSSTRYESSSDDNASDEEDNLLTLFANLNMQQKEKLNELISAIHEKDDLLDTQEDFLIKENKKHVKVKNAYALEVEKCEKLSSELSTCHETIDNLRNENDNLYDNLLAKVDLNGCDASIPNLRNDNDNLLTKIEELNITLGSLRNENKNLLAKAKELDVCNASISDLRSKNDILHAKVVELKSCKPSTSTVQHTTICTRCRDVDINAIHDHMTLIKQQNDHIAKLDAKIAEHDLENEKFKFARSMLYRGRRSGIKDGIGFQQGGNVKLNAPPKKLSNFVKGKAPMPQDNEGYILYPVGYPESKIRRIHSRKSHSGPNHAFMYKGETSSSRQPTRAKFPKKKTPSASNDHDISFKTFDASYVLTSKSGKVVAKYVGGKHKGPKTCVWVYASGGSSWIIDSGCTNHMTGEKKMFSSYEKNQDPQRAITFGDGNQGVTVFRRSDDSVAFKGVLEGQLYLVDFDRAKLDTCLIAKTNMGWLWHRRLAHVGMKNLHKILKGEHILGLTNVHFEKDRICSACQAGKQVGAHHPHKNIMTTDRPLELLHMDLFGPIAYISIGGSKYYLVIVDDYSRFTWVFFLQEKSHTQETLKGFLRRAQNEFGLRIKKIRSDNGTEFKNSQIEGFLEEEGIKHEFSSPYTPQQNGVVERKNRTLLDMARTMLDEYKTSDRFWAEAVNTACYAINRLVFGSKCFILVKRGRKSKFAPKTVEGFLLGYGSNTRAYRVFNKSSGQVQVSCDIVFDEANGSQVEQVDLDEIGDEEAPCIALRNMSIGDVCPKEFEEPPNAQDQPSSSTQASPPTQNEDEAQVDEGQDQEDEPPQDDGNDQGGDANDQDKEDEEPRLPHPRVHQAIQRDHPVDTILGDIHKGVTTISRVAHFCEHYYFVSSIEPHRVEEALQDSDWVVAMQEELNNFTRNEQDEHGVVTRNKARLVAKGYSQVEGLDFGETYAPVARLESIRILLAYATYHGFKLYQMDVKSAFLNGPIKEEVYVEQPPGFEDSEYPNHVYKLSKALYGLKQAPRAWYECLRDFLVDNGFKVGKADPTLFTKTLENDLFMSMMGELKYFLGFQVKQLQEGTFLSQTKYTQDILSKFGMKDAKPIKTPMGTNGHLDLDTEGCKINRKSTSGTYQFLGRSLVSWASKKQNSIALSTAEAEYIAAGHGCVQLLWMRQTLRDYGYKLTKVPLLCDNESAIRMADNPVEHSRTKHIAIRYHFLRDHQQKGDIEIAYINTKDQLADIFTKPLDEQTFNKLRHELNILDSRNFF

SEQ ID NO: 10365 - protein, 917 aa, Zea mays
  Clone ID: TF_ZM5029.C1.o1.fg.pep
MAMMGSTSEKLYLCQVPNFGFEMIKLRPGLPKVHWTRTTVGGPNDLGGSVTAGIGAKPISSDIIKHFKKNFQYLSKKISFILTLSLSGSTHLVIPDMPHTRKTAHKSTGPIGVPRHQLAPRHEGSNNGNNDPIRDLEAQVEQLRTELHHQNRVWAEDSQCIAELSAEVGRLRYSERDSAIDWAINSRSITWHREAKARARVDELSTTLCNLQVYCNTLHEKVHVLYGRLHSDVPADPIAMGARPSGTAGEGPDAELDLFKPPPSTNLADERCHQGLVRMTVRVLPVAGKILQIHHLYHQRWPRLSLPWLTRLSIIPAFYARWRVTNSSSKAEGLLHRDRVKPHTWTSLKRVPHPLFVKAEDPLEADEWIRVIEQKFGLIRCTETQKSLFAAQQLRGPASTWWGNFVAIQQAGHQVTWDEFKLAFREHYIPEGVLHMKQEEFIRLKQAGDTVMQYLNKFNHLSQYAIDQVNTDLKKKNCFMRGLNNRLQRKMVTCLDLTYSRAVTTALAVEAKNTGQGKSKGFGGDRSNQRPKKRTSSSTGCFNCGKSGHFIKDCPYPRQNKSNNQQNSGSSNQGKGNMANNSAGKNVKKTGRIYYTQVATTPEGEPIRVRPKDIPKTAFTTRYGLFKYLVMSFGLTNAPAHLTYLMNSVFMPELDKFVVFIDDILIYSRNEEEHAKHLRIVLTRLREHQLYAKFSKCAFWLEEIQFLGHVLSANGIAVDPSKVQDILEWKSPTIVHQVRSFLGLAGYYRRFIPDFSKIVKPITSLLKNDIKFNWSSKCNEAFEQLKLELNMRQRRWLELIKDYELEIHYHPGKANVVADALSRKASCHCLTVKTSDTTLCQEMEKLNLGMIQHGTLIQLKLESILLQRIIDAQRSDKGMKHIHEKIEADKTNCFRRDNQGIVWFNNRIVVPKDDEVH

SEQ ID NO: 10366 - protein, 752 aa, Zea mays
  Clone ID: TF_ZM5029.C3.o7.fg.pep
MEQFIAAQMQILQGITAAIQQIQQNQQNQQHQQQQQYAPPARDKHRDFMSHHSPTFSHAVDPLDADDWLKVIGKKLDITQCNDREKVLYASGRLEGAASDWWDAFTVAHPNVDTITWQEFQENFRAHHIPSGIMKLKKKEFLSLTQGSMSVSEYRDRFTQLSRYAPEEVDTDEKRQQRFLEGLIGPLNYQLQSHTFPNFQTLLNKAIGLESKRKELSDHKRKFQGQSSRNTWPNNAQGSQFRSGNQGGNNYQVQRSGQQGQGNNQNQNHQRSNSKTNQRSGGSSQNRQGGASTTQARNNAHVQPNGCFKCGELGHYANNCPRRNQQKPQKSNNQRNDQNTPARGSAQNKTPQNQSRGRVNHVTAESVPGDADIVYGMFLVNSIPASVLFDSGASHSFITESFVEKHIIPKYPLKKILHISSPGGDMKATHSCPHVNIKIQGIDFSVNPVVLGSNGIDVILGCNWLKSCDGVIQCANGTIMLTSPQGERIQVNIDKSTDAKGKIVINHLEEKPLENIKVVCEYPDVFLEELPVLFVNKKDGSRRMCVHYRSLNEVTIKNKYPLPRIEDLFDQMKGAKIFSKIDLRSGYHQLKIRAEDVPKTAFTTRYGLYEFLVMSFGLTNAPAYFMNLMNKVFMEYLDQFVVVFIDDILIYSPNEETHEDHLRLVLQKLRNNQLYAKFSKCEFWLKEVAFLGHIVTDGGIKVEPGKISEILDWKQPKDASKIRSFLGLAGYYRRFIEGFSKLVKPLTSLLEK

SEQ ID NO: 10367 - protein, 743 aa, Zea mays
  Clone ID: TF_ZM5037.C4.o1.fg.pep
MSGDHAKKEMETGEKPTTSYGSTSSEESRTKRREKKKSSSNKGKEKKSSSHHKEKKEKSSSHKPHRKGDKHKRMRKVVYYETDTSSTSTSDSDAPSVTSKRQERKKYSKIPLRYPRISKHTPLLSVPLGKPPTFDGEDYARWSDLMRFHLISLHKSIWDVVEFGAQVPSVGDENYDEDEVAQIEHFNSQATTILLASLSKEEYNKVQGLKNAKEIWDVLKTAHEGDELTKITKRETIEGELGRFRLQKGEEPQHMYNRLKTLVNQVRNLGSKKWDDHKVVNVILRSLIFLNPTQVQLIRGNPRYTKMTPEEVIGHFVSFECMIEGSRKINELGDPSEAQPVAFKATEEKKEESTPSRQPIDASKLDNEEMALVIKSFRQILKQRRGKDYKSRSKKVCYKCGKPGHFIAKCPISSDSDRGDDKKGRRKEKKRYYKKKGGDAHVCREWDSDESSSDSSDDEDAANIAVTKGLLFPNVGHKCLMAKDGKKKKVKSNSSTKYESSSDDNASDEEDNLRSLFANLNIAQKEKLNELVSAIHEKDDLLDSQEDCLIKENKKHVKVKKAYALEVEKCEKLSSELSTCREMINNLRNENAILNAKVDSHVCNVSIPNLRDDNIDLLAKIDELNASLASLRLENENLIAKAKDFNVCNATISDLRTKNEMLHAKVVELKSCKPSTSNLEHISICTRCRDIDVDAIHDHLALIKKQNDHIAQLNAKISEHDLVNEKFKFARSERELGLHLVPK

SEQ ID NO: 10368 - protein, 1639 aa, Zea mays
  Clone ID: TF_ZM5055.C5.o1.fg.pep
MSGEHAKKEMETGDKPATSHGKASSEESRKKGKGKEKKASSHKLHRSGDKKKKMRKVVYYETDTSSPSTSDSDAPSITSKRHERKKFSKIPLHYPRTSRHTPLLSVPLGKPPTFDGEDYARWSDLMKFHLTSLHKSIWNVVEFGAQVPSVGDVDYDEDEVAQIEHFNSQATTILLAFLSREEYNKVQGLKSAKEVWDVLKTAHEGDELTKITKRETIEGELGRFRLRQGEEPQDMYNQLKTLVNQVRNLGSKKWDDHEVVKVILRSLIFLNPTQVQLIRGNPRYTLMTPEEVIGNFVSFEFMIKGSRKINELDGPSTSEAQPVAFKATEEKKEESTPSRTPIDASKLDNEEMALVIKSFRQILKQRRGKDYKPRSKKVCYKCGKPGHFIAKCPISSDSDRGDDKKGRRKEKRYYKKKGGDAHVCREWDSDESSSDSSDDEDATNIAVTKGLLFPNVGHKCLMAKDGKKKKVKSKSSTRYESSSDDNASDEEDNLRTLFANLNMQQKEKLNELISAIHEKDDLLDSQEDFLIKENKKHVKVKNAYALEVEKYEKISSELSTCHETIDNLRNENSNLLAKVDSIACNVSIPNLRNDNDDLLAKIEELNMSLASLRIENEKLLAKAKELDVCNATISDLRSRNDILHAKVVELKSCKPSTSTVEHTTICTRCRDVDIDAIHDHMVLIKQQNDHIAKLDAKIAEHELENEKFKFARSMLYSGRRPGIKDGIGFQKGDNVKLNAPPKKLSNFVKGKAPMSQDNEGYILYPAGYPESKIRRIHSRKSHSGPNHAFMYKGKTSSSRQPTRAKLPKKKTPSASNDHDISFKTFDASYVLTNKSGKVYASGGSSWIIDSGCTNHMTGEKKMFSSYEKNQDPQRAITFEDGNQGVTVFRRSDDSIAFKGVLEGQLYLVDFDRAELDTCLIAKTNMGWLWHRRLAHIGMKNLHKLLKGEHILGLTNVHFEKDRISSACQAGKQVGAHHPHKNIMTTDRPLELLHMDLFGPIAYISIGGSKYCLVIVDDYSCFTWVFFLQEKSHTQETLKGFLRRAQNEFGLRIKKIRSDNGTEFKNSQIEGFLEEEGIKHEFSSPYTPQQNGVVERKNRTLLDMARTMLDEYKTSDRFWAEAVNTACYAINWLYLHRILKKTSYKLLIGKKPNISYFRVFGSKCFILVKRGRKSKFAPKTVEGFLLGYDSNTRAYRVFNKSTGQVEVSCDVVFDETNGSQVEQVDLDEIGDEEAPYIALRNMSIRDVCPKESEEPPNAQDQPSSSTQASPPTQNEDEAQVDEGQDQEDEPPQDDGNDQGGDANDQDKEDEEQRPPHPRVHQAIQRDHPVDTILGDIHKGVTTRSRTKWVFRNKQDEHGVVIRNKARLVATGYSQVKGLDFGETYAPVARLESIRILLAYATYHGFKLYQMDVKSAFINGPIKEEVYVEQPPDFEDSEYPNHVYKLSKALYGLKQAPRAWYECLRDFLITNGFKVGKADPTLFTKTLENDLFVCQIYVDDIIFGSTNESTCEEFSRIMTQKFEMSMMGELKYFLGFQVKQLQEGTFLSQTKYTQDILSKFGMKDAKPIKTPMGTNGHLDLDEGGKSVDQKKEHIGDLPVLGKILGVLGFKEAKFRSSFYRRSRVHCRRPLLRATTLDEANP

SEQ ID NO: 10369 - protein, 592 aa, Zea mays
  Clone ID: TF_ZM5105.C5.o1.fg.pep
MSGDHSKKEMVTGEKPATSHGKAPSGESGNKMKGFPSHNKSHWSGEKKKKMKKVVYYETDSLSPSTSGSDAPSVTSKHHERKKFRDEYNDADEVAQIRHFNSQATTILLTSLSREEYNKVQGLKSAKEIWDVLKTTHEGDEVTKITKRETIKGELGRFMLNQGEEPQAMYNRLKILVNQVRNLGSTKWDDLEMVKEVIGKFVSFELMIKGSKQIIEQGTTSTPEVQPVAFKATEEKKEESTSSRLPIDASKLDNEEMTLIIKSFRQILKQRKGKDYKPRSKKVCYKCGKPGHFIAKCPISSDSDRGDDKKGKRREKKRYYKKKGGDAHVCRECDSNERSTDSSSDEDAANLAINKGLLFPNVGHKCLMAKDGKKKKVKSRASTKYATSSDEASSSDDEDDLLTLFANLNMQEKEKLNEWISDIHEKDELLDSQEDFVIKENKKHVKVKNAYVQEVEKCEKLTSELSICHDTISNLRNENAKLIAKVAKLNVCDDSLVNLKNDNASLISKIDKLNKSLSSLKIENDNLIVKAKDLNVCNDSITNLRNENAMLHAKIDELNACKPSTSNVSHVSICTRCRDINVDAIVTPGFGR

SEQ ID NO: 10370 - protein, 1644 aa, Zea mays
  Clone ID: TF_ZM5107.C2.o4.fg.pep
MSGDHAKKEMETGEKPTTSHGSTSSEESRTKRREKKKSSSNKGKEKKSSSHKPHRSEDKPKRMRKVVYYETDTSSTSTSGSDAPSVTSKRQGRKKFSKIPLHYSRISKHAPLLSVPLGKPPTFDGEDYARWSDLMRFHLTSLHKSIWDVVEFGAQVPSIGDKDYDEDEVAQIKHFNSQATTILLASLSREEYNKVQGLKSAKEVWDVLKTAHEGDELTKITKRETIEGELGRFRLRKGEEPQHMYNRLKTLVNQVRNLGSVKWDDHEVVKVILRSLIFLNPTQVQLIRGNPRYTKMTPEEVIGHFVSFECMIEGSRKINELDDPSTSEAQPVAFKATEEKKEESTPSRQPIDASKLDNEEMTLVIKSFRQILKQRRGKDYKSRSKKVCYKCGKPGHFIAKCPISSDSDRGDDKKGRRKEKKRYYKKKGGDAHICREWDSEESSSDSSDDEDATNIAVTKGLLFPNVGHKCLMAKDGKRKKVKSRSSTKYETSSDENASEEEDNLRTLFANLNMEQKEKLNELTSAIHEKDDLLDSQEDCLIKENKKHVKVKNAYALEVEKCQKLSSELSTCHEMIDNLKHENASLNAKVDSHVCNVSIPNPRDNNDDLFARIEELNISLTSLRVENENLIAKAKELDVCNATISNLRDKNDILHAKIVELNSCKTSTSTVEHVSICTRCRDVNIDAIHDHMALIKQQNDHIAKLDAKIAEHNLENEKFKFARSMLYNGRRPGIKDGIGFQKGDNVKLNAPPKKLSNFVKGKAPMPQDNEGYILYPAGYPESKIRKIHSRKSHSGPNHAFMYKGETSSSRQPTRAKVPKKIPIASNDHDISFKTFDASYVLTNKSGKIVAKYVGGKHKGSKTCVWVPKVLVSNAKGPKTIWGYASGGSSWIIDSGCTNHMTGEKKMFSSYEKNQDPQRAITFGDGNQGVTVFRRSDDSIAFKGVLEGQLYLVDFDRAELDTCLIAKTNMGWLWHRRLAHVGMKNLHKLLKGEHVLGLTNVHFEKDRICSACQAGKQVGTHHPHKNIMTTNRPLELLHMDLFGPIAYISIGGSKYCLVIVDDYSRFTWVFFLQEKSQTQETLKGFLRRAQNEFGLRIKKIRSDNGTEFKNSQIEGFLEEEGIKHEFSSPYTPQQNGVVERKNRTLLDMARTMLDEYKTSDRFWAEAVNTACYAINRLYLHRILKKTSYELLTEQVDLDEIGEEEAPCIALRNMSIGDVCPKESEEPPNAQDQPSSSTQASPPTQNEDEAQVDEVEDQANEPPQDDGIDQGEDANEEDKEEEEQRPPHPRVHQAIQRDHPVDTILGDIHKGVTTRSRVAHFCEHYSFVSYNEPHKVEEALQDSDWVVAMQEELNNFTRNEVWHLVPRPNQNVVGTKWVFRNKQDEHGVVTRNKARLVAKGYSQVEGLDFGETYAPVARLESIRILLAYATYHGFKLYQMDVKSAFLNGPIKEEVYVEQPPGFEDSEYPNHVYKLSKALYGLKQAPRAWYECLRDFLIANGFKVGKADPTLFTKTLENDLFVCQIYVDDIIFGSTNESTCEEFSRIMTQKFEMSMMGELKYFLGFQVKQLQEGTFISQTKYTQDILSKFGMKDAKPIKTPMGTNGHLDLDTGGKSVDQKSISNQVIGILKGNLSLRQRQRLPLRNSSF

SEQ ID NO: 10371 - protein, 1122 aa, Zea mays
  Clone ID: TF_ZM5109.C6.o2.fg.pep
MSGDHAKKEMETGDKPTTSHGKASSEESRNKGKGKEKKCSSHKSHRSGDKKKKMRKVVKYETDTSSPSTSGSDAPSVSSKRHGRKKFSKIPLRYPRIPKHTPLLSVLLGKPPTFDGEDYARWSDLMRFHLTSLHKSIWDVVEFGVQVPSVGDEDYDEDEVAQIQHFNSQASTILLASLSREEYNKVQGLKGAKEIWDTLKTAHEGDEVTKITKRETIEGELGRFRLRQGEEPQDMYNRLKTLVNQVRNLGSKKWDDHEMVKVILRSLVFLNPTQVQLICGNPRYTLMTPEEVIGNFHNRSHSKATEEKKAESTPSRTPIDASKLDNEEMVLIIKSFRQILNQRRGKDYKPRSKKVCYKCGKPGHFIAKCPISSDSDRGDDKKGRRKEKKKYYKKKGGDAHVCREWDSNESSTDSSDEDAANIAVTKGLLFPNVGHKCLMAKDGKRKKDDLLDTQEDFLIKENKKRVKVKNAYALEVEKCENYLAKELDVCNVTISDLRDKNDILRAKIVELNSCKPSTSTTEHVTICTRCRDVDVNAIHDHLSMIKQQNDHIAKLDAKIAEHELENEKFKFARSVTVFRRSDDSIAFKGVLEGQLYLVDFDRVELDTCLIAKTNMGWLWHRRLAHVGMKNLHKLLKGEHILGLTNVHFEKDRICSACQAGKQVGAHHPHKNIMTTDRPLELLHMDLFGPIAYISIGGSKYCLVIVDDYSRFTWVFFMQEKSHTQDTLKEFLRRAQNEFGLRIKKIRSDNRTEFKNSQIEGFLEEEGIKHEFSSPYTPQQNGVVERKNRTLLDMARTMLDEYKTSDRFWAEAVNTACYAINRLYLHRILKKTSYELLTGKKPNISYFRVFGSKCFILVKRGRKSKFAPKTVEGFLLGYDSNIRSYRVFNKSSGQVEVSCDVVFDETNGSQVEQVDLDEIGDEEALCIALRNMSFGDVCPKESEEPPNAQDQPSSSTQASPPTQNEDEAQVDEGEVQENEPPQDDGNDQGGEANDQDKEDEEPRPPHPRVHQAIQQDHPIETILGDIHKGVTTRSWVAHFCEHYSFVSSIEPHRVEEALQDSDWMVAMQEELNNFTRNEVWHLVPRPNQNFVGTKWVFRNKQDEHGVVTRNKSRLVAKGYSQVE

SEQ ID NO: 10372 - protein, 492 aa, Zea mays
  Clone ID: TF_ZmC11815_3.pep
MGMIRKINLMGVPLQVEDILFNIDRKKQRKRGCLACGEKGHFRDSCPTMAKPKKERSRGKALTSVRTWDDSSSEDEPPRTRSHWSSSRSSRSSHKCLMARGNKSIPSSSDENSSDDEGLLENFETFANLNSELSTKIELLESSVPSNTADDDLIKKNEKLKAKLASSQNTIENLLEKMEILSIHNDELTTKLENIGSTPGASLVKILEIIKKDASTSCFDLMDDTNPCNQVLVENIVIETCSDEVAKENEQLRQEVARLGKALYDKKGKAKQIQLPQYNTTAGVNKPMEGETVICRLCHKEGHKSFQCKTMTGDKPRQKLKQKPSSKISNTYIKKVDKKTATPYLIKKKKNGKVIAIKANKQANKGKGAKRIWVPKEIISTMKSTKKVWIPKGNSQDARITWTKGLRKATPQKKTLRTSRKHRTVRRHTGLSGVHTPDCLMHQGTAAQQLVPGGTQREDHRTVRCEDRTVRCGKPAAPTVTCSDKATARRTG

SEQ ID NO: 10373 - protein, 598 aa, Zea mays
  Clone ID: TF_ZmC4916_353.pep
MDPKGKGMVVDNNEKESIFNEPKNDKSTDLGSSHKRKDGKKKKTRRIKEIVYYDSDESSSSQKDDDDDYRKTVNSNFSFDYSRIPHSSNSHLLSIPLGKPPHFDGEDYRFWSHKMRSHLFSLHPSIWEIVENGMKFDSSDSPMFINEQIHKNAQATTVLLASLCRDEYNKVSGLDNAKQIWDTLKISHEGNDITMLTKMELVEGELGRFAMIRGEEPTQTYNRLKTLINKIRSYGSTRWTDHDVVRLLLRSFTILDPHLVNNIRENPRYTKMSPEEVLGKFVSGRMMIKEARYVDDALNGPINEPQPLALKATRSKEALPSKVAQIEAAGLNDEEMALIIKRFKTVLKGHKGQPSKTKTKGKRSCFKCGKIGHFIANCTDNESDQEHGSKREKKKNYKKAKGEAHLGKEWDSDCSSSDSDNEGLAATAFNKSALFPNERHTCLMAREKKVCTRNSTYASSSEDESSDEDEVDYSCLFKGLDRTKVDKINELIDALNDKNMLLEKQEDLLYEEHDKFVEAQRSHALEVKRNEMLSCELSSCHETISKLRSINDDLNAKLEIASKSTSCVENVVTCTRCKDINLDAYSEHLACISKLNEE

SEQ ID NO: 10374 - protein, 849 aa, Zea mays
  Clone ID: TF_ZmC4916_433.pep
MELVEGELGRFAVIRGEEPTQTYNRLKTLINKIRSYGSTRWTDHDVVRLMLRSFTIIDPHLVNLIRENPRYTKMTPEEILGKFVSRRMMVKEARYVDDALNGPLPVYEPQPVALKATSSKEALQSKVAQVEAAGLNEDEMALIIKRFKTALKGRKEYPSKNKAKGKRSCFKCGKTGHFIDQCPDNDNDQEQEKYGKKKKKKNYKKAKGEAHLGKEWNFNCSSSDSDDEGLAASAFDKSSLFPNEHHMCLMAKEKKGCQHYGRHSSIKDGLGFRKETKNLTSQKAPVLNKEKGKAPMASSSQKCHAYIYDRKFSRNAHRSNDHDAFNSHAMFASSSTFVHDRSRPRRNHVVHHVPRKVYASGGSSWIIDSGCTNHMTGEKKMFTSYVKNKDSQDSIIFGDGNQGKVKGLGKIAITSEHSTSNVFLVESLGYNLLYDKSETQGTLKRFLRRAQNEFELKVKKIRSDNGSEFKNLQVEEYLEEEGIKHEFSAPYTPQQNGVVEKKNRTLIDMARTMLGEFKTPKRFWSEAMNTSCHAINRLYMHRLLKKTSYELLTSKKPNVFYFRVFGSKCYILVKKEQVDLDDIDEDDVPTAAMRTMAIGEVPREEARDQGGAQEEQVMEEEAPLAPPTQVRATIQRNHPVDQILGDISKGVTTRSRLANFCEHYSFVSSIEPFRVEEALQDLDWVLAMQEELNNFKRNEVWSLVPRPKLNVVGTKWVFGNKQDEHGVVTRNKARLVEKGYAQVAGLDFEETFAPVARLESIRILLAYAAHHSFRLFQMDVKSAFLNGSIKEEVYVDQPPGFEDDRYPDHVFKLSKALYGLKQAPRAWYECLRDFLIANAFKVGKADPTL

SEQ ID NO: 10375 - protein, 1552 aa, Zea mays
  unsure (1)..(1552): unsure at all Xaa locations
  Clone ID: TF_ZM3616.C2.o3.fg.pep
MSREHAKKEMETGNKPATSHGKASSEESRNKGKGKEKKPSSHKSHRSGDKKKKMRKVVYYETDTSSPSTSGSDAPSVTSKRHERKKFSKIPLHYPRTSRHTPLLSVPLGKPPTFDGEDYARWSDLMKYHLTSLNKSIWNVVEFGAQVPSVGDEDYDEDEVAQIEHFNSQATTILLASLSREEYNKVQGLKSAKEVWDVLKTAHEGELGRFHLRQGEEPQDMYNRLKTLVNQVRNLGSKKWDDHEVVKVILRSLIFLNPTQVQLIRGNPRYTLMTPEEVIGNFVSFEFMIKGSRKINELDGPSTSEAQPVAFKATKEKKEESTPSRTPIDAFKLDNEEMALVIKSFRQILKQRRGKDYKPRSKNVCYKCGKPGHFIAKCPISSDSDRGDDKKGRRKEKKRYYKKKGGDAHVCREWDSDESSSDSSSDEDAANIAITKALPXVGHKCLMAKDGKKKKXIHEKYDLLDSQEDFLIKENKRHVKVKNAYALEVEKCEKLSSELSTCHETIDNLRNENANLLAKVDSIACNVSIPNLRNDNNDLLAKIEELNISLASLRDENEKLLAKAKDFDVCNATISDLRSKNDILHAKVVELKSCKPSISTVEHTTICTRCRDVDINAIHDHMALIKQQNDHIAKLDAKIAEHEIENEKFKFARSMLYSGRRPGIKDDIGFQQGGNVKINAPPKKLSNFVKGKAPMPQDNEGYFLYPVGYPENKIRRIHSRKSHSGPNHSFMYKGETSSFRQPTRAKLPKKKTPSASNDHDISFKTFDASYVLTNKSGKVYASGGSSWIIDSGCTNHMTGEKKMFSSYEKNQDPQRAITFGDGNQGVTVFRRSDDLIAFKGVLEGQLYLVNFDRAELDTCLIAKTNMGWLWHRRLAHVVMKNLHKLLKGEHILGLTNVHFEKDRICSACQAGKQVGAHHPHKNIMTTDRPLEVLHMDLFGLIAYISIGGSKYCLVIVDDYSRFTWVFFLQEKTHTQETLKGFLRRAQNEFGLRIKKIRSDNGTEFKNSQIEGFLEEEGIKHEFSSPYTPQQNGVVERKNRTLLDMARTMLDEYKTSDRFWAEAVNTACYAINRLYLYRILKKTSYELLTGKRPNISYFRVFGSKCFILVKRGRKSKFPPKTVEGFLLGYDSNTRAYRVFNKSSGLVEVSCDVVFDETNGSQVEQVDLDEIGDEEAPCISLRNMSIGDVCPKEFEEPPNAQDQPSPSTQASPPTQNEVEAQVDEGEDQANEPPQDDGNDQGGDANDQDKEDDEEQRPPHPRVHQAIQRDHPVDTILGDIHKGVTTRSRVAHIYEHYSFVSSIEPHRVEEALQDSDWVVAMQEELNNFTRNEVWHLVPRPNQNVVGTKWVFHNKQDEHGVVTRNKARLVAKGYSQVEGLDFGETYAPVARLESIRILLAYATYHGFKLYQMDVKSSFLNGPIKEEVYVEQPPAFEDSEYPNHVYKLSKVLYGLKQAPRAWYECLRDFLITNGFKVGKADPTLFTKTLENDLFVCQIYVDDIIFGSTNESTCEEFSRIMTQKFEMSMMGELKYFLGFQVKQLQEGTFLSQTKFKTF

SEQ ID NO: 10376 - protein, 1696 aa, Zea mays
  Clone ID: TF_ZM4499.C1.o6.fg.pep
MSGEHAKKEMETGEKPTTSHGSTSSEEFRTKRREKKKSSSNKGKEKKSSSHHKEKKEKSSSHKPHRSGDKQKRMRKVVYYETDTSSTSTSGSDAPSVTSKRQERKKFSKIPLHYPRISKHAPLLSVPLGKPPTFDGEDYARWSDLMRFHLTSLHKSIWDVVEFGAQVPSVGDKDYDEDEVAQIEHFNSQATTILLASLSREEYNKVQGLKSAKEVWDVLKTAHEGDELTKITKRETIEGELGRFRLRKGEEPQHMYNRLKTLVNQVRNLGSTKWDDHEMVKVILRSLIFLNPTQVQLIRGNPRYTKMTPEEVIGNFVSFECMIEGSRKINELDDPSTSEAQPVAFKATEEKKEEATPSRQPIDASKLDNEEMALVIKSFRQILKQRRGKDHKSRSKNVCYKCGKPGHFIAKCPISSDSDRGDNKKERRKEKKRYYKKKGGDAHVCREWDSDESSSDSSDDEDAANIAVTKGLLFPNVGHKCLMAKDGKKKVKSKSSTKYESSSDDNTNDEEDNLRSLFANLNMQQKEKLNELISAIHEKDDLLDTQEDFLIKENKKHVKVKNAYALEIEKCQKLSSELSTCHETIDNLRNENANLLAKVDSHVCNVSIPNPRDNNDDLLARIEELNISLASLRIENEKLLAKAKDFDVCNTTISDLRTKNDILHAKVVELKSCKPSTSTIEHVSICTRCRDVNIDAIHDHMALIKQQNDHIAKLDAKIAEHNLENEKFKFARSMLYNGRRPGIKDGIGFQRGDNVKLSAPPKRLSNFVKGKAPMPQDNEGYILYPASYPESKIRRIHSRKSHSGPNHAFMYKGETSSSRQPTRAKLPRKKTPNASNDHDISFKTFDASYVLTNKSGKVVAKYVGGKHKGSKTCVWVPKVLVSNAKGPKTIWVYASGGSSWILDSGCTNHMTGEKKMFSSYEKNQDPQRAITFGDGNQGLVKGVTVFRRSDDSIAFKGVLEGQLYLVDFDRAELDTCLIAKTNMGWLWHHRLAHVGMKNLHKLLKGEHILGLTNEKSQTQETLKGFLRRAQNEFDLRIKKIRSDNGTEFKNSQIEGFLEEEGIKHEFSSPYTPQQNGVVERKNRTLLDMGRTMLDEYKTSDRFWAEAVNTACYAINRLYLHRILKKTSYELLTSKKPNISYFRVFGSKCFILVKRGRKSKFAPKTVEGFLLGYDSNTRAYRVFNKSTGLVEVSCDVVFDETNGSQVEQVDLDEIGDEEAPCIALRNMSIGDVGPKESEEPPNAQDQPSSSMQASPPTQNEEEAQVDEEEDQSNEPPQDDGIDQGGDANDQDKEDEEQRPPHPRVHQAIQRDHPVDTILGDIHKGVTTRSRVAHFCEHYSFVSSIEPHRVEEALQDSDWVVAMQEELNNFTRNEVWHLVPRPNQNVVGTKWVFRNKQDEHGVVTRNKARLVAKGYSQVEGLDFGETYAPVARLESIRILLAYATYHGFKLYQMDVKSAFLNGPIKEEVYVEQPPGFEDSEYPNHVYKLSKALYGLKQAPRAWYECLRDFLIANGFKVGKADPTLFTKTLEKDLFVCQIYVDDIIFGSTNESTCEEFSRIMTQKFEMSMMGELKYFLGFQVKQLQEGTFISQTKYTQDILNKFGMKDAKPIKTPMGTNGHLDLDTGGTSFVKLHTLLFYIPLIMSLSYAMTNVFFKSISNQVIGVLKGNWSLRRRQRLPLRNSSFADAPSHSPFLGEKA

SEQ ID NO: 10377 - protein, 1769 aa, Zea mays
  Clone ID: TF_ZM4893.C2.o5.fg.pep
MSGEHAKKEMETGEKPTTSHGSTSSEEFRTKRREKKKSSSNKGKEKKSSSHHKEKKEKSSSHKPHRSGDKQKRMRKVVYYETDTSSTSTSGSDAPSVTSKRQERKKFSKIPLHYPRISKHAPLLSVPLGKPPTFDGEDYARWSDLMRFHLTSLHKSIWDVVEFGAQVPSVGDKDYDEDEVAQIEHFNSQATTILLASLSREEYNKVQGLKSAKEVWDVLKTAHEGDELTKITKRETIEGELGRFRLRKGEEPQHMYNRLKTLVNQVRNLGSTKWDDHEMVKVILRSLIFLNPTQVQLIRGNPRYTKMTPEEVIGNFVSFECMIEGSRKINELDDPSTSEAQPVAFKATEEKKEEATPSRQPIDASKLDNEEMALVIKSFRQILKQRRGKDHKSRSKNVCYKCGKPGHFIAKCPISSDSDRGDNKKERRKEKKRYYKKKGGDAHVCREWDSDESSSDSSDDEDAANIAVTKGLLFPNVGHKCLMAKDGKKKVKSKSSTKYESSSDDNTNDEEDNLRSLFANLNMQQKEKLNELISAIHEKDDLLDTQEDFLIKENKKHVKVKNAYALEIEKCQKLSSELSTCHETIDNLRNENANLLAKVDSHVCNVSIPNPRDNNDDLLARIEELNISLASLRIENEKLLAKAKDFDVCNTTISDLRTKNDILHAKVVELKSCKPSTSTIEHVSICTRCRDVNIDAIHDHMALIKQQNDHIAKLDAKIAEHNLENEKFKFARSMLYNGRRPGIKDGIGFQRGDNVKLSAPPKRLSNFVKGKAPMPQDNEGYILYPASYPESKIRRIHSRKSHSGPNHAFMYKGETSSSRQPTRAKLPRKKTPNASNDHDISFKTFDASYVLTNKSGKVVAKYVGGKHKGSKTCVWVPKVLVSNAKGPKTIWVYASGGSSWILDSGCTNHMTGEKKMFSSYEKNQDPQRAITFGDGNQGLVKGVTVFRRSDDSIAFKGVLEGQLYLVDFDRAELDTCLIAKTNMGWLWHHRLAHVGMKNLHKLLKGEHILGLTNVHFEKDRICSACQAGKQVGSHHPHKNIMTTDRPLELLHMDLFGPIAYISIDGSKYCLVIVDDYSRFTWVFFLQEKSQTQETLKGFLRRAQNEFDLRIKKIRSDNGTEFKNSQIEGFLEEEGIKHEFSSPYTPQQNGVVERKNRTLLDMGRTMLDEYKTSDRFWAEAVNTACYAINRLYLHRILKKTSYELLTSKKPNISYFRVFGSKCFILVKRGRKSKFAPKTVEGFLLGYDSNTRAYRVFNKSTGLVEVSCDVVFDETNGSQVEQVDLDEIGDEEAPCIALRNMSIGDVGPKESEEPPNAQDQPSSSMQASPPTQNEEEAQVDEEEDQSNEPPQDDGIDQGGDANDQDKEDEEQRPPHPRVHQAIQRDHPVDTILGDIHKGVTTRSRVAHFCEHYSFVSSIEPHRVEEALQDSDWVVAMQEELNNFTRNEVWHLVPRPNQNVVGTKWVFRNKQDEHGVVTRNKARLVAKGYSQVEGLDFGETYAPVARLESIRILLAYATYHGFKLYQMDVKSAFLNGPIKEEVYVEQPPGFEDSEYPNHVYKLSKALYGLKQAPRAWYECLRDFLIANGFKVGKADPTLFTKTLEKDLFVCQIYVDDIIFGSTNESTCEEFSRIMTQKFEMSMMGELKYFLGFQVKQLQEGTFISQTKYTQDILNKFGMKDAKPIKTPMGTNGHLDLDTGGTSFVKLHTLLFYIPLIMSLSYAMTNVFFKSISNQVIGVLKGNWSLRRRQRLPLRNSSFADAPSHSPFLGEKA

SEQ ID NO: 10378 - protein, 1462 aa, Zea mays
  Clone ID: TF_ZM5043.C4.o1.fg.pep
MDPKGKGIVINDKEKESFVNEPKDDKSTDSGSGHKRKDGKKKKTRRIKEIVYYDDSDESSSSQKDDDNDHEKKKTVNSNFSFDYSRIPQSINANLLFIPLGKPPHFDGEDYEFWSHKMRSHLFSLHPSIWELVESGMKFDSSDSPLFINEQIHKNAQATTVLLASLCRDEYHKVSGLDNAKQIWDTLKISHEGNDVTMLTKMELVEGELGRFAMIRGEESTQTYNRLKTLINKIRSYGSTRWTDHDVVRLMLRSFTILDPHLVNNIRENPMYTKMSPEEILGKFRFKTALKGRKEHPNKNKTKGKRSCFKCGKIGHFIANCTDNDSDQEKKSGKWEKKKNYKKAKGEAHLGKEWDSDCSSSDSDNEGLAATAFNKSSLFPNEHHTCLMAREKKVSTRNTSTYASSSEDESSDDDEIDYSCLFKGLDRTKVDKINELIDALNDKNRLLEKQEDLLYEEHDKFVSAQNSLALEVKRNEMLSCELSTCHETISTLKGVNDDLNAKLVVANKSNSCVEHVMICNRCKDFNVDACSEHLACISKLNDEVASLNAQLKTSKSEFDKLKFARDAYTIGRHPSIKDGLGFKREVKNLTSHKAPISAKEKGKAPMARSAQKNHAFMYHDRRHSRNVYRSYDAFDSHAMVASSSSIMHDRNLARRNAINHMPRRNIVHVPRKTNSEPSTIYHALNASFAICRKDRKIIARKLGAKCKGDKTCIWVPKAICTNLVGPNMSWVYASGGSSWIIDSGCTNHMTGEKRMFSSYVKNKDPQDSIIFGDGNQGKVKGLGKIAISNEHSISNVFLVESLGYNLLSVSQLCNMGYNCLFTNVDVSVFRRSDGSLAFKGVLDDKLYLVDFVKEEAGLDACLIAKTSMGWLWHRRLAHVGMKNLHKLLKGEHVIGLANVTFEKDRPCAACQAGKQVGSSHHAKNVMTTSRPLELLHMDLFGPVAYLSIGGIKYGLVIVDDFSRFTWVFFLQDKSETQGTLKRFLRRAQNEFELKVKKIRSDNGSEFKNLQVEEYLEEEGIKHEFSAPYTPQQNGVVQRKNRTLIDMAKTMLGEFKTPERFWSEAVNTACHAINRVYLHCLLKKTSYELLTGNKPNVSYFRVFGSKCYILVKKGRNSKFAPKAVEGFLLGYDSNTKVYRVFNKSSGLVEVSSDVVFDETNGSPREQVVDLDDIDEEDVPTAAMRTMAIGDVRPQEQKEQDQPSSSTMVHPPTQDDEQVHQEEAYDQGGAQDVHVIEEEAQPAPPTQVRAMIQRDHPVDQILGDISKGVTTRSRLVNFCEHYSFVSSIEPFRVEEALLDPDWVLAMQEELNNFKRNEVWTLVPRPKQNVVGTKWVFRNKQDKHGVVTRNKARLVAKGYAQVAGLDFEETFAPVARLESIRILLAYAAHHSFRLFQMDVKSAFLNGPIKEEVYVEQPPGFEDERYPDHVCKLSKALYGLKQAPRAWYECLRDFLIANAFKVGKAD

SEQ ID NO: 10379 - protein, 1353 aa, Zea mays
  Clone ID: TF_ZmC119_1836.pep
STWWGNFVAVQPAGHRITWDEFNLAFSEHYVPEGVLHMKQEEFIRLKQGGDTVMQYLNKFNHLSQYAIDQVNTDLKKKNCFMRGLNDRLQRKMATCLDLTYSRAVSMALVVEAKNTGQGKLKRFGGDRSNQGPEKRTRLVIRPFNQNRSSPRPPSYPFKQPVFIHPTIAPTSTNQPSAPGARFPTLPSSSTGCFNCGKFGHFIKDCPYPRQNQSNNQQRSESSKGNAANSTAGKNTRKTGWIYYTQVATTPEGEPVMMGTFLVANHPAVILFDSGASHTFISKKFVEKHCIPYTESREGFTIHSLGGQIFTKEVAYQVPVTLAERDFPTNMIVLKGQDIDHKAILNTDLRTIWLSYGQEEILLSIPIAIPAGPIGRVYGAIIPEIQDIPVVCEFPDVFPEDLPGLPLKRDVEFVIELKPGMAPISRRSYRMPPNELAELKTQLQDLLEKGFIRPSSSHWGCPAIFVKKKDQTLRMCVDYRPLNEVTIKNKYPLPRIDILFGQLTGARVFSKIDLRSGYHQIRIRPKNIPKTAFTMRYGLFEYLVMSFGLTNAPAHFTYLMKSVFMPELDKFVVVFIDDILIYSKNEEEHAQHLRIVLTRLREHQLYAKFSKCVFWLEEIQFMGHVLSAKGIAVDPSKVKDILEWKPPTTIHQVRNFLGLAGYYHRFIPDFSKLVKPITSLLKSDIKFNWSSKCNEAFEQLKLLLTTAPVLAQPDIEKPFDVYCDASGSGLGCVLMQEGRVIAYASRQLRQHEEHYPTHDLELVAVVHGLKIWRHYLLGNVYHIYTDHKSLKYIFTQSELNMRQRRWLELIKDYELEIHYHPGKANVVADALSRKTSCHCLMAKTSKNTLCQEMEKLNLAIIQQGTLNQLKLESIILQRIIDAQRDNLGMKHIREKIKAGVAKCFKEDDQGVIWFKNRIVVPKTEELRQQILDEAHLSRYSIHPGSTKMYQDLKQHYWWTKMKIEIARYVAKCDTCRRVKAIHMKTAGPLQSLPIPTWKWEDISMDFIVGLPRTAKGFDSIWVIIDRLTKIAHFLPVKVKYPVITYAELYITRILSLHGVPKTIVSDRGPQFVSKFWEELHKFLGTKLLHSSAYHPQTSGQTERVNQILEDMLRACVLDFSLKWDECLPLAEFSYNNSYQESIKMAPFEALYGRRCRTPLNWSEPGERYFFRPDMVKEVEEKVQRIIHNMKKAQARQKSYADKRRMPLYFLEGDYVYLKVSPMKGVSRFGVKGKLAPRYIGPFLILERYGPVAYRLQLPETLSAVHNVFHVSQLKKCLRVPDRTVEITDVVLEPDLTYSEHPIRVLDQKDRVTRRKTLKFYKIQWNQHSEDEATWETQDFLNKNFPGFLASCKL

SEQ ID NO: 10380 - protein, 377 aa, Zea mays
  Clone ID: TF_ZmC143274_1.pep
MGVPAFYRWLADRYPLTVSDAEEEEPVELEPGAFVPVDLRRPNPNGLEFDNLYLDMNGIIHPCFHPEGRPAPTTYDEVFKSIFDYIDHLFGLIRPRKLLYMAIDGVAPRAKMNQQRSRRFRAAKDAADAAAEEERLRKEFEAEGRTLAQKEKSEAIDSNVITPGTEFMFVLSTALQYYIQLRLNHTLGWQSVKIILSDSNVPGEGEHKIMSYIRLQRNLPGFDPNTRHCLYGLDADLIMLALATHEVHFSILREVISMPGQHEKCFLCGQVGHLAAECRGPSQPDNSVELPPIHKKKYQFLNIWVLREYLAKDLEIIDAPFKINFERLIDDFVFMCFFVGNDFLPHMPTLEIREGAINLLMSIYRSEFTSMGCYLTD

SEQ ID NO: 10381 - protein, 1402 aa, Zea mays
  Clone ID: TF_ZmC951_336.pep
MSGDHAKKEMETGEKPTTSHGSVSLEESRTKRKEKKKDSSKRKEKKKDSSKGKEKSSSHKPHRSEDKKKRMRKVVYYETDSSSASTSGSDATSVTSKRQERKKYSKIPLRYPRISKHTPLLSVPLGKPPTFDGEDYARWSDLMRFHLTSLHKSIWDVVEFGAQVPSVGDEDYDEDEVAQIEHFNSQATTILLASLSREEYNKVQGLKSAKEVWDVLKTAHEGDELTKITKRETIEGELGRFRLRKGEEPQNMYNRLKTLVNQVRNLGSKKWDDHKMVKVILRSLIFLNPTQVQLIRGNPRYTLMTPEEVIGNFVSFECMIEGSRKINKLDDPSTSEAQPVAFKATEEKKEESTPSRQPIDASKLDNEEMALVIKSFRQILKQRRGKDYKSRSKEVCYKCGKPGHFIAKCPLSSDSDRDNDKKGKRREKKRYHKKRGGDAHVCREWDSDESSTDSSSDEDAANIAVTKGLLFPNVGHKFLMAKDGKKKKVKSKSSTTYESSSDDNASDEEDNLRTLFANLNMEQKEKLNELISAIHEKDDLLDSQEDFLIKENKKHVKVKNAYALEIEKCEKLSSELSTCHVTIYNLRNENANLLAKVDSHVCNVSITNSRNNDDDLLARIEELNISLASLRIEKEKLLAKAKDFDVCNATISDLRTKNDMLHAKVVELKSCKPSTSIVEHVSICTRSKLDAKIAEHYLENENFKFARSMLYNGRGPGIKDGIGFQRGDNVKLNAPPKRLSNFVKGKAPMPQDNESYILYPAGYPEDKIRRIHSRKSHSGPNHAFMYKGETSSSRQPTRAKLPKKKTPSASNEHSLSFKTFDASYVLTNKSGKVVAKFVGGKHKGSKTCVWVPKVLVSNAKGPKTVWVYASGGSSWIIDSGCTNHMTGEKKMFSSYEKNKDPQRAITFGDGNQDSLDYNLLSVSQLCKMGYNCLFTDIGVTIFRRSDDSIEFKGRKSKFAPKTVEGFLLGYDSNTRAYRVFNKSTGQVEVSCDVVFDETNGSQVEQVDLDEIGIEEAPCIALRNMSIGDVCPKEPEEPSNAQDQPSSSTQASPPTQNEDEAQVDEVEDQANELPQDDGNDQGGDANNQEKEDEEQRPPHPRVHQAIQRDHPVDTILGDIHKGVTTRSRVAHFCEHYSFVSSIEPHRVEEALQDSDWVVAMQEELNNFTRNEVWHLVPRPNQNVVGTKWVFRNKQDEHGVVTRNKARLVAKGYSQVEGLDFGETYAPVARLESIRILLAYATYHGFKLYQMDVKSAFLNGPIKEEVYVEQPPGFEDGEYPNHVYKLSKALYGLKQAPRACRIMTQNFEMSMMGELKYFLGFQVKQLQEGTFISQTKYTQDILNKFGMKDAKPIKTPMGTNEHLDLDTGGKSVDQKPRQGPTRQSNPVARWTAKLCQQPFPPENL

SEQ ID NO: 10382 - protein, 432 aa, Zea mays
  Clone ID: TF_ZM3617.C9.o1.fg.pep
MALIIKSFRQILKQRRGKDYKPRSKRVCYKCGKSGHFIAKCPMSNDSDRGNDKKGKKKEKKRYYKKKGGDTHMCREWDSDESSTDSSDDEDATNIAVNKGLLFPNVGHKCFMAKDGKKKKVQSRATKYTTSSDEGSSSEDEDDLLTLFANLNMQQKEKLNKLIGAIHEKDELLDSQEEFLIKENKKHVKVEKLNACNDSIVSLRNENASLIAKIDKLNESISSLRDENARLISKAKDLNVCNDSISSLRNENAILHAKIDELNVCEPSTSTVDHVSICTRCRDVNVDAINDHLALIKQQNDHIAQLTTKINEHEIENEKFKFARSMLYNGRCPGIKNDIGFQQGSNVKLNTPKKLSNFVKGEKRMFSSYEKNEDPQQAITFRDGNQDSLDYNLLSVSQLCKMGYNCLFSDVGVTVFRRSDDSIAFKGVLEGQ

SEQ ID NO: 10383 - protein, 121 aa, Zea mays
  Clone ID: TF_ZM4405.C3.o3.fg.pep
MALIIKSFRQILKQRRGEDYKSHSKMVCYKCGKPGHFIAKCPLSSDSDRGDDKKGKRREKKRYYKKKGGDAHVCREWDSNESSTDSSSDKDAANIVVNKGLLFPNVGHKCLMAKDGKKKKK

SEQ ID NO: 10384 - protein, 752 aa, Zea mays
  Clone ID: TF_ZM5034.C4.o1.fg.pep
MALIIKSFRQILKQRRGKDYKPRSKRVCYKCGKSGHFIAKCPMSNDSDRGNDKKGKKKEKKRYYKKKGGDTHMCREWDSDESSTDSSDDEDATNIAVNKGLLFPNVGHKCFMAKDGKKKKVQSRATKYTTSSDEGSSSEDEDDLLTLFANLNMQQKEKLNKLIGAIHEKDELLDSQEEFLIKENKKHVKVEKLNACNDSIVSLRNENASLIAKIDKLNESISSLRDENARLISKAKDLNVCNDSISSLRNENAILHAKIDELNVCEPSTSTVDHVSICTRCRDVNVDAINDHLALIKQQNDHIAQLTTKINEHEIENEKFKFARSMLYNGRCPGIKNDIGFQQGSNVKLNTPKKLSNFVKGEKRMFSSYEKNEDPQQAITFRDGNQDSLDYNLLSVSQLCKMGYNCLFSDVGVTVFRRSDDSIAFKGVLEGQVYLVDFDRAELDTCLIAKTNMGWLWHRRLAHVGMKNLHKLLKGEHILGITNVHFEKDKFSLRIKKIRSDNGTEFKNSQIEGFLEDEGIKHEFSSPYTPQQNGVVERKNRTLLDMARTMLDEYKTPDRFWAEAINTACYSINRLYLHRILKKTSYELLTGKKSNVSYFRVFGSKCFILVKRGRKSKFTPKAVEGFLLGYDSNTRAYRVFNKSTGLVEVSCDIVFDETNGSQVEQVDLDELYDEEAPCVALRNMSIGDVCPKESEEPPQAQDQPSSSNQASPPTQNEEHAQGDEEEDQEDEPPQEEVNDQGGDEDNQDKEDD

SEQ ID NO: 10385 - protein, 1370 aa, Zea mays
  Clone ID: TF_ZM4939.C1.o6.fg.pep
MLNIAQCTDREKVLYASGRLTGPAADWWDSYTAAHDAADTITWAEFSTQFRNYHIPAGMIKIKKKEFLSLKQGSMSVSEYRDKFIQLSRYAPEEVAEDERKQEHFIEGLNGPLQYALVAHTFPSFQRLLDKALAIEHKRVQLGDLKRKAISQGQGSSSVRPRYSSPQSTPTRPGGPRPVQQSPLRTPPPRQATPTGTPTKFSGQSPGTTCFKCGKNGHYANVCPQRMATTPVQNRQQTPGSGKGYSIAKVNQVSVDATPDGGDLVIGMFYVNAIPATILFDSGATHSFMSARYANTNEIPLLNMRKPMIVVTPKGPVEANQMTRRLTLTIMGREFGATAIILESSSIDLILGMSWLRKAKAVIACGRGTVELTTTKGERFQVNIAVTSSPMRAMFFIPKEFVGNNIRVVRDFPDVFPEELPGMPPEREVEFVIDLLPGTAPISKRPYRMSVEELKELKKQLTELQEAGYIRPSSSPWGAPVLFVQKKDESQRMCVDYRSLNDVTVKNKYPLPRIEDLFDQMRGARVFSKIDLRSGYHQMRIRPSDIPKTAFSTRYGLYEFTVMSFGLTNAPAYFMNLMNKVFMEYLDRFVVVFIDDILIYSKSDSDHEEHLRMVLQKLRDNQLYAKFSKCEFWIDEVPFLGHIISNGGISVDPAKVKEIMEWRVPTTVTEIRSFLGLAGYYRRFIEGFSKIAKPMTSLLEKGKEFKWDEKCQDSFDLLKKRLMSPPVLVMPDLQKGFDIYCDACGQGLGCVLMQEGHVIAYASRQLRKHELNYPTHDLELAAVVHALKIWRHYIMGTKCQVYTDHKSLKYIFTQKDLNLRQRRWLELIKDYDLEIHYHPGKANLVADALSRKEHVHSAIVAQLPDEIVEDFRRLNLGIVTHTEGVTIDVEPTLEQEIRKGQIGDAKIKEIKDLITEGRVPEFTEDEQGIVWFKDRMCVPDIKSLREIILKEAHDSDYSIHPGSTKMYQDLKRKYWWYGLKRDVAAHVAMCDVCQRVKAEHQRPAGLLHPLKIPEWKWEEIGMDFITGLPRTQKGYDAIWVIVDRLTKVAHFIPVKTTYKGSQLAELYMARIVCLHGVPKKIVSDRGSQFTSRFWRSFHENMSTKLNFSTAYHPQTDGQTERTNQVLEDMLRACALQHGGSWDKSLPYAEFSYNNSYQASLKMSPFEALYGRKCRTPLYWDQTGERQFFGPELIQEAEEQVRIIRENLRVAQTRQKSYADNRRRPLEFEEGDYVYLKVSPLRGMRRFKVKGKLSPRYIGPFLIFRRVGEMAYQLELPASLSDVHNVFHVSQLKKCLRVPEEQLPMEELSVQGDLTYTEYPIKILDTLTRVTRNKVIKMCKVQWSHHGEDEATWEREEELRVDFPHLFPRSS

SEQ ID NO: 10386 - protein, 397 aa, Zea mays
  Clone ID: TF_ZmC31816_33.pep
MRRWRSSAKFSTKSSSKGGGRTTSPAPRKFATSVVSPVILLLDVHYLVIVTGAMTRRERGRKRRDTTRRRAAMPMFAGSGTPTMSRGSAKREIETTTSHGKALSRASDAKGREESPPRVKSHQSGDKKKKMKKVVYYETDSSSPSTSGSDAPSVTSKRHERKKFSSKQIVNLEQGDTSTPEVQPVAFKAMEEKKEESTSSRLPIDASKLDNEEMTLIIKSFRQILKQKRGKDYKPRSKRVCYKCGKPGHFIAKYPMSSDSDSGDDKRGKRKEKKYYKKKGGDAHMCQEWDSDMSSTNSSSDGDAANIAVNKGLLFPNVGHKCFMAKNDKKKKVQARTTPKHTTSSDEGSSSDDEDDFLSLFANFNMQQKEKLNELIGVIHEKDELLDSQEEFLIKEK

SEQ ID NO: 10387 - protein, 1690 aa, Zea mays
  Clone ID: TF_ZmC951_280.pep
MSGDYAKKEMETGEKPTTSYKSTSSEESRTKRREKKKSSSNKGKEKKSSSHHKEKKEKSSSHKPHRKGDKHKRMRKVVYYETDTSSTSTSDSDAPSVTSKRQERKKYSKIPLRYPRISKHTPLLSVPLGKPPTFDGEDYARWSDLMRFHLISLHKSIWDVVEFGAQVPSVGDENYDEDEVAQIEHFNSQATTILLASLSREEYNKVQGLKSAKEIWDVLKTAHEGDELTKITKRETIEGELGRFRLHKGEEPQHMYNRLKTLVNQVRNLGSKKWDDHEVVNVILRSLIFLNPTQVQLIRGNPRYTKMTPEEVIGHFVSFECMIEGSRKINELGDSSEAQPVAFKATEEKKEESTPSRQPIDASKLDNEEMALVIKSFHQILKQRRGKDYKSRSKMVCYKCGKPGHFIAKCPISSDSDRGDDKKGRRKEKKRYYKNKGGDAHVCREWDSDESSSDSSDDEDAANIAVTKGLLFPNVGHKCLMAKDGKRKKVKSNSSTKYESSSDDNASDEENNLRSLFANLNIAQKEKLNELVSAIHEKDDLLDSQEDCLIKENKKHVKVKKAYALEVEKCEKLSSELSTCREIIDNLRSENASLNAKVDSHVCNVSIPNPRDNNDDLLARIKELNISLASLRVENEKLITKAKELDVCNVAISDLRTKNDMLHAKVVELKSCKPSTSIVEHVSICTRCRDIDVNAIHDHMALIKQQNDHIAKLDAKIAEHNLENEKFKFARSMLYNGRRPGIKDGIGFQRGDNVKISAPPKRLSNFVKGKAPMPQDNEGYILYPAGYPESKIRRIPSRKSHSGPNHAFMYKGETSSSRQPTHAKLPRKKTPNASNEHNISFKTFDASYVLTNKSGKVVAKFVGGKHKGSKTCVWVPKVLVSNAKGPKTVWVYASGGSSWILDSGCTNHMTGEKRMFSSYEKNQDPQRAITFGDGNQGVTVFRRSDDSIAFKGVLEGQLYLVDFDRAELDTCLIAKTNMGWLWHRRLAHVGMKNLHKLLKGEHILGLTNVHFEKDRICSACQAGKQVGVHHPHKNIMTTDRPLELLHMDLFGPIAYISIGGSKYCLVIVDDYSRFTWVFFLQEKSQTQETLKGFLRRAQNEFGLRIKKIRSDNGTEFKNSQIEGFLEEEGIKHEFSSPYTPQQNGIVERKNRTLLDMARTMLDEYKTPDRFWAEAVNTACYAINRLYLHRILKKTSYELLTGKKPNISYFRVFGSKCFILVKRGRKSKFAPKTVEGFLLGYDSNTRAYRVFNKSTGLVEVSCDVVFDETNGSQVEQVDLDEISEEQAPCIALRNMSIGDVCPKESEEPPTTQDQPSSSTLASPPTQNEDEAQVDEVEDQANEPPQDDGNDQGGDANDQEKEDEEEPRPPHPRVHQAIQRDHPVDTILGDIHKGVTTRSRVAHFCEHYSFVSSIEPHRIEEALQDSDWVVAMQEELNNFTRNEVWHLVSRPNQNVVGTKWVFRNKQDEHGVVTRNKARLVAKGYSQVEGLDFGETYAPVARLESIRILLAYATYHGFKLYQMDVKSAFLNGPIKEEVYVEQPPGFEDSEYPNHVYRLSKALYGLKQAQEHVGKADPTLFTKTLENDLFVCQIYVDDIIFGSTNESTCEEFSRIMTQKFEMSMMGELKYFLGFQVKQLQEGTFICQTKYTQDILTKFGMKDAKPIKTPMGTNGHLDLDTGDSKPTLRKLTLRP

SEQ ID NO: 10388 - protein, 1567 aa, Zea mays
  Clone ID: TF_ZM4452.C2.o1.fg.pep
MSGDHAKREIVTSGDKSASSGRTHSRESGHKHKEESSSSTKSQRRGDKKKMKKVVYYETDSLSPSTSGFESASVTSKRLERKNIWDIVEYGAQVPKVGDKDYDSDKADQIRHFNSQATTILLTSLCREEYNKVQGLKMGKEIWDVLKTAHEGDEVTKITKQETIEGELGRFILNQGEEPQAMYSRLKTLVNQVRNLKSTKWDDHEMVKVILRSLIFRNPTQVQLIRGDPRYKLMSPEEVIGKFVSFELMIKGSKHIVNLEQGGTFTPKVQPVAFKAIEEEKKEPMPSRIPIDASKLDNEEMALIIKSFRQILKQRRGKDYKPHSKRVCYKCGKLGHFIAKCPMSSDSDRGDDKKGNRKEKKRYYKNKGGDAHVCREWDSDMSSTDTSSDEDAANITVNKGLLFPNVGHKCFMAKDGKKKKVELLDSQEEFLIKENKKHVKVKNAYAQEIEKCENLTKELSICHDTISNLRTENVSLIAKVEKSNVCHDSIVNLKNDNARLIAKIDKLNESIAILKTENEKLISKAKDLNVCNVYISNLRNENVILHAKIDELNACKPSTSTVDHVTICTRCRDINVDAIHDHLASIKEQNDHIAQLTAKINEHEIENEKFKFARSMLYSGRRPGIKDGIGFQQGGNIKLNAPKRLSNFVKGKAPMAQDNEGYILYPAGYPEHKIRRIHARKPHNVSHHAFMYKNEASSSRQSTHVKLPKKKTPTASNEPNVSFKTFDASYVLTNKSGKVVAKYIGGKQKGSKTCVWVPKDYASGGSSWIIDSGCTNHMTGEKRMFSSYEKNEDPQRAITFGDGNQDLGVTVFRRSDDSVAFKGEKSQTQETLKGFLRRAQNEFGLRIKKIRSNNGMEFKNSQIEGFLEEEGIKHEFSSPYTPQQNGVVERKNRTLLDMARTMLDEYKTLDWFWAEAINTACYSINRLYLHRILKKTSYELLTGKKPNVSYFRVFGSKCFILVKRGRKSKFAPKVVEGFLLGYDSNTRAYRVFNKSTGLVEVSCDIVFDETNGSQVENMSIGDMYPKESEEPPQAQDQPSSYMQASPPTQDEDQAQDNEDEDQEDEPPQEEDNDQGGDDHDKDKEDDQEIQGQQPPHPRVHQAIQRDHPVNSILGNIHKGVTTRSRVAHFCEHYSFVSSIEPYRVEDVVRDSNWVLAMQEELNNFTRNEVWHLVPRPNQNVVGTKWVFRNKQDEHGVVTRNKARLVAKGYSQVEGLDFGETYAPIARLESIHILLAYATYHGFKLYQMDVKSAFLNGPIKEEVYVEQPPGFEDSEYPNHVYKLSKALYGLKQAPRAWYKCLRDFLITNGFKVGKANPTLFTKTIAKDLFVCQIYVDDIIFGSTNKSTCEEFSRIMIQKFEMSMMGELKCFLGFQVKQLQEDTFTSQTQYIQDILTKFGMKDAKPIKTPMGTNGHLDLDTGGCKIDRKSTSGTCQFLGRSLVSWASKKQNSVALSNAEAEYIVVGHCCAQLLWMRQTLRDYGYKLSKFPLLCDNESAIRMADNPVEHSHTKHIAIRYHFLRESPTKGGYRGAKGSTQTNKKIKVGVQKKGAKEFEENPGLVHQIVRCAT

SEQ ID NO: 10389 - protein, 981 aa, Zea mays
  Clone ID: TF_ZmC6115_1.pep
MKEAEIGQRHNLFQTRAKVQDKVVKVIIDGGSCHNLASREMVEKLDIKIGYKVKVSFKIGEYVDTVECDVAPMSVCHMLLGRPWQYDRYSQHCGRTNQYTLDLKGRKFVLKPMTPQQIMVEHLQKKTEISAASRGGEEQNKLSAIHNSDFEDVFPQETPAGLPPIRGIEHQIDLILGAALPNRPPYRTNPEETKEIQRQVQELLNKGFVRESLSPCVVPVILVPKKDGSWRMCVDCRAINNITVRYPIPQLDDMLDELSGSTFFTKIDLRSGYHQIRMKTGDEWKTAFKTKFGLYEWLVMPFGLTNAPSTFMRLMNHVLRTFIGKFVVVYFDDILIYSKSFDEHVKHIRQVLDERRKEKLFANLEKCSFCTDHVVFLSFVVSAKGIEVDESKVKAIKDWPAPTNVSQVRSFHGLAGFYRRFVRDFSTIASPLNELTKKCVEFKWGNSQEDAFQELKKRLTEAPVLILPDFTKTFEVECDASGIGIGGVLMQQGKPIAYFSEKLGGAQLNYSVYDKELYALVRALETWQHYLWPKEFVIHSDHEALKYLKGQAKLNRRHAKWVEFIETFPYIVKYKKGKDNVVADALSRRNVLLNQLEESHGGGLTGHFGQKKTYEMLSDHFYWPKMRRDVIRFVERCVTCHKAKFSKMAHFIPCNKSDNASHVANLFFREILRLHGVPKTIVSDRDVKFVSYFWKTMWAKLGTKLLFSTTCHPQTDGQTEVVNRTLSMLLRTMVKKNLKDWEECLPHVEFAYNRAVHSTTNLCTFEIVYGFKSIAPIDLLPLPLQERTNIEASKCAAYIKKIHEKTKEAIELKAVRKATSMNKHRKKVLFEPGDLVWIHLRKERFPEQRKSKLMPRGDGLFRVFAKINDNAYKIDLPPSYGVSNTFNVADLLPYTSEDTSESRTTPFHGEEDDTTTTLRNTLQPPRHTTSTQVPSTSRIRAKMLYSTSKDRIKYELDGFHYETQATDPSEVDIEVLREWAH

SEQ ID NO: 10390 - protein, 1126 aa, Zea mays
  Clone ID: TF_ZM4618.C1.o5.fg.pep
MSGGDGPPPVFYGDDFPYWKICMEAYLEAIDIGVYKNATQGFPEPRDPTNLVGEEFNYEKWNVKAKNTLFRGLCKDVFNRVRNHKNAHDLWMDICALHEGTRSEREERYHIAMRKLNSFEMLANENSNAIYSRLNILIEEVNGLGLTQISQPDVVRKILSVLPIDKYGHIVTVLHQMDISVTTPTQILGKINAHEMYMHINDKEESSSKIKDLALKANQERKGKAKVQIEEESSSDDDLDANITLMPKKNKFKGKKEDDIDDEKKEKRFFKRKDGKHKRFHKKKNGKAYIVGDWLTDIESSSGSSSSEEENDEKVAAIAGDFSSPPPSPSSTSHLCLMARGEWKVQNDIHITDDSDSDSDEEFASPSYDELADLLEEYNQIIRKSKAKCDKLKNENESLNAKYDIVMKANAKDKCDKLNEANRELKDRLVKIKEDYTKIKFDHDNLLVENELLSCNTHEAINPVVKIDVATSCDDLSQGEQTSLHDELTEKVEVLTLDNQKLKRYLTDATTRGKVAIENNDFNNELAVDNERLKNEVKKLKSENEHLATSVQKFNKGQYLQNELLMNTVMKNNNSGIGYNAFVQKKVTTQYKPKQTHRPIKCFECGKEGHFAHNCKSKPPTPLPKHSRPFAFNAHYVLRKVANGKVNYKTGGSHWVIDSGCTQHMTGNPRMFTSLDENVDGQDKITFGDNSKEKVQGLGKVAISNDLSISNVLLVAPLSFNLLSVGQLCDLGLQCLFTPIEVIVSKMDDESMVFKGFRYNNLYLVDFTSEDADLRTCLFTKASLGWLWHRRLAHVGMSTLKKVLKKDMVRGLKDVVFEKDKPCSACQAGKQVANTHLTKAFMPTSRPLELLHLDLFGPTNYKFAKKAQNEFDCKIKKIRTDNGKEFDNTNIHEYCDEIGIKHEVSATYTPQQNGVVERKNRTLFTLARTMIDEYNTPERFWAEAVNTACFASNRLFPHRLLAKTPYELLNGKKPDVSFRVFRCKCYIYKKRHHLGKFQRCCDIGFLLGYSLKSKAYRVFNHATGVVEETYDVEFDETNGSQGALENLDDVGDEPLREAMKNMPIGAIKPKEDEEEVQNIDMPSSSNVPQDDEKDERHANEDTFVSHEQARVLSHPGFRGTKTQART

SEQ ID NO: 10391 - protein, 1252 aa, Zea mays
  Clone ID: TF_ZM4900.C4.o1.fg.pep
MSGDHAKKMVIGGEKSATSHGKAPSNYNMWSDKMRHHLTSLHTSIWDVVEIGVQVPSPGDEDYDSDEVAQIRHFNSQATTILLASLSREEYNKVQGLKSAKEIWDVLKTAHEGDEVTKITKQETIEGELGRFRLRQGEEPQDMYNRLKTLVNQVRNLGSKKWDGHEMVKVILRSLVFLNPTQVQLIRGDPRYTLMSPEEVIGKFVSFELMIKGSKKIIEQDGPSTPEAQPVAFKATEEKKEESTSSRLPIDASKLDNEEMALIIKSFRQILKQRRGKDYKPRSKKVCYKCGKTGHFIAKCPLSSDSDRGDDKKGKRREKRRYYKKKGSDAHVCREWDSDESSSDEDAAHIAVTKGLLFPNVGHKCLMAKDGKRKKVKSRSFTKYASSSDEDHFSDEEDNLRILFANLNMQQKEKLNELISAIHEKDELLDSQEDFLIKENKKHVKVKDAYALEVEKCEKLSSELSKCHDIITNLRNKNASLIAKIDSNVCDNSISNLRDDNANLLARIEKLNDSLTSLRNENENENLITKAKDLDVCNVTISNLRSENDILHAKKMKKIKFARSILYSGRRPGIKDGIGFQRGDNVKVNAPPKRLSNFVKGKAPMAQDNEGYILYPVGYPEHKIRRIHSRKSHSGPNHAFMYKGETSSSRQSTRAKLPKRKTPIASNDSNISFKTFDASYVLTNKSGKVYAFGGSSWIIDSGCTNHMTGEKKMFSSYEKNQDPQRAITFGDGNQGVTVFRRSDDSIAFNGVLEGQLYLEKSHTQETLKGFLRQAQNEFGLRIKKIRSDNGTEFKNSQIEGFLEEKGIKHEFSSPYTPQQNGVVERKNRTLLDMARTMLDEYKTSDRFWAEAVNTACYAINRVFGSKCFILVKKGRKSKFAPKVVEGFLLGYDSNTRAYRVFNKSSGQVEVSCDIVFDETNDSQVEQVDLDEIGDEEAPCVALRNMSIGDVCPKESEEPPHAQDQPSSSMQASPPTQDEDEAQDNEGEDQEVEPPQEESNNQGGDAHDQDEEDEQAPRPPHPRVHQAIQQDHPVNTILGDIQKGVTTRSRVAHFCEHYSFVSSIEPHRVEEELQDSDWVVAMQEELNNFTRNEVCHLVPRPNQNVVGTKWVFRNKQDEHGVVTRNKARLVAKGDSQVKGLDFGETYAPVARLESIRILLAYATYHGFKLYQMDVKSAFLNGPIKEEVYVEQPPGFEDSEYPNYVYKLSKALYGLKQAPRAWYECLRDFLITNGFKVGKVDPTLFTKTLDNDLF

SEQ ID NO: 10392 - protein, 661 aa, Zea mays
  unsure (1)..(661): unsure at all Xaa locations
  Clone ID: TF_ZM4987.C1.o15.fg.pep
MVVNDKEKESFLNEPRDDKPTDSGSSHKKRDGKKKRRIKKIIYYDSDASSSSPHDDDDDSSSKKKPVNQNYSFDYSRIPYNSNAHLLSIPLGKPPHFDGEDYSFWSHKMRSHLFSLHPSIWEIVENGMHFDSINNAMFINEQIHKNAQATAVLLASLCRDEYNKVSGLDNAKQIWDTLKISHEGNDTTMITKMELVEGELGRFAMVRGEEPIQTYNRLKTLVNKIRSYGSTRWTDHDVVRLMLRSFTVIDPHLVNLIRENPRYTKMTPEEILGKFVSGRMMVKEARYVDDALNGPLSVYEPQPVALKATSSKEALPSKVAQVEAAGLNEDEMALIIKRFKTTFKERKEYPNKNKTRGKRSCFKCGKNGHFIAQCPDNENDQGQERHGMKEKKKSYRKAKGEAHLGKECDSDCSLSDSDDEGLAALAFDKSSFFPNERHTFLMAKEKKRKEMLSSELSVCHESVSSLKSLNDELNAKLEEVNKSSSCVEHVVICNRCKDFDVNSCDEHLISIAKLNDEVASLNAQLKTCKIDFDKLKFARDAYTIGRHPSIKDGLGFRKKAKNLTSXKAPIPNKEKGKAPMASSTQRNHAFIYNRKIASHSNYNRSYDHDAFDSHAMFASSSTFVHGLCIRGFKLDYRQRMHKPYDRGEEDVHLLRQEQGFL

SEQ ID NO: 10393 - protein, 431 aa, Zea mays
  unsure (1)..(431): unsure at all Xaa locations
  Clone ID: TF_ZmC4855_1.pep
MYKKVRRKSSLLKILLPIILCVLLLMLGALVWTCKSRGKRQKKRVQKRRMLEYLSSTDDAGDKNINFPFISFENIVTATDNFSESNLLGKGGFGKVYKGMLEGTKEVAVKRLSTGSGQGKEEFKNEVVLIAKLQHKNLVKLLGCCIHEDEKLLVYEYLPNKSLDYFLFGILKFQFLILLMMSNKXMSCVPADMPCFILFLLASARKSMLQWPTRFKIIQGVARGIMYLHHDSRLTVIHRDLKASNILLDKEMNPKISDFGMARIFSGDQLQANTNRVVGTYGYMSPEYAMKGAFSVKSDTYSFGVLILEIVSGLKISSPYLIMDFSNLITFAWNMWKDGKPEDFLDSSVTESCSLDEVSRCIHIGLLCAQDNPSCRPLMSTVVSMLENKATPLPTPKQPKDFALRDYNPGNEGVHRELSVNDTSLTMVEGR

SEQ ID NO: 10394 - protein, 168 aa, Zea mays
  unsure (1)..(168): unsure at all Xaa locations
  Clone ID: TF_6101958.pep
FHQGNGNKCFTCGNVGHYAKNCPRNQXRQMPAPNQDRGRKQKVQVRQGKLNFTTVEELPEGAPIMTGIFPVFNQPALILFDSSASHSFISXKFSIKCXLPFYHAKGSFLIATPGGKIATNQLNRNVPISLGSKIFKTTLLILGLEGMDIILGADWMTQHRVVLDVAAR

SEQ ID NO: 10395 - protein, 687 aa, Zea mays
  Clone ID: TF_ZmC14166_340.pep
MSGGHAKKEMVTGEKPATSHGKAPFGESGNKVKGSPSHDKSRQSGEKKKKMKKVVYYKTDSSSPSTSGSDTPSITYKRHERKKFSKIPLRYPHISKHTPLLSVPLGKPLIFDGEDYCMWSDKMRHHLTSLHASIWDIVEFGAHEPSVGDEGYDSDEVAQIQHFNSQATTILLASLSREEYNKVQGLKSTKEIWDVLKTAHEGDEVTKIIKREMIEAELGHFMLHQGEDPQAMYNRLKTLVNQVRNLGSTKWDDHEMVKVILRTLVFLNPTQVQLNRDPRYKLMSPEEVIGKFVSFELMIKCSKKIIEQGASSTPDVQPVAFKATEENKEDSTPSRVPIDASKLDNEEMTLIIKSFRQILKQRRGKDYKPRSKKVCYNCGKSGHFIAKCPLSSDSDRGDNKNGREKKRYYKKKGGDAHVCQEWDSDESSTDSSSDKDAANIAVTKGFLFPNVGHKCLMAKDGKKKKVHSRDTPKYTTSDDERSSNDNNDDLISLFANLTMDQKKKLNELIETINEKDDLLECQEDLLVKENKKFVKLKNAYALEVEKCENLSKELSICNDSISCLIDENASLNAKIEELNVCKPFPSIVEHVTICTRCRDINVVAIDDHLAMIKEQNDHIAKLNAKIVEHGLENENFKFAQSMLYNGRHPGIKDGIGFQQGSQSNTKLNAPKNKLSNFVKGKAPMVQD

SEQ ID NO: 10396 - protein, 1342 aa, Zea mays
  Clone ID: TF_ZmC74_151.pep
QYAQAFNDLCQYAGYHADSDEKKRDRFRRGLNTKLRERLNTVRADSFNELVNMAISQEDCIVAHWAEKKRKAPMAAPSAQAQRFRTVSHNQSRGFQQQAGRWVIRPPQQQQQLAPNRYPAPAPRNNQPPQQQQFRQGNGNKCFTCGNVGHYAKNCPRNQQRQMPAPNQDKGRKQKVQVRQGKLNFTALEEVPEGAPIMTGTFSVYNQPALILFDSGASHSFISQKFSANCKLPFSHSKGSFMIVTPGGKIATNQLNQSVPIQLGSHIVKTTLLVLGLENVDIILGANWMTLHQVVLDVASRTVEVNSPFCGNFTLILPSQGSSQSCAFSMTELPLKKIPVVCEYADVFPDELPGMPPDRDIEFAIELQPGTAPISKRPYRMPPAELAELKKQLQELLDKGFIRPSTSPWGCPALFVKKKDESLRLCIDYHPLNAVTIKNKYPLPRIDVLFDQLVGAKVFSKIDLRSGYHQIKIRASDIPKTAFSTRYGLYEFLVMSFGLTNAPAYFMYLMNSVFMPELDKFVVVFIDDILVYSKNEEEHAGHLHVVLQRLREHHLYAKLSKCDFWLKEIKFLGHTISQEGIVVDPDKVQEVMNWRPPTSVRQIRSFLGLAGYYRRFIPDFSRIAKPITELLKKEVKFAWSQKCEDAFHALRQHLTTAPVLAQPDSSKPFDVYCDASGTGLGCVLMQDNRVIAYASRALRPHEQNYPTHDLELAAVADLNMRQRRWLELIKDYDLEVHYHPGKANVVADALSRKLQCNCILMDSRVNTLCDELSKMQIEMIPSGSLSHISVEPALQDQIIMAQLSDKGVQIIKKNLHQKVEKYDCFRQDEKGVLWFKSRLVIPKDRDLKKKILDEAHLSKFSMHPGSTKMYHDLKLLYWWTRMKREIAQYVSECDTCQRVKASHLKSAGALRPLSVPSWKWDDISMDFIVGLPNTSRHHDLIWVIVDRLTKVAHFLPMHTTDKAQKYAELYIDRIVCLHGLPRTIVSDRGAQFVARFWEQLQESLGTKLIRSSAYHPQTNGQTERVNQILEDMLRACAIDCGKNWDKHLSLAEFAYNNSYQSSLKMAPFEALYGRRCRTPLNWSQPGEREVFGPDLVTEAERKVKLIRKNLEAAQARQKSYHDKRRKPLQFEVGSFVYLKVSPTKGVQRFGIKGKLAPRYIGPYEIVEACGPVAYKLKLPSKMSAIHSVFHVSQLKKCVRLPTEILAEPELEIEPDLSYQEYPSKILDCKERSTRAKSIKMFKVQWSNHSEEEATWETEEFLRSNFPDCLPKEAVVVESTYLARNLKKTIGKELKDCNLADGEYVLIPEQGPVQEEDQEQASEAAIEDLPAAPAVEGKPRFYA

SEQ ID NO: 10397 - protein, 1806 aa, Zea mays
  Clone ID: TF_ZmC74_196.pep
MNSPTPASGGDSRFSSDFLSRDGFPSILWEVLNSAGYPTPPMYTVQLYEEHRVPRCRVWLTLEAHPLQPGWRSLDSETIGLRTDDTVEAAAMKTLTTFCGYHPLEMVMHPLGLFPTEKKDDPMWCNRVSHVKDVWAMYPDLVGRVTVQCMSALYRLQALQSDAMTLLANTAQAAKLTLDSREDFVVDLSTELVEKDLQVERLSQRITTLEQQVEIRDNTIDVLENQLHDVQRELEEANDHLDMHHLEMEANEAGSEGEEAPEELGPAPGANGTTSAMPPSPMAARQRRGQNEQAPPPPPPAPTVQELMAQQNEILRQLLQRQPHQQHHGGGQHQRPPAMATYQEFLSTQPPLFTKAEDPLDADVWLRVVESKFPLLTGDCPDEAKARFAAQQLRGPARTWWDHFRAMLPADHEVSWEEFKTAFRGHHIPAGILDRKLNEFLALNQGTRTVLQYAQAFNDLCQYAGYHADSDEKKRDRFRRGLNTKLRERLNTVRANSFNELVNMAISQEDCIVAHRVEKKRKAPMAAPSAQAQRFRIVSHNQSRGFQQQAGRWVIRPPQQQQQPAPNRYPAPAPRNNQPLQQQQFRQGNGNKCFTCGNVGHYAKNCPRNQQRQMPAPNQDKGRKQKVQVRQGKLNFTALEEVPEGAPIMTGTFSVYNQPALILFDSGASHSFISQKFSANCKLPFSHSKGSFMIVTPGGKIATNQLNQSVPIQLGSHIVKTTLLVLGLENVDIILGANWMTLHQVVLDVASRTVEVNSPFCGNFTLILPSQGSSQSCAFSMTELPLKKIPVVCEYADVFPDELPGMPPDRDIEFAIELQPGTAPISKRPYRMPPAELAELKKQLQELLDKGFIRPSTSPWGCPALFVKKKDESLRLCIDYRPLNAVTIKNKYPLPRIDVLFDQLVGAKVFSKIDLRSGYHQIKIRASDIPKTAFSTRYGLYEFLVMSFGLTNAPAYFMYLMNSVFMLELDKFVVVFIDDILVYSKNEEEHAGHLHVVLQRLREHHLYAKLSKCDFWLKEIKFLGHTISQDGIAVDPDKVQEVMKWRPPTTVRQIRSFLGLAGYYRRFIPDFSRIAKPITELLKKEVKFVWSQKCEDAFHALRQHLTTAPVLAQPDSSKPFDVYCDASGTGLGCVLMQDNRVIAYASRALRPHEQNYPTHDLELAAVVHALKMWRHYLMGTHCNIFTDHKSLKYIFTQADLNMRQRRWLELIKDYDLEVHYHPGKANVVADALSRKLQCNCILMDSRVNTLCDELSKMQIEVIPSGSLSHISVEPALQDQIIMAQLSDKGVQIIKKNLHQKVEKYDCFRQDEKGVLWFKSRLVIPKDRDLKKKILDEAHLSKFSMHPGSTKMYHDLKLLYWWTRMKREIAQYVSECDTCQRVKASHLKSAGALRPLSVPSWKWDDISMDFIVGLPNTSRHHDSIWVIVDRLTKVAHFLPVHTTDKAQKYAELYIDRIVCLHGLPRTIVSDRGAQFVARFWEQLQESLGTKLIRSSAYHPQTDGQTERVNQILEDMLRACAIDCGKNWDKHLSLAEFAYNNSYQSSLKMAPFEALYGRRCRTPLNWSQPGEREVFGPDLVTEAERKVKLIRKNLEAAQARQKSYHDRRRKPLQFEVGSFVYLKVSPTKGVQRFGIKGKLAPRYIGPYEIIEACGPVAYKLKLPSKMSAIHSVFHVSQLKKCVRLPTEILAEPELEIEPDLSYQEYPSKILDCKERSTRAKSIKMFKVQWSNHSEEEATWETEEFLRSNFPDCLPKEAEDGIGTRALDTTKLGICLGFGQGDRPDFLAPYLLTGQPPFLSSGKRISARH

SEQ ID NO: 10398 - protein, 1448 aa, Zea mays
  Clone ID: TF_ZmC951_333.pep
MSGEHAKKEIMTGGDKSTSHRKAPSGESGNKMKGSPSHAKSHRSGDKKKKMKKVVYYETDSSSPSTSGSDTPSVTSKRHERKKFREEPQAMYNRIKTLVNQVRNLRSTKWDDHEMVKAILRSLVFCNPTQVQLIRGDPRYKLMCPEEVIGKFVSFELMIKGSKQIVEQGGTSTPEVQPVAFKVTEEKKEESTSSRLPIDASKLDNEEMALIIKSFCQILKQRKGRDYKPRSKKVCYKCGKTGHFIAKCPISSASDRGDDKKVRRKEKKKYYKKKGGDAHVCREWDSDESTTDSSSNEDAANIAVTKGLLFPNVGHKCLMAKDGKKKKVKSRASTKYTTSSDEGSSSEDEDDLLALFANLNMQQKEKLNELIGAIHEKDELLDSQEEFLIKENKKLVKVKNAYAQELEKCEKLISELSICHDTISNLRIENAKLIAKVEKLNVCDDSLVNLKNDNASLIAKIDKLNESISSLKIENDKLISKAKDLNVCNVSISNLRNENAMLHAKIDELNACKPSTSTVDHVSICMRCRDINVDAIYDHLALIKQQNDHITQLTSKINEHEIENEKFKFARSMLYNGRRPGINDGIGFQQGDNVKLNPPKILSNFVKGKDPMAQDNEGNILYPAGYPEHKIRRIHAKKTHSISHHAFMYKSEASSSRHSTHVKMPKKKSLVASNDHNISFKTFDASYVLTNKSGKIVAKYVGDKHKGCKTCVWVPKVYESKGSSWIIDSGCTNHMTGAKRMFSSYEKNEDAQRAITFGDGNQGLEKSQTQETLKGFLRRAQNEFGLRIKKIRSDNGTEFKNSQIEGFLEEEGIKHEFSSPYTPQQNGVVETKNRTLLDMVRTMLDEYKTPDRVFGSKCFILVKRGRKFKFAHKAVEGFLLGYDSNTRAYRVFNKSTGLVEVSCDIVFDETNGSQVEQASPPTQDEDQAQDDENEDQEDEPPQKEDNDQGGDNDDQDKEDGQEVQGQRPRHPRVHQAIQRDHPVNSILGDIHKGVTTRSRVAHFCEHYSFVSSIEPYRVEDTLRDSDWVLAMQEELNNFTRNELYQMDVKSAFLNGPIKEEVYVEQPPGFEDSEYPNHVYKLSKALYGLKQAPRAWYECLRDFLITNGFKVGKADPTLFTKTIANDLFVCQIYVDDIIFGSTNKSTCEEFSRIMIQKFEMSMMGELKYFLGFQVKQLQEGTFISQTKYIQDILTKFGMKDAKPIKTPMGTNVHLDLDTGGKSIDQKVYRSMIGSLLYLCASQPDIMLSVCMCARFQVDPKEVHLRAVKRILRYLVHTPKFGLWYPKGSTFDLIGYSDVDWAGCKIDRKSTSGTCQLLGRSLVSWASKKQNSVALSTVKAEYIAAGHYCAQLLWMRQTLRDYGYKLSKVPLLCDNESAICMVDNLVEHSRTKHIAIRYHFLRDHQQKGDIEIAYVSTKEQLADIFVKPLDEKTFTKLRNELNILDSRNFD

SEQ ID NO: 10399 - protein, 221 aa, Zea mays
  Clone ID: TF_ZM3970.C1.o1.fg.pep
MSGGHAKKEMVTGEKPATSHGKAPFGESGNKVKGSPSHDKSRQSGEKKKKMKKKIIEQGASSTPDVQPVAFKATEENKEDSTPSRVPIDASKLDNEEMTLIIKSFRQILKQRRGKDYKPRSKKVCYNCGKSGHFIAKCPLSSDSDRGDNKNGREKKRYYKKKGGDAHVCQEWDSDESSTDSSSDKDAANIAVTKGFLFPNVGHKCLMAKDGKKKKVVGDHN

SEQ ID NO: 10400 - protein, 833 aa, Zea mays
  Clone ID: TF_ZM4272.C5.o5.fg.pep
MKTLTTFCGYHPLEMVMHPLGLFPAEKKDDPMWCNCLTLDSREDFVVDLSSELVEKDLQVEKLSQRITTLEQQVEVRDNTIDVLENQLYDVQRELEEANDHLDMHHLEMEANEAGREGEEAPEELGPTPGANGTTSAMPPSPLLQRQPHPQQHGGGQHQRPPAVATYQEFLSTQPPLFTKVDDPLDADVWLRVVESKFPLLTGDCPDEAKSRFAAQQLRGPARTWWDHFRAMLPADREVSWEEFKTTFRGHHIPAGILDRKLNEFLALNQGTRTYAGYHADSDEKKRDRFRRGLNTKLRERLNTVRADSFNELVNLAISQEDCIVAHRTEKKRKAPMAAPSAQAQRFRIVSHNQSRGFQQQTGRWVIRPPQQQQPTPNRFLAPAPRNNQPPQQQQFRQGNGNKCFTCGNVGHYAKNCPRNQQRQMSAPSQDKGRKQKVQVRQGKLNFTTLEEVPEGAPIMTGIFSVYNQPALIMFDSGASHSFISQKFSAKCELPFSHSKGSFMIVTPGGKISTNQLNQSVPIQLGSHIVKTTLLVLGLENVDIILGANWMTLHQVVLDVASLTVEINSPFCGNFTLILLSQGSTQSCAFSMIELPLKKTPVVCEYADVFRDELPGMPPDRDIEFAMELQPGTTPISKRPYRMPPVELAELKKQLQELLDKGFIRPSTSPWGCPALFVKKKDESLRLCIDYRPLNAVTIKNKYPLPRIDVLFDQLVGAKVFSKIDLRSGYHQIKIRASDIPKTTFSTRYGLYEFLVMSFGLTNAPTYFMYLMNSVFMPELDKFIVVFIDDILVYSKNEEEHVGHLHVVLQRLREHHLYAKLSKCKTTESLLMP

SEQ ID NO: 10401 - protein, 1757 aa, Zea mays
  Clone ID: TF_ZM4326.C1.o11.fg.pep
MNSPTPASGGDSRFSSDFLSRDGFPSILWEVLNSAGYPTPPLYTVQLYEEHRVPRCRVWLTLEAHPLQPGWRSLDSETIGLRTDDTVEAAAMKTLTTFCGYHPLEMVMHPLGLFPAEKKDDPMWCNRVSHVKDVWAMYPDLVGRVTVQCMSALYRLQALQSDAMTLLANTAQAAKLTLDSREDFVVDLSTELVEKDLQVERLNQRITTLEQQVEIRDNTIDVLENQLHDVQRELEEANDHLDMHHLEMEANEAGSEGEEAPEELGPAPGANGTTSAMPPSPMAARQRRGQNEQAPPPPPPAPTVQELMAQQNEILRQLLQRQPHQQHHGGGQHQRPPAMATYQEFLSTQPPLFTKAEDPLDADVWLRVVESKFPLLTGDCPDEAKARFAAQQLRGPARTWWDHFRAMLPADHEVSWEEFKTAFRGHHIPAGILDRKLNEFLALNQGTRTVLQYAQAFNDLCQYAGYHADSDEKKRDRFRRGLNTKPRERLNTVRANSFNELVNMAISQEDCIVAHRAEKKRKAPMAAPSAQAQRFRIVSHNQSRGFQQQAGRWVIRPPQQQQQPAPNRYPAPAPRNNQPPQQQQFRQGNGNKCFTCGNVGHYAKNCPRNQQRQMPAPNQDKGRKQKVQVRQGKLNFTALEEVPEGAPIMTGTFSVYNQPALILFDSGASHSFISQKFSANCKLPFSHSKGSFMIVTPGGKIATNQLNQSVPIQLGSHIVKTTLLVLGLENVDIILGANWMTLHQVVLDVASRTVEVNSPFCGNFTLILPSQGSSQSCAFSMTELPLKKIPVVCEYADVFPDELPGMPPDRDIEFAIELQPGTTPISKRPYRMPPAELAELKKQLQELLDKGFIRPSTSPWGCPALFVKKKDESLRLCIDYRPLNAVTIKNKYPLPRIDVLFDQLVGAKVFSKIDLRSGYHQIKIRASDIPKTAFSTRYGLYEFLVMSFGLTNAPAYFMYLMNSVFMPELDKFVVVFIDDILVYSKNEEEHAGHLHVVLQRLREHHLYAKLSKCDFWLKEIKFLGHTISQDGIAVDPDKVQEMMNWKPPTTVRQIRSFLGLAGYYRRFIPDFSRIAKPITELLKKEVKFVWSQKCEDAFHALRQHLTTAPVLAQPDSSKPFDVYCDASGTGLGCVLMQDNRVIAYASRALRPHEQNYPTHDLELAAVVHALKMWRHYLMGTHCNIFTDHKSLKYIFTQADLNMRQRRWLELIKDYDLEVHYHPGKANVVADALSRKLQCNCILMDSRVNTLCDELSKMQIEVIPSGSLSHISVEPTLQDQIIMAQLSDKGVQIIKKNLHQKVEKYNCFRQDEKGVLWFKSRLVIPKDQDLKRKILDEAHLSKFSMHPGSTKMYHDLKPLYWWTRMKREIAQYVSECDTCQRVKASHLKSAGALRPLSVPSWKWDDISMDFIVGLPNTFRHHDSIWVIVDRLTKVAHFLPVHTTDKAQKYAELYIDRIVCLHGLPRTIVSDRGAQFVARFWEQLQESLGTKLIRSSAYHPQTDGQTERVNQILEDMLRACANDCGKNWDKHLSLAEFAYNNSYQSSLKMAPFEALYGRRCRTPLNWSQPGEREVFGPDLVTEAERKVKLIRKNLEAAQARQKSYHDRRRKPLQFEVGSFVYLKVSPTKGVQRFGIKGKLAPRYIGPYEIIEACGPVAYKLKLPSKMSAIHSVFHVSQLKKCVRLPTEILAEPELEIEPDLSYQEYPSKILDCKERSTRAKSIKMFKVQWSNHSEEEATWETEEFLRSNFPDCLPKEAGM

SEQ ID NO: 10402 - protein, 635 aa, Zea mays
  Clone ID: TF_ZM4326.C1.o12.fg.pep
MKTLTTFCGYHPLEMVMHPLGLFPAEKKDDPMWCNRVSHVKDVWAMYPDLVGRVTVQCMSALYRLQALQSDAMTLLANTAQAAKLTLDSREDFVVDLSTELVEKDLQVERLNQRITTLEQQVEIRDNTIDVLENQLHDMAARQRRGQNEQAPPPPPPAPTVQELMAQQNEILRQLLQRQPHQQHHGGGQHQRPPAMATYQEFLSTQPPLFTKAEDPLDADVWLRVVESKFPLLTGDCPDEAKARFAAQQLRGPARTWWDHFRAMLPADHEVSWEEFKTAFRGHHIPAGILDRKLNEFLALNQGTRTVLQYAQAFNDLCQYAGYHADSDEKKRDRFRRGLNTKLRERLNTVRANSFNELVNMAISQEDCIVAHRAEKKRKAPMAAPSAQAQRFRIVSHNQSRGFQQQAGRWVIRPPQQQQQPAPNRYPAPAPRNNQPPQQQHFRQGNGNKCFTCGNVGHYAKNCPRNQQRQMPAPNQDKGRKQKVQVRQGKLNFTALEEVPEGAPIMTGTFSVYNQPALILFDSGASHSFISQKFSANCKLPFSHSKGSFMIVTPGGKIATNQLNQSVPIQLGSHIVKTTLLVLGLENVDIILGANWMTLHQVVLDVASRTVESGFFSVVCFLYDGVAPEEDPSGL

SEQ ID NO: 10403 - protein, 1179 aa, Zea mays
  unsure (1)..(1179): unsure at all Xaa locations
  Clone ID: TF_ZM4448.C1.o5.fg.pep
MATYQEFLSTQPPLFTKAEDPLDADVWLRVVESKFPLLTGDCPDEAKARFAAQQLRDPARTWWDHFRAMLPADREVSWEEFKTAFRGHHIPAGILDRKLNEFLALNQGTRTVLQYAQAFNDLCQYAGYHADSDEKKRDRFRRGLNTKLRERLNTVRADSFNELVNMAISQEECIVAHRAEKKRKAPMAAPSTQAQSFQIVSHNQSRGFQQQAGRWVIRPPPQQQPAPNRFPAPAPRNNQPLQQQQFRQGNGNKCFTCGNVGHYAKNCPRNQQRQMPAPNQDKGRKQKVQVRQGKLNFTTLEEVPEGAPIMTGIFSVYNQPALILFDSGASHSFISQKFSAKCELPFSHSKGSFLIVTPGGKISTNQLNQSVPIQLGSHIVKTTLLVLGLENVDIILGANWMTLHQVVLDVASRTVEVNSLFCGNFTLILPSRGSTQSCAFSMTELPLKKIPVVCEYADVFPDELPGMPPDRDIEFAIELQPGTAPISKRPYRMPPAELAELKKQLQELLDKGFIRPSTSPWGCPALFLKKKDESLRLCIDYRPLNAVTIKNKYPLPRIDVLFDQLVGAKVFSKIDLRSGYHQIKIRASDIPKTAFSTRYGLYEFLVMSFGLTNAPAYFMYLMNSVFMPELDKFVVVFIDDILVYSKNEEEHVGHLHVVLQRMREHHLYAKLSKCDFWLKEIKFLGHTISQAGIVVDPDKVQEVMNWKPPTTVRQIQSFLGLAGYYRRFIPDFSRIAKPITELLKKEAKFVWSQKCEDAFHALRQHLTTALVLAQPDNSKPFDVYCDASGTGLGCVLMQDNRVIAYASRALRPHEQNYPTHDLELAAVVHALKMWRHYLMGTHCNIFTDHKSLKYIFTQADLNMRQRRWLELIKDYDLEVHYHPGKANVVADSLSRKLQCNCILMDSRINTLCDELSKMQIEVIPSGSLSHIFVEPALQDQIIMAQLSDKGVQFIKKNLHQKVEKYNCFRQDEKGVLGTKLIRSSAYHPQTDGQTERVNQILEDMLRACAIDCGKNWDEPLSLAEFAYNNSYQSSLRMAPFEALYGRRCRTPLNWSQPGERGVFGPDLVNEAERKVKLIRKNLEAAQARQKSYHDRRRKPLQFEVGSFVYLKPKKCVRLPTEIIAEPELEIEPDLXYQEYPSKILDSRERSTRAKSIKMYKVQWSNHSEEEATWETEEFL

SEQ ID NO: 10404 - protein, 1355 aa, Zea mays
  Clone ID: TF_ZM4550.C1.o14.fg.pep
MATYQEFLSTQPPLFTKAENPLNADVWLRIVESKFPLLTEDCPDEAKARFAAQQLRGSARTWWDHFCAMLPADREVSWEEFKTAFRGHHIPAGILDRKLNEFLVLNQGTRTVLQYAQAFNDLCQYVGYHADSDEKKRGRFRRGLNTKLRERLNTVRADSFNELVNMAISQEDCIVAHRAEKKRKAPMAAPSAQAQRFQIVSHNQSRGFQQQADRWVIRPPQQQQQPAPNRFPAPAPRNNQPPQQQQFRQGNGNKCFTCGNVGHYAKNCPRNQQRQMPAPNQDKGRKQKVQVRQGKLNFTTLEEVPEGAPIMIGIFSVYNQPALILFDSGASHSFISQKFSARCKLPFSHSKGSFMIVTPGAIHIVEVNSPFCGNFTLVLPSQGSTQSCAFSMTELPLKKIPVVCEYADVFPDELPGMPPDRDIEFTIELQPGTAPISKRPYRMPPAELAELKKQLQELLDKGFIRPSTSPWGCPALFVKKKDESLRLCIDYRPLNAVTIKNKYPLPRIDVLFGQLVGAKIKIRASDIPKTTFSTRYGLYEFLVMSFGLTNAPAYFMYLMNSVFMPELDKFVVVFIDDILVYSKNEQEHAGHLHVVLQRLREHHLYAKLSKCDFWLKEIKFLGHTISQAGIAVDPDKVQEVMNWKPPTTVRQIQSFLGLAGYYRRFIPDFSRIAKPITELLKKEVKFVWSQKCEDAFHALRQHLTTAPVLAQPDNSKPFDVYCDASGTGLGCVLMQDNRVIAYASRALRPHEQNYPTHDLELAAVVHALKMWRHYLMGTHCNIFTDHKSLKYIFTQADLNMRQRRWLELIKNYDLEVHYHPGKANVVADALSRKLQCNCILIYSRINTLCDELSKMQIEVIPSGSLSHISVEPALQDQIIMAQLSDKGVQIIKKNLHQKVEKYNCFRQDEKGVLWFKSRLVIPKDQDLKRKILDEAHLSKFSMHPGSTKMYHDLKPLYWWTRMKREIAQYVSECDTCQRINASHLKSAGALQPLSIPSWKWDDISMDFIVGLPNTSRHHDSIWVIVDRLTKVAHFLPVHTTDKAQKYAELYIDRIVCLHGLPRTIVSDRGAQFVARFWEQLQESLGTKLIRSSVYHPQTDGQTERVNQILEDMLRACAIDCGKNWDKHLSLAEFAYNNSYQSSLKMAPFEALYGRRCRTPLNWSQPGEREVFGPDLVTEAERKVKLIRKNLEAAQARQKSYHDRRRKPLQFEVGSFVYLKVSPTKGVQRFGIKCKLAPRYIGPYEIIEACGPVAYKLKLPSKMSAIHSVFHVSQLKKCVRLPTEIIAEPELEIEPDLSYQEYPSKILDCKERSTRAKSIKMYKVQWSNHSEEEATWETEEFLRSNFPDCLPREAGT

SEQ ID NO: 10405 - protein, 947 aa, Zea mays
  Clone ID: TF_ZM4641.C1.o4.fg.pep
MGNQKFAKSMMRRSYTFEVVISKSTYHIMHISYALHSLDCNLADGEYVLIPEQGPVQEEDQEQASEAAIEDLPAAPAIEGKPRYGGYKCGHCTAAAGVSGAVYAKAMNSPTPASGGDSRFSSDFLSRDGFPSILWEVLNSAGYPTPPLYTVQLYEEHRVPRCRVWLTLEAHPLQPGWRSLDSETIGLRTDDTVEAAAMKTLTTFCGYHPLEMVMHPLGLFPAEKKDDPMWCNRVSHVKDVWAMYPDLVGRVTVQCMSALYRLQALQSDAMTLLANTAQTAKLTLDSREDFVVDLSTELVEKDLQVERLSQRITTLEQQVEIRDNTIDVLENQLHDVQRELEEANDHLDMHHLEMEANEAGSEGEEAPEELGPAPGANGTTSAMPPSPMAARQRRGQNEQVPPPPPPAPTVQELMAQQNEILRQLLQRQPHPQQHGGGQHQRPPAMATYQEFLSTQPPLFTKAEDPLDADVWLRVVESKFPLLTGDCPDEAKARFAAQQLRGPTRTWWDHFRAMLPADREVSWEEFKTAFRGHHIPAGILDRKLNEFLALNQGTRTVLQYAQAFNDLCQYAGYHADFDEKKRDRFRRGLNTKLRERLNTVRANSFNELVNMAISQEDCIVAHRAEKKRKAPMAAPSAQAQRFRIVSHNQSRGFQQQAGRWVIRPPQQQQQPAPNRYPAPAPRNSQPLQQQFRQGNGNKCFTCGNVGHYAKNCPRNQQRQMPAPNQDKGRKQKVQVRQGKLNFTALEEVPEGAPIMTGTFSVYNQPALILFDSGASHSFISQKFSAKCKLPFSHSKGSFMIVTPGGKIATNQLNQSVPIQLGSHIVKTTLLVLGLENVDIILGANWMTLHQVVLDIASRTVEVNSPFCGNFTLILPSQGSTQSCAFSMTELPLKKIPVANTKPEGDLAVPANEAQAVISMRPTEEMKRINLGFADARRAAIINSSLDDK

SEQ ID NO: 10406 - protein, 405 aa, Zea mays
  Clone ID: TF_ZM4714.C6.o4.fg.pep
MSGGHAKKEMVTGEKPATSHGKAPFGESGNKVKGSPSHDKSRQSGEKKKKMKKVVYYKTDSSSPSTSGSDTPSITYKRHERKKFSYDSDEVAQIQHFNSQATTILLASLSREEYNKVQGLKSTKEIWDVLKTAHEGDEVTKIIKREMIEAELGHFMLHQGEDPQAMYNRLKTLVNQVRNLGSTKWDDHEMVKVILRTLVFLNPTQVQLNRDPRYKLMSPEEVIGKFVSFELMIKCSKKIIEQGASSTPDVQPVAFKATEENKEDSTPSRVPIDASKLDNEEMTLIIKSFRQILKQRRGKDYKPRSKKVCYNCGKSGHFIAKCPLSSDSDRGDNKNGREKKRYYKKKGGDAHVCQEWDSDESSTDSSSDKDAANIAVTKGFLFPNVGHKCLMAKDGKKKKVVGDHN

SEQ ID NO: 10407 - protein, 1662 aa, Zea mays
  Clone ID: TF_ZM5061.C1.o2.fg.pep
MKTLTTFYGYHPLEMVMHPLGLFPAKKKDDPMWCNRVSQVKDVWAMYPDLVGRVTVQCMSALYRLQALQSDAMALLANTAQTAKLTLDNREDFVVDLSTELVEKDLQVERLSQRITTLEQQVEIRDNTIDVLENQLHDVQRELEEANDHLDTHHLEMEANEAGSEGEEAPEELGPAPGAHGTTSAMPPSPEFLSTQPPLFTKAEDPLDADVWLRIVESKFPLLTGDCPDEAKARFAAQQLRGPARTWWDHFRAMLPADREVSWEEFKTAFRGHHIPAGILDRKLNEFLALNQGTRTVLQYAQAFNDLCQYAGYHADSDEKKRDRFRWGLNTKLQERLNTVRADSFNELVNMAISQEDCIVAHRAEKKRKAPMAAPSAQAQRFWIVSHNQSRGFQQQAGRWVIRPPQQQQPAPNRFPAPAPGNNQPPQQQQFRQGNGNKCFTCGNVGHYAKNCPRNQQRQMPAPNQDKGRKQKVQVRQGKLNFTTLEEVPEGAPIMTGIFSVYNQPALILFDSGASHSFISQKLSDKCELPFSHSKGVPIQLGSHIVKTTLLVLGLENVDIILGANWMTLHQVVLDVASRTVEVNSPFYGNFTLILPSQGSTQSCAFSMTELPLKKIPVVCEYADVFPDELPGMPPDRDIEFATELQPGTTPISKRPYRMPPVELAELKKQLQELLDKGFIRPSTSPWGCPALFVKKKDESLRLCIDYRPLNAVTIKNKYPLPRIDVLFDQLVEAKVFSKIDLRSGYHQIKIRASDIPKTTFSTRYGLYEFLVMSFGLTNAPAYFMYLMNSVFMPELDKFVVVFIDDILVYSKNEEEHAGHLHVVLQRLREHHLYAKLSKCDFWLKEIKFLGHTISQVGIAVDPDKVQEVMNWKPPPTVRQIRSFLGLAGYYRRFIPDFPRIAKPITELLKKEAKFVWRQKCKDAFHALRQHLTTAPVLAQPDNSKPFDVYCDASGTGLGCVLMQDNRVIAYASRALRPHEQNYPTHDLELAAVVHALKMWRHYLMGTHCNIFTDHTGLKYIFTQADLNMRQRRWLELIKDYDLEVHYHPRKANVVADALSRKLQCNCILMDSRINTLCDELSKMQIEVIPSGSLSHISVEPALQDQIIMAQLSDKGVQIIKKNLHQKVEKYNCFRQDEKGVLWFKSRLVIPKDQDLKRKILDEAHLSKFSMHPGSTKMYHDLKPLYWWTRMKREIAQYVLECDICQRIKASHLKSAGALQPLSIPSWKWDDISMDFIVGLPNTSRHHDSIWVIVDRLTKVAHFLPVHTTDKAQKYAELYIDRIVCLHGLPRTIVSDRGAQFVARFWEQLQESLGTKLIRSSAYHPQTDGQTERVNQILEDMLRACAIDCGKNWDKHLSLAEFAYNNSYQSSLRMAPFEALYGRRCRTPLNWSQPGEREVFGPDLVTKAERKVKLIRKNLEAAQARQKSYHDRRRKPLQFEVGSFVYLKVSPTKGVQRFGIKGKLAPRYIGPYEILEACGPVAYKLTLPSKMSTIHSVFHVSQLKKCVRLPTEIIAEPELEIEPDLSYQEYPSKILDCKERSTRAKSIKMYKVQWSNHSEEEATWETEEFLRSNFLDCLPKETVAKRMTFEEQFYLNNNNNHPFPISLTLRFTLGGLWPKSRDKIPLRGEGCDTSVSPRVSLKMPNQGPSFYVNQIKHEHQLT

SEQ ID NO: 10408 - protein, 879 aa, Zea mays
  Clone ID: TF_ZM5066.C9.o8.fg.pep
MKAINPVVKIDVATSCDDLSQGEQTSLHDELTEKVEVLTLDNQKLKRCLTDATTRGKVAIEKNDFNNELAADNERLKNESGIGYNAFVQKKTTTQYKPKQTHMPIKCFECGKEGHFAHNCKAKPPTPLPKHSRPFAFNAHYVLRKVANGKVNYKTDGSHWVIDSGCTQHMTGNPRMFTSLDENVDGQDKITFGDNSKGKVQGLGKVAISNDLSISNVLLVAPLSFNLLSVGQLCDLGLQCLFTPTEVIVSKWMMNQWRLAHVGMSTLKKVLKKDMVRGLKDVVFEKDKPCSACQAGKQVANTHPTKAFMSTSRPLELLHMDLFGPTNYVSVGGNHYYLVIVDDFSRYTWVFFLHDKSEVASIFKKFAKKAQNEFDCKIKKIRSDNGKEFDNTNIHEYCDEIGIKHEVSATYTPQQNGVVERKNRTLITLARTMIDEYNTPERFWAEADNTAWYASNRLFPHRLLAKTPYELLNGKKPDVSFRSKAYRVFNHATGVVEETYDVEFDEANGSQGAIENLDDVGDEPLREAMKNMPIGAIKPKEDEEEVQNIDRPSSSNVPQDDDKDERHANEDTFVSHEQARTLEKPPQDARIIGTKWVFRNKQDDQGLIVRNNARLVAKGFSQVEGLDFGETFAPVARLEAIHILLAYASCYDIKLYQMDVKSAFLNSFINELVYVEQPPGFEDPRYPNHAYRLSKALYGLKQAPRAWYERLRDFLIEKGFKIGTVDTTLFTKKHNSDIFICQVYVDDIIFGSTNDYHCKEFGELMSKEFEMSMIGELTYFLGFQVKQMKDGNFLSQEKYTKDLLKRFNMEKCKPIKTPMPTNGNLDLDEGGNPVNQTLYRSMIGSLLYLTASRPDIMFSVCMCARFQSNPKKAHLRAVK

SEQ ID NO: 10409 - protein, 204 aa, Zea mays
  Clone ID: TF_ZmC2309_2.pep
MATAAAMADDDDFASPPLAPRAREEGGGRGVYQVGGVPVEFPYKPYGTQLAFMGRVIATLDRARRQGRSHALLESPTGTGKSLSLLCSALAWQRHYPLRSPPASRYERGRDYGGGRAPRGGGGGGGGDRFKCGKPGHFARECPSGDGGRGDRYGGRDDRYGGGGGGGGGRYGSDRGGDRYSGRSRDGGSYGGGDRYSRDRSGPY

SEQ ID NO: 10410 - protein, 1727 aa, Zea mays
  Clone ID: TF_ZmC36592_155.pep
MTSHGSSNDGNALTHTDGLAREGFPRILWEVLQGAGYTTPPQYAVQQFEKHRVPRCRVWMTLEPHPLQPGWRSLDSESFGYRAEDTIEAIALHGLTTFCGFHPLELATHPIGLFPAEREDDPMWKDRVEHAKDIWAIYPGQTAHLTVRCMNALYHLQVMRGEAMSHLMALLEATKITLDNREELVVDLSQEMVEKDLQVEQLSTDIQELEELVGTRENTIEVLEDQLINTQQQLAEANEHLDMHHQEIQDQEANEDVDIEGGDEPASSVDTADVVLSMYMVFQMAGRQRRGQNERVPPPPPPPPTLQELMAQQNEILRQLAQRQPPPQHYGGGDHQRHPAAATYQEFLSTQPPLFTRAEDPLDADVWLRVVESKFPLLHGVCSEVTKVRFATQQLRGPARTWWDHFLAMQPEDREVEWREFKAAFRGHHIPAGIMDRKLNEFLALTQGNRTVLQYAQAFNDLCQYAGYHADTDEKKRDRFRRGLITKLRDRLNTVRANSYNELVNMAISQEDCITARQAEKKRKTPVAGPSAQPQRFRIVSDTQGRGPQQQQGRWVIRPQQQQQQAPNRTQFPAQRGNQQQQQYRQANDKRCFTCGNTGHYAKNCPRNQQRQGQNVNQNQGKRQKVQVRQGRLNFTTMADIPEGAPVMTGIFTVLNFPAIVLFDSGASHSFISAKFSAKCQFPFHHTDGGITISTPGGRVATYQINRQVPIKFGSLVIRTTLLILGLDSVDIILGTDWLTRHQAVLDIAARAIEIHSPAYGETVLYLPDQGCTRSCAFVMIESPVEKIPVVCDYPDVFPDELPGMPPDRDIEFAIELQPGTAPISKRPYRMPPAELAELKKQLQELLDKGFIRPSTSPWGCPALFVKKKDESLRMCVDYRPLNAVTIKNKYPLPRIDDLFDQLQGAKYFSKIDLRSGYHQLRIKEADIQKTAFVTRYGQYEFTVMPFGLTNAPAFFMNLMNKVFMEELDKFVVVFIDDILIYSKNREDHKRHLRIVLGKLRAHQLYAKLSKCEFWLEKIAFLGHILTAEGIEVDPSKVEAVSKWRQPTNVSEVRSFLGMAGYYRRFIKGFSSIARPMIELLKKDHKFVWTPKCEESFQIIKKKLTTAPVLSLPDIHQDFVVFCDASRQGLGCVLMQNERVIAYASRLLKPHEQNYPTHDLELAAIVHALKIWRHYLIGNKCHIFTDHKSLRYIFTQPDLNLLQRRWLELIKDYDLEIHYHPGKANVVADALSRKPFGIKGTNFLEDWKEESAQLNACLGNNDSLEVKPMLEDIICKAQHLDPETARLVEKARKEQLPDLRTDDQGVLWFKHRLCVPKGEAREVLLKEAHDSAYSIHPGTTKMYLDLKTRYWWKGMKKEIAQYVARCDICQRTKAEHQKPAGLLQPLPIPEWKWEEIGMDFVTGLPRTQKGNDSIWVIIDRLTKVAHFIPVKTTFGGATLARIYLKEIVRLHGIPRKIVSDRGTQFTSKFWTSLQKAMGTKLDFSTAYHPQIDGQTERVNKVLEDLLRACVLAFDRSWESSLPYAEFSYNNSYQSSIKMSPFEALYGRKCQTPLMWSNVGEKALEGPAFVKEAEEKVALIRRRLLEAQSRQKSYADNRRRELRFEEGDFVYLKVSPMRGVRRFQVKGKLAPRFVGPYPIIGKVGPAAYRLELPESMSDIHNVFHLSQLRKCLQAPESHLEEETVQIQKDLQYREKPVKILDSAVRKTRTSEVKLCKVQWSREGEEEAT

SEQ ID NO: 10411 - protein, 1980 aa, Zea mays
  Clone ID: TF_ZmC24054_2.pep
MRSRSRAALRRRSLALGRRSSSAATRQPSRPAVLPTAPAPAPSSGGIAAAATPVLTIASTSGLEAGEGNYHSFPLTVSPTKGDFCLQEQIKDALPHVFHSRRDKVPSDLDLQKHAATANGTSLLAASASAPKSTRKFYSETSSIGDPVDLLAPARIPVLEKRKWAVGSSPVFPPDCNEVDFNFNASNATSHQLAVDGGHDLRSYGRLHFGQHKADAPVLEEGGWSVVRPKFWWRKTVENLKRSPTQQQHDTKGTSTFKTKLQGKCYNCLSPDHFAFRCSALTRCWQCLHFGHRARACPGIYYRSRHNSTPPQPEPVQHSMQYTSNVNSRHQQHQRQLNSLLKEQKQAPEPVLNFSPVQHNKSYLRAAQEGQNMEARYPGDPRARPSRAFCAVSATGSIRRRRDDLISKAVVCSFDGNSHEVDTIVAGDMLREKFNLCHGQYQLVKHFPEQFFIIFPDARTKQWAIDRRSVSYRGREFHFGDWSEESYARKTSWEFRVKVRVEGIPVHCWGEEVASRALGRSCTIHYVQERSRRRERTRSFDLWAWCSDPCEIPKEVWLTVSEPDPELPPISTPLPLVGAHHAEPTDLKKGHVYTLRNHIEVVEDLCFIHGRNTRGGPMNRKPRREFVWSYGVSDSAGEKRERSEEFRGRETMRRDWDHDDDEDFHQHRHQGTRRQRSLSGWARSSRCRGGVEDCYSSSGRYRPSTPFRRRGMGMGQPGRWTPKIKNKKVSFADPVITAIWPTDVSKGHISAENSISLGGMDLGTQAMEEYQCSAHPKVSVPIASYSVNALIHSWSTRGTDSAPVPIISGSHLANETIQGDLCIQNVQVESNFSNSEPNSQRNVVANEDRQCILPTNEVPPIGHESSTHSTPRPLENQLNSNDRLQIFIESITNTPEPPLILSPPNSNTLATSPVLGGSDNLDANVTINAGTPAIQYQGSSASISNNHVNSFEQIEGLFSRPLNKDQMEWRNGYYPMNTNCCIFSWNVRGLNDPAKRESVRQTILSTHATLVCLQETKIMNWTNDLLKDTVGYKLAKQTAHLPSIGASGGILIACDEDFFDITPVTYASTYSLSVRLLELDLIGKKFTWSNEQDDPTMSRIDRLMATTEWHGLYPAANLQALCSMTSDHSPLLMQGHSPCNFYKGFRFESYWVHIDGFKDVVQQAWTTTVNSSDAILRLHVKMVRTAKALKAWRRRTVGNIKVQLAIIKIVLTMLEKAQENRTLSSEELDFRRRLKIKILGLAGIQLSIARQHSRQTWVRLGDANTNFFHLMANHRKRKNFIRSLNCGDCLLTSQEDKLREAHRHFLEILGTRGGRTSVVRWENLGYSPFELSELDTMINDDEIRNAVMGMHSEKAPGPDGFIGLFYKECFEVIREDLSKAINDFYHHKCKSLHLVNEANIVLLPKRENPDRIDLFRPISLINSCMKIITKIMATRLAPRMNEIVSTTQNAFIQKRSIHDNFLYVQKVIKKLHKSKQAALFVKLDISKAFDSLNWAYLLDVLKALGFTQKWRDWIATILGSSSSKIIINGQQTKEIKHMRGVRQGDPLSPFLFILAMDPLQRMIERAAHEGLLGQVLPNGAKFRCSLYADDAGVFVRADKLDLKVLKRILEAFEWCSGLKINFEKTEIFPIRYPESLWSNLMEVFPGKYSNFPGKYLGLPLHFRNIKRIEFQPLIEKINKRLAGWKDVDLFNASTIVTIGDGKMADFWRSSWIQGQAPKNIAPTLFMKAKRKNISVCQALTNNRWMHFCSPYTHEDEIKEFISLWQGSRVPCQSTGLRPDLNRGENGRKQPKAAVYFRTWRGHLQNLLGYALSVYCVYKMLKSLQSAVFKKSGSVDPVTITITIFLRHFDIGIDVALLSQYISLMFIGMLVVISVRGFLANVMKFFFASSRVGSRSTTNVVLVLSEIMARYFISSILLIRKSLANEYRYSGDHYCGVLGGDIQFDFYHRWFDAIFLASAFLSLLLISAQYTTRQTDKHPID

SEQ ID NO: 10412 - protein, 1766 aa, Zea mays
  Clone ID: TF_ZmC36592_119.pep
MTSHGSSDDGNALTHTDRLAREGFPRILWEVLQGAGYATPPQYAVQQFEKHRVPRCRVRMTLEPHPLQPGWRSLDSESFGYRAEDTIEAIALHGLTTFCGFHPLELATHPIGLFPAEKEDDPMWKDRVEHAKDIWAIYPGQTAHLTVRCMNALYRLQVMRGEAMSHLMALLEATKITLDNREELVVDLSQEMVEKDLQVEQLSTDIQELEELVGTRENTIEVLEDQLINTQRQLVEANEHLDMHHQEIQDQEANEDVDIEGGDEPASSVDTAGSGRPPSPESSMAERQRRGQNERVPPPPPPPPTLQELIAQQNEILRQLAQRQPPPQHYGGGDHQRHPAAATYQEFLSTQPPLFTRAEDPLDADVWLRVVESKFPLLHGACSEVTKVRFATQQLRGPARTWWDHFLAMQPEDREVEWREFKAAFRGHHIPAGIMDRKLNEFLALTQGNRTVLQYAQAFNDLCQYAGYHADTDEKKRDRFRRGLSTKLRDRLNTVRANSYNELVNLAISQEDCITARQAEKKRKTPVAGPSAQPQRFRIVSDTQGRGPQQQQGRWVIRPQQQQQAPNRTQFPAQRGNQQQQQYRQANDNRCFTCGNTGHYAKNCPRNQQRQGQNANQNQGKRQKVQVRQGRLNFTTMADIPEGAPVMTGIFTVSNFPAIVLFDSGASHSFISAKFSAKCQLPFHHTDGGITISTPGGRVATYQINRQVPIKFGSLVIRTTLLILGLDSVDIILGTDWLTRHQAVLDIAARAIEIHSPAYGETVLYLPDQGCTRSCAFVMIESPVEKIPVVCDYPDVFPDELPGMPPDRDIEFAIELQPGTAPISKRPYRMPPAELAELKKQLQELLDKGFIRPSTSPWGCPALFVKKKDESLRMCVDYRPLNAVTIKNKYPLPRIDVLFDQLVGAKVFSKIDLRSGYHQIKIRASDIPKTAFSTRYGLYEFLVMSFGLTNAPAYFMYLMNSVFMPELDKFVLVFIDDILVYSKNEDEHTEHLHIVLQRLREHHLYAKLSKCEFWLKEIKFLGHTISQDGISVDPEKVQEVMDWKPPTTVKQIRSFLGLAGYYRRFIPDFSRMAKPMTKLLKKGVKFEWSQKCEDAFHALRQHLTTAPVLAQPDSTKPFEVYCDASGTGLGCVLMQENRVIAYASRALRPHEQNYPTHDLELAAVVHALKIWRHYLMGAHCNIYTDHKSLKYIFTQADLNMRQRRWLELIKDYDLEVHYHPGKANVVADALSRKVQCNCMSMDVGVTTLCDELCKLNLEVVSSGDLSYISMEPTLQEQIVRAHVGDKGVQDPELRKKILDEAHLSKFSMHPGSNKMYHDLRSLYWWTRMKREIAKYISECDTCQRIKASHLKAAGPLQPLPIPSWKWEDICMDFIVGLPNTSRHHDSIWVIVDRLTKTAHFLPVHTTHRAEKYAEIYVDQIIRLHGIPKTIISDRGAPFVARFWEQLQESLGTHVIRSSAYHPQTDGQTERVNQILEDMLRACALHYGKDWDKCLSLAEFSYNNSYQSSLKMAPFEALYGRRCRTPLNWSQAGEREIFGPDLVLEAEAKVRVITKNLEAAQARQRSYHDKRRKPLQFEVGDHVYLKVSPTKGVQRFGIKGKLAPRYIGPYEIKASCGPVAYQLELPPHMSSVHNVFHVSQLRKCVRLPTEVLPEPAIEIEPDLSYQEYPVKVLDQKERSTRARSVRMYKVQWSHHSAEEATWETEDFLRSRFPDFLPKGVDCNLADGEYILVPEQGAAQEVAPDPAPEPAPEDLPATALEGKPRFYA

SEQ ID NO: 10413 - protein, 1517 aa, Zea mays
  Clone ID: TF_ZmC36592_137.pep
MAGRQRRGQNEHVPPPPPPPPTLQELMAQQNEILRQLAQRQPPPQHYGGGDHQRHPAAATYQEFLSTQPPLFTRAEDPLDADVWLRVVESKFPLLHGACSEVTKVRFATQQLRGPARTWWDHFLAMQPEDREVEWREFKAAFRGHHIPAGIMDRKLNEFLALTQGNKTVLQYAQAFNDLCQYAGYHADTDEKKRDRFGRGLSTKLRDRLNTVRANSYNELVNMAISQEDCITARQAEKKRKTPVAGPSAQPQRFRIVSDTQGRGPQQQQGRWVIRPQQQQQQAPNRNQFPAQRNNQQQQYRQANDNRCFTCGNTGHYAKNCPRNQQRQGQNANQNQGKRQRVQVRQGRLNFTTMADIPEGAPVMTCIFTILNYPAIVLFDSGASHSFISAKFSAKCQLPFHHTDGGITISTPGGRVATYQINRQVPIKFGSLVIRTTLLILGLDSVDIILGADWLTRHQAVLDIAARAIEIHSPAYGETVLYLPNQGCTRSCAFVMLESPVKEIPVVCAYPDVFPEELPGMPPDRDIEFAIELQPGTAPISKRPYRMPPVELAELKKQLQELFDKGFIRPSTSPWGCPALFVKKKDESLRMCVDYRPLNAVTIKNKYPLPRIDVLFDQLVGAKVFSKIDLRSGYHQIKIRASDIPKTAFSTRYGLYEFLVMSFGLTNAPAYFMYLMNSVFMPELDKFVVVFIDDILVYSKNEAEHTKHLHTVLQRLRDHQLYAKLSKCEFWLKEIKFLGHTISQDGISVDPEKVQEVMDWKPPTTVKQIRSFLGLAGYYRRFIPDFSRIAKPMTELLKKGVKFEWSRKCEDAFHTLRQHLTTAPVLAQPDNTKPFEVYCDASGTGLGCVLMQESRVIAYASRALRPHEQNYPTHDLELAAVVHALKIWRHYLMGAHCNIYTDHKSLKYIFTQADLNMRQRRWLELIKDYDLEVHYHPGKANVVADALSRKAQCNCMSMDVGVTTLCDELCKLNLEVVSSGNLSYISVEPTLQEQIVRAQVEDKGVQVIKDMIKQKTEKYKCFRQDSKGILWFGDRLVVPKDPELRKQILDGAHLSKFSMHPGSNKMYHDLRSLYWWTRMKREIAKYISECDTCQRIKASHLKAAGHLQPLPIPSWKWEDICMDFIVGLPNTSRHHDSIWVIVDRLTKTAHFLPVHTTHRAEKYAEIYVDQIVRLHGIPKTIISDRGAPFVARFWEQLQESLGTHVIRSSAYHPQTDGQTERVNQILEDMLRACALHYGKDWDKCLSLAEFSYNNSYQSSLKMAPFEALYGRRCRTPLNWSQAGEREIFGPDLVLEAEAKVRIIKKNLEAAQARQRSYHDKRWKPLQFEVGDHVYLKVSPTKGVQRFGIKGKLAPRYIGPYEIKEACGLIAYQVELPPHLSAVHNVFHVSQLRKCVRLPTEVLPEPDIEIEPDLSYQEYPVKVVDQKERSTRARSVRMYKVQWSHHSAEEATWETEDFLRSRFPDFLPKGVDCNLADGEYILVPEQGAAQEVAPDPAPESAPEDPPATALEGKPRFYA

SEQ ID NO: 10414 - protein, 1677 aa, Zea mays
  Clone ID: TF_ZmC36592_140.pep
MTSHGSSDDGNALSHTDGLAREGFPRILWEVLQGAGYMTPPQYAVQQFEKHRVPRCRVRMTLEPHPLQSGWRSLDSESFGYRAEDTIEAIALHGLTTFCGFHPLELATHPIGLFPTEREDDPMWKDRVEHAKDIWAIYPGQTAHLTVRCMNALYRLQVMRGEAMSHLMALLEATKITLDNREELVVDLSTEMVEKDLQVEQLSTDIQELEELVGTRENTIEVLEDQLINTQQQLAEANEHLDMHHQEIQDMEANEDVDIEGGEEPASSVDTAGSGRPPSPESNGREAASGQNERVPPPPPPPPTLQELMAQQNEILRQLAQRQPPPQHYGGGDHQRHPAAATYQEFLSTQPPLFTRAEDPLDADVWLRVVESKFPLLHGACSEVTKVRFVTQQLRGPTRTWWDHFLAMQPEDREVEWREFKAAFRGHHIPAGIMDRKLNEFLALTQGNRTVLQYAQAFNDLCQYAGYHADTDEKKRDRFRRGLSTKLHDRLNTVRANSYNELVNMAIFQEDCITARQAEKKRKTPVAGPSAQPQRFRIVSDTQNRGPQQQQGRWVIRPQQQQQQAPNRTQFPAQRTNQQQQQYRQANDNRCFTCGNTGHYAKNCPRNQQRQGQNVNQNQGKRQKVQVRQGRLNFTTMADIPEGAPVMTGIFTVLNYPAIILFDSGASHSFISAKFSAKCQLPFHHTDGGITISTPGGRVATYQINRQVPIKFGSLVIRTTLLILGLDNVDIILGADWLTRHQAVLDIAARAIEIHSPAYGETVLYLPGQGCTRSCAFVMIESPVEKIPVVRDYPDVFPDELPGMPPDRDIEFAIELQPEIAPISKRPYRMPPVELAELKKQLQELLDKGFIRPSTSPWGCPALFVKKKDESLRMCVDYRPLNAVTIKNKYPLPRIDVLFDQLVGAKVFSKIDLRSGYHQIKIRASDIPKTTFSTRYGLYEFLVMSFGLTNAPAYFMYLMNSVFMPELDKFVVVFIDDILVYSKNEAEHTKHLHTVLQRLRDHQLYAKLSKCEFWLKEIKFLGHTISQDGISVDPEKVQEVMDWKPPATVRQIRSFLGLAGIAKPMTELLKKGVKYEWSQKCEDAFHTLRQHLTTAPVLAQPDNTKPFEVYCDASGTGLGCVLMQENRVIAYASRALRPHEQNYPTHDLELAAVVHALKIWRHYLMGAHCNIYTDHKSLKCFEQKGPVQLYEHGCGSYHPIVRAQVEDKGVQVIKDMIKQKAEKYKCFRQDSKGILWFGDRLVVPKDPELRKKILDEAHLSKFSMHPGSNKMYHDLRSLYWWTRMKREIAEYISECDTCQRIKASHLKVAGPLQPLPIPSWKWEDICMDFIVGLPNTSRHHDSIWVIVDRLTKTAHFLPVHTTHKTEKYAEIYIDQIVRLHGIPKTIISDRGALFVARFCEKLQESLGTQVIRSSAYHPQTDGQTERVNQILEDMLRACALHYGKDWDKCLSLAEFSYNNSYQSSLKMAPFEALYGRRCRTPLNWSQAGEREIFGPDLVLEAEEKVRVITKNLEAAQARQKSYHDKRRKPLQFEVGDHVYLKVSPTKGVQRFGIKGKLAPRYIGPYEIKASCGPVAYQLELPPHMSAVHNVFHVSQLRKCVRLPTEVLPEPDLEIEPDLSYQEYPDKVLDQKERSTRARSVRMYKVQWSHHSAEEATWETKDFLRSHFPDFLPKGVGM

SEQ ID NO: 10415 - protein, 1708 aa, Zea mays
  Clone ID: TF_ZmC36592_141.pep
MTSHGSSDDGNALTHTDGLAREGFPRILWEVLQGAGYTTPPQYAVQQFEKHRVPRCRVRMTLEPHPLQPGWRSLDSESFGYRAEDTIEAIALHGLTTFCGFHPLELATHPIGLFPADKEDDPMWKDRVEHAKDIWAIYPGQTAHLTVRCMNALYRLQVMRGEAMSHLMALLEATKITLDNREELVVDLSQEMVEKDLQVEQLSTDIQELEELVGTRENTIEVLEDQLINTQQQLAEANEHLDMHHQEIQDQEANEDVDIEGGDEPASKDPLDADVWLRVVESKFPLLHGVCSEITKVRFATQQLRGPARTWWDHFLAMQPEDREVEWREFKAAFRGYHIPAGIMDRKLNEFLALTQGNRTVLQYAQAFNDLCQYAGYHADTDEKKRDRFRRGLSTKLRDRLNTVRANSYNELVNMAISQEDCITARQAEKKRKTPVAGPSAQPQRFRIVSDTQGRGPQQQQGRWVIRPQQQQQAPNRNQFPAQRNNQQQQYRQANDNRCFTCGNTGHYAKNCPRNQQRQGQNANQNQGKRQKVQVRQGRLNFTTMADIPEGAPVMTGIFTVLNYPAIILFDSGASHSFISAKFSAKCQLPFHHTNGGITISTPGGRVATYQINKNVPIKFGSLIIKTNLLILGLESVDIILGTDWLTRNQAVIDIAARAIEVHSPTCGGTTLYLPDQGCTRSCAFVMIESPVEKIPVVRDYPDVFPDELPGMPPDRDIEFAIELQPGTAPISKRPYRMPPAELAELKKQLQELLDKGFIRPSTSPWGCPASFVKKKDESLRMCVDYRPLNAVTIKNKYPLPRIDVLFDQLVGAKVFSKIDLRSGYHQIKIRASDIPKTAFSTRYGLYEFLVMSFGLTNAPAYFMYLMNSVFMPELDKFVVVFIDDILVYSKNEDEHTEHLHIVLQRLRDHHLYAKLSKCEFWLREIKFLGHTISQDGISVDPEKVQEVMDWKPPTTVKQIRSFLGLAGYYRRFIPDFSRIAKPMTELLKKGVKFEWSQKCEGAFHTLRQHLTTAPVLAQHDNTKPFEVYCDASGTGLGCVLMQENRVIAYASRALRPHEQNYPTHDLELAAVVHALKIWRHYLMGAHCNIYTDHKSLKYIFTQADLNMRQRRWLELIKDYDLEVHYHPGKANVVADALSRKAQCNCVSMDVGVTTLCDKLCKLSLEVVYSGNLSYISVEPTLQELIVMAQVEDKGVQVIKVMIRQKAEKYKCFRQDSKGILWFGDRLVVPKDPELRKKILDEAHLSKFSMHPGSTKMYHDLRSLYWWTRMKREIAKYISECDTCQRIKASHLKAAGPLQPLPIPSWKWEDICMDFIVGLPNTSRHHDSIWVIVDRLTKTAHFLPVHTTHKTEKYAEIYVDQIVRLHGIPKTIISDRGALFVARFWEKLQESLGTQVIRSSAYHPQTDGQTERVNQILEDMLRACALHYGKDWDKCLSLAEFSYNNSYQSSLKMAPFEALYGRRCRTPLNWSQAGEREIFGPDLVLEAEAKVRVITKNLEAAQARQRSYHDRRRKPLQFVVGDHVYLKVSPTKGVQRFGIKGKLAPRYIGPYEIKASCGPVAYQVELPPHMSAVHNVFHVSQLRKCVRLPTEVLPEPDIEIEPDLSYQEYPVKVLDQKERSTRARSVRMYKVQWSHHSAEEATWETEDFLRSRFPDFLPKGVDCNLADGEYILVPEQGAAKEVAPDPAPGPAPEDLPATALEGKPRFYA

SEQ ID NO: 10416 - protein, 1754 aa, Zea mays
  Clone ID: TF_ZmC36592_144.pep
MTSHGSSDDGNALTHTDGLAREGFPRILWEVLQGAGYTTPPQYAVQQFEKHRVPRCRVRMTLEPHPLQPGWRSLDSESFGYRAEDTIEAIALHGLTTFCGFHPLELATHPIGLFPAEREDDPMWKDRVEHAKDIWAIYPGQTAHLTVRCMNALYRLQVMRGEAMSHLMALLEATKITLDNREELMVDLSQEMVEKDLQVEQLSTDIQELEELVGTRENTIEVLEDQLINTQQQLAEANEHLDMHHQEIQDQEANEDVDIEGGDEPASSVDTAGSGRPPSPESSMAGRQRRGQNERVPPPPPPPPTLQELMAQQNEILRQLAQRQPPPQHYGGGDHQRHPAAATYQEFLSTQPPLFTRAEDPLDADVWLRVVESKFSLLHGACSEVTKVRFATQQLRGPARTWWDHFLAMQPEDREVEWREFKAAFRGHHIPAGIMDRKLNEFLALTQGNRTVLQYAQAFSDLCQYAGYHADTDEKKRDRFRRGLSTKLRDRLNTVRANRYNELVNMAISQEDCITARQAEKKRKTPVAGPSAQPQRFRIVSDTQGRGPQQQQGRCVIRPQQQQAPNRTQFPAQRNNQQQQQYRQANDNRCFTCGNTGHYAKNCPRNQQRQGQNVNQTQGKRQKVQVRQGRLNFTTMADIPEGAPVMTGIFTVLSYPAIILFDSSASHSFISAKFSAKCQLPFHHTNGGITISTPGGRVATYQINRQVPIKFGSLVIRTTLLILGLDSVDIILGADWLTRHQAVLDIAARAIEIHSPAYGETVLYLPNQGCTRSCAFVMLESPVEKIPVVCDYPDVFPDELPGMPPDRDIEFAIEWQPGTAPISKRPYRMPPAELAELKKQLQELLNKGFIRPSTSPWGCPALFVKKKDESLRMCVDYRPLNAVTIKNKYPLPRIDVLFDQLVGAKVFSKIDLRSGYHQIRIRASDIPKTAFSTRYGLYEFLVMSFGLTNAPAYFMYLMNSVFMPELDKFMVVFIDDILVYSKNEAEHTKHLHTVLQRLRDHQLYAKLSKCEFWLKEIKFLGHTISQDGISVDPEKVQEVTDWEPPTTVKQIRSFLGLAGYYRRFILDFSKIAKPMTELLKKGVKFEWGQKCEDAFHTLRQHLTTAPVLAQPDNTKPFEVYCDASGTGLGCVLMQENRVIAYASRALRPHEQNYPTHDLELAAVVHALKIWRHYLMGAHCNIYTDHKSLKYIFTQADLNMRQRRWLELIKDYDLEVHYHPGKANVVADALSRKAQCNCMSMDVGVTTLCDELCRLNLEVVSSGDLSYISVEPTLQEQIVRAQVEDKGVQVIKDMIKQKAEKYKCFRQDSKGILWFGDRLVVPKDPELRKQILDEAHLSKFSMHPGSNKMYHDLRSLYWWTRMKREIAKYVSECDTCQRIKASHLKAAGPLQPLPIPSWKWEGICMDFIVGLPNTSRHHDSIWVIVDRLTKTAHFLPVHTTHKIEKYAEIYVDQIVRLHGIPKTIISDRGALFVARFWEKLQESLGTQVIRSSAYHPQTDGQTERVNQILEDMLRACALHYGKDWDKCLSLAEFSYNNSYQSSLKMAPFEALYGRRCRTPLNWSQAGEMEIFGPDLVLEAEAKVRVITKNLEAAQARQRSYHDKRRKPLRFEVGDHVYLKVSPTKGVQRFGIKGKLAPCYIGPYKIKASCGPVAYQLELPPHMSAVHNVFHVSQLRKCVRLPTEVLPEPDIEIEPDLSYQEYPVKVLDQKERSTRARSVRMYKVQWSHHSAEEATWETEDFLRSRFPDFLPKGVGM

SEQ ID NO: 10417 - protein, 377 aa, Zea mays
  Clone ID: TF_ZmC36592_146.pep
MRTSTLREEMSLPPVWTLLAREDHLPPSRVLLRSLTRCPGFGTVVLSKYVVFQMAGRQRRGQNERVPPPPPPPPTLQELMAQQNEILRQLAQCQPPPQHYGGGDHQRHPAAATYQEFLSTQPPLFTRAEDPLDADVWLRVVESKFPLLHRACSEVTKVRFAAQQLRGPARTWWDHFLAMQPEDREVEWREFKAAFRGHHIPAGIMDRKLNEFLALTQGNRTVLQYAQAFNDLCQYAGYHADTDEKKRDRFRRGLSTKLRDRLNTVRANSYNELVNMAISQEDCITARQAEKKRKTPVAGPSAQPQRFRIVSDTQGRGPQQQQGRWVIRPPQQQQAPNRNQFPAQRNNQQQQYRQANDNRCFTCGNTGHYAKNCPRNQ

SEQ ID NO: 10418 - protein, 1595 aa, Zea mays
  Clone ID: TF_ZM4508.C4.o1.fg.pep
MAISQEDCITARQAEKKRKTPVAGPSAQPQRFRIVSDTQGRGPQQQQGRWVIRPQQQQQAPNRNQFPAQRNNQQQQYRQANDNRCFTCGNTGHYAKNCPRNQQRQGQNANQNQGKRQKVQVRQGRLNFTTMADIPEGAPVMTGIFTVLNFPAIVLFDSGASHSFISAKFSAKCQLPFHHTDGGITISTPGGRVATYQINRHVPIKFGSLIIKTTLLILGLDSVDIILGTDWLTRHRAVIDIAARAIEVHSPTCGETTLYLPDQGCTRSCAFVMIDSPVERIPVVCDYPDVFPDELPGMPPDRDIEFAIELQPGAAPISKRPYRMPPAELAELKKQLQELLDKGFIRPSTSPWGCPALFVKKKDESLRMCVDYRPLNAVTIKNKYPLPRIDVLFDQLVGAKVFSKIDLRSGYHQIKIRASDIPKTAFSTRYGLYEFLVMSFGLTNAPAYFMYLMNSVFMPELDKFVVVFIDDILVYSKNEDEHTEHLHIVLQRLRDHHLYAKLSKCEFWLKEIKFLGHTISQDGISVDPEKVQEVMDWKPPTTVKQIRSFLGLAGYYRRFIPDFSRIAKPMTELLKKGVKFEWSQKCEDAFHTLRQHLTTAPVLAQPDNTKPFEVYCDASGTGLGCVLMQESRVIAYASRALRPHEQNYPTHDLELAAVVHALKIWRHYLMGAHCNIYTDHKSLKYIFTQADLNMRQRRWLELIKDYDLEVHYHPGKANVVADALSRKTQCNCMGMDVGVTTLCDELCKLNLEVVSSGNLSYISVEPTLQEQIIRAQVEDKGVQVIKDMIKQKAEKYKCFRQDSKGILWFGDRLVVPKDPELRKKILDEAHLSKFSMHPGSTKMYHDLRSLYWWTRMKREIAKYISECDTCQRIKASHLKAAGPLQPLPIPSWKWEDICMDFIVGLPNTSRHHDSIWVIVDRLTKTAHFLPVHTTHRAEKYAEIYVDQIVRLHGIPKTIISDRGAPFVARFWEQLQESLGTHVIRSSAYHPQTDGQTERVNQILEDMLRACALHYGKDWDKCLSLAEFSYNNSYQSSLKMAPFEALYGRRCRTPLNWSQAGEREIFGPDLVLEAEAKVRVITKNLEAAQARQRSYHDKRRKPLQFEVGDHVYLKVSPTKGVQRFGIKGKLAPRYIGPYEIKEACGPVAYQVELPPHMSAVHNVFHVSQLRKCVRLPTEELPEPDLEIEPDLSYQEYPVKVLDQKERSTRARSVRMYKVQWGHHSAEEATWETEDFLRSRFPDFLPKGVDCNLADGEYILVPEQGAAQEWTLPLTRPETRSLIPVMVGTSAVTARRPVGVSEALYAKAMTSHGSSDDGNALTHTDGLAREGFPRILWEVLQGAGYTTPPQYAVQQFEKHRVPRCRVRMTLEPHPLQPGWRSLDSESFGYRAEDTIEAIALHGLTTFCGFHPLELATHPIGLFPAEKEDDPMWKDRVEHAKDIWAIYPGQTAHLTVRCMNALYRLQVMRGEAMSHLMALLEATKIMLDNREELVVDLSQEMVEKDLQVEQLSTDIQELEELVGTRENTIEVLEDQLLNTQQQLAEANEHLDMHHQEIQDQEDNEDVDIEGGDEPASSVDTAGSGRPPSPESSVASFAH

SEQ ID NO: 10419 - protein, 328 aa, Zea mays
  Clone ID: TF_ZM4508.C4.o2.fg.pep
MAGRQRRGQNERVPPPPPPPPTLQELMAQQNEILRQLAQRQPPPQHYGGGDHQRHPAVATYQEFLSTQPPLFTRAEDPLDADVWLRVVESKFPLLHGVCSEVTKVRFATQQLRGPARTWWDHFLAMQPEDREVEWREFKAAFRGHHIPAGIMDRKLNEFLALTQGNRTMLQYAQAFNDLCQYAGYHADTDEKKRDRFRRGLSTKLRDRLNTVRANSYNELVNMAFFPKRTALKLDKQRRRGRPPWGPQQQQGRWVIRPQQQQQAPNRNQFPAQRNNQQQQYRQANDNRCFTCGNTGHYAKNCPRNQQRQGQNANQNQGKRQKVQVRQI

SEQ ID NO: 10420 - protein, 741 aa, Zea mays
  Clone ID: TF_ZM4508.C5.o1.fg.pep
LSTQPPLFTRAEDPLDADVWLRVVESKFPLLHGVCSEVTKVRFATQQLRGPARTWWDHFLAMQPEDREVEWREFKAAFRGHHIPAGIMDRKLNEFLALTQGNRTVLQYAQAFNDLCQYAGYHADTDEKKRDRFRRGLSTKLRDRLNTVRANSYNELVNMAISQEDCIKARQAEKKRKTPVVGPSAQPQRFRIVSDTQGRGPQQQQGRWVIRPQQQQQAPNRNQFPAQRNNQQQQYRQANDNRCFTCGNTGHYAKNCPRNQQRQGQNANQNQGKRQKVQVRQGRLNFTTMADIPEGAPVMTGIFTVLNFPAIVLFDSGASHSFISAKFSAKCQLPFHHTDGGITISTPGGRVATYQINRHVPIKFGSLIIKTTLLILGLDSVDIILGTDWLTRHRAVIDIAARAIEVHSPTCGETTLYLPDQGCTRSCAFVMIDSPVERILVVCDYPDVFLDELPGMPPDRDIEFAIELQPGAAPISKRPYRMPPAELAELKKQLQELLDKALFVKKKDESLRMCVDYRPLNAVTIKNKYPLPRIDVLFDQLVGAKVFSKIDLRSGYHQIKIRASDIPKTAFSTRYGLYEFLVMSFGLTNAPAYFMYLMNSVFMPELDKFVVVFIDDILVYSKNEDEHTEHLHIVLQRLRDHHLYAKLSKCEFWLKEIKFLGHTISQDGISVDPEKVQEVMDWKPPTTVKQIRSFLGLAGYYRRFIPDFSRIAKPMTELLKKGVKFELSQKCVKDFHSRGSL

SEQ ID NO: 10421 - protein, 1444 aa, Zea mays
  Clone ID: TF_ZM4589.C1.o8.fg.pep
MAGRQRRGQNERVPPPPPPPPTLQELMAQQNEILRQLAQRQPPPQHYGGGDHQRHPAAATYQEFLSTQPPLFTRAEDPLDADVWLRVVESKFPLLHGVCSEITKVRFATQQLRGPARTWWDHFLAMQPEDREVEWREFKAAFRGHHIPAGIMDRKLNEFLALTQGNRTVLQYAQAFNDLCQYAGYHADTDEKKRDRFRRGLSTKLRDRLNTVRANSYNELVNMAISQEDCITARQAEKKRKTPVAGPSAQPQRFRIVSDTQGRGPQQQQGRWVIRPQQQQQQAPNRNQFPAQRNNQQQQYRQANDNRCFTCGNTGHYAKNCPRNQQRQGQNANQNQGKRQKVQVRQGRLNFTTMADIPEGAPILTGIFTVLNYPAIVLFDSGASHSFISTKFCAKCQLPFHHTNGGITISTPGGRVASYQICRHVPIKLGSLIFKTTLMIMGLDSVDIILGADWLTRHQAVMDIAARAIEVHSPTCGETTLYLRDRGCTRPCAFVMLESPVEKIPVVYDYPDVFPDELPGMPPDRDIEFAIELQPGTAPISKRPYRMPPAELAELKKQLQELLDKGFIRPSTSPWGCPALFVKKKDESLRMCVDYRPLNAVTIKNKYPLPRIDVLFDQLVGAKVFSKIDLRSGYHQIKIRASDIPKTAFSTIYGLYEFLVMSFGLTNAPAYFMYLMNSVFMPELDKFVVVFIDDILRLRDHQLYAKLSKCEFWLKEIKFLGHTISQDGISVDPEKVQEVMDWKPPTTVKQIRSFLGLAGYYRRFIPDFSRIAKPMTELLKKGVKFEWSQKCEGAFHTLRQHLTTAPVLAQPDNTKPFEVYCDASGTGLGCVLMQENRVIAYASRALRPHEQNYPTHDLELAAVVHALKIWRHYLMGAHCNIYTDHKSLKYIFTQADLNMRQRRWLELIKDYDLEVHYHPGKANVVADALSRKAQCNCVSMDVGVTTLCDELCKLNLEVVYSGNLSYISVEPTLQELIVRAQVEDKGVQVIKDMIKQKAEKYKCFRQDNKGILWFGDRLVVPKDPELRKKILDEAHLSKFSMHPGSNKMYHDLRSLYWWTRMKREIAKYISECDTCQRIKASHLKAAGPLQPLPIPSWKWEDICMDFIVGLPNTSRHHDSIWVIVDRLTKTAHFLPVHTTHKTEKYAEIYVDQIVRLHGIPKTIISDRGALFVARFWEKLQESLGTQVIRSSAYHPQTDGQTERVNQILEDMLRACALHYGKDWDKCLSLAEFSYNNSYQSSLKMAPFEALYGRRCRTPLNWSQAGEREIFGPDLVLEAEAKVRVLTKNLEAAQARQRSYHDRRRKPLQFVVGDHVYLKVSPTKGVQRFGIKGKLAPRYIGPYEIKASCGPVAYQVELPPHMSAVHNVFHVSQLRKCVRLPTEVLPELDIEIEPDLSYQEYPVKVLDQKERSTRARSVRMYKVQWSHHSAEEATWETEDFLLIVA

SEQ ID NO: 10422 - protein, 1547 aa, Zea mays
  Clone ID: TF_ZM4783.C4.o3.fg.pep
MTSHGSSDDENALTHTDGLAREGFPRILWEVLQGAGYTTPPQYAVQQFEKHRVPRCRVRMTLEPHPLQPGWRSLDSESFGYRAEDTIEAIALHGLTTFCGFHPLELATHPIGLFPAEKEDDPMWKDRVEHAKDIWAIYPGQTAHLTVRCMNALYRLQVMRGEAMSHLMALLEATKITLDNREELVVDLSQEMVEKDLQVEQLSTDIQELEELVGTRENTIEVLEDQLINTQQQLAEANEHLDMHHQEIQDQEANEDVDIEGGDEPASSVDTAGSGRPPSPESNGRKAAFRGHHIPAGIMYRKLNEFLALTQGNRTVLQYAQAFNDLCQYAGYHADTDEKKRDRFRRGLSTKLRDRLNTIRANSYNELVNMAISQEDCITARQAEKKRKTPVAGPSAQPQRFRIVSDTQGRGPQQQQGRWVIRPQQQQQQGPNRTQFPAQRGNQQQQQYRQANDNRCFTCGNTGHYAKNCPRNQQRQGQNVNQNQGKRQKVQVRQGRLNFTTMADIPEGAPVMTGIFTVLNYPAIVLFNSGASHSFISAKFSAKCQLPFHHTDGGITISTPGGRVATYQINRQVPIKFGSLVIRTTLLVLGLDSVDIILGADWLTRHQAVLDIATRAIEIHSPAYGKTVLYLPNQGCTRSCAFVMIESPVEKIPVVCDYPDVFPDELPGMPPDRDIEFAIELQPGTAPISKRPYRMPPAELAELKKQLQELLDKGFIRPSTSPWGCPALFVKKKDESLRMCVDYRPLNAVTIKNKYPLPRIDVLFDQLVGAKVFSKIDLRSGYHQIKIRASDIPKTAFSTRYGLYEFLVMSFGLTNAPAYFMYLMNSVFMPELDKFVVVFIDDILVYSKNEAEHTKHLHTVLQRLRDHQLYAKLSKCEFWLKEIKFLGHTISQDGISVDPEKVQEVMEWKPPATVKQIRSFLGLAGYYRRFIPDFSRIAKPMTELLKKGVKFEWSQKCEDAFHTLRQHLTIAPVLAQPDNTKPFEVYCDASGTGLGCVLMQESRVIAYASRALRPHEQNYPTHDLELAVVVHALKIWRHYLMGAHCNIYTSHKSLKYIFTQADLNMRQRRWLELIKDYDLEVHYHPGKANVVADALSRKAQCNCMSMDVGVTTLCDELCKLNLEVVSSGKLSYISVEPTLQEQIVRAQVGDKGVQVIKDMIKQKAEKYKCFRQDSKGILWFGDRLVVPKDPELRKKILDEAHLSKFSMHPGSNKMYHDLRSLYWWTRMKREIAKYISECDTCQRIKASHLKAAGPLQPLPIPSWKWEDICMDFIVGLPNTSRHHDSIWVIVDRLTKTAHFLPVHTTHRAEKYAEIYVDQIVRLHGIPKTIISDRGAPFVARFWEQLQESLGTHVIRSSAYHPQTDGQTERVNQILEDMLRACALHYGKDWDKCLSLAEFSYNNSYQSSLKMAPFEALYGRRCRTPLNWSQAGEREIFGPDLVLEAEAKVRVITKNLEAAQARQRSYHDKRRKPLQFEVGDHVYLKVSPTKGVQRFGIKGKLAPRYIGPYEIKEACGPVAYQVELPPHMSAVHNVFHVSQLRKCVRLPT

SEQ ID NO: 10423 - protein, 349 aa, Zea mays
  Clone ID: TF_ZM4853.C2.o5.fg.pep
MAGRQRRGQNERVPPPPPPPPTLQELMAQQNEILRQLAQRQPPPQHYGGGDHQRHPAAATYQEFLSTQPPLFTRAEDPLDADVWLRVVESKFPLLHGVCSEVTKVRFATQQLRGPARTWWDHFLAMQPEDREVEWREFKAAFRGHHIPAGIMDRKLNEFLALTQGNRTVLQYAQAFNDLCQYAGYHADTDEKKRDRFRRGLSTKLRDRLNTVRANNYNELVNMAISQEDCITARQAEKKRKTPVAGPSAQPQRFRIVSDTQGRGPQQQQGRWVIRPQQQQQAPNRIQFLAQRGNQQQQQYRQANDNRCFTCGNTGHYAKNCPRNQQRQGQNANQNQGKRQKVQFYQYQI

SEQ ID NO: 10424 - protein, 1470 aa, Zea mays
  unsure (1)..(1470): unsure at all Xaa locations
  Clone ID: TF_ZM4906.C5.o3.fg.pep
MTSHGSSDDGNALSHTDRLAREGFPRILWEVLQGAGYTTPPQYAVQQFEKHRVPRCRVRMTLEPHPLQPGWRSLDSESFGYRAEDTIEAIALHGLTTFCGFHPLELSTHPIGLFPVEREDDPMWKDRVEHAKDIWAIYPGQTAHLTVRCMNALYRLQVMRGEAMSHLMALLEATKITLDNRKELVVDLSTEMVEKDLQVEQLSNEIQELEELVGTRENTIEVLEDQLINTQQQLAEANEHLDMHRQEIQDMEANEDVDIEGGEEPASSLDTAGSGRPPSPESSMAGRARRGQNERVPPPPPPPPTLQELMAQQNEILRQLAQRQPPPQHYGGGDHQRHPAAATYQEFLSTQPPLFTRAEDPLDADVWLRVVESKFPLLHGVCSEVTKVRFATQQLHGPARTWWDHFLAMQPDDREGNRTVLQYAQAFNDLCQYAGYHADTDEKKRDRFRRGLSTKLCDRLNTVRANSYNELVNMAISQEDCITARQAEKKRKTPVAGPSAQPQRFRIVSDTQSRGPQQQQGRWVIRPEQQQQQAPNRTQFPAQGNNQQQQYRQANDNRCFTCGNTGHYAKNCPRNQQRQGQNVNQNQGKIQKVQVRQGRLNFTTMADIPEGAPVMTGLDSVDIILGADWLTRHQAVLDIAARAIEIHSPAYGETVLYLPDQGCTRSCAFVMIESPVEKIPVRPYRMPPAELAELKKQLQELLDKGFIRPSTSPWGCPALFVKKKDESLRMCVDYRPLNAVTIKNKYPLPRIDVLFDQLVGAKVFSKIDLRSGYHQIKIRASDIPKTAFSTRYGLYEFLVMSFGLTNAPAYFMYLMNSVFMPELDKFVVVFIDDILVYSKNGDEHTEHLHIVLQRLRDHRLYTKLSKCEFWLKEIKFLGHTISQDGISVDPEKVQEVMDWKPPTTVRIAKPMTELLKKGVKYDWSQKCEDAFHTLRQHLTTAPVLAQPDNTKPFEVYCDASGTGLGCVLMQDDKVIAYASRALRPHEQNYPTHDLELAAVVHALKIWRHYLMGAHCNIYTDHKSLKYIFTQADLNMRQRIWLELIKDYDLEVHYHPGKANVVADALSRKAQCNCMSIDARVTTLCDELCKLNLEVVSSGALSYISVEPTLQEQIVRAQIKDKGVQVIKDMIKQKAEKYKCFRQDNKGILWFGDRLVVPKDPELRKKILDEAHLSKFYMHPGSNKMYHDLRSLYWWTRMKREIAKYISECDTCQRIKASHLKAACPLQPLPIPSWKWEDICMDFIVGLPNTSRHHDSIWVIVDNLTKTTHFLPVHTTHRTEKYAEIYIDQIVRLHGIPRTIVSDRGAPFVARFWEQLQESLRTYVIRSSAYHPQTDGQTERVNQILEDMLRACVLHYGKDWDKCLSLAEFSYNNSYQSSLKMALFEALYGRRCRTPLNWSQAGEREIFGPDLVLEAEAKVRVIKKNLEAAQARQKSYHDKRRKPLQFEVGDHVYLKVSPTKGVQRFXIKGKL

SEQ ID NO: 10425 - protein, 1421 aa, Zea mays
  Clone ID: TF_ZM4995.C3.o8.fg.pep
MDPKGKGMVVNDKEKESIFNEPRDDKPTDSGSSHKKKDGKKKRRIKKIIYYDSDASSSSPKDDDDEDSSSKKKTVNQNYSFDYSRMLYNSNAHLLSIPLGKPPHFDGEDYSFWSHKMCSYLFSLHPSIWEIVENGMHFDNTDNAVFINEQIHKNAQATTVLLASLCRDEYNKVSGLDNAKQIWDTLEISHEGNDATMITKMELVEGELGRFTMIRAEEPTQTYNRLKALVNKIRSYGSTRWTDHDVVRLMLRSFTVIDPHLVNLIRENPRYTKMTPEEILGKFVSGRMMVKEARYVDDALNGTLPVYELQPVALKATSSREALPSKVAQVEAAGLNEDEMALIIKRFKTALKGRKEYPNKNKTRGKRSCFQCGKTGHFIANCPDNDSDQGQEKSEKKEKKKNYRKAKGEAHLGKEWDSDCSSFDSDDEGLAASAFNKSSLFPNERHTCLMAKEKKVCVRDTPKYTSSSDEESSDDEVDYSSLFKDKLLEKQEDILYEEHDKFISVQKSLALEIKRNEMLSSELSACHESVSSLRSLNDDLNAKLEEVNKSSSCVEHAVICNRCKDFDVDAYNEHIVSITKSSNEVASLNAQLKTCKDDFNKLKFVRDAYTIGRHPSIKDGLGFRKETKNLTSQKDHVLNKEKGKAPMVYASGGSSWIIDSRCTNHMTGEKKMFTSYVKNKDSQDTIIFGDGNQGKVKGLGKIAITNEHSISNVFLVGSLGYNLLYGGHVLGLTNVCFDKDRPCAACQAGKHVGSTHHSKNMMTTSRPLELLHMDLFGPVAYLSIGGSKYGLVIIDDFSRFTWVFFLQDKSETQGTLKRFLRRAQNEFELKVKKIRSDNGSEFKNLQVEEYLEEEGVKHEFSAPYTPQQNGVVDRKNTTLIHMARTMLGEFKMPERFWSEAVNTACHAINRLYLHHLLKKTSYELLTGNKPNISNFRVFGSKCYILVKKGRHSKFAPKAVEGFLLGYDSNTKAYRVFNKSSGLVEVSSDVVFDETNGSPREQVDLDDIDEDDVPKAAMRMMAIGDVRPQEQQEQDQPSSSTMVHPPTQDGKQEELNNFKRNEVWSLVPRPKQNIVGTKWVFHNKQDEHGVVTRNKARLMAKCYAQVAGLDFEETFAPVARLESIQILLSYVAHHSFRLFQMDVKSAFLNGPIKEEVYVEQPPGFEDDRYPDYVFKLSKALYGLKQAPRAWYECLRDFLIVNAFKVGKADPTLFTKTCDGDLSVCQIYVDDIIFGSTNQKSCEEFSRVMTQKFEMSMMGELTYFLGFQVKQLKDDTFISQTKYTQDLLKRFGMKDAKPVKTPMGTDGHVDLNKGGKSVDQKAYRSMIGSLLYLCASRPDIMLSVCMCARCKSDPKECHLVAVKRILRYLVSTPCFGIWYPKGSTFDLIGYSDSDYAGFKVDRKSTSGTCQFLGKSLVSWSSKK

SEQ ID NO: 10426 - protein, 341 aa, Zea mays
  Clone ID: TF_ZM4997.C1.o9.fg.pep
MWKDRVEHAKDIWAIYPGQTAHLTVRCMNALYHLQVMRGEAMSHLMALLEATKITLDNREELVVDLSQEMVEKDLQVEQLSTDIQELEELVGTRENTIEVVEDQLLNTQQQLAEANEHLDMHHQEIQDQEANEDVDIEGGDEPASNTDEKKRDRFRRGLSTKLRDRLNTVRANNYNELVNMAISQEDCITARQAEKKRKTPVAGPSAQPQRFRIVSDTQGRGPQQQQGRWVIRPQEQQQAPNRTQFPAQRSNQQQQQYRQANDNRCFTCGNTGHYAKNCPRNQQRQGQNVNQNQGKRQKVQVRQGRLNFTTMTDIPEGAPVMTGIFTVLNYPAIILFDSGA

SEQ ID NO: 10427 - protein, 214 aa, Zea mays
  Clone ID: TF_20507166.pep
SKFQRWDDNASGSSSGGTVHSYKEALLSSSSATSLELEVRTSTIARPKLCDKERRLCRREDLVPVDKEDGWQVVKSRKQSRCASARRGTSVNLRGRCFNCLSPNHLVASCRCPPRCFRCFKLGHQASRCPAIQAGPLQLKTPGRLRDRLEFDRSYPVGKRSVWHRLEEPGKRLSVFKRLSSHKVPPPAVQSWECCSSKEEEVSLGAYLSRTPNI

SEQ ID NO: 10428 - protein, 1763 aa, Zea mays
  Clone ID: TF_ZM5054.C12.o3.fg.pep
MDPKGKGIVINDKEKESFVNEPRDDKSNDSGSGHRRKDGKKKTRHIKEIVYYDSDESTSSQKDDDHNEYERKKPVNSNFSFDYSRIPQSTNAHLLSIPLGKPPHFDGEYYGFWSHKMRSHLFSLHPSIWEIVESGMHFDSTDSPMFINEQIHKNAQATTVLLASLCRDEYHKVSGLDNAKQIWDTLKISHEGNDVTLLTKMELVEGELGRFAMIRGEEPTQTYNRLKTLINKIRSYGSTRWTDHDVVRLMLRSFTVLDPHLVNNIRENPRYTKMSPEEVLGKFVSGRMMIKEARYVDDALNGPIHEPQPIALKATRSKEALPSKVAQVEAVGLNNEEMALIIKRFKTALKGRKGQTSKTKTKEKRSCFKCGKIGHFIAKCPDNESDQEKGNKREKKKHYKKAKGEAHIGKEWDSDCSSSDSDNEGLAATAFSKSSLFPNERHTCLMAREKKVSTHDTSTYASSSEDESSDDDEIDYSCLFKGLDRSKINKINELIDALNDKNRLLEKQEDLLYEEHDKFVSAQNSLALEIKRNEMLSSELSTCHESISKLKSVNDDLNAKLEIASKSTSCVEIVETCNRCKDFDIDACSEHLVSISKLNDELASLNAQLKTSKSNFDKLKFARDAYTIGRHPSIKDGLGYKKEAKNFTSHKAPISAKEKGKAPMASSEQKNHAFMYHDRRQSRNAYRRCNAYDAFDSHDMFASSSSYVHDRNVGYASGGSSWIIDSGCTNHMTGEKKMFTSYVKNKDSQDSIIFGDGNQGKVKGLVESLGYNLLSVSQLCNMGYNCLFTNVDVSVFRRSDGSLAFKGVLDGKLYLVDFAKEEAGLDACLIAKTSMGWLWHRRLAHVGMKNLHKLLKGEHVIGLTNVQFEKDRPCAACQAGKQVGGAHHSKNVMTTSRPLELLHMDLFGPVAYLSIGGCKYGLVIVDDFSRFTWVFFLQDKSETQGTLKRFLRRAQNEFELKVKKIRSDNGSEFKNLQVEEFLEEEGIKHEFSTPYTPQQNGVVERKNRTLIDMARTMLGEFKTPERFWSEAVNTACHAINRVYLHRLLKKTSYELLTGNKPNVSYFRVFGSRCYILVKKGRNSKFAPKAVEGFLLGYDSNTKAYRVFNKSSGLVEVSSDVVFDETNGSPREQVVDCDDVDEEDVPTAAIRTMAIGEVRPQEQDERDQPSSSTTVHPPTQDDEQVHQKEACDQGGAQDDHVMEEEAQPAPPTQVRAVIQRDHPVDQILGDISKGVTTRSRLVNFCEHYSFVSSIEPFRVEEALLDPDWVLAMQEELNNFKRNEVWTLVPRPKQNVVGTKWVFRNKQDEHGVVTRNKARLVAKGYAQVAGLDFEETFAPVARLESIHILLAYVAHHSFRLYQMDVKSAFLNGPIKEEVYVEQPLGFEDERYPDHVCKLSKALYGLKQAPRAWYECLRDFLIANAFKVGKADPTLFTKTCDGDLFVCQIYVDDIIFGSTNQKSCEEFSRVMMQKFEMSMMGELNYFLGFQVKQLKDGTFISQTKYTQDLLKRFGMKDAKPAKTPMGTDGHTDLNKGGKSVDQKAYRSMIGSLLYLCASRPDIMLSVCKCARFQSDPNECHLVAVKRILRYLVATPCFGLWYLKGSTFDLVGYSDSDYAGCKVDRKSTSGTCQFLGRSLVSWNSKKQTSVALSTAEAEYVAAGQCCAQLLWMRQTLRDFGYNLSKVPLLCDNESAIRMAENPVEHSRTKHIDIRHHFLRDHQQKGDIEVFHVSTENQLADIFTKPLDEKTFCRLRSELNVLDSRNLD

SEQ ID NO: 10429 - protein, 1259 aa, Zea mays
  Clone ID: TF_ZmC19623_3.pep
MRSSSSSGAEPESEPWGRAKRSSSSSGAEPESEPWVGQSGVRRLPGLSPSPSPGSGEAELPMALEDGLGCCQPHSAEWRSSRSGAGSAVLLSGRCFTCGNTGHYAKNCPRNQQRQGPNANQNQGNRQKVQVRQGRLNFTTMADISEGAPIMTGIFSVLNYPAIILFDSGASHSFISAKFSAKCQLPFHHTNRGITISTPGGRVATYQINKNVPIKFGSLIIKTNLLILGLDSVDIILGTDWLTKHQATMDIAARAIEVHSPTCGETTLYLPDQGCTRSCAFVMIGSPVERIPVVCDYPDVFSNELPWMPPDRDIEFAIELQPGTAPISKRPYRMPPAELAELKKQLQELLDKGFIRPSTSPWGCPALFVKKKDESLRMCVDYRPLNAVTIKNKYPPPRIDVLFDQLVGAKVFSKIDLRSGYHQIKIRASDIPKTAFSTRYGLYEFLVMSFGLTNAPAYFMYLMNSVFMPELDKFVVVFIDDILVYSKNEDEHTEHLHIVLQRLRDHHLYAKLSKCEFWLTEIKFLGHTISQDGISVDPEKVQEVMDWKPPTTVRQIRSFLGLAGYYRRFIPDFSRIAKPMTELLKKGVKFEWSQKCEDAFHTLRQHLTTAPVLAQPDNTKPFEVYCDASGTGLGCVLMQENRVIAYASRALRPHEQNYPTHDLELAAVVHALKIWRHYLMGAHCNIYTDHKSLKYIFTQADLNMRQRRWLELIKDYDLEVHYHPGKANVVADALSRKAQCNCMSMDVGVTTLCDELCKLNLEVVSSGDLSYISVEPTLQEQIVRAQVEDKGVQVIKDMIKQKAEKYKCFRQDSKGILWFGDRLVVPKDPELRKKILDEAHLSKFSMHPGSNKMYHDLRSLYWWTRMKREIAKYISECDTCQRIKASHLKAAGPLQPLPIPSWKWEDICMDFIVGLPNTSRHHDSIWVIVDRLTKTAHFLPVHTTHKTEKYAEIYVDQIVRLHGIPKTIISDRGALFVARFWEKLQESLGTHVIRSSAYHPQTDGQTERVNQILEDMLRACALHYGKDWDKCLSLAEFSYNNSYQSSLKMAPFEALYGRRCRTPLNWSQAGEREIFGPDLVLEAEAKVRVITKNLEAAQARQRSYHDKRRKPLQFEVGDHVYLKVSPTKGVQRFGIKGKLAPRYIGPYEIKATCGPVAYQLELPPHMSAVHNVFHVSQLRKCVRLPTEVLPEPDIEIEPDLSYQEYPVKVLDQKERSTRARSIRMYKVQWSHHSAEEATWETEDFLRSRFPDFLPKGVGM

SEQ ID NO: 10430 - protein, 685 aa, Zea mays
  Clone ID: TF_ZmC951_442.pep
MTMSSQEVTLELLLGDGSNYKSWSVSIYNAFMHIDPDLRQIFSRSIFPSNISKNPSNTELRCLSLNHHACNILVDSLSRGAYFAIMSSDSDLFVDAHDLWTRIKIKYSESNCTTSTPYVACGTNLSKGEEKRWQPNDESTSPTGLSSTSYKCLIANNDSGDESDDEEEYEDDSEDESSSPQGTFSCIASTNNNDRENETGDAEEEEIRRFYTNLNKEDKVLLVKLLSRNKEQGETLLRLEETLIKTNDSLEKMTKEHEELKCSHDNLVQRYESILFEQRNNHDVLSDVAQLKIENSMLRNKVELLSHDNLALTQKYDLLSCYHDNLLDRHIMLEVAHEVVITNLNSCELHSCTSTHSDISSPCANPCLSKESQCLNKHQAAGSQKKLCGNKKAKQLRRRRIAQPPQDIHGRMVKKLETGETAASVKLHKKDAPKAINEEINMNKEKGKNSISHVVCTDHLSMSSKSKKGRGKRRCFKCKELGHFIASCPHKDKDEGMRRCFGCNDKDHMITSCPLMKNQRRAPSKMTLTKQKDKQQVSSQVERRFCYMCGKHGHLPKSQGGKGKMSKKWSDQDLGTSTSRVIATRKGQDKGSDISVKELRLLRWKVHHNMVKIFMWFWRFKIGILMVNSETIDQAKDGGKKRFEVPSAREKVKETRIPKPGVKKKTCKVKVDRVKKSYGASRITT

SEQ ID NO: 10431 - protein, 183 aa, Zea mays
  unsure (1)..(183): unsure at all Xaa locations
  Clone ID: TF_LIB5117-011-Q1-PF1-F3.pep
RHAQFPAPAPNNRNTREAFAEEESRPAPRRCGWASILGHQPPPAPTTVAAAPPGATPVVCFNCGEEGHCQVECKQPPTCFKCKRMDHPTLLCPDQSTEXELMLFGYALDDLGFLQMDLSEPAATPSLTALVSALGGKTASPAIIMDELRHLFRPDWDWEVTPISDHDFTAVYPDLVSLRYHTH

SEQ ID NO: 10432 - protein, 935 aa, Zea mays
  Clone ID: TF_ZmC363_1.pep
MNPKGKGTVVNDKDKESFLNEPREDKPTDSGSNHKKKDGKKKRRIKKIVYYDSDESSSSQRDDDDEKKKSVNSNFSFDYSRIPFNSNAHLLSIPLGKPPHFDGEDYSFWSHKMCSHLFSLHPSIWEIVENEMLFDSTDNPVFINEQIHKNAQATTVLLASLCRDEYHKVSGLDNAKQIWDTLKISHEGNDATMITKMELVEGELGRFAMIRGEEPTQMYNRLKTLVNKIRSLGSTRWTDHDIVRLMLRSFTVLDPHLVNSIRENPRYTKMTPEEILGKFVSGRMMIKEARYIDEALNGPMPIYEPQTVALKATSSMEALPSKVAQVEAAGLNEDEMALIIKRFKIALKGRKEYSNKNKAKGKCSCFKCGKTGHFIAQCPDNENDQEDERHGKREKKKAYKKAKGEAHLGKEWESDCSSSDSDDEGLAASAFNKSSLFPNERHTCLMAKEKKVNARETPKYSTSSDEDSSDDEVDYTSLFKGLDRAKVEKINELIDALNEKDRLLERQEDILYEEHDKFVSVQKSLALEIKRNELLSSELSICNESISSLKILNDDLNAKLEVVNKSSPCVEHVVICNRCKDFNIDACVEHLNSIAKLNDEVESINAQLKTCKDDFDKLKLARDAYTIGRHPSIKDGLGFRREAKNLTSQRAPILNKEKGKAPMDSSSQKNHAFIYDRKFSRNAHYNRSYNAYDSHAMIVSSSSFVHSRNMPRNNVVHHVPRKMQNESATVFHACNTDFVLSCKNKKVVARKLGAKCKGDKTCIWVPKAIVTNLVGPNKSWVYASEGSSWIVDCGCTNQMTEEKKMFTSYVKNKDSKDSIIFGGGNQGKDKTETQGTLKRFLRRAQNEFELKVKTIRSDNGSEFKNLQVEEYLEEEGIKHDFSTPYTPQQNVKKGRNSKFAPKAVEGFLLDYDPSKMIGDTLKGIIVRDDSTILYS

SEQ ID NO: 10433 - protein, 1314 aa, Zea mays
  unsure (1)..(1314): unsure at all Xaa locations
  Clone ID: TF_ZM4793.C2.o5.fg.pep
MELVEGELGRFAMIRGEEPTQTYNRFKTLVNKIRSYGSTRWTDHDVVRLMLRSFNVIDPHLVNLIRENLKYIKMTPEEILGKFVSGSMMVKEARYVDDALNGPLPVYEPQPVALKATSSREALPSKVAQVEAVGLNEDEMALIIKRFKTALKGRKEYPNKSKAKGKCSCFKCGKTGHFIAQCPDNNNDQEQEKHGKREKKKAYKKAKGEAHLGKEWDLDCSSSDSDEEELAASAFNKSSLFPNERHTCLMAKEKKVSVRETPKYTTSSDDDSSDDEVDYTDSFKGLDRAKVDKINELIDALNEKDRLLEKQEGILYEEHDKFVSVQKSLALETKRNKMLSSELSVCHESISSLKILNNDLNVKLEVANKSSSCVEHVAISNRCKDFDVDACVEHLTSITKLNDKVASLNTQLKTCKNDFDKLKFARDAYTIGRHHSIKDGLGFRKEAKNLTSQKAPILAKEKGKGPMASSVQKNHAFLYNRKIASHXIGDMIMMLVYASGGSSWIIDSGCTNHMTGEKKMFTSYVKNKDSQDTIIFGDGNQGKVKEGAMADLDACLISKTSMGWLWHRRLAHVGMKNVHKLLKGEHVLGLTNVCFEKDRPSSGEQNGVVERKNRTLIDMARTMLGEXQTPERFWSEVVNTACHAINRLYLHRLLKKTSYELLTGNKPNVSYFRVFGSKCYILVKKCRHSKFAPKVVEGFLLGYDSNTRAYRVFNKSSGLVEVSSDIVFDENNGSPREQVDLDDIDEDDVPTAAMRAMAIGDVRPQEQQKQDQPSTSMMVQPXTQDDEQVPQEEACDQGGAQEEQXPFRVEEALQDPDWVLAMQEELNNFERNEVWSLVPRPKQNFVGTKWVFRNKQDEHGVVTRNKARLVAKGYAQVAGLEFEETFAPVARLESIRILLAYVAHHSFRLFQMDVKSAFLNGPIKEEVYVEQPPGFEDDRYPDHVFKLSKALYGLKQAPRAWYECLRDFLIANAFKVGKANPTLFTKTCDSDLFVCQIYVDDIIFGSTNQKSCEEFSRVMTQKFEMSMMGELTYFLGFQVKQLKDGTFLSQTKYTQDLLKRFGMKDAKPAKTTMGTDGHVDLKKGGKSVDQKAYRSMIGSLLYVCASRPDIMLSVCMCARFQSDPRECHLVAVKRILRYLVATPCFGIWYPKGSTFDLIGYSDSDYAGCKVDRKSTSGTCQFLGRSLVSWSSKKQTSVALSTTEAEYVAAGQCCAQLLWMRQTLSDFGYNLSKVPLICDNESAICMADNPVEHSRTKHIDIRHHFLRHHQQKGDIKVFYISTENQLADIFTKLLDEKTFCRLRSELNVLDLRNLD

SEQ ID NO: 10434 - protein, 1560 aa, Zea mays
  Clone ID: TF_ZM5106.C2.o13.fg.pep
MDPKGKGMVVNDKEKESVFNEPRDDKPTDSGSSHMKKDEKKKRDEYHKVSGLYNAKQIWDTLKISHEGNDATMITKMELVEGELGRSFTILDPHLVNSIRENPRYTKMTPEEILGKFVSGRIMIKEARYIDEALNATSSREALPSKVAQVEAAGLNKDEMALIIKRFKTALKGCKEYSNKNKAKGKCSCFKCGKTGHFIAQCPDNENDQGDERHGKRENKKVYKKAKGEAHLGKEWDSDCSSSDSDDEGLAASAFNKSSLFPNERHTCLMAKEKKVNAQETPKYSTSSDDDSSDDEVDYTSLFKGLDRAKVEKINELIDALNEKDRLLERQEDILYEEHDKFVSVQKSLALEIKRNELLSSELSICNESISSLKILNDDLNAKLEVVNKSSPCVEHVVICNRCKDFNVDVCDEHLISISKLNDEVASLNAQLKTCKSDFDKLKFARDAYTVGRHPSIKDGLGFKREAKNLTSQRAPIFNKEKGKAPMASNSQKNHAFIYDRKFSRNAHHNRSYNAYDSHAMIVSSSSFVHSRNMTRNNVVHHVPKKMQNKSATVFHACNTDFVLSCKNKKVVARKLGAKCKGDKTCIWVPKTIVTNLVGPNKSWVYASGGSSWIIDSGCTNHMTGEKKMFTSYVKNKDSQDSIIFGDGNQGKVKGLGKIAISSEHSISNVFLVESLGYNLLSVSQLCNTGYNCLFTNVDVSVFRRSDGSLAFKGVLDDKLYLVDFSKEEAGLDACLIAKTSIGWLWHRRLAHIGMKNLHKLLKGEHVLGLTNVTFKKDRPCAACQAGKQVGSSHHSKNVMTASRPLELLHMDLFGPVAYLSIGGSKYGLVIVDDFSRFTWVFFLQDKTETQGTLKRFLRRDQNEFELKVKKIRSDNGSEFKNLQVEEYLEEEGIKHEFFAPYTPQQNGVVERKNRTLIDMARTMLGEFKTPERFWSEAVNTACHAINRVYLHRLLKKTSYELLTGNKPNVSYFRVFGSKCYILVKKVRNSKFAPKAVEGFLLGYDSNTKAYRVFNKSSGLVEVSSDVVFDETNGSPREQVDLDDVEEDDVPTAAIRTMAIGDVRPQEQKEQDQPSSSTMVHPPTQDDEQIQAKQDLRIRTFATGRLGLASPPGWLVAARLPLAVWDWLSYSFVSFIEPFRVEEALLDPDWVLAMQEELNNFKRNEVWTLVPHPKQNIVGTKWVFRNKQDEHRVVTRNKARLVAKGYAQVAGLDFEETFAPVARLESIRILLAYVAHHSFRLFQMDVKSAFLNGPIKEEVHVEQPPSFEDERYPDHVCKLSKALYGLKQAPRAWYECLRDFLIANAFKVGKADPTLFTKTCDGDLFVCQIYVDDIIFGSTNQKSCEEFSRVMTQKFEMSMMGELNYFLGFQVKQLKDDTFISQTKYTQDLLKRFGMKDAKPAKTPMGTDGHVDLNKGGKSVDQKTYRSMIGSLLYLCASRPDIMLSVCMCARFQSDPRECHLVAVKRILRYLVATPCFGIWYPKGSTFDLIGYSDSDYARCKVDRKSTSGTCQFLGRSLVSWSSKKQTSVALSTAEAEYVAAGQCCAQLLWMRQTLRDFGY

SEQ ID NO: 10435 - protein, 1544 aa, Zea mays
  Clone ID: TF_ZmC951_321.pep
MSEELAKKEMETGDKPTTSHGKASSEESRNKEKRKEKKKENKTSSHKSHRSGDKIKKMRKVVYYETDTSSPSTSGSDAPSITSKRHERKKFSKIPLHYPRTYRHTPLLSVPLGKPPTFDGEDYARWSDLMKFHLTSLHKSIWNVVEFGVQVPSIGDEDYDSDEVAQIHHFNSQATTILLASLSREEYNKVQGLKSAKEIWDVLKTAHEGDEVTKITKRETIEGELGRFMLHQGEDPQAMYNRLKTLVNQVRNFGSEKWDDHEMVKVILRSLVFLNPTQVQLIRGDPRYKLMSPEEVIGKFESFELMIKGSKKIIEQGTSSTPEAQPVAFKATEEKKEESTSSRQPIDASKLDNEEMALVIKSFRQILKQRKGKDYKSRSKKVCYTCGKPGHFIAKCPISSDSDRGDDKKGRRKEKKKYYKKRGGDAHVCREWDSDESSSDSSDDEDAANIAVTKGLLFPNVGHKCLMAKDGKKKKVKSKSSTRYESSSDENASDEEDNLHTLFANLNMQQKEKLNELISAIHEKDDLLDSQEDFLIKENKKHVKVKNAYALEVEKCEKISSELSTCHETIDNLRNENANLLAKVDSNACNVSIPNLRNDNDDLLAKIEELNLSLVSLRNENEKLIATAKDFDVCNATISNLRSENDILHAKVVELKSCKPSTSIVEHVSICTRCKDVDINAIHDHMSLIKQQNDHIAKLDAKIAEHNLENEKIKFARSMLYNGRRPGIKDGIGFQRGDNVKLSAPPKRLSNFVKGKAPMPQDNEGYILYPAGYPESKIRRIHSRKSHSGPNHAFMYKGETSSSRQPTRAKLPKKRTPNASNDHDISFKTFNASYALTNKSSNVVAKFVGGKHKGSKTCVWVPKVLVSNAKGPKTVWEKSQTQETLKGFLRRAQNEFGLRIKKIRSDNGTEFKNSQIEGFLEEEGIKHEFSSPYTPQQNGVVERKNITLLDMARTMLDEYKTSDRFWAEAVNTACYAINRLYLHRILKKTSYELLTGKKPNISYFRVFGSKCFILVKRGRKSKFAPKTVEGFLLGYDSNTRAYRVFNKSSGQVEVSCDVVFDETNGSQVEQVDLDEIGIEEALCIALRNMSIGDVCPKESEEPPNAQDQPSSSTQASPPTQNEDEAQVDEVEDQANEPPQDDGNDQGGDANDQDKEDEEQRPPHPRVHQAIQRDHPVDTILGDIHKGVTTRSRVAHFCEHYSFVSSIEAHRVEEALQDSDWVVAMQEELNNFTRNEVWHLVPRPNQNVVGTKWVFRNKQDEHGVVTRNKARLVANGYSQVEGLDFGETYAPVARLESIRILLAYATYHGFKLYQMDVKSAFLNGPIKEEVYVEQPPGFEDSEYPNHVYKLSKALYGLKQAPRAWYECLRDFLITNGFKVGKAGPTLFTKTLENDLFVCQIYVDDIIFGSTNESTCEEFSRIMTQKFEMSMMGELKYFLGFQVKQLQEGTFLSQTKYTQDILSKFGMKDAKPIKTPMGTNGHLDLDEGGKSVDQKKEHIGDLPVLGKVLGVLGFKEAKFRSSFYRRSRVYCRRTFLRATTLDEANP

SEQ ID NO: 10436 - protein, 534 aa, Zea mays
  Clone ID: TF_ZmC14166_298.pep
MGIWWLRAINIPQPPQLQASKFSEVLIQYKNHAKREIVTGDKLASSGRTLSRESDNKHKEESSSSIKSHQRGDKKKEMKKVVYYKSTKYSKMPLRYPCISKRAPLLSVPLGKPPYFDGEDYSMWSDKMRHHLTSLHESIWNIVEFGAQVPMVGNEGYDSDEVAQIRHFNSQATTILLASLCRDEYNKVQGLKSVKEIWDVLKTAHEGDEVTKITKRKTIKGELGRFILNKGEEPQAMYNRLKTLVNQVRNLGSTKWDGHEMVKVILRTLVFRNPTQVQLIRGDPRYKQMSPDKLPPNPQAKRGKDYKPRSKRVCYKCGKPSHFIAKCPNSSDSDRGDDKKRKKKEKKRYYKKKGGDAHVCREWDFDESSTDPSADEDAANIAVNKGLLFPNVDHKCFMAKDGKKKKHGTKGKKLNELIEAIHEKDDLLESQEDFLIKENKKHVKLKNAYAQEVEKCENLTKELSVCHNSITSLRNENANLNAKIDELNICNESISSLRTENASLVSKVKELNVCNDSISCLRNENTILHAKIED

SEQ ID NO: 10437 - protein, 619 aa, Zea mays
  Clone ID: TF_ZmC4916_442.pep
MDPKGKGIVINDKEKESFINEPKDDKPTDSGSGHKCKDGKKKKTRRIKEIVYYDDSDESTSSQKDNDDNDYERRKPVNSNFSFDYSRIPQSTNAHLLSIPLGKPPHFDGEDYGFWSHKMRSHLFYLHPSIWEIVESGMKFDSSDSPMFINEQIHRNAQATTVLLASLCRDEYHKVSGLDNAKQIWDTLRISHEGNDVTLLTKMELVEGELGRFAMIRGEEPTQTYNRLKTLINKIRSYGSTQWTDHDIVRLMLRSFTVLDPHLVNNIRENPRYTKMSPEEVLGKFVSGRMMIKEARYVNDALNGPIHEPQPIALKATRSKEALPSKVAQVEAAGLNDEEMALIIKRFNTALKGRKGQPSKTKTKGKCSCFKCGKVGHFIANCPDNDSDQEQENKREKKKNYNKAKGEAHLGKEWDSDCSLSDSDNEGLAATAFNKSSLFPNEHHTCLMAREKKVSTHNTSTYASSSDEESSDDEVDYSCLFEGLDRTKVDKINELIDALNDKNRLLEKQEDLLYEEHDKFVEAQKSLALEIKGNEMLSCELSTCHDSISSLKSINDDLTAKLEIGNKSTSCVEHVAICNRCKDFNVDACSEHLVSISNLNDEVASLNAQLKTSKSVFTN

SEQ ID NO: 10438 - protein, 886 aa, Zea mays
  Clone ID: TF_ZM4578.C2.o8.fg.pep
MEWIRKTENFIDRAFALSRGTDVRCPCSMCRVCRCQDKRTLSGHLCKYGYMPNYEVWVYHSEELPRENVFEAHNNDDVEYDRMEEMLQDLREDPDFVFPPHSKELPPDVKKFFDLLKAAEEPLHEHTKVSILAFVTRLMAIKSKYVFSNNCYNELLILISEVFPPNHKMPKDVYQCRKLLSGLDGVETEEGRQVGNVDDEVETEEGRQVGDDDEVETEEGRQVGDDDEVETEEAETWWGCHDTGGFGHDSHSGWREWPEDASGWPRDGGSGVGGASGSREGEACGFGSGGVGGAWVDSSFTGTGRRRQVKKVLGNICRMKWPGLVIEDGKEVPVTRWDQYALAINAQHGNAQAAVWHDFWKHYKLPEGDTHTEHAHSVFHRNAASVVGDMMYYARIQHSIPWIAVNDAAWHALCRYWASVEFKAKSVRHSSNRGTESYHRYGGDDHFRLAKRMEASTGAVPSDVQIYLRGHRGPDPANPDVLYSQKATDRVAAYGEAMTSQHGPDYDWRTSPIDPQAVYASGGKAHGRYTMFANVIDSSQTPPATLPTHEQEDRLDFVDTLLNSGGIDGDRRPHLVNSCHKKVVEINKVQKKRKHPQTHASTKNKQRKETTGKISYAVTGTIPYDDAVIFGTLVIHTTIAIVLYDPRTTHSFISSQFATKYGIFKCPLRSRKTISTPEGKTLVNYICPKVSVKINGIDFPADLLVIETMGKDVILGKNWLQRTKAMMNPNGNEVNDADDNIPTLTTRNEKNESQRYLMNGMKNNKRNRKMFGYMISSSQPQAKAPKHMDTQTEESSQTQLHEIQTPNQPSPPVGQAKLTRKELKARGGCYYCKNEGHLIRECPKKRLDRIKKKAAKHDLSNNSEDPPFYKYDDEGRLVSIHFGAEK

SEQ ID NO: 10439 - protein, 1002 aa, Zea mays
  Clone ID: TF_ZM4622.C5.o3.fg.pep
MDPKGKGMVVDNNEKESIFNEPKDDKPTDSGSGHKRKDGKKKKTRRIKEIVYYDNDESSSSQKDDDDYEKKKTVNSNFSFDYSRIPQSTNAHLLSIPLGKPPHFDGEDYGFWSHKMCSHLFSLHPSIWEIVESGMHFDSTDSPMFINEQIHKNARATTVLLASLCRDEYHKVSGLDNAKQIWDTLKISHEGNDVTMLTKMELVEGELGRFAMIRGEEPTQTYNRLKTLVNKIRSYGSTRWTDHDVVRLMLRSFTVLDPHLVNNIRENPRYTKMTPEEILGKFVSGRMMIKEARYMDDALNGPINEPQPLALKATRSKETLPNKVAQIEAAGLNDEEMALIIKRFKTTLKGRKGQPSKTKTKGKRSCFKCGKLGHFIASCPDNDSDQDQGNKREKKKNYKKAKGKAHLGKEWDSDCSSSDSDNEGLAATAFNKSSLFPNERHTCLMAREKKVCTRNSTYASSSEDESSDEDEIDYSCLFKGLDRTKVDKINELIDALNDKNRLLEKQEDLLYEEHDKFVEAQKSHALEVKRNEMLSCELSSCHETISNLRNINDDLNAKLEIASKLTSCVEIVATCNRCKDFDIDACSEHLVSISKLNDELASLNAQLKTSKSEFDKLKFARDAYTIGRHPSIKDGLGFKREANNLTIHKVPIPAKEKGKAPMASSTKKNHAFMYHNTRHARNDYRSYDSHAMFASSSSYMHDRDMSRRYVHHVPRKNIVHVSRKVMDGPSTIYHALNASFTICRKDRKIVARKLGAKCKGDKTCIWVPKTIVTNLVGPNKSWGYASGGSSWIIDSGCTNHMTGEKKMFTSYVKNKDSQDSIIFGDGNQGKVKGLGKTAISNEHSISNVFLVESLGYNLLSVSQLCNMGYNCLFTNVDVSVFRRSDGSLAFKGVLDGKLYLVDFAKEEAGLDACLIAKTSMGWLWHRRLAHVGMKNFHKLLKGEHVIGLTNVQFEKDRPCAACQAGKQVGGAHHSKNVMTTSRPLELLHMDLFGPVAYLSIGG

SEQ ID NO: 10440 - protein, 215 aa, Zea mays
  Clone ID: TF_ZM4895.C2.o1.fg.pep
MDPKGKGIVINDKEKESFVNEPKDDKPTDSGSGHRRKEGKKKKTRRIKEIVYYDDSDESSSSQKDNDDNDYDKQKTATRSKEALPSKVAQIEAAGLNDEEMALIIKRFKTALKGRKGQPSKTKTKGKRSCFKCGRLGHFIANCPDNDSDQEHGSKREKKKYYKKAKGEAHIGKEWDSDCSSSDFDNEGLAATAFNKSSLFPNECHTCLMAREKKV

SEQ ID NO: 10441 - protein, 1703 aa, Zea mays
  Clone ID: TF_ZmC951_398.pep
MSGDHAKKEMETGEKPTTSYGSTSSEESRTKRREKKKSSSNKGKEKKSSSHHKEKKEKSSSHKPHRKGDKHKRMRKVVYYETDTSSTSTSDSDAPSVTSKRQERKKYSKIPLRYPRISKHTPLLSVPLGKPPTFDGEDYARWSDLMRFHLISLHKSIWDVVEFGAQVPSVGDENYDEDEVAQIEHFNSQATTILLASLSKEEYNKVQGLKNAKEIWDVLKTAHEGDELTKITKRETIEGELGRFRLQKGEEPQHMYNRLKTLVNQVRNLGSKKWDDHEVVNVILRSLIFLNPTQVQLIRGNPRYTKMTPEEVIGHFVSFECMIEGSRKINELGDPSEAQPVAFKATEEKKEEATPSRQPIDASKLDNEEMALVIKSFRQILKQRRGKDYKSRSKKVCYRCGKPGHYIAKCPISSDSDRGDDKKGRRKEKKRYYKKKGGDAHVCREWDSDESSSDSSDDEDAANIAVTKGLLFPNVGHKCLMAKDGKKKVKSKSSTKYESSSDDNASDEEDNLRSLFANLNIAQKEKLNELVSAIHEKDDLLDSQEDCLIKENKKHVKVKKAYALEVEKCEKLSSELSTCREIIDNLRNENAILNAKVDSHACDVSIFTPRDNNDDLITRIEELNISLTSLRIENEKLLAKAKDFDVCNTTISDLRTKNDILHAKVVELKSCKPSTSTIEHVSICTRCRDVDINAIHDHMVLIKQQNDHIAKLDAKIAEHNLENEKFKFARSMLYNGRRPGIKDGIGFQRGDNVKLNAPPKNLSNFVKGKALMPQDNEGYILYPASYPESKIRKIHSRKSHSGPNHAFMYKGETSRSRQPTHAKLPRKKTTNASNDHAISFKTFDASYVLTSKSGKVYASGGSSWILDSGCTNHMTGEKRMFSSYEKNKDPQRAITFGDGNQGLVKGVTVFRRSDDSIAFKGVLEGQLYLVDFDRAELDTCLIAKTNMGWLWHRRLAHVGMKNLHKLLKGEHILGLTNVHFEKDRICSACQAGKQVGTHHPHKNIMTTDRPLELLHMDLFGPIAYISIGGSKYCLVIVDDYSRFTWVFFLQEKSQTQETLKGFLRRAQNEFGLRIKKIRSDNGTEFKNSQIESFLEEEGIKHEFSSPYTPQQNGVVERKNRTLLDMARTMLDEYKTPDRFWAEAVNTACYAINRLYLHRILKKTSYELLTEGFLLGYDSNTRAYRVFNKSTGLVEVSCDVVFDETNGSQVEQVDLDEIGEEQAPCIALRNMSIGDVCPKESEEPPSTQDQPSSSMQASPPTQNEDEAQNDEEQNQEDEPPQDDSNDQGGDTNDQEKEDEEEPRPPHPRVHQAIQRDHPVDTILGDIHKGVTTRSRVAHFCEHYSFVSSIEPHRVEEALQDSDWVVAMQEELNNFTRNEVWHLVPRPNQNVVGTKWVFRNKQDEHGVVTRNKARLVAKGYSQVEGLDFGETYAPVARLESIRILLAYATYHGFKLYQMDVKSAFLNGPIKEEVYVEQPPGFEDSEYPNHVYRLSKALYGLKQAPRAWYECLRDFLIANGFKVGKADPTLFTKTLENDLFVCQIYVDDIIFGSTNESTCEEFSRIMTQKFEMSMMGELKYFLGFQVKQLQEGTFISQTKYTRDILAKFGMKDAKPIKTPMGTNGHLDLDTGGKSVDQKFISNQVIGILKGNWSLRRRQRLPLRNSYFAITPSNSLVFGGEMSIKEKDFILGGESKSSNAKGTSSLV

SEQ ID NO: 10442 - protein, 1664 aa, Zea mays
  Clone ID: TF_ZM4685.C3.o1.fg.pep
MDPKGKGMVVNNNEKESIFNEPKDDKPTDSGSGHKRKDGKKKKTRRIKEIVYYDSDESSSSQKDDDDYEKKKTVNSNFSFDYSRIPQSTNAHLLSIPLGKPPHFDGEDYRFWSHKMRSHLFSLHPSIWEIVESGMHFDSTDSPMFINEQIHKNAQATTVLLASLCRDEYHKVSGLDNAKQIWDTLKISHEGNDVTMLTKMELVEGELGRFAMIRGEEPTQTYTKMTPEEILGKFVSGRMMIKEARYVDDALNGPINEPQPLALKATRSKETLPSKVAQIEAAGLNDEEMALIIKRFKTTLKGRKGQPSKTKTKGKRSCFKCGKLGHFIVNCPDNDSDQDQGNKREKKKNYKKAKGEAHLGKEWDSDCSSSDSDNEGLVATAFNKSSLFPNERHTCLMAREKKVCTRNTTYASSSEDESSDEDEIDYSCLFKGLDRTKVDKINELIDALNDKNKLLEKQEDLLYEEHDKFIEAQKSHALEVKRNEMLSCELSSCHETISNLRSINDDLNAKLEIASKSTSCVENDVICNRCKDFDIDACSEHIASIAKLNDEIASLNAQLKTSKSEFDKLKFARDAYTIGRHPSIKDGLGFKREVKNLTSHKASISTKEKGKAPMARNAKKNHAFMYHDRKFSRNVHDDRSCNAYNAFDSHAMFASSSSYMHGRNVFRRNVVHHMHRRNVPRKVNEPSTIYHACDASFAICRKDRKDPTRDGYLSPKPKFALQVYASGGSSWIIDSGCTNHMTGEKKMFTSYVKNKNSQDSIIFGDGNQGKLSPLDIIYYLRSDGSLAFKGVLDGKLYLVDFAKEEAGLDACLIAKTSMGWLWHRRLAHVGMKNLHKLLKGEHVIGLTNVQFEKDRPCAACQAGKQVGGAHHNKNVMTTSRPLELLHMDLFEPVAYLSIGGSKYGLVIVDDFSRFTWVFFLQDKSETQGTLKRFLRRAQNEFELKVKKIRSDNGSEFKNLQVEEYLEEEGIKHEFSAPYTPQQNGVVERKNRTLIDMARMMLGEFKTPERFWSKAVNTACHAINRVYLHRLLKKTSYELLTGNKPNVSYFRVFGSKCYILVKKGRNSKFAPKAVEGFLLGYDSNTKAYRVFNKSSGLVEVSSDVVFDETNGSPREQVVDLDDVDEEDVPTATIRTMAIGEVRPQEQKEQDQPSSSTMVHPPTQDDEQIHQQEVCDQGGAQDDHVMEEEAQPAPPTQVRAMIQRDHPVDQILGDISKGVTTRSRLVNFCEHYSFVSSIEPFRVEEALLDPDWVLAMQEELNNFKRNEVWTLVPRPKQNVVGTKWVFRNKQDEHGVVTRNKARLVAKGYAQVAGLDFEETFAPVARLESIRILLAYAAHHSFRLFQMDVKSAFLNGPIKEEVYVEQPPGFEDERYPDHVCKLSKALYGLKQVKQLKDGTFISQMKYTQDLLKRFGMKDAKPANTPMGTDGHTDLNKGGKSVDQKAYRSMIPLAYRPCASRPDIMLSVCMCARFQSDPKECHLVAVKRILRYLVATPCFGLWYPKGSTFDLIGYSDSDYAGCKVDRKSTSGTCQFLGRSLVSWNSKKQTSVALSTAEAEYVAAGQCCAQLLWMRQTLRDFGYNLSKVPLLCDNESAIRMAENPVEHSRTKHIDIRHHFLRDHQQKGDIEVFHVSTENQLADIFTKPLDEKTFCRLRSELNVLDSQNLD

SEQ ID NO: 10443 - protein, 489 aa, Zea mays
  Clone ID: TF_ZM4548.C3.o10.fg.pep
MSGDHAKKEMETGEKPTTSHRSTSSEESRTKRKEKKDSSKGKEKKKDSSKGKEKKSSSHKEKKEKSSSHKPQRSGDKKKRMRKVVYYETDSSSTSTSGSDAASVTSKRQERKKYSKIPLCYPRISKHTPLLSVPLGKPPTFDGEDYARWSDLMRFHLTSLHKSIWDVVEFGAQVPSVGDEDYDEDEVAQIEHFNSQATTILLASLSREEYNKVQGLKNAKEIWDLLKTAHEGDELTKITKRETIEGELGRFRLRQGEEPQDMYNRLKTLVNQMCNLGSKKWDDHEVVKVILRSLIFLNPTQVQLIRGNPRYTLMTPEEVIENFVSFECMIKGSKKINELDDPSTSEAQPVAFKATEEKKEESTPSRQPIDASKLDNEEMALIIKSFRQILKQRKGKDYKSRSKKVCYKCGKSGHFIAKCPLSSDSDRDNDKKGKRREKKRYHKKRGGDAHVCREWDSDESSTDSSDDEDAANIVVTKGLLFPNVGHKCL

SEQ ID NO: 10444 - protein, 1386 aa, Zea mays
  unsure (1)..(1386): unsure at all Xaa locations
  Clone ID: TF_ZM4639.C2.o6.fg.pep
MTGGDKSASLGRTHSRESGHKHKEESSSSIKSQRRGDKKKKMKKVVYYETDSSSPSTSGSESASITSKRHERKQYSKMPLRYPCISKRTPLLSVPQGKPPFFDGEDYCMWSDKMRHHLTSLHKAYGTLLSMERRYKLMSHEEVIRKFVSFELMIKGSKQIVEQGGTSTPEVQPVAFKATEEKKEESTSSRLPIDASKLDNEEMALIIKSFRQILKQRRGKDYKPRSKKVCYKCGKSGHFIAKCPLSSDSDRGDDKKGERKEKKSSTDSSFDEDVANIAVNKGLLFPNVGHKCLMAKDGKRKNVKSRASIKYTTSSDEGSSSEDEDDLLTLFANLNMQQKEKLNELIGVIHEKDELLDSQEEFLIKENKKHVKVKNAYAQEVEKCENLTNELSICHDTVSNLRNENASLIAKVEKSNVCNDSIINLRNENANLIVKIDKLNESLSSLKNENDSLILKAKDLIVCNDSISCLRDKNVMLKSKIDELKSCKPSTSTVDHVSICMRCRDINVDAIHDHLALIKEQNDHIAQLTAKINEHKIENENFKFARSMLYNGRRPGINDGIGFQQGSNVKLNVPKRLSNFVKGKAPMAQDNKGYILYPAGYPEHKIRRIHARKSHSVSHHAFMYKNEASISRHSTHVKMPKKKTPTASNEPNVSFKTLDALYVLTNKSGKVVAKYVGGKHKGSKTCVWVPKVYASGGSSWIIDSGCTNHMTGEKRMFSCYEKNDDPQIAITFGDGNQGLEKSQTQETLKGFFRRAQNEFGLRIKKIRSDNETEFKNSQIEGFLEEEGIKHEFSSPYTPQQNGVVERKNRTLLDMARTMLDEYKSPDRFWAEAINTACYSINRLYLYRILKKTSYELLTGKKPNVSYFRVFDSKCFILIKRGRKSKFAPKVVEGFLLGYDSNTRAYRVFNKSTRLVEVSCDIVFDETNGSQVEQVDLDELDDEEALCVALRNMSIGXNVCPKESEEPPQAQDQPSSSMQASPPTQDEDQAQDNEEEDQEDESPQEEGNDQXGGDDNDQDKEDDQEVQGPRPPHPRVHQVIQRDHPVNSILGDIHKGPYMVEDALRDSDWVLAMQEELNNFIRNEWVFRNKQDEHGVVIRNKAQLVAKGYSQVEGLDFGETYALVARLESIHILLAYATYHGFKLYQMDVKSAFLNGPIKEEVYVEQPPGFEDSEYPNHVYKLSKAFYGLKQAPRACQTKYIQDLLTKFGMKDAKPIKTPMGTNGHLDLDTGGYSDADWAGCKIDRKSTSGTCQFLGRSLVSWASKKQNSVALSTAEAEYIVACHCCAQLLWMRQTLRDYGYKFSKVPLLCDNESAIRMADNPIEHNRTKHIAIRYHFLRDHQQRGDIEIAYVSTKEQLADIFTKPLDEKIFTKLRNELNNLDSRNFD

SEQ ID NO: 10445 - protein, 1445 aa, Zea mays
  Clone ID: TF_ZM4981.C1.o3.fg.pep
MYNRLKTLVNQVRNLGSKKWDDHEMVKVILISLVFLNPTQVQLIRGNPRYTLMSPKEVIGNFVSFELMIKGSRKINELDGPSMFEAQPVIFKATEEKKEESTSSRQPIDASKLDNEEMALIIKSFRQILKQRRGKDYKSRSKKVCYKCGKSGHFIAKCPLSSDSDRGDDKKGRRKEKKRYYKKKGGDAHICREWDSDESSTDSSSDEDAANIAVTKGILFPNVGHKCLMAKDGKRKKVKSRSSTKYETSSDEDNASDEEDNLRTLFANLNMQQKEKLNKLISDIHEKDDLLDSQEDFLIKENKKHVKVKNAYALEVEKCEKLSSELSTCHDVITNLRNENANLIAKVDSNVCDASIPNLTNDNVDLLAKIEELNISLASLRIKNEKLLAKAKELDVCNASTSNLRSENDILHAKIVELKTCKPSTSTVEHVSICTRCRDVDIDAIRDHMVLIKQQNDHIAKLDAKIAEHELENEKFKFARSMLYSGRRPGIKDGIGFQKGDNVKINAPPKRLSNFVKGKAPMPQDNEGYILYPAGYPESKIRRIHSRKSHSSPNHAFMYKGETSSSRQSTRAKLLRNKNPIASNDHNISFKVFDASYVLTNKSGKVYASGGSSWIIDSGCTNHMTGEKKMFSSYEKNHDPQRAITFGDGNQDSLDYNLLSVSQLCKMGYNCLFTDIGVTVFRRSDDSIAFKRVLEGQLYLVDFDRAELDTCLIAKTNMGWLWHRRLAHVGMKNLHKLLKGEHILGLTNVHFEKDRICSACQAGKQVGVHHPHKNIMTTDRPLELLHMDLFGPIAYISIGGSKYCLVIVDDYSRFTWVLFLQEKSHTQETLKGFLRRAQNEFGLRIKKIRSDNGTEFKNSQIEGFLEEEGIKHEFSSPYTPQQNGVVERKNRTLLDMARTVLNEYKTSDRFWAEAVNTACYAINRLYLHRILKKTSYELLTSKKPNISYFRVFGSKCFILVKRGRKSKFAPKTVEGFLLGYDSNTRAYRVFNKSSGQVEVSCDVVFDETNGSQVEQVDLDEIGDQEAPCIALRNMSNGDVCPKESKEPPNAQDQPSSSTQASPPTQDEDKAQNDDGEDQEIEPPQDDENDQGGDANDQDKEDEVPRPPHPRVHQAIQRDHPVDTIIGDIHKGVTTRSRVAHFCEHYSFVSSIEPHRVEEALQDSDWVVAMQEELNNFTRNEVWHLVPRPNQNVVGTKWVFRNKQDEHGVVTRNKARLVAKGYSQVEGLDFGETYAPVARLESIRILLAYATYHGFKLYQMDVKSAFLNGPIKEEVYVEQPPSFEDSEYPNHVYKLSKALYGLKQAPRAWSTNESTCEEFSRIMTQKFEMSMMGELKYFLGFQVKQLQEATFIRQTKYIQDILNKFGMKDAKPIKTPMGTNGHLDLDTGGKSVDQKKEHIGDLPVLGKILGVLGFKEAKFCSSFYRRSRVYCRMPLLRATTLDEANP

SEQ ID NO: 10446 - protein, 1071 aa, Zea mays
  Clone ID: TF_ZM4544.C6.o6.fg.pep
MDPKGKGMVVNDKEKDSIFNEPRDDKPTDSGSSHKKRDGKRKRRIKKIIYYDSDASSSSLRDDDNDDDSSSKRKTMELVEGELGRFMMIRGEEPTQTYNRLKTLVNKIRSYGSTRWTDHDVVQLMLRSFTVIDPHLVNLICENPRYTKMTPEEVLGKFVSRRMMVKEARYMDDALNGPLSIYESQPVALKATSSKEALPSKVAQVEAAVLNKDEMALIIKRFKTALKGRKEYSNKNKTRGNRSCFKCGKTDHFIAQCPDNDNDQGQEKSGKREKKNYRNAKGEAHLGKEWDSDCSSSDSNDEGLAASAFDKSSLFPNERHTCLMAKEKKVHIRDTPKYTSSSDEESSDDEVDYSDLFKGLDRAKVEKINELIDALNEKDRLLEKQEDILYEEHDKFVSVQKSLALEIKRNEMLSSELCACHESVSSLKNSNDELKAKLEEVNKTSSCVEHVFICNRCKDFDVDACDEHLASIAKLNDEVASLNAQFMTCKVEFDKLKFARDAYTVGRHPSIKDGLSFRKETKNLTSQRAPVLNKEKGKAPMASSSQKNHAYIYDRKYPRNAYNDKCYNHAAYNDSHAMFASSSTFAHGRSRPRRNYATSHASRKVCNGPTTVYHACDTSFVLSCKNTKVVARKLGSKCKGDKTCIWVPKAIVTNLVGPNTSWVYASRGSSWIIDSGCTNHMTGEKKMFTSYVKNKDSQDTFIFGDGNQGKVKGLGRIAITNEHSISNVFLVESLRRSDGSLAFKGVLDIKLYLVDFSRENAGLDACLIAKTNMGWLWHRRLAHVGMKNLHKLLKGDHVLGLTDVCFEKDRPCVACQEGKQDKSETQGTLKRFLRRAQNEFELKTPQQNGMVERKNRTLIDMARTMLREFKTPERFWSEAVNTACRAINRLYLHRLLKKTSYKLLTGNKPNLSYFHVFGSKCYIMVKKGRHSKFAPKTVEGFLLGYDSNTKAYRVFNKSSRLVEVSSDVVFDETNGSPREQVDLDDIDEDEVPTATMRTMAIGDVRPQELQEQDQPSSSTLVYPPTQDDVQVPQEEGQNQGGAQKEQVMEEEAPRVPPTQVQATIQRHHPVD

SEQ ID NO: 10447 - protein, 664 aa, Zea mays
  unsure (1)..(664): unsure at all Xaa locations
  Clone ID: TF_ZM4679.C2.o8.fg.pep
MTIEQMFMMQTQAVQAISQTLAVMQQVQQQPPPPQPPVQVQMPQVPRDKRAELMRGHPPXFAHSADPMDAEDWLXRGAAQSWWESYLATHANPEAINWEEFRDNFHRYHVPEGLMIVRKEVFLAPKQGPLSVSEYRDKFLQLSRYAPEDINTYAKRQYRFLRGLHLIDRAIMTERKRREMEDRKHKIGGPQAGSSSHPRYSGNSPQQFKQVHQHPRQHQPQYQRQFPQQQQQQYRQNTQPGGNQYQRQNNQAARLPAPATNQSSQAAPAQVGGRACFYCGEQNHWAKNCPKKAAQQPPTVNAPARQGAPHQAPGVRGQAYNREKVNHLEVKAIQDAQDVAVGMFPVKSDPTKVLFDTGATHSFVSASWVESHNIPIEPMIPPLRVNSVGGKVQSDRICPNLRIEIRGIDFPASLVVMGTQGFDVILGMNWLHRNQAIVSCDKRTVKLVSPSGKEVVTKLYLPELEEGACHHLSVDDNESNPIEAIRIVSEFPDVFPEELPGMPPKRKVEFAIELISGTAPISKKDYRVSGPELVELKKQIDELLEKGYIRPSTSPWAAPVLFVEKKDGTKRMCIDYRALNEVTVKNKYPLPRIEDLFDQLRGASVFSKIDLRSGYHQLKIRPADISKTAFITKYGLYEFMVMSFGLMNVKGKCALGPFLKYFGD

SEQ ID NO: 10448 - protein, 449 aa, Zea mays
  unsure (1)..(449): unsure at all Xaa locations
  Clone ID: TF_ZmC119_1217.pep
RSLTGRTRDVLCYXCKGYGHVQRDCPNQRVLVVKDDGGYSSASDLDEATLALLAADDAGTKEPPEEQIGADDAEHYESLIVQRVLSAQMEKAEQNQRHTLLQTKCVIKERSCRLIIDGGSCNNLASSDMVEKLALTTKPHPHPYHIQWLNNSGKVKVTKLVRINFAIGSYRDVGDCDVVPMDACNILLGRPWQFDSDCMNHGRSNQYSLIHHDKKIILLPMSPEAIVRDDVAKATKTKTENNKNIKVVGNNKDGIKLKGHCLLATKTDVNELFASTSVAYALVCKDALISIQDMQHSLSPVVTNILQEYSDVFPCEILEGLPPIRGIEHQIDLIPGASLPNRASYRTNPEETKEIQRQVQELLDKGYVRESLSPCVVPVILVPKKDGTWRMCVDCRAINNITIRYXHPIPRLDDMLDELSGAIVFSKVDLRSGYHQIRMKLGDEWKTAF

SEQ ID NO: 10449 - protein, 995 aa, Zea mays
  Clone ID: TF_ZM4945.C1.o3.fg.pep
MAQPKRMQEWEAERLICGDPVSALRPALEWAVQVKYFGCYTERPPATVTYQEFLSTQPPLLIKAEDPLDTDVWLHVVESKFPLLTGDYPDDTKTRFAAQQLRRPARTWWDHLCAMLPAGHEVSWEEFKTAFKGHHIPARILDHKLNDFLALNQGTHTVLQYAQAFNDLCQYTGYHVDSDEKKKDRFCRGLNTKLRERLNNVRADSFNELVNLAISQEDCIIAHRAEKKRKAPMNNQPQQHQQFRQGNGNKCFTCGSVGHYAKNCLKNQQRQMPAPNQDRGRKQKVQVRQGKLNLTTLEELPEGAHIMTSIFLVFNQPALILFDSGASHSFISQKFGAKCQLHFYHTKASFMIATLGGKIATNQLNRNVTISLGSKIIKTTLLILGLEGMDIILEADWMTQHRVVLDVAARTLEIRSPTFGDLALYLPSQDSTRSYAFAMIELPLKKILVVCEYADVFPDNLPGMPPDREIEFIIELQPGTTSISKRPYRMPPAELAELKKQLQELLDKGFIRPSTSPWGCPALLVKKKDEILRLCTDYHPLNAVTIKNKYHLPRIDVLFDQLVGAKMFSKINLRSGYHQIKIRASDILKTVFSTRYGLYEYLVMSFGLTNMPAYFMYLMNSIFMPELDKFVVVFIDDILVYTKNEEEHTGHLHIVLQRLREHRLYAKLLKNHKSLKYIFTQADLNMRQRRWLELIKDYDLEVHYHPVKANVVADALSRKSKCNYVMMDSRINTLCDELSKMKIEVIPSGALSHISVEPTLQDRIIMAQLSDKGVQIIKENLHQKPEKYKCFRQDGKGILWFGRRLVVRKNKDLKKKILDEAHLSKFSMHLGSTKMYHDLKPLYWWTGMKREIARYVSECDTCQRIKASHLKLAGALQPLSIPSWKWDDISMDFIVGLPNTSRHHDSIWVIVDRLTKVANFLPVHTTDKAQKYTELYIDQIVCLHGLPQTIVSDRGTQFVARFFDQLQESLGTKLMRSSAYHPQADCGGTSRIILA

SEQ ID NO: 10450 - protein, 219 aa, Zea mays
  Clone ID: TF_ZmC1373_22.pep
VLDSCQQLTVCGNYLRRIREVELKRDWKNKCYRCGESGHIERNCQNSPRNLRRDKSYSRSPSPRGGRGRSRSYSRSRSYSRSRSPSGSPRGGRRERDERRSRSLSYSRSASPRRSVSPAKEKERSRTPNGSRSPRSPSPRAEVSPPLKDNGARNGSDHEGNPGGGENSKRSRSPSDGYRSPVANGRSPSPRDDRSPSPKGNNEDDERRGSPRGSQSPLN

SEQ ID NO: 10451 - protein, 630 aa, Zea mays
  unsure (1)..(630): unsure at all Xaa locations
  Clone ID: TF_ZM3612.C3.o1.fg.pep
MDPKGKGIVINDKEKESFVNETKDDKPTDSGSGHKQKDGKKKTRHIKEIVYYDDSDESSSSQKDDDNDYEKKKTVNSNFSFDYSRIPHSSNAHLLSIPLGKPPHFDGEDYGFWSHKMCSHLFSLHPSIWDIVESGMKFDSSDSPLFINEQIHKNAQATTVLLASLCRDEYHKVSGLDNAKQIWDTLKISHEGNDVTMLTKMELVEGKLGRFAMIRGEEPTQTYNRLKTLVNKIRSYGSTRWTDHDVVRLMLRSFTVLDPHLVNNIRENPRYTKMSPEEILGKFVSRRMMIKEARYVDDALNGPIHEPQTVALKATRSKEALPSKVAQVEAAGLNEEEMALIIKRFKTALKGRKEHPNKNKTKGKCSCFKCGKIGHFIANCPDNDSDREKKSGKWEEKKNYKKAKGEAHLGKEWDSDCSSSDSDNEGLAATAFNKSSLFPNEHHTCLMAKEKKDLLYEEHDKFVSAQNSLALEVKRNEMLSCELSICHETISTLKGVNDDLNAKLEVANKSNSCVEHVMICNRCKDFNVDACSEHLVCIAKLNDEVASLNAQLKTSKSELDKLKFARDAYTIGRHPSIKDGLGFKREVQNLTSHKASIYAKEKGKAPMASSAQKNYAFMYHDRRHXRNGYR

SEQ ID NO: 10452 - protein, 1506 aa, Zea mays
  unsure (1)..(1506): unsure at all Xaa locations
  Clone ID: TF_ZM4913.C5.o4.fg.pep
MDPKGKGMMVNDKEKESFVIDPKDDKPTDSGTSHKRKDGKKKKTRRIKEIVYYDDSDESSSSQKNDDNDYEKKKMVNSNFSFDYSRIPQSSNTHLFSIPLVYGRVENGMHFDSTDSPMFINEQIHKNAQATTVLLASLCREEYNKVSGLDNAKQIWDTLKISHEGNDVTMLTKMELVEGEHGRFAMIRGEEPTQTYNRLKTLINKIRSYGSTRWTDHDVVRLLLRSFTVLDPHLVNNICENPRYTKMSPEEVLGKLVSGRMMIKEARYVDDALNGPIHEPQTMALKATRSKEALPSKVAQVEAVGLNEEEMSLIIKRFKTALKGRKEHPNKNKTKGKCSCFKCGKIGHFIANCPDNNSDQEQDKKREKKKAYKKAKGEAHLGKEWDSDCSSSDSDNEGLAASAFNKSSLFPNERHTCLMAKEKKVCTRNNTIYASSSDDESSDDDEIDYSSLFKGLDRNKIDKINELIDALNDKNRLLEKQEDILYEEHDKFVEAQKSLALEVKRNEMLSCELYTCHESISNLKSINDDLNAKLEVANRSNSCVEHVVICNRCKDFNVDACSEHLVSITKLNGEVASLNAQLKTSKDEFDKLKFARDAYTIGRHSSIKDGLGFKREAKNLTSHKAPIPAKEKGKAPMTNSCQKNHAFMYHDRKFSKNVHYDRSCNAYNSNAMIASSSSIMHNRNLTRKNVMPRRNVVHVPRKVNNEPSTIYHACNAAFAICRKDRKLIARKLGAKCKGDKTCIWVPKDIVTNLVGPNKSWVYASGGSSWIIDSGCTNHMTGEKKMFTSYVKNKDSQDSIIFDVSVFRRSDGSLAFKGVLDGKLYLVDFAKEEVDLVQLVKQDKSETQGTLKRFLRRAQNEFELKQNGVVERKNRTLIDMARTMLGEFKTPERFWSEAVNTACHAINRVYLHRLLKKTSYELLTGNKPNVSYFRVFGSKCYILVKKGRNSKFAPKAVEGFLLGYDSNTKAYRVFNKSSGLVEVSSDVVFDETNGSPREQVVDLDDVEEEEVPTAIIRTMAIGEVRPREQKEQDQPSSSTMVHPPTQDDEQPFRVEEALLDPDWVLAMQEELNNFKRNEVWTLVPRPKQNVVGTKWVFCNKQDEHGVVTRNKARLVAKGYAQVAGLDFEETFAPVARLESIRILLAYVTHHSFRLFQMDVKSAFLNGPIKEEVYVEQPPGFEDERYPDHVGKADPTLFTKTCDGDLFVCQIYVDDIIFGSTNQKSCEEFSRXVMTQKFEMSMMGELNYFLGFQVKQLKEXTFISQTKYTQDLLKWFGMKDAKPAKTPMGTDGHVNLNKRSRPDIMLSVCMCARFQSDPRECHLVAVKRILRYLVATRCFGIWYPKESTFDLIGYSDFDYAGCKVDRKSTSGTCQFLGRSLVSWSSKKQTSVALSTAEAEYVAAGQCCAQLLWMRQTLRDFGYNLSKVPLLCDNESAIRMADNPVEHSRTKHIDIRHHFLRDHKQKGDIEVFYVSTENQLADIFTKPLDESTFCRLRSELNVLDSRNLD

SEQ ID NO: 10453 - protein, 765 aa, Zea mays
  Clone ID: TF_ZmC31816_8.pep
MDQTSFMSGASAKREIGTGEKPATSHGKAPSGESANKVKGSPSHNKSRRSGDKKKKMKKVVYYETDSSSPSTSGSDTPSVTSKRHERKKFSEDPQAMYNRLKTLVNQVRNLGSAKWDDHEMVKVILRSLVFLNPTQVQLIRGDPRYTLMSPEEVIGKFVSFELMIKGSKKIIEQGDSSTPEAQTVAFKATEEKKEDSTPSRIPIDASKLDNEEMALIIKSFRQILKQRKGKDYKPRSKKVCYKCGKLGHFIAKCPLSSDSDRGDDKKGKRREKKRYYKKKGGDAHVCREWDSDESSIDSSSDEDAANIAVTKGLLFPNVGHKCLMAKDGKRKKVKSKSSTKYASSSDEDNSSDEEDNLRTLFANLNMQQKEKLNELISAIHEKDELLDSQEDFLIKENKKHVKVKNAYALEVEKCEKLSSELSTCHDIIANLRNENAKLIAKVDSNVKDDSNSNLRDDNVSLLAKIEELNVSLASLKNENEKLIAKANDLDVCNVTISNLRSENDILHAKIVELKSCKPSTSTVEHVSICTRCRDINVDAIHVHLALIKKQNDHIAQLNAKINEHDLENEKFKFARSMLYNGRHPGIKDGIGFQKGDNVKLNAPPKRLSNFVKVKAPMPQDNEGYILYPVGYPEHKIRRIHSRKSHSGPNHAFMYKGETSSSRQSTRAKLPKKKTPIASNDSNISFKTFDASYVLTNKSGKVYASGGSSWIIDSGCTNHMTGEKKMFSSYEKNQDPQRAITFRDGNQDIGFTVFRRSDDSIAFKG

SEQ ID NO: 10454 - protein, 1171 aa, Zea mays
  Clone ID: TF_ZM4892.C1.o13.fg.pep
MTPEKVIGNFVSFELMIKGSKKINELDGPSMSEAQPIVFKATEEKKEESTPSRTPIDASKLDNEEMALIIKSFRQILKQRRGKDYKPRSKKVCYKCGKLGHFIAKCPLSSDSDRGDDKKGRRKEKKRYYKKKGGDAHVCREWDSDESSTDSSDEDAANIAVTKGLLFPNVGHKCLMAKDGKKKKVKSRSSTKYETSSDEDDASNEEDNLRILFANLNMQQKEKLNELISAIHEKDDLLDTQEDFLIKENNKHVKVKNAYALEVEKCEKLSSELSTCHDTIANLRNENAQLISKAKDFDGCNVTIFNLRSENDILHAKVIELKSCKPSTSTVEHVSICTRCRDVDIDAIHDHMVLIKQQNDHIAKLDAKIAEHELENEKFKFARSMLYSGRRPGIKDGIGFQKGDNVKLNAPPKKLSNFVKGKSPMPQDNEGYILYPTGYPESKIRRVHSRKSHSGPNHAFMYKGETSSSRQSTHAKLPKKKTPNASNDHSISFKTFDASYVLTNKSGKVYASGGSSWIIDSGCTNHMTGEKKMFSSYKKNQDPQRAITFGDGNQGLVKGVTVFRRSDDSIAFKGVLEGQLYLVDFDKAELDTCLIAKTNMGWLWHRRLAHVGIKNLHKLLKGEHILGLTNVHFEKDRICSACQARKQVGVHHPHKNIMTTDRSLELLHMDLFGPIAYISIGGSKYCLVIVDDYSRFTWVFFLQEKSHTQETLKGFLRWAQNEFGLRIKKIRSDNGTEFKNSQIEGFLEEEGIKHELSSPYTPQQNGVVERKNKTLLDMARTMLDEYKTSDRFWVEAVNTACYAINRLYLHRILKKTSYELLTGKKPNISYFRVFGSKYFILVKRGRKTKFAPKTVEGFLLGYDSNTRAYRVFNKSFGQVEVSCDVVFDETNGSQVEQVDLDEIGDEEAPCIALRNMSIGDVCPKESGEPPSAQDQPSSSTQPSPPTQNEDEAQVDEEEDQRDEPPQDDGNDQGGDANDQDKEDEEPRPPHPRVHQAIQRDHPVDTILGDIYKGVTTRSRVAHFCEHYSFVSSIEPHKECQNVVGTKWVFRNKQDEHGVVTRNKARLVAKGYSQVEGLDFGETYAPVARLESIRILLAYATYHGFKLYQMDMKSAFLNGPIKEEVYVEQPPGFEDSEYPNHVYRLSKALYGLKQAPRAWYECLRDFLIANGF

SEQ ID NO: 10455 - protein, 935 aa, Zea mays
  Clone ID: TF_ZM5039.C1.o1.fg.pep
MSGDHAKKEMENGEKPTTSHGSTSSEESRTKRKEKKDSSKGKEKKKDSSKGKEKKSSSHKEKKEKSSSHKPQRSGDKKKRMRKVVYYETDSSATSTSGSDAASVTSKRQERKKYSKIPLRYPRISKHTPLLSVPLGKPPTFDGEDYARWSDLMRFHLTSLHKSIWDVVEFGAQVPSIGDEDYDEDEVAQIEHFNSQATTILLASLSREEYNKVQVLKSAKEVWDVLKTAHEGDELTKITKWETIEGELGRFRLRKGEEPQNMYNRLKTLVNQVRNLGSKKWDDHEVVKVILRSLIFLNPTQVQLIRGNPRYTLLTPEEVIGNFVSFECMIEGSRKINELDDPSTSEAQPVAFKATEEKKEESTPSRQPIDASKLDNEEMALVIKSFRQILKQRRGKDYKSRSKKVCYKCGKLGHFIAKCPLSSDSDRDNDKKGKRREKRRYHKKRGGDAHVCREWDSDESSTDSSDDEDAANIAVTKGLLFPNVGHKCLMAKDGKKKKVKSKSSTKYESSSDDNASDEEDNLRTLFANLNMEQKEKLNELISAIHEKDDLLDSQEDFLIKENKKHVKVKNAYALEVEKCENLSSDLSTCHETIDNLRNENANLLAKVDSHVCNVSITNSRNNDDDLLARIEELNISLASLRIENEKLLAKAKNFDVCNATISDLRTKNDMLHAKVVELKSCKPSTSIVEHVSICTRCRDVDINAIHDHMALIKQQNDHIAKLDAKIVEHNLENEKFKFARSMLYNGRRPGIKDGIGFQRGDNVKLNAPPKRLSNFVKGKAPMPQDNEGYILYPAGYPGSKIRRIHSRKSHSGPNHAFIYKGETSSSRQPTRAKLPKKKTPSASNDHDISFKTFDASYVLTNKFGKVYASGGSSWILDSGCTNHMTGEKRMFSSYEKNQDPQRAITFGDGNQGVTVFRRSDDSIAFKGVLEGQLYL

SEQ ID NO: 10456 - protein, 1201 aa, Zea mays
  Clone ID: TF_ZmC13633_1.pep
KELQGRQQQRSSTFAPRQPPAPAKASSSSGVRTSTSSTVPSGVAAKPATTTSSTGRSSDIKCHRCQGLGHIQRDCPSKRAYIATGDGGYVSASDVEDEDTVGANIAETYDGDEEVLGTTATETYKALIMQRALSTTASDDDNRQLRNLFNMFLIVKDCRVHTIIDGGSCNNLVNVEGKKIVLLPMTPTEIVHFEHEKKTNAKQKGVLNSENQQPIKLKTPTLLATKSDLDELHASLGLCYALVCKNAFYSIDDTSIVLPPAIANLLQEYMDVFPSEIPPGLPPVRGIEHKIDLIPGASLPNRAAYRTNPEETKEIQRQVQDLLDRGYIRESLSPCSVPILLVPKKDGTWRMCVDCRAINNITIRYRYPIPRLDDMLDELSGSIVFSIIDLRSGYHQIRMSLGDEWKTAFKTKFSLYEWLVMSFGLTNAPSTSMRLMNEVLRAFIGKFVVGIEMDEAKIVAITSWPLPTTVTQVQSFLGLAGFYRRFVRDFSTIAAPLHELTKNGVSFRWGPSQQQAFDALKSKLTQAPLLQLPDFDKTFELGEAHGDGLMGHFGVKKTEDVLFTHFYWPRMRRDVERYVSRCTTCNKAKSRLNPHGLYLPLPVPRAPWEDISMDFVLGLPRTKRGSDSVFVIVDRFSKMTHFIPCQKTDNASHIADLFFTEIVRLHGVPNTIVSDRDAKFLSHFWRTLWFKLGTKLLFSTTCHPQTDGQTEVVNHTLSTMLRAILKDNLRLWEECLPHIEFAYNRSIHSTTKLSPFMVVYGFNPRALIDLLPLPPSEIVNLDATQRSEFILELHETTKLQIEKMNEKYCIAANKGRKEMKLEPGDLVWVHLRKDRFPDLRKSKLMPRAAGPYKVLAKINDNAYTLELPPDFGVSSTFNISDLKPYMGDEDEAESRKTPIQEEEDDEDITSIYTMNGPITRSPARQLNLQVPWRGPTRTWERDKPSWRGHSCVTGDNQRSRGVVIARNRSLGALDHQRRDLHSIKLSYLTEDRAASTISVPRWGASVVDSLDSQRGATSCLAMVAPPPSPAARKATGQTQMLFFRHGGKTSSIPPPSGGLMATIIAVARWRKEYHVVVAVKGHELETPETEQRPGLKRLLETTHLELDGKLFVNTQQSPTWRANYRRFDPGGSLDRRRGRSEPKVGRGGDSSEVEIEAEPWAQARRRPSSEVEVEAEPWGRVRRRPSSEVEAGAEPWGRARR

SEQ ID NO: 10457 - protein, 1478 aa, Zea mays
  Clone ID: TF_ZmC13633_2.pep
MDVLMIRYLGEDQQGLGKGQGVEEEQQGRPQQNRYSFAITPTLVGQSHWSPFATCSAGPKNQMDKDKGPKLNDDECVSQMELKEMMRAMTEGFKKYQDSASTSYEQLDRRVAELVTRMDVLEARPPPPTPAPAHSPVDDDDDDDDVYAPLRQRLARNRQGMGGNGRRRHHNPEPDHDPFAKIKFSIPPFMGSYDAEAYLDWEMTVEQKFNSHLVPEQHRGDMSVQEYYQELQKEKELQGRQQRRSSTFAPRQPPAPAKASSSSGVRTSTSSTVPSGVAAKPATTTSSTGRSSDIKCHRCQGLGHIQRDCPSKRAYIATGDGGYVSAYDVEDEDTVGANIAETYDGDEEVLGTTATETYKALIVQRALSTTASDDDNRQRHNLFNMFLIVKDCRVHTIIDGGSCNNLVNVEVVKKLGLTTREHPHHYHIQWFNNNGKFKVTKTTRVHFSIGSYHDFADFDVVTMDACSLLLGRPWEFDTDAIHHGRSNKYTFMHKGKKIVLLPMTPTEIVHFEHEKKTNPKQKGVLNSENQQPIKLKTPTLLATKSDLDELHASLGLCYALVCKNAFYSIDDTSIVLPPAIANLLQEYMDVFPSEIPPGLPPVRGIEHKIDLIPGASLPNRAAYRTNPEETKEIQRQVQDLLDRGYIRESLSPCSVPVLLVPKKDGTWRMCVDCRAINNITIRYRYPIPRLDDMLDELSGSIVFSKIDLHSGYHQIRMSLGDEWKTAFKTKFGLYEWLVMPFGLTNAPSTFMRLMNEVLRAFIGKFVVVYFDDILIYSKSHDDHIEHLRAVFDVLRDARLFGNLEKCTFSTDRVSFLGYVVTSQGIEMDEAKIVAITSWPLPTTVTQVQSFLGLAGFYMRFVRDFSTIAAPLHELTKNGVSFHWGPSQQQAFDALKSKLTQAPLLQLPDFDKTFELECDASGIGIGGVLIQGGKPVAFFSEKLNGPTLNYSTYDKELYALVRVLQTWQHYLWSKEFVIHSDHESLKYLKGQSNLNKRHAKWIEFIESFPYIIKHKKGKDNVIADALSRRYTMLSQLNHKIFGLETIKELYAADLDFKDAFENCREGRTWQKFMLREGLLYRANKLCVPASSVRLLLLQEAHGGGLMGHFGVKKTEDVLFTHFYWPRMRRDVERYVSRCTTCNKAKSRLNPHGLYLPLPVPRAPWEDISMDFVLRLPRTKRGSDSVFVIVDRFSKMAHFIPCHKTDNASHIADLFFTEIVRLHGVPNTIVSDRDAKFLSHFWRTLWCKLGTKLLFSTTCHPQTDGKTEVVNHTLSTMLRAILKDNLRLWEECLPHIEFAYNRSIHSTTKLSPFMVVYGFNPRAPIDLLPLPPSEIVNLDATQRSEFILKLHETTKLQIEKMNEKYRIASNKGRKEMKLEPGDLVWVHLRKDRFPDLRKSKLMPRATGPYKVLAKINDNAYTLELPPDIGVSPTFNISDLKPYMGDEDETESRTTPIQEEEEDEDITSIHTMNGPITRSRA

SEQ ID NO: 10458 - protein, 165 aa, Zea mays
  Clone ID: TF_ZM4628.C6.o10.fg.pep
MTNSSTGRSSNIKCHRCQGLGHIQRDCPSKRAYIATGDGGYVSASYVEDEDTVGANIAETYDGDEEVLGTTATETYKALIVQRALSATASDDDNRQCHNLFNMFLIVKDCRVHTIIDGGSCNNLVNIEVVKKLGLTTRQHPHPYHIQWFNNNGTLERTIKDLGKA

SEQ ID NO: 10459 - protein, 97 aa, Zea mays
  Clone ID: TF_LIB3079-025-Q1-K1-D3.pep
VDFSDSASLAAALKLDQKVVKERPVRIRCAVPKKDDQKVNDNGNSDHLKSETRTCYECGTPGHSSSSCPNKKDSEARKSYECGTPVHLSCACPNNND

SEQ ID NO: 10460 - protein, 590 aa, Zea mays
  unsure (1)..(590): unsure at all Xaa locations
  Clone ID: TF_ZmC29741_64.pep
MELVEGELGRFAMIRGEEPTQTYNRLKTLVNKIRSYGSTRWTDHDVVRLMLRSFTVIDPHLVNLIHENPRYTKMTPEEILGKFVSGRMMVKEARYVDDALNGPLPVYEPQPVALKATSSREALPSKVAQVVVAGLNEDEMSLIIKHFKTTLKGRKEYPNKNNAKGKHSCFKCGKTGHFIANCPDNSSDQEQGKGGKKEKKKSYKKAKGEAHIGKEWDSDCSSSDSDDEGLTASAFNKSSLFPNERHTCLMAKEKKVSIRETPKYTTSSDDDSSDDEVYHTDLFKGLDRAKVDKINELIDALNEKDRLLEKQEDILYKDFNVDACDEHLVSISKLNDEVASLNAQLKTCKSDFDKLKFARDAYTVGRHPSIKDGLGFRKEAKNLTSQRDPIPVKDKGKAPMANSAQRNHAFIYSYRKFSRNAHRSYAYDSHAMIASSSSFVYASGGSSWIIDSGCTNHMTGEKKMFTSXSRTRIPRKAPFTKLMLRSSISWNSKNWITWSPTLXILIPRSSETDRNLVGPNMSWVYASGGSSWIIDSGCTNHMTGEKKMFTSSCSQRRPAVLRIGTNSSGERAGSGGWAARARGGGWASVR

SEQ ID NO: 10461 - protein, 1392 aa, Zea mays
  Clone ID: TF_ZM4707.C6.o5.fg.pep
MSGDHAKKEMETGDKPATSHGKASSKESRNKEKRKDKKKEKITSSHKSHRSGDKIKKMRKVVYYETDTSSPSTSGSDTPSITSKRHERKKFSKIPLRYPRITKHTPLVSVPLGKPPTFDGEDYARWSDLMKFHLTSLHKSIWNVVEFGAQVPSVGDEDYDEDEVAQIEHFNSQATTILLASLSREEYNKVQGLKSAKEVWDVLKTAHEGDELTKITKREMIEGELGRFRLRQGEEPQDMYNRLKTLVNQVRNLGSKKWDDHEVVKVILRSLIFLNPTQVQLIRGNPRYTLMTPEEVIGNFVSFEFMIKGSRKINELDGPSTSEAQPVAFKATEEKKEESTPSRQPIDASKLDNEEMTLVIKSFRQILKQRRGKDYKPRSKKVCYKCGKLGHFIAKCPISSDSDRGDDKKGRRKEKKRYYKKKGGDAHVCREWDSDESSSDSSDDEDAANIAVTKGLLFPNVGHKCLMAKDGKKKKVKSKSSTRYESSSDENASDEEDNLGTLFANLNMQQKEKLNELISTIHEKDDLLDSQEDFLIKENKKHVKVKNAYSLEVEKCEKLSSELSTCHENIDNLRNENANLLAKVDSIASKLDAKIAEHELENEKFKFARSMLYNGRRPSIKDGIGFQKGDNVKLNAPPKKLSNFVKGKAPMPQDNEGYILGETSSSRQPTRAKLPKKKTPSASNEHNFSFKTFDASYVLTNKSGKVYASGGSSWIIDSGCTNHMTGEKKMFSSYEKNQDPQRAITFGDGNQGVTVFRRSDDSIAFKGVLEGQLYLVDFDRAELDTCLIAKTNMGWLWHRRLAHVGMKNLHKLLKGEHILGLTNVHFEKDRICSACQAGKQIGAHHPHKNIMTTNRPLELLHMDLFGPIAYISIGGSKYCLVIVDDYSRFTWVFFLQEKSHTQETLKGFLIRAQNEFGLRIKKIRSDNGTKFKNSQIEGFLEEEGIKHEFSSPYTPQQNGVVERKNRTLLDMARTMLDEYKTSDRFWAEAVNTACYAINRLYLHRILKKTSYELLTGKKPNISYFRVFGSKCFILVKRGRKSKFAPKTVEGFLLGYDSNTRAYRVFNKSSGQVEVSCDVVFDETNGSQVEQVDLDEIASPPTQNEDKAQVDEGENQANEPPQNDGNNQGGDANDQDKEDEEPRPPHPRVHQAIQRDHPVDTILGDIHKGVTTRSRVAHFCEHYSFVCSIEPHRVEEALQDSDWVVAMQEELNNFTRNEVWHLVPRPNQNVVGTKWVFRNKQDEHGVVTRNKARLVAKGYSQVEGLDFGETYAPVARLESIRILLAYATYHGFKLYQMDVKSAFLNGPIKEEVYVEQPPGFEDSEYPNHVYKLSKALYGLKQAPRAWYECLRDFLISNGFKVGKADPTLFTKTLENDLFICQIYVDDIIFGSTN

SEQ ID NO: 10462 - protein, 701 aa, Zea mays
  Clone ID: TF_ZM4715.C1.o9.fg.pep
MSGAPAKREIGTGGDKSASSGRTHSRESGHKHKEESSSCIKTQRRCDKKKKMKKVVYYETDSLSPSTSGSESASATSKHHERKKYSKMPLCYPRISKRTPLLSVPLGKPPVPKEGDKDYDSEEVEQIRHFNSQATTILLASLSREEYNKVQGLKSAKEIWDVLKTAHGGDEVTKITKRETIKGELGRFMLNQGEEPQAMYNRLKTLVNQVRNLESTKWDDHEMVKVILGSLVFLNPTQVQLIRGDPRYKLMSPEEVIGKFVQPIAFKATEEKKEESTSSRLPIDTSKLDNEEMALIIKSFRQILKQRKGRDYKPRSKKVCYKCGKLGHFIAKCPISSDSDRGDDKRGKKKEKKRYYKKKGGDAHVCREWDSDESSTDSSSDEDATNIAVNKGLLFPNVGHKCLMAKDGKKKPRGLIKENKKHVKVKDAYAQEVEKCEKLTSELSTCHDTISNLRNENAKLIAKVEKLNVCDDSLVKLKNDNASLIAKIDKLNESLSSLKIENDKLISKAKDLNVCNVSISNLRNENDMLHAKIDELNACKPTTSTVEHVSICMRCRDINVDAIHDHLALIKQENDHIAQLSAKINEHDLENEKFKFARSMLYSGRRPDIKDVIGFQQGDNVKLNSLKKLSNFVKGKAPMVQDNEGYILYPIGYPEHKIRRIHSRKSHSGSHHAFMYKSEASSSRQSTHVKLPKKKSPIASM

SEQ ID NO: 10463 - protein, 748 aa, Zea mays
  Clone ID: TF_ZM4516.C1.o15.fg.pep
MPKFDGRSDPEDYFTWELKVEKIFRLHNYLEEKKLAMASLEFEGYALIWWEQLLSDREEDGDDPIITWQEMRREMRIRFVTKHYRRDLFDKLQNLSQGSFSVEENYKEMEKAMIRANVYEDEEQTIASTKAERQLQQDAKSTKPLSYGARTMTGGSKSISRFTAASSATKGSIGGLQSNIQGNSSAKNGVAPNTSYKPAASTSTSVGSIAKSSGIQCFKCGGHGHVIKECPNNRVILVNDDGEYTSASEEEAEAGNHCGRTNQYTLDLKGRKFVLKPMTPQQIMAEPLQKKTEISAASRGGEEQNKLSAIHNSVSECYKPNSRDKRKEEGEHLVMLATKSELREVRNNPYQVLFVLVNKDALISPNDITSLPSVVADLLQDFEDVFPQETPAVLPPIRGIEHQIDLIPGAALPNRPPYRTNPKETKEIQRQVQELLDKGFIRESLSHCAVPVILVPKKDGSWRMCVDYRAINNITVRYHHPIPRLDDMLDELSGSTIFTKIDLRSGYHQIRMKTGDEWKTAFKTKFGLYEWLVMPFGLTNAPSIFMRLMNHVLRTFIGKFVVVYFDDILIYSKSFDEHVKHIRQVLDELRKEKLFANIEKCNFCTDHVVFLGFVVSAKGIEVDESKVKAVKDWPAPTNVSQVRSFQGLAGFYRRFVRDFSTIASPLNELTKKGVEFKWGNSQEDAFQELKKRLTEAHVLILPDFTKTFEVECDASGIGIGGVLMQQGKPIAYFSEKLGGAQCNTSGVT

SEQ ID NO: 10464 - protein, 1224 aa, Zea mays
  unsure (1)..(1224): unsure at all Xaa locations
  Clone ID: TF_ZM5005.C1.o1.fg.pep
MDPKGKGMVVNDKEESLFNEPRDDKPIDSGLSHRTRDGKKKRCIKKIIYCDSDASSSSPRDDDDDSSSKKKTVNQNYSFDYSRIPYNSNAHLLSIPLGKPPHFDGEDYSFWIHQMCSHLFSLHPSIWEIVENGMHFDSTDNPVFINEQIHKNAQATTVLLASLCRDEYNKVSGLDNAKQIWDTLKISHEGNDATMITKMELVEGELWRFAMIRGEEPTQTYNRLKTLVNKIRSYGSTRWTDHDVVRLMLRSFTIIDPHLVNLIRENPRYTKMMSEEILGKFVSGRMMVKEARYVDDALNGPLLIYEPQLVALKGTSSKETLPSKVAQVEAAGLNEDEMALIIKRFKTALKGRKEYPNKNKTRGKRSCFKCDKTGHFIAQCPDNKNDLAQERHGKKEKKKNYRKAKGEAHLGKEWDSDCSSSDSDDEGLAASAFDKSSLFPNERHTCLMAKEKKVHIQDTPKYTSSSDEESSDDEVDYSDLFMGLDQAKVEKINELIDALNEKDRLVEKQEDILHEEHDKFVSVQKSLALEIKRNEMLSSELSVHHESVSSLKKLNDKLTANLEEVNKTSSCVEHVIICNRCKDFDVNACDEHLASITKLNNEVASLNAQLKTCKVDFDKVKFARDAYIVGRHPSIKDGLGFQKKTKNLTSQRTPILNKEKGKTPMASSPQRNHAFIYDRKIASHSHRSYDHVAYYDSNAMLASSSTHDYGRNRPRTMCNKPSTIYHTCNTSFVLTCKNTKVVARKLGSKCKGDKTCIWVPKVIFTNLVGPNKSWVYATGGSSWIIDSGCTNHMTGEKKMFTSYVKNKDSQDTIIFGDENQGKVKGLGKIAITSEHSISNVFLVESLGYNLLSDKLETQGTLKRFLRRAQNEFELKVKKIRSDNGSEFKNLQVEEYLEEEGIKHEFSAPYTPQQNAVNTACHAINRLYLHHLLKKTSHELLTGNKPNVSYFRVFGSKCYILVKKGRHSKFVPKAVERFLLGYDSNTKAYRVFNKSSGLVEVSSNVVFDETNGSPREQVDLDDVDEEEIPTAAMRTMAIGDVRPQELQEQDQPSSSMVVHPPTQDDEQVPQEEGHDQVGAQEDQVMEEEAPRVPPTQVLATIQRHHPVDHILVDISKGVTTRSRLANFCEHYSFVSSIEPFRVEEALQDPDWVLAMQEELNNFKRNEVWSLVPCPKQNVVGTKWVFRNKQDEHGVVTRNKARLVAKGYXQVASLDYEETFASVARL

SEQ ID NO: 10465 - protein, 511 aa, Zea mays
  Clone ID: TF_ZM4989.C10.o3.fg.pep
MEDLSNMTPTIVIGKIAAFEMSRKMSRGEEPTSSRPYAFACDERKGKKKAPTPSSSSEEEEEEESDDDEDNQPCTSSSEDEETIRRVGKVEDLLFNIDRKKQRKRGCFACGEKGHFRDNCQNMAKPKKERSKGKALTSVRTWDDSSSEDEPPRTRSHRSSSRSSQSSHKCLMARGNKSIPSSSDESSSDDEGEGKPSLDELAEAVEFFQDVCTKQKAQLKTLKNKLVSSQNDYKGLLEKFETFANLNSELSTKIELLESSAPSTATDDNLIKKNEKLKAKLASSQEAIENLLEKMEILSIHNNELTTKLENIGSTPTTSLVEIPEIIKKDASTSCFDLIDDSNPCNQVVVENIVVETCSDEVAKENEQLKQEVARLGKALYDKKGKAKQIRPTQDNTTAGVNKPVEGETVICRLCHMEGHKSFQCKAMTGDKQRQKLKQKPSSKISNTYIKRVNKKDATPYLIKKKKNGKVIAIKANKQANKGKGAKRIWVPKEIISTMKSTKKVWIPKGK

SEQ ID NO: 10466 - protein, 1621 aa, Zea mays
  unsure (1)..(1621): unsure at all Xaa locations
  Clone ID: TF_ZmC951_430.pep
MSGEHTKKEIVTDGDKSRSHGKDPSGESDNKMKGTPSHAKSHWSGDKKKKMRKVVYYETDSSSPSTSGSDTPSVTSKRHERKKFSKIPLHYPRIPKRTPLLFVPLGKPPMFDGEDYNMWSDKMRHHLTSLHTSIWDVVEIGVQVPSPGDEDYDSDEVAQIRHFNSQATTILLASLSREEYNKVQGLKSAKEIWDVLKTAHEGDEVTKITKRETIEGELDRFRLRQGEEPQDMYNCLKTLVNQVRNLGSTKWDDHEMVKVILRSLVFLNPKQVQLICGNPRYTLMSPEEVIGNFVSFELMIKGSKKIIELDGPSTPEAQPVAFKATEEKKEESTPSRQPIDASKLDNEEMALVIKSFRQILKQRRGKDYKSHSKKVCYKCGKPDHFIAKCPMSSDSDRGDDKKGRRKEKKRYHKKRGGDAHVCREWDSDESSSDSSSDEDAANIAFIKGLLFPNVGHKCLMAKDGKKKKVKSKSSTKYETSSDEDNSCDEEDNLRTLFANLNMQQKEKLNELISAIHEKDELLDSQEDFLIKENKKHVKVKNAYALEVEKCEKLSIELSSCHDVITNLRNENASLIAKVDSNVCDASIPNLRDDNVKLLAKIEELNVSLASLKIENEKLIVKAKELDHVTICTRCRDINIDAIHDHMALIKQQNDHIAKLDAKIAEHDLENDNFKFARSMLYNGRRPDIKDGIGFQKGDNVKLNAPPKRLSNFVKGKAPMTQDNEGYILYPTGYPESKIRRIHSRKSHSGPNHAFMYKGETSSSRQSTHARLPKRKTPTTSNDHNFSFKTFDASYVLTNKSGKIVAKYVGDKHKGTKTCVWVPKVLASNAKGPKTVWVYASGGSSWIIDSGCTNHMTGEKKMFSSYEKNQDPQRAITFGDGNQGVTVFRRSDDSITFKGVLEGQLYLVDFDRAELDTCLIAKTNMGWLWHCRLAHVGMKNLHKLLKGEHILGLTNVHFEKDRICSACQAGKQVGIHHPHKNIMTTDRPLELLHMDLFGQIAYISIGGSKYCLVIVDDYSRFTWVLFLQEKSHTQETLKGFLRRAQNEFGLRIKKIRSDNGTEFKNSQIEGFLEEEGIKHEFSSPYTPQQNGVVERKNRTLLDMARTMLDEYKTSDRFWVEAVNTACYAINRLYLHRILKKTSYELLTGKKPNVSYFRVFGSKCFILVKRGRKSKFAPKAVEGFLLGYDSNTRAYRVFNKSSGLVEVSCDIVFDETNGSQVEQVDLDEIGDEEAPCVTLRNMSIGDVCPKESKEPPNAQDQPSSSTQASPPTQNEDEAQDDEGEDQEDEPPQDDGNDQGGDANDQDKEDKEPRLPHPRVHQAIQQEHPVNTILGDIQKGVTTQSRVAHFCEHYSFVSSIEPHRVEEALQDSDWVVAMQEELNNFTRNELYQMDVKSAFLNGPIKEEVYVEQPPGFEDSEYPNYVYKLSKALYGLKQAPRAWYEFLRDFLITNGFKVRKVDPTLFTKTLDNDLFVCQIYVDDIIFGSTNESTCEEFSSIMTPKFEMSMMGELKYFLGFQVKQLQEGTFISQTKYIQDILNKFGMKDAKPIKTHMGTNGHLDLDTGGKSVDQKKXSTSGTCQFLGRSLVSWASKKQNSVALSTAKAEYIAAGHCCAQLLWMRQTL

SEQ ID NO: 10467 - protein, 1191 aa, Zea mays
  unsure (1)..(1191): unsure at all Xaa locations
  Clone ID: TF_ZmC13103_1.pep
MDPKGKGIVINDKEKESFVNEPKDDKPTDSGSGHKRKDGKKKKTRRIKEIVYYDDNDESTSSQKDNDDNDYERRKPVNSNFSFDYSRIPQSTNAHLLSIPLGKPPHFDGEDYGFWSHKMRSHLFSLHPTIWEIVESGMKFDSSDSPMFINEQTHRNAQATTMLLASLCRDEYHKVSGLDNAKQIWDTLRISHEGNDVTLLTKMELVEGELGRFAMIRGEEPTQNCNFPKFLTNLTLRQVKITSXRWSKHTLLVLHLHCQNHLAAQLFLLTLLGYVATSRDPIIGGSLLLTYTTGYVAPLLIAASFAGALHSLLSFRRYSAWINPISGAFLLGGGVYTHTGQGVSSNINGHVGRKGQPSKTKIKGKHSCFKCGKVGHFIANCPDNDSDQEEGNKREKKKNYKKAKGEAHLGKEWDSDCSSSDSDNEGLAATAFNKSSLFPNEHHTCLMAREKKGLDRTKVDKINELIDALNDKNRLLEKQEDLLYDEHDKFVEAQKSLALEIKRNEMLSCELSTCHDSISSLKSIKDDLTAKCKDFNIDACSEHLVSISKLNDEVASLNAQLKTSKSEFDKLKFARDAYTIGRHPSIKDGLGFKREAKNLTSHKAPIPAKEKGKAPMASSAKKNHAFMYHDRRHARNANRSHDAFDSHVYDSYDMFASSSSYMHGRNVARRNAINHMPRRNGVSVPRKVNEPSTIYHACNASFAICRKDRKVYASGGSSWIIDNGCTNHMTGEKKMFTSYVKNKDSQDSIIFGDGNQGKDKSETQGTLKRFLRRAQNEFELKVKKIRSDNGSEFKNLQVEEYLEEEGIKHEISAPYTPQQNGVVERKNRTLIDMVRTMLGEFKTLERFWSEAVNTACHAINRVYLHRLLKKTSYELLTGNKPNVSYFRVFGSKCYILVKKGRNSKFAPKAVEGFLLGYDSNTKAYRVFNKSSGLVEVSSDVVFDETNGSPREQVVDFDNVDEEEVPITAIRTMAIGDVRPQEQDEQDQPSSSTMVQPPTQDDEQEACDQGGAQDDHVMEEEAQPAPPTQVRAMIQRDHPVDQILADISKGVTTRSRLVNFCEHYSFVSSIEPFRVEEALLDLDWVLAMQEELNNFKRNEVWILVPRPKQNVVGTKWVFRNKQDEHGVVTRNKARLVAKGYAQVAGLDFDETFAPVARLESIRILLAYAAHHSFRLFQMDVKSAFLNGPIKEE

SEQ ID NO: 10468 - protein, 1644 aa, Zea mays
  Clone ID: TF_ZM4958.C2.o1.fg.pep
MDPKGKGIVINDKEKESFINEPKDDKPTDSGHKSKDGKKKKTRHIKEIVYYDDSDESTSSQKDNDDNDYERRKPVNSNFSFDYSRIPQSTNAHLLSIPLGKPPHFDGEDYEFWSHKMRSHLFSLHPSIWEIVESGMKFDSSDSPMFINEQIHRNAQATTVLLASLCRDEYHKEARYVNDALNGPIHEPQPIALKATRSKEALPSKVAQVEAAGLNDEEMALIIKRFKTALKGRKGQPSKTKTKGKHSCFKCGKVGHFIANCPDNDSDQEEGNKREKKKNYKKAKGEAHLGKEWDSDCSSSDSDNEGLAATAFNKSSLFPNKHHTCLMAREKKGLDRTKVDKINELIDALNDKNRLLEKQEDLLYDEHDKFVEAQKSLALEIKRNEMLSCELSTCHDSISSLKSINDDLNAKLEIANKSTSCVEYVVVCTRCKDFNVDACSEHLVSISKLNDEVASLNAQLKTSKSEFDKLKFARDAYTIGRHPSIKDGLGFKREAKNLTSHKAPIPAKEKGKAPMASSAKKNHAFMYHDRRHARNANRSYDAFDSHVYDSYAMFASSSSYMHGRNVARRNTINHMPRRNGVNVPRKINEPSTIYHACNASFAICRKDRKVYASGGSSWIIDSGCTNHMTGEKKMFTSYVKNKDSQDSIIFGDGNQGKVKGLGKIAIPSEHSISNVFLVESLGYNLLSVSQLCKMGYNCLFTNVDVSAFRRSDGSLAFKGILDGKLYLVDFAKEEAGLDACLIAKTSMGWLWHRRLAHVGMKNLHKLLKGEHVIGLTNVQFEKDRPCAAYQAGKQVGGAHHTKNVMTTSRPLEMLHMDLFGPVAYLSIGGSKYGLVIVDDFSRFTWVFFLQDKSETQGTLKRFLRRAQNEFELKVKKIRSDNGSEFKNLQVEEFLEEEGMKHEFSAPYTPQQNGVVERKNRTLIDMARTMLGEFKTPECFWSEAVNTACHAINRVYLHRLLKKTSYELLTGNKPNVSYFRVFGSKCYILVKKGRNSKFAPKAVEGFLLGYDSNTKAYRVFNKSSGLVEISSDVVFDETNGSPREQVVDFDDVDEEEVPTAAIRTMAIGDVRPQEQDERDQPSSSTMVHPPTQDDEQEAYDQGGAQDDHVMEEEAQPTPPTQVRAMIQRDNPVDQILGDINKGVTTRSRLVNFCEHYSFVSSIEPFRVEEALLDPDWVLAMQEELNNFKRNEVWTLVPRPKQNVVGTKWVFRNKQDEHGVVTRNKARLMAKGYAQVAGLDFEETFAPSAFLNGPIKEEVYVEQPPGFEDERYPDHVCKLSKVLYGLKQAPRAWYECLRDFLIANAFKVGKADPTLFTKTCDGDLFVCQIYVDDIIFGSTNQKSCEEFSRVMTQKFEMSMMGELSYFLGFQVRQLKDGTFISQTKYTQDLIKRFGMKDAKPAKTPMGTDGHTDLNKGGKSVDQKAYRPMIGSLLYLCASRPNIMLSVCMCARFQSDPRECHLVAMKRILRYLVATPCFGIWYPKGSTFDLIGYSDSDYAGCKVDRKSTSGTCQFLGRSLVSWSSKKQTSVALSTAEAEYVAAGQCCAQLLWMRQTFRDFGYNLSKVPLLCDNESAIRMVDNPVEHSRTKHIDIRHHFLRDHQQKGDIEVFHVSSENQLVDIFTKPLDEQTFCKLRSELNVLDSRNLD

SEQ ID NO: 10469 - protein, 505 aa, Zea mays
  Clone ID: TF_ZmC24260_17.pep
MSGGKRNESASKLEKVEVASTLSFGADVDPRAIDLAMRIAERMFLKMKEDEAKNIIEEEENDRWRPNDESTSSQGSSFKSTSHMCFIANGSDSESESEDKEEQESDSEDEDDLQQFFAQLSKKHRMSLLKLMKRAEEQKEMLHKQEDFLIRKIEDLEKLTKEHEKLKCSHDDLVQRYEDISIEQIKVVNHSSYIAQLENKNAMFKNTIERLNIENLAFQEKHDMLVCSHNKFMDSHIMLEMAHEVVLTNLKSYQPHMCTCVEIETILPCANKCCSQESQSSIELDISRISDISITQENKELKEEVGMLRRSLTRLKGKCHAQPPQDNHDNVVKKLEKGTTVACTKPLQKNTKLSKKGMSKIHGEKINAHMICSNNVPMCFNKERSKRSDRRCYGCKEKGHEIDSCPHMKNQDLARSRKMTIKKDESKRQKHCKDKHRICYNCREKGHLFKVCPKGKTPKPNLSIHLNMLWRPKFDSCARKVMSSPHSRTKAIWVPKSLLANLDLS

SEQ ID NO: 10470 - protein, 678 aa, Zea mays
  Clone ID: TF_ZmC951_348.pep
MSGDHAKKEMVTGEKPATSHGKAPSGESGNKKREESPPRVKSHRSGNKKKKMKKVVYYETDSSSPSTSGSDTPSVTSKRHERKPPVFMVKIIVPSIGDEDYDADKVAQIQHFNSQATTILLTSLSQEEYNKVQGLKSAKEIWDVLKTAHEGDEVTKITKREMIEGELGRFMLNQGEEPQAMYNRLKILVNQVRNLGSTKWDDHEMVKVILRSLVFLNPTQVQLIRGDPRYKLMSLEEVIGKFVSFELMIKGSKQIIEQGATSTPEVQPVAFKATKEKKEESTSSRLPIDASKLDNEEMALIIKSFRQILKQRREKDYKPRSKKVCYKCGKPSHFIAKCPSSSDSDRGDDKKGKRKEKKRYYKKKGGDAHICREWDSDESYTDSSSDEDAANITVNKGLLFPNFGHKCLMTKGGKKKVKSRASTKYATSSDEDNSSDDEDNLLALFANLNMQQKEKLNELIGAIHEKDELLDSQENFLIKENKKHVKVKNAYAQEVEKCEKLTSELSTCHDIISNLRNENVKLIAKVEKLDVCDDSIVSLRNDNASLVTNIDKLNTSLSSLKIENEKLIAKAKDLNVCNISISNLRDENAILHAKIDKLNACKPSTSTISYVSICTRCKDVNVDAIHDHIAMIKQQNDHIAKLDAKIAEHELENEKFKFARSMFYNGRRPVIKDGIGFQ

SEQ ID NO: 10471 - protein, 649 aa, Zea mays
  Clone ID: TF_ZM4952.C1.o18.fg.pep
MASGRTPLQQCPRPHLRSRGEDKYKEPEVRSADGGGDPARDPTVPARRIGHGPVSLGRRRDGRCGQKWAGSNGGGRRAEAAVTSSAKLTSPHGTDVTQEWLDRVKIARKGLRGTKRRFNRFFALFTFLKILVQPDTQPDTQPVFVWWKQLWYYIEFFVDSLLLELLAPRRLGVAYVDPRAIDLAMRIAERMFLKMKEDEAKNKIEEENDRWRPNDESTFSQGSYFKSTSHMCFIANGSDSESESEDEEEQESDSEDEDDLQQFFAQLSKKHRMSLLKLMKRAEEQKEMLHKQEDFLIRKIEDLEKLTKEHEKLKCSHDDLVQRYEDISIEQIKVVNHSSYIAQLENKNAMFKNTIERLNIENLALQEKHDMLMCSHNKFMDSHIMLEMAHEVVLTNLKSYQPHICTCTQVETILSCANKCCSQESQSSIELEISGINDISMTQENKELKEEVGRLRRILTLLKGKCHAQPSQDNRDNMVKKLEKGTTVACTKPFQKNTKLSKKGMSKIHGKKINAHTICSNNVPMCFNKERSKRSDRRCYGCKEKGHEIDSCPHMKNQDLTQSRKMTIKKDENKRQMHCKDKHRICYNCREKGHLFKVCPKGKTLKPTMSIHSYSLRRPKNDTCARKPHRKNEALENELKRFYLALERI

SEQ ID NO: 10472 - protein, 2350 aa, Zea mays
  Clone ID: TF_ZmC3792_1.pep
MRTSAPLGGRMASPDLRKDAARMLRVIGGCWPRNVPIPRAAGEDLFTSRMVREWRVFPYGRNIAAVVSAVMDKDRQGAAQKRQAVVRLVEARPKRQRGSAKAAAAGGGKPPLAAKLGVPASSKAPEATTGAGGSKPTKAVPPASRVPEAAKAAKLLPAGKRIADFATDISVEDYLGGSDEGQLAIVAPAAATTTAAAAPKAKGGAIGARGEVAALAAVRDEAGAASRQLKEVAESLSQVADFANRTTSGALTAVVSAEVERLRTQHTDAVREKSAADSKCRKLVDKVAALEGEKADLRRQLAGERRETNEALVNAQAAQAEANLARAEGNLARERAEQLQERLIALESRVERAEAATRAEAERTRTQLMDTYRELGARTGDFEVPDREPGLHYLEWVQEELQALPTVVEGFMSYASLVTCEGAMNALSREGCRHFEVFDQADDDFERDIYKVEDPVVKESAGAIYDRMWGPHGREVVRERATTARAQAARGERVDDFGALNNALADPEPTPAVTMRLMVLITIMVLMARLRHTARKSVIPFLPSRLAKRPLRRPVAGQSSHLERLHHRLREEQERRRQEQQSSSFSLHQEIESVRSCSPVLPLEAPPAPPLGAPASGVAAGGDPDDGDGDDSSSHDTDFSANPEPEGWVARPITRDAARGCHFHDALDTLLRRAFDRHTWSVEYRCVVYQHSRGVYPDRWEATCLVRCPEDSLQGAEACSEHYSISERDSAEAAMQDAARRALSHYCSVFGGAADGLDLKYYPRRPSGSTGGVIVSPVGEGNPRLSSTVNLAAVLNTELDHALDELSRARAEIALLRAERGNVVIWMMSENRRRGGRRAQQERAAQQEEVPQQQLPPPPPMSIEQMFLMQTQSVQAIGQTLAAIQQQQQQQQQQAPPQPQMPQMPRDKRAEFMRGHPPTFAHSSDPMDAEDWLRNVERELHTAQCDDREKVLYGPRLLRGAAQSWWESYLATHANPDTITWEEFRGSFRQYHVPAGLMTVKKEEFLALKQGSSSVSEYRDRFLQLSRYAPEDVNTDAKRQYRFLRGLVDPLQYQLMNHTFPTFQHLIDRAIMTERKRKEMEDRKRKISGPQPGSSSRPRFSGNQPQQFRQNQRPPQQRQQHQQFQRQYPQHQYQNRQSNQSGGQFQRQNQQAPRLPAPANQQNSQAAPAQVGNRACFHCGEQGHWVMQCPKKAAQQQSGPNAPAKQNVSQPGAGNRPQQRYNHGRLNHLEAEAVQETPGMIVGMFPVDSHIAEVLFDTGATHSFITASWVEAHNLPTTTMSTPIQIDSAGGRIRADSICLNISVEIRGIAFPANLIVMGTQGIDVILGMNWLDKYQAVISCDKRTIKLVSPLGKEVVTELVPPEPKKGSCYQMAVDSSEADPIESIKVVSEFPDVFPKDLPGMPPERKVEFAIELLPGTAPIFKRAYRISGPELVELKKQIDELSEKGYIRPSTSPWAAPVLFVEKKDGTKRMCIDYRALNEVTIKNKYPLPRIEDLFDQLRGASVFSKIDLRSGYHQLRIRPSDIPKTAFITKYGLYEFTVMSFGLTNAPAFFMNLMNSVFMDYLDKFVVVFIDDILIYSQSEEEHADHLRMVLQRLREHQLYAKLSKCEFWINEVLFLGHIINKEGLAVDPKKVADILNWKAPTDARGIKSFIGMAGYYRRFIEGFSKIAKPMTALLGNKVEFKWTQKCQEAFEALKEKLTTSPVLILPDVHKPFSVYCDACYTGLGCVLMQEGRVVAYTSRQLKVHEKNYPIHDLELAAVVHALKTWRHYLYGQKCDVYTDHKSLKYIFTQSELNMRQRRWLELIKDYELEIHYHPGKANVVADALSRKSQVNLMVARPMPYELAKEFDRLSLGFLNNSRGVTVELEPTLEREIKEAQKNDEKISEIRRLILDGRGKDFREDAEGVIWFKDRLCVPNVQSIRELILKEAHETAYSIHPGSEKMYQDLKKKFWWYGMKREIAEHVAKCDSCRRIKAEHQRPAGLLQPLQIPQWKWDEIGMDFIVGLPRTRAGYDSIWVVVDRLTKSAHFIPVKTSYNSAVLAELYMSRIVCLHGVPKKIVSDRGTQFTSHFWQQLHEALGTHLNFSSAYHPQTDGQTERTNQILEDMLRACALQDQSGWDKRLPYAEFSYNNSYQASLKMSPFQALYGRSCRTPLQWDQPGEKQVFGPDILLEAEENIKMVRENLKIAQSRQRSYADTRRRELSFEVGDFVYLKVSPIRGVRRFGVKGKLAPRYIGPYQILSKRGEVAYQLSLPENLSAVHDVFHVSQLKKCLRVPEEQLPVEGLEVQEDLTYVEKPAQILEIADRVTRRKTIRMCKVRWNHHSEEEATWEREDDLVAKYPELFASQP

SEQ ID NO: 10473 - protein, 1799 aa, Zea mays
  Clone ID: TF_ZmC3792_12.pep
MRVVHIATTAQEKAKSWKETSRSSKTTTNFRWLVLDTLHLEAPPAPPRDVPAVGGATGGDPDDNDSDHSTESSEPQEAEGWVARPITRDAARGCHFHDALDTLLRQAFDQHTWSIEYRCVVYQHSRGRYPDRWEATCLVRRPEDDLRGAEAVSEHYSISERDTAEAAMQDAARRALSQYCSLFGGVADGLNLRYYPRRPTGSTESVVVSPVGEANPRLSSTVNLVAVLNTELDHSLDELSRARTEIAGLRAELAERHHQEGGSPAPVGTQHPYRSPPRGSMLMYECLPQMSDNRRRCNRRAQQEQHDQQEEQQRQPPPPPPMSVEQMFLMQTQAVQAIGQTLAAMQQAQQQPQPQLQVQMPQMPRDKRGEFMRGHPPTFAHSADPMDAEDWLRAVERELRTAQCDDREKVLYGPRQLRGAAQSWWESYLATHANLEAITWEEFSESFRRYHVPEGLMIVKKEEFLALKQGPLSVSEYRDKFLQLSRYAPEDVNTDAKRQYRFMRGLVDPLHYQLMNHTFPTFQHLIDRAVMTEKKRKDMEDRKRKMSGHQSGGISRPHFSGSSSQQGRPGHPQGYQNQNQRPHQQQFQRQYPQQQQQYRQHSQQGGNQYQKQNNQAPRLPAPTANQSNQAAPAQGGGRGCFHCGEQGHWAMQCPKKLAQQQTNPNAPTRQGVLQPAAGNRNQAYNRGKVNHLEAEAIQDAPDVAVGMFSVESHPAKVLFDTGATHSFVTATWVELHNISVEAMMPPMRINSVGGKVQTDKICSNIMVEIRGIGFPSDLMVIDTPGIDIILGMNWLMKYEANVSCDKRTVTLKSPSGEEVVAELWMPKSEEGVCHQISVSSKEPNPLEAIKVVSDFPDVFPEELTGMPPERKVEFAIELIPGTAPISKRAYRVSGPELVELKKQIDEMLEKGYIRPSTSPWAAPVLFVEKKDGTKRMCIDYRALNEVTIKNKYPLPRIEDLFDQLRGASVFSKIDLRSGYHQLRIRPSDIPKTAFITKYGLYEFTVMSFGLTNAPAFFMYLMNSVFMDYLDKFVVVFIDDILIYSQSEEDHAEHLKMVLQRLREHQLYAKLGKCEFWIHEVLFLGHIINQDGLAVDPKKVADILNWKAPKDVRGIKSFIGMAGYYRRFIEGFSKIARPMTALLAKKVEFKWTQKCQEAFEELKSRLTTAPVLVLPDVHKPFSVYCDASYTGLGCVLMQEGRVVAYSSRQLKIHEKNYPTHDLELAAVKCDIYTDHKSLKYIFTQSELNMRQRRWLELIKDYELEIHYHPGKANVVADALSRKSQVNMLASYPMPYELAKEFDRLSLGFLNSTQGVTVELEPTLEWEIKEGQKDDENINKIRQLILEGRGKDFREDEEGVIWFKDRLCVPDLKPIRELILKEAHETAYSIHPGSEKMYQDLKRRFWWYGMKREIAEYVAICDSCQRTKAEHQRPAGLLQPLRIPQWKWDEIGMDFIVGLPRTRAGYDSIWVVVDRLTKVAHFIPVKTTYTGATLAELYMSRIVCLHGVPKKIVSDRGTQFTSHFWQQLQEALGTHLNFSSAYHPHTDGQTERTNQILEDMLRACALQDKSGWDKRLPYAEFSYNNSYQASLKMSPFQALYGRSCRTPLHWDQPGERQVFGPDILLEAEENIKMVRENLKIAQSRQRSYADRRRRELSFEVGDYVYLKVSPIRGVRRFGVKGKLAPRYVGPYQIQAKRGEVAYQLNLPESLSAVHNVFHVSQLKKCLRVPEEQLPVEGLEVQEDLTYIEKPTQILEFADRVTRRNTIRMCKVRWGHHSEEEATWEREDDLKAKYPELFADQP

SEQ ID NO: 10474 - protein, 1912 aa, Zea mays
  Clone ID: TF_ZmC3792_3.pep
MWLLLPSTAMRASSVLFHRPRSALLLPSFRLMDLMGTAWTSNVESMALGMFLLKPISRLTMARLRHTARKSVIPFLPSRLAERPLHRTVSGQSSHLERLHHRLREEQERRRQHGEQQGSSSSPQQEVETVRPRSSVAQLEAPLVPPRDVPAVGGATEGATGGDPDDDDSDHSTESSEPQEAEGWVARPITRDAARGCHFHDALDTLLRQAFDRHTWSIEYRCVVYQHSRGRYPDRWEATCLVRRPEDDLRGAEAVSEHYSISERDTAEAAMQDAARRALSQYCSLFDGVADGLNLRYYPRRPTGSTESVVVSPVGEANPRLSSTVNLVAVLNTELDHSLDELSRARTEIAELRAELAERHHQEGGSPAPVGTQHPYRSPPRGHHTYGSPMSDNRRRCNRRAQLEQHDQQEENQRQPPPPPPMSVEQMFLMQTQAVQAIGQTLAAMQQAQQQPQPQLQVQMPQMPRDRRGEFMRGHPPTFAHSADPMDAEDWLRAVERELRTAQCDDREKVLYGPRQLRGAAQSWWESYLATHANPEAITWEEFSESFRRYHVPEGLMIVKKEEFLALKQGPLSVSEYRDKFLQLSRYAPEDVNTDAKRQYRFMRGLVDPLHYQLMNHTFPTFQHLIDRAVMTEKKRKDMEDRKRKMSGPQSGGISRPRFSGSSSQQGRPGHPQGYQNQNQRPHQQQFQRQYPQQQQYRQHSQQGGNQYQKQNNQAPRLPAPAANQSNQAAPAQGGGRGCFHCGEQGHWAMQCPKKMAQQQTNPNAPTRQGVLQPAAGNRNQAYNRGKVNHLEAEAIQDASDVAVGMFSIESHPAKVLFDTGATHSFVTATWVELHSISVEAMMPPMRINSVGGKVQTDKICSNIMVEIRGIGFPSDLIVIGTPGIDIILGMNWLMKYEANVSCDKRTITLKSPSGEEVVAELRMPKSEEGACHQISVDSKEPNPLEAIKVVSDFPDVFPEELTGMPPERKVEFAIELIPGTAPISKRAYRVSGPELVELKKQIDEMLEKGYIRPSTSPWAAPVLFVEKKDGTKRMCIDYRALNEVTVKNKYPLPRIEDLFDQLRGASEFSKIDLRSGYHQLRIRPSDIPKTAFITKYGLYEFTVMSFGLTNAPAFFMYLMNSVFMDYLDKFVVVFIDDILIYSQSEEDHVEHLKMVLQRLREHQLYAKLGKCEFWIHEVLFLGHIINQEGLAVDPKKVADILNWKAPKDVRGIKSFIGMAGYYRRFIEGFSKIARPMTALLAKKVEFKWTQKCQEAFEELKNRLTTAPVLVLPDVHKSFSVYCDASYTGLGCVLMQEGRVVAYSSRQLKIHEKNYPTHDLELAAVVHALKTWRHYLYGQKCDIYTDHKSLKYIFTQSELNMRQRRWLELIKDYELEIHYHPGKANVVADALSRKSQVNMLASHPMPYELAKEFDRLSLGFLNSTQGVTVELEPTLEREIKEGQKDDENINKIRQLILEGRGKDFREDEERVIWFKDRLCVPDLKPIRELILKEAHETAYSIHPGSEKMYQDLKRRFWWYGMKREIAEYVAICDSCQRTKAEHQRPAGLLQPLRIPQWKWDEIGMDFIVGLPRTRAGYDSIWVVVDRLTKVAHFIPVKTTYTGATLAELYMSRIVCLHGVPKKIVSDRGTQFTSHFWQQLQEALGTHLNFSSAYHPQTDGQTERTNQILEDMLRACALQDKSGWDKRLPYAEFSYNNSYQASLKMSPFQALYGRSCRTSLHWDQPGERQVFGPDILLEAEENIRMVRENLKTAQSRQRSYADRRRRELSFEVGDYVYLKVSPIRGVRRFGVKGKLAPRYVGPYQIQAKRGEVAYQLDLPESLSAVHNVFHVSQLKKCLRVPEEQLPVEGLEVQEDLTYIEKPTQILECADRVTRRNTIRMCKVRWGHHSEEEATWEREDDLKAKYPELFADQP

SEQ ID NO: 10475 - protein, 1428 aa, Zea mays
  Clone ID: TF_ZM3670.C6.o1.fg.pep
MTVEQMFLMQTQAVQAIGQTLAAMQQAQQQPQPQMQVQMPQMPRDKHGEFMRGHPPTFAHSADPMDAEDWLRAVERELRTAQCDDREKVLYGPRQLRGAAQSWWESYLATHADPEAITWEEFSESFRRYHVPEGLMIVKKEEFLALKQGPLSLMNHTFPTFQHLIDRAVMTEKKRKDMEDRKRKMSGPQSGSISRPRFSGSSSQQGRPGHPQGYQHQIQRPHQQQFQRQYPQQQQYRQNSQQGGNQYQKQNNQAPCLPAPAANQNNQAAPAQGGGRGCFHCGEQGHWAMQCPKKMTQQQTNPNAPTRQGVLQQAAGNRGQAYNRGKVNHLEAEAIQDAPDVAVGMFSVESHSAKVLFDTGATHSFVTATWVEMHNISVEAMMPPMRINSVGGKVQTDKICSNIRVEIRGIGFPSDLIVIDTPGIDVILGMNWLMKYEANVSCDKRTVTLKSPSGEEVVAELKMPKSAEGVCHQISVDSKETNPLEAIKVVSDFPDVFPEELTGMPPERKVEFAIELIPGTAPISKRAYRVSGPELVELKKQIYEMLEKGYIRPSTSPWAAPVLFVEKKDGTKRMCIDYRALNEVTVKNKYPLPRIEDLFDQLRGASVFSKIDLRSGYHQLRIRPSDIPKTTFITKYVLYEFTVMSFGLTNAPAFFMYLMNSVFMDYLDKFVVVFIDDILIYSQSEEDHVEHLKMVLQRLREHLLYAKLSKCEFWIHEVLFLGHIINQDGLAVDPKKVADILNWKAPKDVRGIKSFIGMAGYYRRFIEGFSKIARPMTALLAKKVEFKWTQKCQEAFEELKNRLTTSPVLVLPDVHKPFSVYCDASYTGLGCVLMQEGRVVAYSSRQLKIHEKNYPTHDLELAAVVHALKTWRHYLYGQKCDIYTDHKSLKYIFTQSELNMRQRRWLEFIKDYELEIHYHPGKANVVADALSRKSQVNMMATHPMSYELAKEFDRLSLGFLNSTQGVTVELEPTLEREIKEGQKDDENINKIRQLILEGRGKDFREDEEGVIWFKDRLCVPDLKPIRELILKEAHEIAYSIHPGSEKMYQDLKRRFWWYGMKREIAEYVAICDSCQRTKAEHQRPAGLLQPLRIPQWKWDEIRMDFIVGLPRTRAGYDSIWVVVDRLTKVAHFIPVKTTYTGATLAELYMSRIVCLHGVPKKIVSDRGTQFTSHFWQQLQEALGTHLNFSSAYHPQTDGQTERTNQILEDMLRACALQDKSGWDKRLPYAEFSYNNSYQTSLKMSPFQALYGRSSEENIKMVRENLKIAQSRQRSYADRRRRELSFEVGDYVYLKVSPIRGVRRFGVKGKLAPRYVGPYQIQAKRGEVAYQLNLPESLSAVHNVFHVSQLKKCLRVPEEQLPVEDLEVQEDLTYVEKPTQILEFADRVTRRNTIRMCKVRWGHHSEEEATWEREDDLKAKYPELFADQP

SEQ ID NO: 10476 - protein, 1834 aa, Zea mays
  Clone ID: TF_ZM4694.C3.o5.fg.pep
MARLRHTARKSVIPFLPSRLAERPLHRTVSGQSSHLERLHHRLREEQEHRRQHREQQGSSSPPQREVESVRPRSSVAQLEAPPAPPRDAPAVGGATGGDPDDDDSDHSTESSEPQEAEGWVARPITRDAARGCHFHDALDTLLRQAFDRHTWSIEYRCVVYQHSRGRYPDRWEATFLVRRPEDDLRGAEVVSEHYSISERDTAEAAMQDAARRALSQYCSLFGGVADGLNLRYYPRRPTGSTESVVVSPVGEGNPRLSSTVNLVAVLNTELDHSLDELSRARTEIAELRAELAERHHQEGGSPAPVGTQHPYRSPPRGHHTYGSPVCADATGVLSKSSMTSRRNNRGSLPHHPPMSVEQMFLMQTQAVQAIGQTLAAMQQAQQQPQPQLQVQMPQMPRDKRGEFMRGHPPTFAHSADPMDAEDWLRAVERELRTAQCDDREKVLYGPRQLRGAAQSWWESYLATHADPEAITWEEFSESFRRYHVPEGLMIVKKEEFLALKQGPLSVSEYRDKFLQLSRYAPEDVNTDAKRQYRFMRGLVDPLHYQLMNHTFPTFQHLIDRAVMTEKKRKDMEDRKRKMSGPQSGGTSRPRFSGSSPQQGRPGHPQGYQNQNQRPHQQQFQRQYPQQQQQYRQHSQQGGNQYQKQNNQAHRLPAPAANQSNQATPAQGGGRGCFHCGEQGHWAMQCPKKMAQQQTNPNAPTRQGVLQPAAGNRNQAYNRGKVNHLEAEAIQDAPDVAVGMFSVESHPAKVLFDTGATHSFVTATWVELHNISVEAMMPPMRINSVGGKVQTDKICSNIMVEIRGIGFPSDLIVIDTPGIDVILGMNWLMKYEANVSCDKRTVTLKSPSGEGVVAELRMPKSEEGVCHQISVDSKEPNPLKAIKVVSDFPDVFPEELTGMPPERKVEFAIELIPGTAPISKRAYRVSGPELVELKKQIDEMLEKGYIRPSTSPWAAPVLFVEKKDGTKRMCIDYRALNEVTVKNKYPLSRIEDLFDQLRGASVFSKIDLRSGYHQLRIRPSDIPKTAFITKYGLYEFTVLSFGLTNAPALFMYLMNSVFMDYLDKFVVVFIDDILIYSQSEEDHVEHLKMVLQRLREHQLYAKLGKCEFWIHEVLFLGHIINQDGLAVDPKKVADILNWKAPKDVRGIKSFIGMAGYYRRFIEGFSKIARPMTALLAKKVEFKWTQKCQEAFEELKNRLTTTPVLVLPDVHKSFSVYCDASYTGLGCVLMQEGRVVAYSSRQLKIHEKNYPTHDLELAAVVHALKTWRHYLYGQKCDIYIDHKSLKYIFTQSELNMRQRRWLELIKDYELEIHYHPGKANVVADALSRKSQLAKEFDRLSLGFLNSTQGVTVELEPTLEREIKEGQKDDENINKIRQLILEGRGKDFREDEEGVIWFKDRLCVPDIKPIRELILKEAHETAYSIHPGSEKMYQDLKRRFWWYGMKREIAEYVAICDSCQRTKAEHQRPAGLLQPLRIPQWKWDEIGMDFIVGLPRTRAGYDSIWVVVDRLTKVAHFIPVKTTYTGATLAELYMSRIVCFHGVPKKIVSDRGTQFTSHFWQQLQEALGTHLNFSSAYHPQTDGQTERTNQILEDMLRACALQDKSGWDKRLPYAEFSYNNSYQASLKMSPFQALYGRSCRTPLHWDQPGERQVFGPDILLEAEENIKMVRENLKTAQSRQRSYADRRRRELSFEVGDYVYLKVSPIRGVRRFGVKGKLAPRYVGPYQIQAKRGEVAYQLNLPESLSAVHNVFHVSQLKKCLRVPEEQLPVEGLEVQEDLTYKEKPTQILEFADRVTRRNTIRMCKVRWGHHSEEEATWEREDDLKAKYPGLFADQP

SEQ ID NO: 10477 - protein, 348 aa, Zea mays
  Clone ID: TF_ZM4711.C2.o1.fg.pep
MQQAQQQPQPQLQVQMPQMPRDKRGEFMRGHPPTFAHSAEPMDAEDWLRAVERELRTAQCDDREKVLYGPRQLRGAAQSWWESYLATHADPEAITWEEFSESFRRYHVPEGLMIVKKEEFLALKQGPLSVSEYRDKFLQLSRYAPEDVNTDAKRQYRFMRGLVDPLHYQLMNHTFPTFQHLIDRAVMTEKKRKDMEDRKRKMSGPQSGGISRPRFSGSSSQQGRPGHPQGYQNQNQRPHQQQFQRQYPQQQQQYRQHSQQGGNQYQKQNNQAPRLPAPAANQSNQAAPAQGGGRGCFHCGEQGHWAMQCPKKLAQQQANPNAPARQGVLQPAAGNRNQAYNRGKGANR

SEQ ID NO: 10478 - protein, 1437 aa, Zea mays
  Clone ID: TF_ZM4783.C6.o2.fg.pep
MPQMPRDKPGEFMRGHPPTFAHSADPMDAEDWLRAVERELRTAQCDDREKVLYGPRQLRGAAQSWWESYLATHADPEAITWEEFSESFRRYHVPEGLMIVKKEEFLALKQGPLSVSEYRDKFLQLSRYAPEDVNTDAKRQYRFMRGLVDPLHYQLMNHTFPTFQHLIDRAVMTEKKRKDMEDRKRKMSGPQTGGISRPRFIGSSSQQGRPGHPQGYQNQNQRPHQQQFQRQYPQQQQQYRQHSQQGSNQYQKQNNQAPRLPAPAANQSNQAAPAQGGGRGCFHCGEQGHWAMQCPKKMAQQQTNPNAPTRQGVLQPAAINRSQAYNRGKVNHLEAEAIQDAPDVAVGMFSIESHPAKVLFDTGATHSFVTATWVELHNISVEAMMPPMRINSVGGKVQTDKICSNIMGEIRGIGFPSDLIVIDTPGIDVILGMNWLMKYEANVSCDKRTVTLKSPSGEEVVAELRMPKSAEGVCHQISVDSKEPNPLEAIKVVSDFPDVFPEELTGMPPERKVEFAIELIPGTAPISKRAYRVSGPELVELKKQIDEMLEKGYIRPSTSPWAAPVLFVEKKDGTKRMCIDYRALNEVTVKSKYPLPRIEDLFDQLRGASVFSKIDLRSGYHQLRIRPSDIPKTAFITKYGLYEFTVMSFGLTNAPAFFMYLMNSVFMDYLDKFVVVFIDDILIYSQSEEDHVEHLKMVLQRLREHQLYAKLGKCEFWIHEVLFLGHIINQDGLAVDPKKSFIGMAGYYRRFIEGFSKIARPMTALLAKKVEFKWTQKCQEAFEELKNRLTTAHVLVLPDVHKSFSVYCDASYTGLGCVLMQEGRVVAYSSRQLKVHEKNYPTHDLELAAVVHALKTWRHYLYGQKCDIYTDHKSLKYIFTQSELNMRQRRWLELIKDYELEIHYHPGKANVVADALSRKSQVNMLASYPMPYELAKEFDRLSLGFLNSTQGVTVELEPTLEREIKEGQKDDESINKIRQLILEGRGKDFREDEEGVIWFKDRLCVPDLKPIRELILKEAHETAYSIHPGSEKMYQDLKRRFWWYGMKREIVEYVAICDSCQRTKAEHQRPAGLLQPLRIPQWKWDEIGMDFIVGLPRTRAGYDSIWVVVDRLTKVAHFIPVKTTYTGATLAELYMSRIVCLHGVPKKIVSDRGTQFTSHFWQQLQEALGTHLNFSSAYHPQTDGQTERTNQILEDMLRACALQDKLGWDKRLPYAEFSYNNSYQASLKMSSFQALYGRSCRTPLHWDQPGERQVFGPDILLEAEENIKMVRENLKIAQSRQRSYADRRRRELSFEVGDYVYLKVSPIRGVRRFGVKGKLAPRYVGPYQIQAKRGEVAYQLNLPESLSAVHNVFHVSQLKKCLRVPEEQLPVEGLEVQEDLTYIEKPTQILEFADRVTRRNTIRMCKVRWGHHSEEEATWEREDDLKAKYPELFADQP

SEQ ID NO: 10479 - protein, 1507 aa, Zea mays
  Clone ID: TF_ZM4932.C1.o2.fg.pep
MSDNRRRCNRRAQQEQHDQQEEQQRQPPPPPPMSVEQMFLMQTQAVQAIGQTLAAMQQAQQQPQPQLQVQMPQMPRDKRGEFMRGHPPTFAHSADPMDAEDWLRAVERELRTAQCDDREKVLYGPRQLRGVAQSWWESYLATHADPEAITWEEFSESFCRYHVPEGLMIVKKEEFLALKQGPLSVSEYRDKFLQLSRYAPEDVNTDAKRQYRFMRGLVDPLHYQLMNHTFPTFQHLIDRAVMTEKKRKDMEDRKRKMSGPQSGGISRPRFSGSSSQQGRPGHPQGYQNQNQRPHQQQFQRQYPQQQQQYRQHSQQGGNQYQKQNNQAPRLPAPAANQSNQAAPAQGGGRGCFHCGEQGHWAMQCPKKMAQQQTNPNAPTRQGVLQPAAGNRSQAYNRGKVNHLEAEAIQDAPDVAVGMFSVESHPAKVLFDTGATHSFVTATWVELHNISVEAMMPPMRINSVGGKVQTDKICSNIMVEIREIGFPSDLIVIDTPGIDVILGMNWLMKYEANVSCDKRTVTLKSPSGEEVVAELRMPKSEEGVCHQISVDSKEPNPLEAIKVVSDFPDVFPEELTGMPPERKVEFAIELIPGTAPISKRAYRVSGPELVELKKQIDEMLEKGYIRPSTSPWAAPVLFVEKKDGTKRMCIDYRALNEVTVKNKYPLPRIEDLFDQLRGASVFSKIDLRSGYHQLRIRPSDIPKTAFITKYGLYEFTVMSFGLTNAPAFFMYLMNSVFMDYLDKFVVVFIDDILIYSQSEEDHVEHLKMVLQRLREHQLYAKLGKYGLAVDPKKVADILNWKAPKDVRGIKSFIGMAGYYRRFIEGFSKIARPMTALLAKKVEFKWTQKCQEAFEELKNRLTTAPVLVLPDVHKSFSVYCDASYTGLGCVLMQEGRVVAYSSRQLKIHEKNYPTHDLELAAVVHALKTWRHYLYGQKCDIYTDHKSLKYIFTQSELNMRQRRWLELIKDYELEIHYHPGKANVVADALSRKSQVNMLASYPMSYELAKEFDRLSLGFLNSTQGVTVELEPTLEREIKEGQKDDESINKIRQLILEGRGKDFRDDEEGVIWFKDRLCVPDLKPIRELILKEAHETAYSIHPGSEKMYQNLKRRFWWYGMKREITEYVAICDSCQRTKAEHQRPAGLLQPLRIPQWKWDEIGMDFIVGLPRTRAGYDSIWVVVDRLTKVAHFIPVKTTYTGATLAELYMSRIVCLHGVPKKIVSDRGTQFTSHFWQQLQEALGTHLNFSSAYHPQTDGQTERTNQILEDMLRACALQDKSGWDKRLPYAEFSYNNSYQASLKMSPFQALYGRRCRTPLHWDQPGERQVFSPDILLEAEENIKMVRENLKIAQSRQRSYADQRRRELSFEVGDYVYLKVSPIRGVRRFGVKGKLAPRYVGPYQIQAKRGEVAYQLNLPESLSAVHNVFHVSQLKKCLRVPEEQLPVEGLEVHEDLTYIEKPTQILEFADRVTRRNTVRMCKVRWGHHSEEEATWEREDDLKAKYPELFADQP

SEQ ID NO: 10480 - protein, 1595 aa, Zea mays
  Clone ID: TF_ZM4940.C2.o21.fg.pep
MLALPRLSAEVLSFCSLLVTLLRGGMARLRHTARKSVIPFLPSRLAERPLHRTVSGQSSHLERLHHRLREEQERRRQHGEQQGSSSSPQQEVETVRPRSSVAQLEAPLVPPRDVPAVGGATGGATGGDPDDDDSDHSTESSEPQEAEGWVARPITRDAARGCHFHDALDTLLRQAFDRHTWSIEYRCVVYQHSRGRYPDRWEATCLVRRPEDDLRGAEAVSEHYSISERDTAEAAMQDAARRALSQYYSLFGGVADGLNLRYYSRRPTGSTESVVVSPVGEGNPRLSSTVNLVAVLNTELDHSLDELSRARTEIAELRAELAERHHQEGGSPAPVGTQHPYRSPPRGHHTYGSPIVRSMLMCECLPQMSDNRRRCNRRAQLEQHDQQEENQRQPPPPPPMSVEQMFLMQTQAMQAIGQTLAAMQQAQQQPQPQLQVQMPQMPRDRRGEFMRGHPPTFAHSADPMDAEDWLRAVERELCTAQCDDREKVLYGPRQLRGAAQSWWESYLATHANPEAITWEEFSESFRRYHVPEGLMIVKKEEFLALKQGPLSVSEYRDKFLQLSRYAPEDVNTDAKRQYRFMRGLVDPLHYQLMNHTFPTFQHLIDRAVMTEKKRKDMEDRKRKMSGPQSGGTSRPRFSGSSSQQGRPGHPQGYQNQNQRPHQQQFQRQYPQQQQYRQHNQQGGNQYQKQNNQAPRLPAPAVNQSNQAAPAQGGGRGCFHCGEQGHWAMQCPKKMAQQQTNPNAPTRQGVLQPAAGNRNQAYNRGKVNHLEAEAIQDAPDVAVGMFSVESHPAKVLFDTGATHSFVTATWVELHSISVEAMMPPMRINSVGGKVQTDKICSNIMVEIRGIGFPSDLIVIGTPGIDVILGMNWLMKYEANVSCDKRTITLKSPSGEEVVAELRMPKSEEGVCHQISVDSREPNPLETIKVVSDFPDVFPEELTGMPPERKVEFAIELIPGTAPISKRAYRVSGPELVELKKQIDEMLEKGYIRPSTSPWAAPVLFVEKKDGTKRMCIDYRALNEVTVKNKYPLPRIEDLFDQLRGASVFSKIDLRSGYHQLRIRPSDIPKTAFITKYGLYEFTVMSFGLTNAPAFFMYLMNSVFMDYLDKFVVVFIDDILIYSQSEEDHVEHLKMVLQRLREHQLYAKLGKCEFWIHEVLFLGHIINQDGLAVDPKKVADILNWKAPKDVRGIKSFIGMAGYYRRFIEGFSKIARPMTALLAKKVEFKWTQKCQEAFEELKNRLTTAPVLVLPDVHKSFSVYCDASYTGLGCVLMQEGRVVAYSSRQLKIHEKNYPTHDLELAAVVHALKTWRHYLYGQKCDIYTDHKSLKYIFTQSELNMRQRRWLELIKDYELEIHYHPGKANVVADALSRKSQVNMLASHPMPYELAKEFDKLSLGFLNSTQGVTVELEPTLEREIKEGQKDDENINKIRQLILEGRGKDFREDEEGVIWFKDRLCVPDLKPIRELILKEAHETAYSIHPGSEKMYQDLKRRFWWYGMKREIAEYVAICDSCQRTKAEHQRPAGLLQPLRIPQWKWDEIGMDFIVGLPRTRAGYDSIWVVVDRLTKVAHFIPVKTTYTGATLAELYMSRIVCLH

SEQ ID NO: 10481 - protein, 352 aa, Zea mays
  Clone ID: TF_ZM4516.C1.o1.fg.pep
MEVLSTMTPIIVIGKIAAFEMSGKMGRQEEPTSSRPYAFACDERKDKKKAPTPSSSSEEESRIFTLTLTRKSKEREDASHVGRRATLGTIVQIWPNPQRGGAKARSLQVSKLGMTLQAKMNLQGRATTDPHHGHRTSALWQELSTKIEQLESSAPSTATDDGLIKKNEKLKAKLASSQEAIENLLEKMEILSIHNDELTTKLENIGSTPEVSLVEIPEIIKKDASTSCLDVIDNSNHCNQVLVKNVVIETYSDEIAMENEQLKQEVYHLGNALYDKKGKAKQIQPPQDNTTAGVNKPMEGETVICRLCHKENHKSFQCKAKTGISKSSNKIRQAKSPTPTSTRWTKRLLHHT

SEQ ID NO: 10482 - protein, 534 aa, Zea mays
  Clone ID: TF_ZmC4916_400.pep
MDPKGKGMVVNDKEKKSFLNEPRDDKPTDSSSSHKKKDGKKKRRIKKIVYYDSDASSSSPRDDDDDDSSLKKKTDTLKISHEGNDATMITKMELVEGELGRFAMIRGEEPTQTYNRLKTLVNKIRSYGSTRWTDHDVVRLMLRSFTVIDPHLVNLIRENPRYTKMTPEEILGKFVSGRMMVKEARHMDDALNDPLPIYESQPVALKATSSKEALPSKVAQVEAADLNKDEMALIIKRFKTALRGRMEYPNKNKTKGKRSCFKCGKTGHFIAQCLDNENDQGQERHGKKEKKKSYRKAKGEAHLGKEWDSDCSSSDSDDEGLAASAFDKSSLFPNERHTCLMAKEKKVNVRETPKYTTSSDDDSSDDEVDYSSLFKGLDRVKVEKINELIDALNEKDRFLEKQEDILYEELDKFVSVQKSLALETKRNEMLSSELSACHESISSLKILNDDLNAKIEEVNKSSSCVEHVVICNRCKDFDVDTCNEHLIAITKLNDEVSSLNAQLKTCKSDFEKLKFARDAYTIGRHPSIKDGFGF

SEQ ID NO: 10483 - protein, 1782 aa, Zea mays
  Clone ID: TF_ZmC4916_381.pep
MDPKGKGMVVNNKTKESIVNESRDDKPSDSGLSHNKDGKKKRHIKKIVYYDSDKSSSPRDNEYEEKKKMFNSNAHLLSIPLGKPPHFDGEDYPFWSHKMRSHLFSLHPSIWEIVKNGMLFDSTDNPVFINEQIHKNAQATTVLLASLCRDEYNKMELVEGELGRFAMIRGEEPTQTYNRLKTLVNKIRSYGSTRWTNHDVVRLMLRSFTVLDPHLVNSIRENPRYTRMTPEEILGKFVSGRMMIKEARYVDEALNGPMPIYEPQTVALKATSSREALSSKVAQVEAARLNEDEMALIIKRFKTALKGRKEHPNKSKTKGKRSCFKCGKTGHFIANCLDNDSDQGQEKSEKREKKKSYKKAKGEAHLGKEWDLDCSSSDSDDEGLAASSFNKSSLFPNERHTCLMAKEKKVNARDTPMYASSSDNESSDDEVDYTGLFKGLDRTKIDKTNKLIDALNEKHRLLEKQEDILYEEHDKFISVQKSLALEVKRNEMLSFELSTCHETVSSLRSINDDLNAKLEVVNKSSSCVEHVVICNRCKDFDVDACVEHLTSITKLNGEVASLNAQLKTSKNDFDKLKFARDAYTVGKHPSIKDGLGFRKEAKNLTSQRAPISAQEKGKAPMANSAQRNHAFIYSDRKFSRNAHRSYAYDSHAMIASSSSFVHGRNMPRKNVAHVPRKVCNEPSTIYHACNTSFAICRKNKKVIARKLGAKCKGDKTCIWVPKSIITNLAGPNKSWVYASGGSSWIIDSECTNYMTGEKKMFTSYVKNKDSQDTIIFGDGDQGKVKGLGKIAITNEHSISNVFLVESLGYNLLFVSQLCHMGYNCLFTNVDVSVFRRSDGSLAFKGVLDGKLYLADFSKEDADLDTCLIAKTSMGWLWHRRLAHVGMKNLHKLLKGEHVLGLTNVFFEKDRPCAACQAGKQVGSTHHSKNVMTTSRPLELLHMDLFGPVAYLSIAGSKYGLVVVDDFSRFTWVFFLQDKSGTQGTLKRFLRRAQNEFELKVKKIRSDNGSEFKNLQVEEFLEEEGIKHEFSAPYTPQQNGVVERKNMTLIDMARTMLGEFKTPERFWSKAVNTACHATNRVYLHLLLKKTSYELLTGNKPNVSYFRVFGSKCYILVKKGRNSKFAPKAVEGFLLGYDSNTKAYRVFNKSSGLVEVSSDVVFDETNGSPREQVDLDDVPTDAIRTMAIGDVRPQEHQQQDQPSSSTMVHPPTQDDEQVPQEEACDQGGAQNVQDVEEEAPQAPPTQVRVTIQRNHAIDHILGDISKGVTTRSRLANFCDHYSFVSSIEPFRVEEALLDPDWVLAMQEELNNFKRNEVWTLVPRPKQNVVGTKWVFRNKQDEHGVVTRNKARLVTKGYAQVAGLDFEETFAPVARLESISILLAYVAHHSFRLFQMDVKSAFLNGPIKEEIYVEQPPGFEDERYPDHVCKLSKALYGLKQAPRAWYECLRDFLIANAFKVGKADPTLFTKTCDGDLFVCQIYVDDIIFGSTNQKSCEEFSRLNYFLGFQVKQLKDGTFISQTKYTQDLLKRFGMKDAKPAKTPMGTDGHVDLNKGGKSVDQKAYRSMIGSLLYLCASRPDIMLSVCMCARFQSDPRECHLVAVKRILRYLVATPCFGIWYPKGSTFDLIGYSDSDYAGCKVDRKSTSGTCQFLGKSLVSLSSKKQTSVILSTAEAEYVAAGQCCAQLLWMRQTLRDFGYNLSKVPLLGDNESAIRMADNPVEHSRTKHIGIQHHFLRDHQQKGDIEVFYVSTENQLAVIFTKPLDEKTFCRLRSELNVIDSRNLD

SEQ ID NO: 10484 - protein, 1654 aa, Zea mays
  unsure (1)..(1654): unsure at all Xaa locations
  Clone ID: TF_ZmC6526_1.pep
MVAVACTGPRRHQTQRAGLQWRLGGPCRRRRLAERPRPPLPRRPVPQDLRGRCFNCLATSHRAAACRHPSCCLRCRRPGHRAAECPGADRGHDVTKVLSGGPDLHPLVARRLNVASASSGGRPVWERLGSQPVEVSVPFSKRRLVWRRVSPPMDHGRHAAAEDGPGQSMNHTKKGRHRTRGRRPRSRSAASLPPVDDDSSARLPSHQSAVVKNAGSAARPVCVLERARDLTLVENNLRHCALFVVVIGSRPPVTAELLAAEIAAEYELDPASFSVHRSVPEDFVIIMQNEQAVLRVFNNGAVLNSPSGSFKFIKWSRLAHAEAVSLPSFVSVSFEGVPLHAWSVETARSLLRAHCTALELHPDTVARLNFSSFRVLGWSRHPELIPVAVDLLILKPVQSFEVETTVKHLLAYQVMASVSLISPSAGDVSPPPSPPASNDDRDTRSRRRRLQQASPARQGGPVEALAVRRPVHERLGPLPICPRHVAISQEVLEQEVSKEASLNGSSNLEEHIPAVKELNIGAMIEASEDNVESNGRRHEQACMVEAGASGLSGGCPSHSPLPVPSSPSSPLRAPAVCCSMGGCEKEQAIQVLPPGSPSRATFDMGGQKSALVDARTSSRLSRRSPIITYFRQRRKKDSQPSLLLGASPSPPSGAKEFIDKLTRPAGGILRAPVRRPRQGKATATEVVPRHNRRVAGAGVERLATPPPATQGKKHILKELGIVNAEETVTIRPKDLDEYARVFSKGLSEVQTKMVDVSRFLVLRMLGPAFDNFVFLPSVGASGGILVAWKNSIGICAGSRVNDHSVSVNFHSSTSPPWWLTCVYGPQGNQEKIQFLQSLREIRALCNGPWLVLGDFNPILREEEKNNNNLDRAMMGRFRRWANDLALNEIPLIGRKYTWSNGPCPPITLAKKLKATARSLQSWNDKKAGKIKQKLEMARELLHQLEVAQDNRSLSHAELWLRNMLKKHSLALSSISRTVARLKSRIGWLNEGDANTSLFHAQTRFRKKKNFIAAIHSEDGQIWTAHEGNAAAFFNFYQGLLGTAEVRDVTVDLDALGMPSFDLVALDAPVSEEEVWDTIKALPSDKSPGPDGFTGRFYKSCWSVIMADFMAAIHCIWARNFRNLGSLNSAFITLLPKVEGATSVRDFRPISLVHSFAKVVTKLLANRLADRLQNMVSPNQTAFIKKRFILDNFMLVQQTTRFLHCQKQARILLKLDISKAFDSRASEEGFLQPLPSRNMQDRISLYAGDAVVFLYPTDRVITMVMAIQQKSGRDSLLKMLGEQNRLIPIAFCXAVTSTMDETQEIIDKASIRLAWESAAAVTRTGSSLYAEYVMTAKVMYVALPLVLPDFAFKAIEMLRKFFFLSYREXFLLFIASRGGLRLAVPSSWMILGLNSXNNLCWELSPSRAWEPRTPPSKPWADLPSHVCXGVNNLFAAALLSKIGHVENRLIXRSNAYSGGXLKEIVAAIFDLMTXVSSQHMVVXDALPHFASILDSHALISIGVAAELLELCELLFAVVLLQRIXRDHHXLISAPGAYTSFYVYNALFLGSVQFEPAERVWKSWAPGKCTFFLWIVEQRRCSAAATFGQGWLERPERCPMXSQEGENIIYLVFECVLAKQFWFDYLYEVALPGLYRAHKKYLDSYRKSSISRASDR

SEQ ID NO: 10485 - protein, 1253 aa, Zea mays
  unsure (1)..(1253): unsure at all Xaa locations
  Clone ID: TF_ZM3738.C20.o2.fg.pep
MITKMELVEGELGRFAMIRGEEPTQTYNRLKTLVNKIRSYGSTRWMDHNVVRLMLRSFTVLDPHLVNSIRENPRYTKMTPEEILGKFVSGCMMIKEARYVDEALNGPMPIYEPQTVALKATSSREVLPSKVAQVEAAGLNEDEMALIIKRFKTALKGRKEYSNKNKAKGKRSCFKCGKTGHFIANCLDNSSDQEQGKGGKKEKQKSYRKAKGEAHIGKEWDSDCSSSDSDDEGLAAXAFNKSFLFPNERHTCLMAKEKKXDDEVDYTELFKGLDRSKVDKINELIDALNEKDRLLERQEDILYEEHDKFVSVQKSLALELKRNELLSSELSTCNETVASLKSINDDLNAKLEVVNKSSSCVEKIVICNRCKDFNVDACDEHLISISKLNDEVASLNAQLKTCKSDFDKLKFARDGYTVGRHLLIKDGLGFKKEAKNLTSQRAPIFNKEKGKAPMASCIQKNHAFIYHRKVSRNTHYNRSYGAYDSHAMIASSSTFVHGRSRPRKGNVIHHVPNKMPNESATVFHACNTDFVLSCKNKKVVARKLGAKCKGDKTCIWVPKDIVTNLVGPNKSWVYASGGSSWIIDSGCTNHMTGEKKMFSSYVKSKDSQDSIIFGDGNQGKVKGIGKIAISSEHSISNVFLVESLGYNLLSVSQLCNMGYNCLFTNIDVSAFRRSDGSLAFKGVLDDKLYLVNFSKEEADLDACLIAKTSMGWLWHHRLAHVGMKNLQKLLKGEHVLGLTNVSFEKDRPCGACQAGKQVGSTHHNKNVMTTARPLELLHMDLFGPVAYLSIGGSKYGLVIVDDFSRFTWVFLLQDKTETQGTLKRFLRRAQNEFELKVKKIRSDNGSEFKNLQVEEYLEEEGIKHEFSAPYTPQQNSVKGRNSKFTPKVVEGFLLGYDSNTKAYRVFNKSSGLVEVSSDVVFDETNGSPREQVDLDDVDEDDVPTDAIRTMAIGNPFRIEEALLDSDWVLAMQEELNNFKRNEVWTLVPCPKQNVVGTKWVFRNKQDEHGVVTRNKARLVAKGYAQLAGLDFEETFAPVARLESIRILLAYATHHSFRFQSDLRECHLVAVKRILRYLVAMPCFGIWYPKGSTFDLIGYSDSDYAGCKVDRKSTSGTCQFLGRSLVSWSSKKQTSVAISTAEAEYVAEGQCCAQLLWMRQTLRDFGYNLSKVPLLCDNESAIRMGGQSWLNTTRTKHIDIRHHFLRDHQQKGDIEVFYVSTENQLADIFTKPLDEKTFCRLRSELNVLDSCNLD

SEQ ID NO: 10486 - protein, 502 aa, Zea mays
  Clone ID: TF_ZM4936.C1.o6.fg.pep
MELVEGELGRFAMIRGEEPTQTYNRLKTLVNKIRSYGSIRWTDHDVVRLMLRSFTVIDPHLVNLIRENPRYTKMMPEEILGKFVSERMMQPVAGRRCQVPSKVAQVEAASLNEDEMALIIKRFKTALKGRKEYPNKSKTRGNRSCFKCSKTGHFIANCPDNVNDQEQEKSGKKEKKKSYRKAKGEAHLRKEWDSDCSSSDSDDEGLAASAFNKSSLFPNERHTCLMAKEKKVIVRETPKYTTSSDDDSSDDEVDYTDLFKGLDRAKVDKINELIDSLNEKDRLLEKQEDILYEEHDKFVSVQKSLALETKRNEMLSSELSVCHESISSLKILNNDLNAKLEVANKSSSCVEHVVVCNRCKDFDIDACDKHLASITKLNDEVASLNAQLKTCKIDFDKLKFARDAYTVGRHPSIKDGLGFRKEAKNLTSQRAPIPNKEKGKAPMASSIQRNHAFIYDRKCSRNVHYNRSYVDYNDSHATFASSSTFVHGRPRKSNGVHHVPRR

SEQ ID NO: 10487 - protein, 560 aa, Zea mays
  Clone ID: TF_ZmC119_1513.pep
MDPKGKGMVVNDKEKESFVNDPKDDKPTDSGSSHKRKDGKKKKTRRIKEIVYYDDSDESSSSQKDDDNYEKKKTVNSNFSFDYSRIPQNTNAHLLSIPLGKPPHFDGEDYGFWSHKMRSHLFSLHPSIWEIVESGMQFDSSDSPMFINEQIHKNAQATTVLLASLCKDEYHKASGLDNAKKIWDTLKISHEGNDVTMLTKMELVEGELGRFAMIKGKEPTQTYNRLKTLVNKIRSYGSTRWTDHDVVRLMLRSFTVLDPHLVNNIRENPRYTKMTPEEILGKFVSGRMMIKEARYVDDALNGPIHEPQTVALKATRSKEALPSKVAQVEAAGLNEEEMALIIKRFKTALRGRKEHPNKTKTKGKHSCFKCGKIGHFIANCPDNDSDQEQGNKREKKKAYKKAKGEAHLGKEWDSDCSSSDSDNEGLAATAFNKASLFSNEHHTCLMAKEKKVNSRKSTYASSSEDESSDDDEIDYASLFKGLDRTKIDQINELIDALNDKNRLLEKQEDLLYDEHDKFVEAQNSLALEIKRNEMLSCELSTCHDSISSLKSVGVSRPGGP

SEQ ID NO: 10488 - protein, 1572 aa, Zea mays
  Clone ID: TF_ZmC119_745.pep
MDPKGKGMVVNDKEKESFVNDPKDDKPTDSGSGHKRKNGRKKKTRRIKEIVYYDSDKSSSSQKDNDNDYEKKKTVNSNFSFDYSRIPQSSNAHLLSIPLGKPPTLMERTMDFGVTKCVATCSLSIQVSGLDNAKQIWDTLKISHEGNDVTMLTKMELVEGELGRFAMIRGEEPTQTYNRLKTLVNKIRSYGSTRWTDHDVVRLMLRSFTVLDPHLVNNIHENPRYTKMTSEEILGKFVSGRMIIKEARYVDDALNGPIHEPQTVALKATRSKEVLPSKVAQVEAAGLNEEEMALIIKHFKTALRGRKEHPNKTKTKGKHSCFKCGKIGHFIANCPDNDSDQEQGNKREKKKAYKKAKGEAHLGKEWDSDCSSSDSDNEGLAATAFNKSALFPNEHHTCLMAREKKVSTRDTSTYASSSDEESSDDEIDYSCLFRGLNRTKVDKINELIDALNDKNRLLKKQEDLLYEEHDKFVEAQKSLALEIKRNEMLSDELSTCHDSISSLKSINDDLNAKLEIANRSTSCVEHVAICNRCKDFNVDACSEHLVSISNLNDEVASLNAQLKTSKSEFDKLKFARDAYTIGRHPSIKDGLGFKREVKNLTSHMASISAKEKGKAPMASSAQKNHAFMYHDRRHSRNVYRSYDAHAMIASSSSIMHDRNLAKKNVVHHTPRRNIVHVPRKIMNEPSTIYYACNASFAICRKDKKVYASGGSSWIIDSGCTNHMTEEKRMFSSYVKNKDPQDSIIFGDGNQGKVKGLGKIAISSEHFISNVFLVESLGYNLLSVSQLCNMGYNCLFTNVDVSVFRRSDGSLAFKGVLDGKLYLVDFAKEEVGLDACLIAKTSMGWLWHRRLAHVGMKNLHKLLKGEHVIGLTNVTFEKDRPCAACQAVDDFSRFTWVFFLQDKSETQGTLKRFLRRAQNEFELKVKKIRSDNGSEFKNLQVEEYLEEEGIKHEFSAPYTPQQNGVVERKNRTLLDMARTMLGEFKTPERFWTEAVSTACHAINRVYLHRLLKKTSYELLTGNKPNVSYFRVFGSKCYILVKKGRNSKFAPKAVEGFLLGYDSNTKAYRVFNKSSGLVEVSSDVVFDETNGSPREQVVDLDDVNEEDVPTAAMRTMAIGDPFRVEEALLDPDWVLAMQEELNNFKRNEVWTLVPCPKQNVVGTKWVFRNKQDEHGVVTRNKARLVAKGYAQVAGLDFEETFAPVARLESIRILLAYATHHSFKLFQMDVKSAFLNGPIKEEVYMEQPPGFEDERYPDHVCKLSKALYGLKQAPRAWYECLRDFLIANAFKVGKADPTLFTKTCDGDLFVCQIYVDDIIFGSTNQKSCEEFSRVMTQKFEMSMMGELSYFLGFQVKQLKDGTFISQTKYTQDLIKRFGMKDAKPAKTAMGTDGHTDLNKGVATPCFGIWYPKGSTFDLIGYSDSEYAGCKVDRKSTSGTCQFLGRSLVSWSSKKQTSVALSTAEAKYVAAGQCCAQLLWMRQTLRDFGYNLSKVPLLCDNESAIRMADNPVEHSRTKHIDIRHHFLRDHQQKGNIEVFYVSTENQLADIFTKPLDESTFCRLRSELNVLDSRNLD

SEQ ID NO: 10489 - protein, 554 aa, Zea mays
  Clone ID: TF_ZmC33526_1.pep
MELVEGELGRFAMIRGEEPTQTYNRLKTLINKIRSYGSTRWTDHDVVRLMLRSFTVLDPHLVNNIRENPRYTKMMPEEILRKFVSGRMMIKEARYVDDALNGPIQEPQTIALKATRSKETLPSKVAQVEAAVLNDEEMALIIKRFKAALKGRKGQPNKNKTKGKHSCFKCGKIGHFIANCPDNDSDQEQGNKREKKKAYKKAKGEAHLGKEWDSDCLLFDSDNEGLAATAFNKSSLFPNEHHTCLVAREKKVSTRNTSTYASSSDEESSDDEIDYSCLFKGLDRTKVDKINELIDALNDKNRLLEKQEDLLYEEHDKFVEAQKSLALEIKRNEMLSCELSTCHDSISSLKSINDDLNAKLEIANKSTSCVEHVAICNRCKDFNVDACSEHLVSISKLNDEVASLNAQLKTSKSEFDKIKFARDSYTIGRHPSIKDGLGFKREVKNLTSHKVSISAKEKGKAPMSSSVQKNHAFMYHDRRHSRNNYRSYDAFNSHAMTASSSSIMHDRNLTRKNVIHHMPKRNVTHVPRKINEPSINYHTGNASFAICRKDRLGI

SEQ ID NO: 10490 - protein, 1182 aa, Zea mays
  unsure (1)..(1182): unsure at all Xaa locations
  Clone ID: TF_ZmC4916_452.pep
MDPKGKGIVINDKKKESFVNEPKDDKPTDSGLGHKRKDGKKKKTRRIKEIIYYDDNDESTSSHKDNDDNDYDKRKTVNSNFSFDYSRIPHSSNAHLLSIPLGKPPHFDGEDYGFWSHKMDEYHKVSGLDNAKQIWDTLKISHEGNDVTLLTKMELVEGELGRFAMIRGEEPTQTYNRLKTLINKIRSYGSTRWMDHDVVRLMLRSFTVLDPHLVNNIRENPRYTKMSPEEVLGKFVSGRMMIKEARYVDDALNGPINEPQPFALKATRSKEALPSKVAQVEAAGLSDEEMALIIKRFKTALKGHKGQPSKTKTKGKHSCFKCGKIGHFIANCPDNDSDQEQGNKREKKKTYKKAKGEAHLGKEWDSDCSSSDSDNEGLAATAFNKSSLFPNERHTCLMAKEKKVYASGGSSWIIDSGCTNHMTGEKKMFTSYVKNKDSQDSIIFGDGNQGKDKSETQGTLKRFLRRAQNEFELKVKKIRSDNGSEFKNXQVEEFLEEKGIKHEFSAPYTPQQNGVVERKNRTLIDMARTMLGEFKTPECFWSEAVNTACHAINRVYLHRLLKKTSYELLTGNKPNVSYFRVFGSKCYILVKKGRISKFTPKVVEGFLLGYNSNTKAYRVFNKSSGLVEVSSDVVFDETNGSPREQVVDLDDVDDEDVPTAAIRTMTIGDVRPREQLEQDQPSSSTMVHPPTQDDEQVHQKEACDQWGAQDDHVMEEEAQPTPPTQVRAVIQRDHPVDQILGDISKGVTTRSRLVNFCEHYSFVSSIEPFRVEEALLDPDWVLAMQEELNNFKRNEVWTLVPRPKQNVVGTKWVFRNKQDEHGVVTRNKARLVAKGYAQVAGLDFEETFAPVARLESIRILLAYAAHHSFRLYQMDVKSAFLNGPIKEEVYVEQPPGFEDERYPDHVCKLSKALYGLKQAPRAWYECLREFLIANAFKVGKADPTLFTKTCDGDLFVCQIYVDDIIFGYTNQKSCKEFSRVMTQKFEMSMLGELNYFLGFQVKQLKDGTFISQTKYTQDLLKRFGMKDAKPAKTPMGTNGHTDLNKGSKSVDQKAYRSMIGSLLYLCASRPDIMLSVCMCARFQSDPKECHLVAVKRILRYLVATPCFGIWYPKGSNFDLIGYSDSDYAGCKVDRKSTSGTCQFLGRSLVSWNSKKQTSVALSTAEAEYVAAGQCCAQLLWMR

SEQ ID NO: 10491 - protein, 513 aa, Zea mays
  unsure (1)..(513): unsure at all Xaa locations
  Clone ID: TF_ZM4334.C2.o14.fg.pep
MDAQYDVTQEWLDRVKIARKGLRGTKRSLRSVCASVWQSDWQTGCQLWYYIEFFVDSLLLELVAPRRLGVSYIDPRAIDLAMKIAERMFLKMKEDEAKNKIEEEENDRWRPNDESTSSQANGSDSESESENEEEHESDSEDEDDLQKFFAQLSKKNRMSLLKLMKRAEEQKEMLHKQEDVLIEKIKDLEKLTKEHEKLKCSHDDLVQRYEDISIEQIKAIKHSSYIAQLENKNAMLKNTVERLNIENLALQEKHDMLVCSHNKFMDSHIMLEMAHEVVLTNLKSCQPHICTCTQIETILPCANNCCYQASQSSIELEISGISDISITQENKELKEENERLKRSLTILKGKCHAQPSQDNRDNMVKKLEKGTTVACTKPLQKNTKLSKKGMSKIHGKKINAHTICSNNVPMCFNKERSKRSDRRCYGCKEKGHEIDSCPHMKNQDLAGSRNMTIKKDESKRQMLCKDKHHICYNCREKGHLFKDCPMSKYPKPTMSILSYSLRXTQNDICARKV

SEQ ID NO: 10492 - protein, 1629 aa, Zea mays
  Clone ID: TF_ZM4354.C13.o2.fg.pep
MDPKGKGMVVNDKEKESFVNDPKDDKPTDSGSSHKRKDGKKKKTRRIKEIVYYDDSDESSSSQKDDDNYEKKKTFNSNFSFDYSRIPQSTNAHLLSIPLGKPPHFDGEDYGFWSHKMRSHLFSLHPSIWEIIESGMQFDSIDSPIFINEQIHKNAQATTVLLASLCRDEYHKVSGLDNAKQIWDTLKISHEGNDVTMLTKMELVEGELGRFAMIRGEEPTQTYNRLKTLVNKIRSYGSTRWTDHDVVRLMLRSFTVLDPHLVNNIRENPRYTKMSPEEILGKFVSGLMMIKEARYVDDALNGPIHEPQTVALKATRSKEVLPSKVAQVEAAGLNEEEMALIIKRFKTALRSRKEHPNKNKTKGKHSCFKCGKIGHFIANCPDNDSDQEQEKKREKKKAYKKAKGEAHLGKEWDSDCSSSNSDNEGLAASAFNKSSLFPNEHHTCLMAKEKKVNTRKSTYASSDDESSDDEIDYASLFKGLDRTKIDKINELIDALNDKNRLLEKQEDLLYEEHDKFVEAQKSLALEVKRNEMLSCELSTCHESISSLKSVNDDLNAKLEIASKLTSREEHVTICNRCKDFNVDACSEHLVCISKLNDEVASLNAQLKTSKNDFDKLKFARDAYTVGRHPSIKDGLGFKREAKNLTSHKAPISAKEKGKAPMTHNSQKNHAFIYGDKRYSRNVHRSCNDSNAMFASSSSYVHGRDMPRRNVIHHVPRRNVHVPRKINEPSTIYHACNASFAICRKDKKVIARKLGAKCKGDKTCIWVPKDIVTNLVEPNKSWVYASGGSSWIIDSGCTNHMTGEKKMFTSYVKNKDSQDSIIFGDGNQGKVKGLGKIAISSEHSISNVFLVESLGYNLLSVSQLCNMGYNCLSTIVDVSVFRRSDGSLAFKGVLDGKLYLVDFAKEEAGLDACLIAKTSMGWLWHRRLAHVGMKNLHKLLKGEHVIGLTNVTFEKDRPCAACQAGKHVGSSHHTKNVMTTSRPLELLHMDLFGPIAYLSIEGSKYGLVIVDDFSRFTWVFFLQDKSETQGTLKRFLRRAQNEFELKVKKIRSDNGSEFKNLQVEEYLEEEGIKHEFSAPYTPQQNGVVERKNRTLIDMARTMLGEFKTPERFWLEAVNTACHAINQVYLHRLLKKTSYELLTGNKSNVSYFRVFGSKCYILVKKGRNSKFAPKAVEGFLLGFDSNTKAYRVFNKSSGLVEVSSDVVFDETNGSPREQVVDLDDIDEEDIPTVAIRTMAIGEVRPQEQKEQDQPSSSTMVHPPTQDDEQPFRVEEALLDPDWVLAMQEELNNFKRNEVWTLVPHPKQNIVGTKWVFRSKQDEHGVVTRNKARLVAKGYAQVAGLDFEETFAPVARLELFQMYVKSAFLNGPIKEEVYVEQPPGFEDERYPDHVCKLSKALYGLKQAPRAWYECLRDFLIANAFKVGKADPTLFTKTCDGDLFMCQIYVDDIIFGSTNQKSCEEFSRVMTQKFEMSMMGELNYFLGFQVKQLKDGTFISQTKYTQDLLKRFGMKDAKPAKTPMGTDGHVDLNKGGQCCAQLLWMRQTLRDFGYNMSKVPLLCDNESAIRMADNPVEHSRTKHIDIRHHFLRDHQQKILVRQWGSRAKIDPVLVLDAKGGENKAKATNGSATT

SEQ ID NO: 10493 - protein, 970 aa, Zea mays
  Clone ID: TF_ZM4499.C1.o3.fg.pep
MEWVFLRKKILGDISVEYLGSISEKNLKGITREISGRASLRKFQDLNFWDATWTDHDVVRLMLRSFAVLDPHLINNIRENPRYTKMSAEEILGKFRFKTALKGRKEHPNKNKTKGKHSCFKCGKIGHFIANCPDNDSDQEQEKKRENKKSYKKAKGEAHLGKEWDSDCSSSDSDNEGLAASAFNKSSLFPNEHHTCLMAKEKKVNTRKSTYASSDDESSDDEIDYASLFKGLDRTKIDKINELIDALNDKNRLLENQEDLLYEEHDKFVEAQNSLALEVKRNEMLSCELSTCHESISSLKGVNDDLNAKLEIASKSTSREELVTICNRCKDFNVDACSEHLVCISKLNDEVASINAQLKTSKNDFDKLKFARDAYTVGRHPSIRDGLGFKREAKNLTSHKAPITAKEKGKAPMANSSQKNHAFIYDKKFSRNVHHDRSCNAYDSNAMFASSSSYVHGRDMPRRNVYASGGSSWIIDSGCTNHMTGEKKMFSSYVKNKDSQDSIIFGDGNQGKDKHGVVTRNKARLVAKGYAQVAGLDFEEIFAPVARLESIRILLAYVAHHSFRLFQMDVKSAFLNGPIKEEVYVEQPPGFEDERYPDHVCKLSKALYGLKQAPRAWYECLRDFLLSNAFKVGKVDPTLFTKTCDGDLFVCQIYVDDIIFGSTNQKSCEEFSKVMTQKFEMSMMGELNYFLGFQVKQLKDGTFISQTKYTQDLLKRFGMKDAKPAKTPMGTNGHTNLNKGGKSVDQKAYQSMIGSLLYLCASRPNIMLGVCMCARFQSDPKECHLVAVKRILRYLVATPCFGIWYPKRSTFDLIGYSDSDYAGCKVDRKSTSGTCQFLGRSLVSWSSKKQTSIALSTDEAEYVAAGQCCVQLLWMRQTLRDFGYNLSKVPLLCDNESAIRMTDNPVEHSRTKHIDIWHHFLRDHQQKGDIEVFHVSTENQLADIFTKPLDEKTFCRLRSELNVLDSRNLD

SEQ ID NO: 10494 - protein, 456 aa, Zea mays
  Clone ID: TF_ZM4893.C2.o8.fg.pep
MEWVFLRKKILGDISVEYLGSISEKNLKGITREISGRASLRKFQDLNFWDATWTDHDVVRLMLRSFAVLDPHLINNIRENPRYTKMSAEEILGKFRFKTALKGRKEHPNKNKTKGKHSCFKCGKIGHFIANCPDNDSDQEQEKKRENKKSYKKAKGEAHLGKEWDSDCSSSDSDNEGLAASAFNKSSLFPNEHHTCLMAKEKKVNTRKSTYASSDDESSDDEIDYASLFKGLDRTKIDKINELIDALNDKNRLLENQEDLLYEEHDKFVEAQNSLALEVKRNEMLSCELSTCHESISSLKGVNDDLNAKLEIASKSTSREELVTICNRCKDFNVDACSEHLVCISKLNDEVASINAQLKTSKNDFDKLKFARDAYTVGRHPSIRDGLGFKREAKNLTSHKAPITAKEKGKAPMANSSQKNHAFIYDKKFSRNVHHDRSCNAYDSNAMFASSSSYVH

SEQ ID NO: 10495 - protein, 160 aa, Zea mays
  unsure (1)..(160): unsure at all Xaa locations
  Clone ID: TF_LIB3632-013-Q1-K6-E6.pep
SSSXPGRPSCGRRAGILEPQKKKEAQDTSARIVHQKKGVPTPSEGGSFFKGDLEGDGAVRPAGGGPIRSDQADWPDAETPDVGQSRAMFLSSPQGRILPPPQNXXRRAXXXPPPHPMGSPWKSGRQKNSCIIRHHHRRCHRCSRRRRWSSLWPRGQAGRS

SEQ ID NO: 10496 - protein, 1674 aa, Zea mays
  unsure (1)..(1674): unsure at all Xaa locations
  Clone ID: TF_ZM4587.C3.o1.fg.pep
MSGDHAKKEMVTGEKPVTSHGKAPSGESRNKGKEKESPSHKSHRSGEKKKKMRKVVYYEIDSLSPSTSGSDAPSVTSKRHERKKFSKIPLHYPRISKRTPLLSVPLGKPPIFDGEDYNMWSDKMRHHLTSLYTSIWNVVEFGVQEYNKVQGLKSAKEIWDVLKTAHEGDEVTKITKRETIEGELGHFMLNQGEDPQAMYNRLKTLVDQITGQGASPSLADLVPRSVPVGLNLAAFGWGIARIPRNTWRQMQRAGEGGADDVAPPRGVRKAVADARAHLSAPEGQCQARGHAQAMQGENGPQDDTFGPPGSKKIIEQGASSSVPEAQPVAFKATENKKEDSTPSRVPIDASKLDNEEMALIIKSFRQILKQRKGKDYKPRSKKVCYKCGKPGHFIAKCSLSSDSDRGDDKKGKRREKKRYYKKKGGDAHVCREWDSDESSTDSSSDEDAASIAVNKGLLFPNVGHKCLMAKDGKKKKVKSKSSTKYATSSDEANSSDDEDDLFTLFANLNMQQKEKLNELIRAIHDKDELLDSQEDFLIKENKRHVKVKNAYAQEVEKNEKLTSELSTCHDIVSNLRNENAKLIAKVENLNVCDDSLINLRNDNANLIAKIDKLNASLTSLRNENEKLIAKAKELDVCNISISNLRNENNILHAKIVELKDCKPSTSTVEHVSICTRCRDVNVDAIHDHLALIKQQNDHIATLTAKINEHDLENEKFKFARSMLYSGRRPGIKDGIGFQKGDNVKLNAPPKRLSNFVKGKALMVQDNEGYILYPAGYPEHKIRRIHSRKSHSGPNHAFMYKSETSSSRQSTHAKLPKKKTPAASNDHNVSFKTFDASYVLTNKSGKLVAKYVGGKHKGSKTCVWVPKVLVSNVKGPKTIWVYASGGSSWIIDSGCTNHMTREKRMFSSYEKNQDPQRAITFGDGIKDKYQTQETLKGFLRRAQNEFSLRIKKIRSDNGTEFKNSQIEGFLEEEGIKHEFSSPYTPQQNGIVERKNRTLLDMARTMLDEYKTLDRFWAEAVNTACYAINRLYLHRILKKTSYELLTGKKPNVSYFRVFGSKCFILVKRGRKSKFAPKAVEGFLLGYDSNTRAYRVFNKSTGLVEVSCDIVFDETNGSQVEQVDLDELDDEEAPCIALRNMSIGDVCPKESEEPPQAQDQPSSSMQASPPTQDEDEAQDDEGEDQEDEPPQEDSNDQGGDANDQDKEDEQDAKPPHPRVHQAIQRDHPVNTILGDIHKGVTTRSRVAHFCEHYSFVSSIEPYRVEDALRDSDWVLAMQEELNNFTRNEVWHLVPRPNQNVVGTKWVFRNKQDEHGVVIRNKARLVAKGYSQVEGLDFGETYAPVARLESIRILLAYATHHGFKLYQMDVKSAFLNGPIKEEVYVEQPPGFEDSEYPNYVYKLSKALYGLKQAPRAWYECLRDFLITNGFKVGKVDPTLFTKTIENDLFVCQIYVNDIIFGSTNKSICEEFSRIMIKKIEMSMMGELKYFLGFQVKQLQDGTFISQTKYIQDILTKFGMKDVKPIKTPMGTNGHLDLDTGGKSIDQKVYRSMIGSLLYLCASRPDIMLSVCMCARFQADPKEVHLRVVKQIMRYLVYTPKFGLWYPKGSSFDLLGYSDADWAGCKLDRKSTSGTCQFLGRSLVSWASKKQNFVALSTAEAEYIAAGXCAQLLWMRQTL

SEQ ID NO: 10497 - protein, 1420 aa, Zea mays
  unsure (1)..(1420): unsure at all Xaa locations
  Clone ID: TF_ZM4677.C5.o3.fg.pep
MGRRMTLLAHQVILRSLVFLNPTQVQLIRGDPRYKLMSPEEVIGKFVSFELMIKGSKKIIEQGASSSVPEAQPVAFKATENKKEDSTPSRVPIDASKLDNEEMALIIKSFRQILKQRKGKDYKPRSKKVCYKCGKPGHFIAKCSLSSDSDRGDDKKGKRREKKRYYKKKGGDAHVCREWDSDESSTDSSSDEDAASIAVNKGLLFPNVGHKCLMAKDGKKKKVKSKSSTKYATSSDEANSSDDEDDLFTLFANLNMQQKEKLNELIRAIHDKDELLDSQEDFLIKENKRHVKVKNAYAQEVEKNEKLTSELSTCHDIVSNLRNENAKLIAKVENLNVCDDSLINLRNDNANLIAKIDKLNASLTSLRNENEKLIAKAKELDVCNISISNLRNENNILHAKIVELKDCKPSTSTVEHVSICTRCRDVNVDAIHDHLALIKQQNDHIATLTAKINEHDLENEKFKFARSMLYSGRRPGIKDGIGFQKGDNVKLNAPPKRLSNFVKGKALMVQDNEGYILYPAGYPEHKIRRIHSRKSHSGPNHAFMYKSETSSSRQSTHAKLPKKKTPAASNDHNVSFKTFDASYVLTNKSGKLVAKYVGGKHKGSKTCVWVPKVLVSNVKGPKTIWVYASGGSSWIIDSGCTNHMTREKRMFSSYEKNQDPQRAITFGDGIKDKYQTQETLKGFLRRAQNEFSLRIKKIRSDNGTEFKNSQIEGFLEEEGIKHEFSSPYTPQQNGIVERKNRTLLDMARTMLDEYKTLDRFWAEAVNTACYAINRLYLHRILKKTSYELLTGKKPNVSYFRVFGSKCFILVKRGRKSKFAPKAVEGFLLGYDSNTRAYRVFNKSTGLVEVSCDIVFDETNGSQVEQVDLDELDDEEAPCIALRNMSIGDVCPKESEEPPQAQDQPSSSMQASPPTQDEDEAQDDEGEDQEDEPPQEDSNDQGGDANDQDKEDEQDAKPPHPRVHQAIQRDHPVNTILGDIHKGVTTRSRVAHFCEHYSFVSSIEPYRVEDALRDSDWVLAMQEELNNFTRNEVWHLVPRPNQNVVGTKWVFRNKQDEHGVVIRNKARLVAKGYSQVEGLDFGETYAPVARLESIRILLAYATHHGFKLYQMDVKSAFLNGPIKEEVYVEQPPGFEDSEYPNYVYKLSKALYGLKQAPRAWYECLRDFLITNGFKVGKVDPTLFTKTIENDLFVCQIYVNDIIFGSTNKSICEEFSRIMIKKIEMSMMGELKYFLGFQVKQLQDGTFISQTKYIQDILTKFGMKDVKPIKTPMGTNGHLDLDTGGKSIDQKVYRSMIGSLLYLCASRPDIMLSVCMCARFQADPKEVHLRVVKQIMRYLVYTPKFGLWYPKGSSFDLLGYSDADWAGCKLDRKSTSGTCQFLGRSLVSWASKKQNFVALSTAEAEYIAAGXCAQLLWMRQTL

SEQ ID NO: 10498 - protein, 899 aa, Zea mays
  unsure (1)..(899): unsure at all Xaa locations
  Clone ID: TF_ZmC951_443.pep
MVTGEKPATSHGKAPSGESGNKKREESPPHVKSHRSGDKKNKMKKVVYYETDSSWPSTPGSDAPSVTSKRHERKKFSKIPLRYPHISKRTPLLSIPLGKPPVFDGEDYXIWDIVEFGAHVPSMGDEGYDSDEVAQIXEHFNSQATTILLASLSREEYNKVQGLKSAKEIWDVLKTAHEGDEVTKITKRETIEGELGRFMLHQGEDPQAMYNRLXTLVNEVRNLGSTKWDDHEMAKVILRSLIFCNPTQVQLIRGDPRYKLMSPEEVIGKFVSFELMIKGSKQIINLEQGATSTSEVQPVTFKATEEKKEXSPSSRLPIDASKLDNEEMALIIKSFRQILKQRRGKDYKPRSKKVCYKCGKPDHFIAKCPLYSDSDRDNDKKGRMKEKKKYYKKKGGDAHVCREWDSDESSTDSSSDEDAANIAINKGLLFPNVGHKCLMAKDDKKKKVKSRASTKYAISSDEENSSDNEDNLLALFANLNMQQKEKLNELISDIHEKDELLDTQEDFLIKENKKHVKVKNAYAQEVEKCENLTSELSTCHDIISNLRNENAKLIAKVEKLDDCDDSLVKLKNDNANLIAKIDKLNESIASLKIENEKLIIKAKNLNVCNDIVSNLRNENVMLHAKIDELNVCKPSTSTVSHVSNCTRCRDVNIDAIHDHIAMIKQQNDHIAKLDAKIAEHELEIEKFKFARSMLYSGRRPGIKDGIGFQKGDNFKLHAPKKLSNFVKGKAPMTQDNKGYILYPVGYPKHKIRRIHSRKSHSGSHHAFMYKSEPSSSRQSTHAKLPKNKTPIASNEPNILFKTFDASYVLTNRSGKVVAKYVGAKHKGSKTCVWVPKVYASGGSSWIIDSGCTNHITGEKRMFSYEXNHDPQRAITFGDGNQGKITNPRDLKGILETGSK

SEQ ID NO: 10499 - protein, 528 aa, Zea mays
  Clone ID: TF_ZM4885.C3.o4.fg.pep
MDPKGKGIVINDKEKESFVNEPKDDKPTDSGSGHRRKEGKKKKTRRIKEIVYYDDSDESTSSQKDDDHNDYERRKPVNSNFSFDYSRIPQSSNSHLLSIPLDKPPHFDGEDYGFWSHKMRSHLFSLHPSIWEIVESGMHFDSSDNPMFINEQIHKNAQATTVLLASLCRDEYHKVSGLDNAKQIWDTLKISHEGNDVTLLTKMELVEGELGRFAMIRGEEPTQTYNRLKTLINKIRSYGSTRWTDHDVVRLMLRSFTVLDPHLVNNIRENPRYTKMSPEEVLGKFVSGRMMIKEARYVDDALNGPINEPQTLALKATRSKEALPSKVAQIEAAGLNDEEMALIIKRFKTTLKGRNGQPSKTKAKGKRSCFKCGKLGHFIANCSDNDSDQDQGNKREKKKNYKKAKGEAHLDKEWDSDCSSSDSDNEGLAATAFNKSPLFPNECHTCLMAREKKVCTRDSTYASSSEDESSDEDEIDYSCLFKGLDRNKIDKINELIDALNEKDRLLEKQEDLLYDEHDKFVEAQKSMP

SEQ ID NO: 10500 - protein, 890 aa, Zea mays
  Clone ID: TF_ZM4913.C6.o1.fg.pep
METGDKPTTSQGSTSSEESRTKRKEKKKSSSNKGKEKKPSSHHKEKKEKSSSHKSHRSGDQHKRMRKVVYYETDTSSTSTSGSDAPSVTSKRQERKKFSKIPLHYPRTSRHTPLLSVPLGKLPTFDGEDYARWSDLMKFHLTSLHKSIWNVVEFGAQVPSVGDEDYDEDEVAQIEHFNSQATTILLASLSKEEYNKVQGLKNAKEIWDLLKTAHEGDELTKITKRETIEGELGRFRLRQGEEPQDMYNRLKTLVNQVRNLGSKKWDDHEVVKVILRSLIFLNPTQVQLIHGNPRYTQMTPEEVIGNFVSFECMIKGSKKINELDEPSTSEAQPVAFKATEEKKEESTPSRQPIDASKLDNEEMALIIKSFRQILKQRKGKDYKSRSRKVCYKCGKPDHFIAKCPLSSDSDRDNDKKGKRKEKKRYHKRRGGDAHVCREWNSDESSTDSSSDKDAANIAVTKGLLFPNVGHKCLMAKDSKRKKVKSRSSTKYETSSDEDDASNEEDNLHVLFANLNMEQKEKLNELISAIHEKDDLLDSQEDFLIKENKKHVKVKNAYALEVENCEKLSSELSTCHDTITNLRNENASLNTKVDSHVCNVSIPNLRNDNDDLLAKIEELNISLASLRVENENLIAKAKELDVCNVTISDLRDNNDILRAKIVELNSCKPSTSSVEHVSVCTRCRDVDIDAIHDHMTLIKQQNDHIAILDAKIAEHNLENEKFKFARSMLYNGRRPGIKDGIGFQRGDTVKLNAPPKRLSNFVKGKTPMPQDNEGYILYPAGYPEDKIRRIHSRKSHSGPNHAFMYKGETSSSRQPTRAKLPKKKTPSASNEHSLSFKTFDASYVLTNKSGKVVAKYVGGKHKGSKTCVWVPKVLVSNAKGPKTIWVPKVKN

SEQ ID NO: 10501 - protein, 1459 aa, Zea mays
  Clone ID: TF_ZM5008.C2.o5.fg.pep
MNPPNPPPGGVDPLVAAQMAVMQQMADTMADMRAQMQQERQEMRQEREDIRQELRQERDEIRQERRAQQQQLQQQLQQQQQQQQVPLPPPPPPVPPHDKHREFMSHKPPTFASSPDPLDADDWLKSIEKMLNIAQCTDREKVLYASGRLTGPAADWWDSYTAAHDAADTITWAEFSTQFRNYHIPAGMIKIKKKEFLSLKQGNMSVSEYRDKFIQLSRYAPEEVAEDERKQEHFIEGLNGPLQYALVAHTFPSFQRLLDKALAIEHKRVQLSDLKRKAISQGQGSSSVRPRYVPPQGTPTRPGGPRPVQQSPLRIPPPRQATPTGTPTRPTGQKTGPTCFKCSQVGHYANACPMGNSGTPAKNKQQTRGKGYSIARVNQVSVDDTPDGGDLVIGMFYVNAIPATILFDSGATHSFMSARYANTNEIPLLNMRKPMIVITPKGPVEANQMTRRLTLTIMGREFGATAIILESSSIDLILGMSWLRKAKAVIACGRGTVELTTTKGERFQVNIAVTSSSMRAMFFMPEEFVGDNIRVVRDFPDVFPEELPGMPPDREVEFVIDLLPGTAPISKRPYKMSVEELKELKKQLINDVTVKNKYLLPRIEDLFDQMRGARVFSKIDLRSGYHQMRIRPSDIPKTTFSNRYGLYEFTVMSFGLTNAPAYFMNLMNKVFMEYLDRFVVVFIDDILIYSKNESDHEQHLRLVLQKLRDNQLYAKFSKCEFWIDKVPFLGHIISNGGIAVDPSKVKEIMEWRVPTTVTEIRSFLGLAGYYRRFIEGLSKIAKPMTSLLEKGREFKWDEKCQESFDQLKERLMSPPVLVMPDLQKGFDIYCDACGQGLGCVLMQDGHVIAYASRQLRRHELNYPTHDLELAAVVHALKIWRHYIMGTKCQVYTDHKSLKYIFTQKDLNLRQRRWLELIKDYDLEIHYHPGKANLVADALSRKEHVHSAFVVQLPDELAKDFERLNLGIVTHTEGVTIELEPTLEQEIRKGQIGDAKIQEIKDLITEGRGPEFTEDEQGTIWFKNRICVPEIDSLRETILKEAHDSVYSIHPGSTKMYQGLKQKYWWYGLKRDVAAHVAMCDVCQRVKAEHQRPAGLLHPLKIPEWKWEEIGMDFIVGLPRTSAGYDSIWVIGDRLTKVAHFIPVKTTYSGAKLAELYMARIVCLHGVPKKIVSDRGSQFTSRYWKKLHESLDTRLNFSSAYHPQTDGQTERTNQVLEDMLRACALKHGGSWDKSLPYAEFSYNNSYQASLKMSPFEALYGRKCRAPLYWDQTDERQLFGPEIIQEAEDQVQQIRENLRTAQSRQKSYADTRRRLLEFKEGDYVYLKVSPLRGMRRFKVKGKLSPRFIGPFLILKRVGEVAYQLELPDHLADVHDVFHVSQLKKCLRVPEEQLPMEDLSVQDDLTYAEYPIKILDTLTRVTRNKVIKMCKVQWSHHGEDEATWEREEELRVDFPHLFPRSS

SEQ ID NO: 10502 - protein, 819 aa, Zea mays
  Clone ID: TF_ZmC16207_1.pep
MLRSFTVIDPHLVNLICENPKYTKMTPEEILGKFVSGRMMVKETRYVDDALNRPLLLHESQPVALKATGSKEALPSKVAQVEAVGLNEDEMTLIIKCFKTALKGRKEYPNKNKSRRKCSCFKCGKYGHFIAQCPDNNNDQAREKYGKKERKKNYRKAKGEAHIGKEWDSDCSSSDSDDEGLAASAFNKSSLFPNERHTCLMAKENKIDLRCKDFNIDACNEHVSTILKLNNDVASLNAKLKTCKDDYEKLKFTRDAYTIGRHPSIKDGLGFQKETKNFTSHRTSNLNKEKGKAPMANSSQKNHAYLYKKIPNVTHHDKCHNHSVFLCVMMMYLVLMPCLQPAPRMLMVYAFGGSSWIIDSGCTNHMMGEKKMFTSYVKNRDSQDTNIFGDGNQGKVKGLGKIAITTEHSISNVFFVESLGYNLLSDKTETQGTLKRFLRRAQNEFELKVEKIRSDNGSEFKNLQVKDYLEDEGIKHEFSAPYTPQQNGVVERKNRTLIDMARTMLGEYKTPERFWSEAVNTACHDINRLYLHCLLEKTSYELLTGNKPKVSYFRVFGSKCYVLIKKGRHSKFAPKAVEGFLLGYDSNTKAYRVFSKSSELVEVSSDVVFDETNGSPREQVDLDDVDEDEVPTAAMRTMAIGEEELNNFKRNEVWSLVPRPKQNVVGTKWVFRNKQDEHGVVTRNKARLVAKGYAQVTGLDFEETFAPVARLESIRILLACAAHHSFKIFQMDVKSAFLNGPIKEKVYVEQPPSFEDDRYPDHVYKLSKALYGLKQAPRAWYECLRDFFITNAFKVGKADPTLFTKTCNGDLFVCQIVTP

SEQ ID NO: 10503 - protein, 1461 aa, Zea mays
  unsure (1)..(1461): unsure at all Xaa locations
  Clone ID: TF_ZmC951_456.pep
MSGEHAKKEMETGDKPATSHGKASSGESRNKGKGKEKKPSSHKSHRSGDKKKMMRKVVYYETDTSSPSTSGSDAPSITSKRHERKKFSKPPTFDGEDYARCSDLMKFHLTSLHKSIWNVVEFGAXREEYNKVQGLKSAKKVWDVLKTXHEGDELTKITKRETIEGELGRFRLRQEEEPQDMYNRLKTLVNQVRNLGSKKWDDHKVVKVILRSLIFLNPTQVQLIRGNPRYTLMTPEEVIGSFVSFEFMIKGSRKINELDGPSTSEAQPVTFKATEEKKEESTSSRTPIDASKLDNEEMTLVIKSFRQILKQRRGKDYKPRFKKVCYKCGKPGHFIAKCSISSDSDRGDDKKGRRKEKKRYYKKKGGDAHVCREWDSDESSSDSSDDEDVANIAVTKGLLFPNVGHKCLMAKDGKKKNVKSKSSTRYESSSDDNASDEEDNLRTLFANLNMQQKEKLNELISAIHEKDDLLDSQEDFLIKENKKHVKVKNAYALEVEKCEKISSELSTCHETIDNLRNENANLLAKVDSIACNVSIPNLRNDNDDLLARIEELNISLASLRDEDEKLLAKAKDFDVCNATISNLRSKNDILHAKVVELKSCKPSTSTVEHTTICTRCRDVDINAIHDHMALIKQQNDHIAKLDAKIAEHEIENEKFKFARSMLYSGRRPGIKDGIGFQQGGNVKLNAPPKKLSNFVKGKAPMPQDNEGYILYPAGYPESKIRRIHSRKSHSGPNHAFMYKGETSSSRQPTRAKLPKKKTPSASNDHNISFKTFDASYVLTNKSGKVYASGGSSWIIDSGCTNHMTGEKKMFSSYEKNQDPQRAITFGDGNQGVTVFRRSDDSITFKGVLEGQLYLVDFDRAELDTCLIAKTNMGWLWHRRLAHVGMKNLHKLLKGEHILGLTNVHFEKDRICSACQAGKQVGAHHPHKNIMTTDRPLELLHMDLFGPIAYISIGGSKYCLVIVDDYSCFTWVFFLQEKSHTQETLKGFLRRAQNEFGLRIKKIRSDNGTEYKNSQIEGLLEEEGIKHEFSSPYTPQQNGVVERKNRTLLDMARTMLDEYKTSDRGRKSKFAPKTVEGFLLGYDSNTRAYRVFNKSSGQVEVSCDVVFDETNGSQVEQVDLDEICDEEAPCIALRNMSIGDVCPKESEEPPNAQDQPSSSTQASPRTQNEDEAQVDEGEDQASELPQDDDNDQGGDANDQDKEDEERRPPHPRVHQAIQRDHPVDTILGDIHKGVTTRSRVAHFCEHYSFVSSIEPHRVEEALQDSDWVVAMQEELNNFTRNEQDEHGVVTRNKARLVAKGYSQVKGLDFGEIYAPVARLESIRILLAYGTYHGFKLYQMDVKSAFLNGPIKEDVYVEQPPGFEDSEYPNHVYKLLKALYGLKQAPRAWYECLRDFLITNGFKVGKADPTLFTKTLENDLFVCQVYVDDIIFGSTNESTCEEFSRIMTQKFEMSMMGELKYFL

SEQ ID NO: 10504 - protein, 784 aa, Zea mays
  Clone ID: TF_ZM4589.C1.o4.fg.pep
MKKVVYYETDSSSPSTSGSDAASVTSKRQERKKYSKIPLRYPRIPKHTPLLSVLLGKPPTFDGEDYSRWSDMMRYHLTSLHKNIWDIVEFGVQVPSVGDEDYDEDEVAQIVHFNSQATTILLTSLSREEYNKVQGLKSAKEIWDVLKTTDEGDEVTKITKRETIEGELGRFRLRKRRSHKKCSKKIIEQDGPSTPEAQSVAFKATEEKKEESTSSRLPIDASKLDNEEMTLIIKSFRQILKQRRGKDYKSRSKKVCYKCGKPGHFIAKCSISSDSDRGDDKKGKRREKKRYYKKKGGDAHVCRERNSDESSSDSSSDEDAANIAVTKGLLFPNIGHKCLMAKDGKRKKVKSRSSTKYASSSDEDNSSDEEDNLRTLFANLNMQQKEKLNELISDIHEKDELLDSQEDFLIKENKKHVKVKNAYALEVEKCEKLSSELSTCHDIIANLRNENAKMITKVDSNLCDDSISNHRDDNVNLLAKIEELNVSLASLRNENERLIAKAKDLDVCNVTISNLRSENDILHAKIVALNSCKPSTSTIEHVTICTRCRDINVDAIHDHLALIKKQNDHIAQLNAKINEHDLENEKFKFARSMLYNGRRPGIKDGIGFQKGDNVKLNAPPKRLSNFVKGKAPMPQDNEGYILYPVGYPEHKIRRIHSRKSHSGPNHAFMYKGETSSSRQSTRAKLPKKKTPIASNDSNISFKTVDASYVLTNKSGKVYASGGSSWIIDSGCPNHMTGEKKMFSSYKKNQDPQRAITFGDGNQGVTVFRRSDDSVAFKGVLEGQL

SEQ ID NO: 10505 - protein, 1647 aa, Zea mays
  Clone ID: TF_ZmC951_328.pep
MSGDHTKKEMETGEKPTTSHGKTSSEESRNKRKEKKDSSKGKEKKSSSHKEKKEKSSSHKPHRSGDKKKKMRKVVYYETDSSSTSTSGSDAASVTSKRQERKKYSKIPLRYPHISKHTPLLFVPLGKPPTFDGEDYARWSDLMRFHLTSLHKSIWDVVEFGAQVPSVGDEDYDEDEVAQIEHFNSQATTILLASLSREEYNKVQGLKSAKEVWDVLKTAHEGDELTKITKRETIEGELGRFRLRKGEEPQNMYNRLKTLVNQVRNLGSKKWDDHEMVKVILRSLIFLNPTQVQLICGNPRYTLMTPEEVIGNFVSFECMIEGSRKINELDDPSTSEAQPVAFKATEEKKESTPSRQPIDASKLDNEEMALVIKSFRQILKQRRGKDYKLRSKKVCYKCGKPDHFIAKCPISSDSDRGDDKKGRRKEKKKYYKKRGGDAHVCREWDSDESSSDSSDDEDAANIAVTKGLLFPNVGHKCLMAKDGKKKKVKSKSSTRYESSSDENVSDEEDNLRTLFANLNMQQKEKLNELISAIHEKDDLLDTQEDFLIKENKKHVKVKNAYALEVEKCEKLSNELSTCHETIDNLRNENSNLLAKVDSIACNVSIPNLRNDNDDLLAKIEELNLSLVSLKNENEKLIAKAKDFDVCNATISDLRTKNDILHAKVVELKSCKPSTSTVEHTSICTRCRDIDVNAIHDHMTLIKQQNDHIAKLDAKIAEHNLENEKFKFARSMLYSRRRPGIKDGIGFQRGDNVKLNAPPKRLSNFVKGKAPMPPDNEGYILYPAGYPEDKIRRTHSRKSHSGSNHAFMYKSETSSSRQPTRAKLPKKKTPSASNDHDISFKTFDASYVLTNKSSKVYASGGSSWIIDSGCTNHMTGEKKMFSSYEKNQDPQRAITFGDGNQGVTVFRRSDDSIAFKGVLEGQLYLVDFDRAELDTCLIAKTNMGWLWHRRLAHVGMKNLHKLLKGEHILGLTNVHFEKDRICSACQAGKQVGAHHPHKNIMTTDRPLELLHMDLFGPIAYISIGGSKYCLEKYQTQETLKGFLRRAQNEFTLRIKKIRSDNGTEFKNSQIEGFLEEEGIKHEFSSPYMPQQNGVVERKNRTLLDMARTMLDEYKTSDRFWAEAVNTACYAINRVFGSKCFILVKRGRKSKFAPKTVEGFLLGYDSNTRAYRVFNKSSGQVEVSCDVVFDETNGSQVEQVDLDEIGDEEAPCIALRNMSIGDVCPKKSEEPPNAQDQPSSSTQASPPTQNEDEAQIDEGEDQANEPPQYDGNDQGGDANDQDKEDEEQRPPHPRVHQAIQRDHPVDTILGDIHKGVTTRSRVAHFCEHYSFVSSIEPHRVEEALQDSDWVVAMQEELNNFTRNEVWHLVPRPNQNVVGTKWVFRNKQDEHGVVTRNKARLVAKGYSQVEGLDFGETYAPVARLESIQILLAYATYHGFKLYQMDVKSAFLNGPIKEEVYVEQPPGFEDSEYPNHVYKLSKALYGLKQAPRAWYECLRDFLITNGFKVGKADPTLFTKTLENDLFVCQIYVDDIIFGSTNESTCEEFSRIMTQKFEMSMMGELKYFLGFQVKQLQEGTFISQTKYTQDILNKFGMKDAKPIKTPMGTNGHLDLDTGGEESNVRALMIPFLAIHAKGGESMSPKQKDRTTT

SEQ ID NO: 10506 - protein, 1186 aa, Zea mays
  unsure (1)..(1186): unsure at all Xaa locations
  Clone ID: TF_ZmC951_331.pep
MKKVVYYEIDSSSPSTFGSDAPSVTSKRHERKKFSKIPLRYPRISKRTPLLSISLGKPPIFYGEDYCMWSDKLRHHLTSLHASIWDIVEFGAQVPPIGDEDYDSNEIAQIWHFDSQATTILLASLCREEYNKVQWLKSAKKIWDVLKTAHEGDEVTKTTKRETIEGELGRFVLNQGEEPQAMYNRLKTLVNQIILRSLIFRNPTQVQLIRGDPRYKLMSPEEVIGKFVSFELMIKGSKQIVNLEQGDTSTPEVQPIAFKATEDKKEESTSSRLPIDASKLDNEEMTLIIRSFRQILKQRRGKDYKPRSKRVCYKCGKPRHFIAKCPMSSDSDRDNDKKGMKKEKNKYYKKKGDDAHVCWEWDSSSDEDAANIIVNKGLLFPNVGHKCYMAKDGKKKRVQARTTPSILHLVMRGKAPKAQDNEGYILYPAGYPEHKIRRSHARKSHSVSHHAFMYKNEASSSRHSTYVKMSKKITPTASNEPNVSFKTFDASYALTNKSGKIVYASWSSSWIIDSRCTNHMTWEKRMFSSYEKNDDPQRVITFGDGNQDLGVTVFRRSDDSIAFKGVLEXNIMTTDRPLELLRMDLFGSIAYISIXREKSQTQETLKGFLRRAQNEFGLRIKKIRSDNGTEFKNSQIEGFLEDEGIKHEFSSPYTPQQNGVVERKNRTLLDMARTMLDEYKTPDWFWVEAINTACYSINRLYLHRILKKTSYEFLXRNMSIGDVCPKESEEPTQAQDQPSLSCKHXPPTQDEDQAQDNEDGDQEDEPPQEEDNDQGGYEVDQDKEDDQELQGQRPPHPRVHQAIQRDHPVNSILGDIHKGVTTRSRVAHFCEYYSFVSSIEPYRVEEALRDLDWVLAMQEELKNFTRNXGTKWVFHNKQDEHGVETRNKARLVANGYSQVXKLYQMDMKSSFLNGPIKEEVYVEQPPGFEVSEYPNHVYKLSKALYGLKQAPRAWYKCLRDFLITNGFKVGKADPTLFTKTIAKDLFVCQIYVDDIIFGSTNKSTCEEFSRIMIQKFEMSMMGELKYFLGFQVKQLQEGTFISQTKYIQNILTKFGMKDAKPIKTPMGTNGHLDLDTRGCKIDRKSTSGTCQFLGRSLVSWASKKQNSVALSTAEAEYIAAGHCCVQLLWMRQTLRDYGYKLSKVPLLCDNESAIRMEDNLVEHSRTKHIDIQYHFLRDHQQRGISK

SEQ ID NO: 10507 - protein, 1583 aa, Zea mays
  Clone ID: TF_ZmC951_376.pep
MSGDHAKKEMETGDKPTTSHGKASSEESRNKGKGKEKKSSSHKSHRSGDKKKKMRKVVYYETDTSSPSTSGSDAPSITSKRHERKKFSKIPLRYPRIPKHTPLLSVPLGKPPTFDGEDYARWSDLMRFHPTSLHKSIWDVVEFGVQSREYNKVQGLKGAKEIWDTLKTAHEGDEVTKITKRETIKGELGRFRLRQGEEPQDMYNRLKTLVNQVRNLGSKKWDDHEMVKVILRSLVFLNPTQVQLIRGNPRYTLMTPEEVIGNFVSFEMMIKGSKKINELDGPSTSEAQPVAFKATEEKKEESTPSRTPIDASKLDNEEMAIIIKSFRQILKQRKGKDYKPCSKKVCYKCGKPDHFIAKCPISSDSDRGDDKKGRRKEMKKYYKKKGGDAHVCREWDSDESSTDSSSDEDAANIAVTKGLLFPNIGHKCLMAKDGKRKKVKSRSSTKYETSSDEDNASNEEDNLRILFANLNMQQKEKLNELISAIHEKDDLLDTQEDFLIKENKKHVKVKNAYALEVEKCEKLSSELSTCHETIDNLRNENANLLAKVDSNVCDVSIPNLRNDNDDLLAKIEELNMSLTSLRNENEKLIAKAKDFDVCNASISDLRSKNDILHAKVVELKSCKPYTSTVEHTAICTKCRDINVDAIHDHLALIKKQNDHIAQLNAKINEHDLENEKFKFARSMLYSGRRLGIKDGIGFQKGDNVKLNAPPKRLSNFVKGKAPMPQDNEGYILYPAGYPESKIRRIHSRKSYSGPNHAFMYKGEASSSRQPTHAKLPKKKTPSASNEHSISFKTFDASYVLTNKSVKVYASGGSSWIIDSGCTNHMTGEKKMFSSYEKNQDPQRAITFGDGNQGVTVFRRSDDSIAFKGVLEGQLYLVDFDRAEPDTCLIAKTNMGWLWHRRLAHVGMKNLHKLLKGEHILGLTNVHFEKDRICSACQAGKQVGAHHPHKNIMTTDRPLELLHMDLFGPIAYRSIGGSKYCLVIVDDYSRFTWVFFLQEKSHTQETLKGFLRRAQNEFGLRIKKIRSDNGTEFKNSQVEGFLEEEGIKHEFSSPYTPQQNGVVERKNRTLLDMARTMLDEYKTSDRFWAEAVNTACYTINRLYLHRILKKTSYELLTGKKPNISYFRVFGSKCFILVKRGRKSKFAPKIVEGFLLGYDSNTRAYRVFNKFSGQVEVSCDVVFDETNGSQVEQVDLDEIGNEEAPCIALRNMSIGDVCPKESEEPPNAQDQPSSSTQASPPTQNEDEAQVDEGEDQRVEPPQDDGNDQGGDVNDQDKEDEEPRPPHPRVHQAIQRDHPVDTILGDIHKGVTTRSHVAHFCEHYSFVSSIEPHRVEEALQDSDWVVAMQEELNNFTRNEVWHLVPRPNQNVVGTKWVFRNKQDEHGVVTRNKARLVAKGYSQVEGLNFGETYAPVARLESIRILLAYATYHGFKLYQMDVKSAFLNGPIKEEVYVEQPPGFEDSEYPNHELSKALYGLKQAPRAWYECLRDFLIANGFKVGKADPTLFTKTLDNDLFVCQIYVDDIIFGSTNESTCEEFSRIMTQKFEMSMMGELKYFLGFQVKQLQEGTFISQTKYIQDILKKFG

SEQ ID NO: 10508 - protein, 933 aa, Zea mays
  unsure (1)..(933): unsure at all Xaa locations
  Clone ID: TF_ZmC951_378.pep
MKKVVYYEIDSSSPSTFGSDAPSVTSKRHERKKFSKIPLRYPRISKRTPLLSISLGKPPIFYGEDYCMWSDKLRHHLTSLHASIWDIVEFGAQVPPIGDEDYDSNEIAQIWHFDSQATTILLASLCREEYNKVQWLKSAKKIWDVLKTAHEGDEVTKTTKRETIEGELGRFVLNQGEEPQAMYNRLKTLVNQIILRSLIFRNPTQVQLIRGDPRYKLMSPEEVIGKFVSFELMIKGSKQIVNLEQGDTSTPEVQPIAFKATEDKKEESTSSRLPIDASKLDNEEMTLIIRSFRQILKQRRGKDYKPRSKRVCYKCGKPRHFIAKCPMSSDSDRDNDKKGMKKEKNKYYKKKGDDAHVCWEWDSSSDEDAANIIVNKGLLFPNVGHKCYMAKDGKKKRVQARTTPSILHLVMRGKAPKAQDNEGYILYPAGYPEHKIRRSHARKSHSVSHHAFMYKNEASSSRHSTYVKMSKKITPTASNEPNVSFKTFDASYALTNKSGKIVAKYVGGKHKGSKTRVWVPKVYASWSSSWIIDSRCTNHMTWEKRMFSSYEKNDDPQRVITFGDGNQDLGVTVFRRSDDSIAFKGVLEGQLYLVDFNRAELDTCLIAKTNMGWLWHRRLAHVGMKNLXKLLKGEHILGLTNVHFEKDRVCSTCQAGKQVGAHHXKNIMTTDIPLELLHMDLFGPIAYISISGSKYCLVIVDDYSRFTWVFFLQEKSHTQETLKGFLRRAXNEFGLRSKXIRSDNGTEFKNSQIEGFLEEEGIKHEFSSPYTPQQNGVVERKNXTLFDMARTMLDEYKTSDRFWAEAVNTACXAINRLYLHRILKKTSYELLTGKKPNISYFRVFGSKCFILVKRGRKSKFAPKTVEGFLLGYDSNTRAYRVFNKSSGQVEVSCDVVFDETNGSQVEQVDLDEIGDEEAPXIALRNIPLGRGPP

SEQ ID NO: 10509 - protein, 1279 aa, Zea mays
  Clone ID: TF_ZM3644.C1.o16.fg.pep
MSGDHAKKEMETGEKPTISHGSTSSEESRTKRKEKKDSSKGKEKRSSSHHKEKKEKSSSHKPHRSGDKKKRMRKVVYYETDSSSASTSGSDAASVTSKRQERKKYSKIPLRYPRISKHTPLLSVPLGKPPTFDGEDYARWSDLMRFHLTSLHKSIWDVVEFGAQVPSVGDEDYDEDEVAQIEHFNSQATTILLASLSREEYNKVQGLKSAKEIWDLLKTAHEGDELTKITKRETIEGELGRFRLRQGEEPQDMYNWLKTLVNQVRNLGSKKWDDHEVVKVILRSLIFLNPTQVQLIRGNPRYTLMTPEEVIGNFVSFEYMIKGSKKINELDDPSTSAAQPDAFKATEEKDESTSSRQPIDTSKLDNEEMTLVIKSFRQILKQRRGKDYKPQSKKVCYKCGKPDHFIAKCPISSDSDRGDDKKGRRKEKKRYYKKKGGDAHVCREWDSDESSSDSSDDEDAANIAVTKGLLFPNVGHKCLMAKDGKRKKVKSKSSTKYETSSDDNASDEEDNLRTLFANLNMEQKEKLNELISAIHEKDDLLDSQEDFLIKENKKHVKVKNAYALEIEKCEKLSSELSTCHDTIANLRNENAKLIAKVDSHVCNVSTSNPRDDNVDLLARIDELNISLVSLRIENEKLLAKAKDFDVCNVTISNLRSENDILHAKVIELKSCKPSTSIVEHVSICTRCRDVDVNAILDHMALIKQQNDHIAKLDAKIVEHNLENEKFKFARSMLYNGRRPGIKDGIDFQRGDNVKLNAPPKRLSNFVKGKAPMPQDNEGYILYPAGYPESKIRRIHSRKSHSGPNHAFMYKGETSSSRQPTHAKLPKKKTPSASNEHSISFKTFDASYVLTNKSGKIVAKFVGGKHKGSKTCVWVPKVLVSNAKGPKTVWVYASGGSSWILDSGCTNHMTGEKKMFSSYEKNQDPQRAITFGDGNQGVTVFRRSDDSIAFKGVLEGQLYLEKSQTQETLKGFLRRAQNEFGLRIKKIRSDNGTEFKNSQIEGFLEEEGIKHEFSSPYTPQQNGVVERKNRTLLDMARTMLDEYKTSDRFWAEAVNTACYAINRLYLHRILKKTSYELLTGKKPNISYFRVFGSKCFILIKRGRKSKFAPKTVEGFLLGHDSNTRAYRVFNRSTGQVEVSCDVVFDETNGSQIEQVDLDEIGNEEAPCIALRNMSIGDVCPKESEEPPNAQNQPSSSTQASPSTQNEDEAQVDEVEDQANEPPQDDDNDQRGDANDQDKEDEEQRPPHPRVHQAIQRDHPVDTILGDIHKGVTTRSRVAHF

SEQ ID NO: 10510 - protein, 314 aa, Zea mays
  Clone ID: TF_ZM4612.C4.o4.fg.pep
MENLSQMTLTIVIGKIVVDDLLFNTEGKCKERKDASHAGRRATSGTTVQTCPNPQRGGAKPRRLQVSKLEITLQTKMNLQGHATTNPHHAHHGHCTSALWQEVTTKIEQLESDVPSSATDDGLIKNNEKLKAKLASSQEAIENLLEKMEILSIHNNELTTKLEKIDSTLEVFLVEIPKIIEKDASTSCFDLIDDSNPCNQVLVENVVIETCSNEVSKENEQLRQEVARLGKALYGKKGKAKQIQTPQGNTTAGVNKPVEGGTVICRICHKEGHKFYQCKAKTGDKQKQKLKKKSNNKISNTYINKVDKRLLHHI

SEQ ID NO: 10511 - protein, 662 aa, Zea mays
  Clone ID: TF_ZM4913.C4.o2.fg.pep
MDPKGKGMVVNNNEKESIFNEPKDDKPTDSGSSHKRKDGKKKKTRRIKEIVYYDSDESSSSQKDDDYEKKKTVNSNFSFDYSRIPQSTNAHLLSIPLDKPPHFDGEDYGFWSHKMRSHLFSLHPSIWEIVESGMHFDSTDSPMFINEQIHKNAQATTVLLASLCRDEYHKVSGLDNAKQIWDTLKISHEGNDVTMLTKMELVEGELGRFAMIRGEEPTQTYNRLKTLVNKIRSYRSTRWTDHDVVRLMLRSFTVLDPHLVNNIRENPRYTKMTPEEILGKFVSGRMMIKEARYVDNALNGPINEPQPLALKATRSKETLPSKVAQIEAARLNYEEMALIIKRFKTALKGRKGQPSKTKTKGKHSCFKCGKLGHFIANCPDNDSDQDQGNKREKKKNYKKAKGEAHLGKEWDSNCSSSDSDNEGLAATAFNKSSLFPNERHTCLMAREKKVCTRNSTYASSSEDESSDEDEIDYSCLFKGLDRTKVDKINELIDALNDKNRLLEKQEDLLYEEHDKFVEAQKSHALEVKRNEMLSCELSSCHKTISNLRSINDDLNAKLEIASKSTCCGEIVATCNRCKDFDIDACSEHLVSISKLNDELASLNAQLKTSKSEFDRLKFMMDAYTIGRHPSIKDGLGFKRETKNLTSHKVPIPAKEKGKAPMA

SEQ ID NO: 10512 - protein, 443 aa, Zea mays
  Clone ID: TF_ZM4986.C2.o5.fg.pep
MDPKGKGIVINDKEKESFVNEPKDDKPTDSGSGHKRKDGKKKKTRRIKEIVYYDDSDESTSSQKDDDNDYRKTVNSNFSFDYSRIPHSSNSHLLSIPLGKPPHFDGEDYGFWSHKMRSHLFSLHPSMEEYNKVSGLDNAKQIWDTLKISHEGNDITMLTKMELVEGELGRFAMIRGEEPTQTYNRLKTLINKIRSYGSTRWTDHDVVRLMLRSFTVLDPHLVNNIRENPRYTMMTPEEVLGKFVSGRMMIKEARYVDDALNGPINEPQPLALKATRSKEMLPSKVAQIEAVGLNDEEMALIIKRFKTALKGRKGQPSKTKTKGKHSCFKCGKLGHFIANCPDNDSDQDQGNKREKKKNYKKAKGEAHLGKEWDSDCSSSDSDNEGLAATAFNKSSLFPNERHTCLMAREKKVSTRDSTYASSSDNESSDDDDIDYSCLFKGLD

SEQ ID NO: 10513 - protein, 524 aa, Zea mays
  unsure (1)..(524): unsure at all Xaa locations
  Clone ID: TF_ZmC29741_67.pep
MALIIKRFKTALKGRKEHPNKSKTKGKRSCFKCGKIGHFIANCLDNDSDQEQGKNGKRENKKVYKKAKSEAHLGKEWDSDCSSSDSDDEGLAATAFNKSSLFPNEHHTCLMAKEKKVSTRRTITYASSSDDEPSDDEVDYASLFKGLDRTKIDKINELIDALNEKDRLLEKQEDLLYEEHDKFVSAQNSLALEVKRNEMLSCELSTCHESISSLKSINDDLNTKLEITNKSSSCVEHVVIFNRCKDFNVDACVEHLTSIAKLNGEVASLNAQLKTSKNDFDKLKFARDAYTIGRHPSIKDGLGFKREAKNLTSQRAPIFNKEKGKAPMANSSQKNHAFIYDRKFSRNAYHNGSCDAYDSNAMIASSSFFVHGRDMPRRNVVHVPRKPSNEPSTIYHACNASFAICRKNKKVIARKLGAKCKGDKTCIWVPKAIVTNLVGPNKSWVLSGTIIRGTLKTPNSQLVTPISXSCKGLMGPIKKMFTSYVKNKDSQDSIIFGDGIQGMVKGLGKIAISNAHSISNVFCV

SEQ ID NO: 10514 - protein, 293 aa, Zea mays
  Clone ID: TF_ZM3651.C6.o3.fg.pep
MDPKGKGIVINDKEKESFVNEPKDDKPTDSGSGHKRRDGKKKKTRRIKEIVYYDDNDESSSSQKDDDNNYEKKKTINSNFSFDYSRIPHSSNAHLLSIPLGTSTIRYTKMTPEEILGKFVSGRMMIKEARYVDDALNGPIQEPQTIALKATRSKEALPSKVAQVEAAGLNVEEMTLIIKRFKTALKGRKEHPNKNKTKGKHSCFKCGKIGHFITNCPDNDSDQEKKSGKWEKKKNYKKAKGEAHLGKEWDSDCSSFDSDNEGLATTTFNKSSLFPNKHHTCLMAREKKVLMMI

SEQ ID NO: 10515 - protein, 1661 aa, Zea mays
  Clone ID: TF_ZM4412.C1.o7.fg.pep
MDPKGKGIVINDKEKESFVNEPKDDKPTDSGSGHKRKDGKKKKTRRIKEIVYYNDSDESTSSQKDDDNDYRKTVNSNFSFDYSRIPHSSNSHLLSIPLGKPPHFDGEDYGFWSHKMRSHLFSLHPSIWEIVENGMKFDSSDSPMLINEQIHRNAQATTVLLASLCREEYNKVSGLDNAKQIWDTLKISHEGNDITMLTKMELVEGELGRFAMMRGEEPTQTYNRLKTLINKIRSYGSTRWTDHDVVRLMLRSFTVLDPHLVNNIRENPRYTMMTPEEVYGKFVSGRMMIKEARYVVDALNGPINEPQPLALKATRSKETLPSKVAQIEAVGLNDEEMALIIKRFKTALKGRKGQPSKTKTKGKRSCFKCGKLDHFIANCPDNDSDQDQGNKREKKKNYKKAKGEAHLGKEWDSDCSSSDSDNEGLAATAFNKSSLFPNEHHTCLMAREKKVSTQDSTYASSSDNESSDDDDIDYSCLFKGLDRSKIDKINELIDALNDKNRLLEKQEDLLYEEHDKFVEAQKSLALEIKRNEMLSFELSTCHETISTLKSVNNDLNAKLEAANKSNSYVEHVVICTRCKDFDIDACSKHLVSISKLNDELASLNAQLKTSKNDFDKLKFARDAYTIGRHPSIKDGLGFKREAKNLTSHKAPISAKEKGKAPMASSTKRNHAFMYHDRRQTRNAYRSYNAYDDFDSHAMFASSSSYMHGRNMSRRNAIHHVPRKNIIHTPRKVVNEPSTIYCALNASFAICRKDRKIVARKLGAKCKGDKTCIWVPKDICTNLVGPNMSWVYAFGGSSWIIDSGCTNHMTGEKKMFTSYVKNKDSQDSIIFGDGNQGKDKSETQGTLKRFLRRAQNEFELKVKKIRSDNGSEFKNLQVGEFLEEEGIKHEFSAPYTPQQNGVVERKNRTLIDMARTMLGEFKTPECFWSETVNTACHAINRVYLHRLLKKTSYELLTGNKPNVSYFRVFGSKCYILVKKGRNSKFAPKAVEGFLLGYDSNTKAYRVFNKSSGLVEVSSDVVFDETNGSPREQVVDLDDVDEEDVPTAAMRTMAIGDVRPQEQLEQDQPSSSTMMHPPTQNDEQVHQEECDQGGAQDDHVMEEEAQPAPPTQVRAMIQRDHPVDQILGDISKGVTTRSRLVNFCEHYSFVSSIEPFKVEEALLDPDWVLAMQEELNNFKRNEVWTLVPRPKQNVVGTKWVFRNKQDEHGVVTRNKARLVAKGYAQVAGLDFEETFAPVARLESIRILLAYAAHHSFRLFQMDVKSAFLNGPIKEEVYVEQPPGFEDERYPDHVCKLSKALYGLKQAPRAWYECLRDFLIVNAFKVGKADPTLFTKTCDGDLFVCQIYVDDIIFGSTNQKSCEEFSRVMTQKFEMSMMGELNYFLGFQVKQLKDDTFISQTKYTQDLLKRFGMKDAKPAKTPMGTDGHTDLNKGGKSVDQKAYRSMIGSLLYLCASRPDIMLSVCMCARFQSDPKECHLVAVKRILRYLVATPCFGLWYPKGSTFDLVGYSDSDYAGCKVDRKSTSGTCQFLGRSLVSWNSKKQTSVALSTAEAEYVAAGQCCAQLLWMRQTLRDFGYNLSKVPLLCDNESAIRMAENPVEHSRTKHIDIRHHFLRDHQQKGDIEVFHVSTENQLADIFTKPLDEKTFCRLRSELNVLDSRNLD

SEQ ID NO: 10516 - protein, 1358 aa, Zea mays
  Clone ID: TF_ZM4640.C8.o1.fg.pep
MTSHGSSDEGNAQSHTDGLAREGFRCILWEVLQGAGYMTPPLYAVQQLEKHRVPRCRVRMTLEPHPLQPGWRSLDFECFGYRAEDTIEAIALHGLTTFCRFHPLELSTHPIGLFLTEKEDDPMWKDRVEHAKDIWAIYPCQTAHLTVRCMNALYRLQVMRGEAMSHLMALLEATKITLDNREELVVDLSTEMVEKDLQVEQLSNEIQELEELVGTRENTLEELMAQQNEILRQLAQRQPPPQHYGGGDHQRHPAAATYQEFLSTQPPLFTRAEDPLDADVWLRVVESKFPLLHGVCSEVTKPEDREVEWREFKAAFRGHHIPAGIMDRKLNEFLALTQWNRTVLQYSQAFNDLCQYAGYHADTDEKKWDRFRRGLSTKLRDRLNTVRANSYNELVNMAISQEDCITARQAEKKRKSPVEGPSAQPQHFRIVSDTQNRGPKQQQGRWVIRPQQQQQYRQANDNMCFTCGNTGHYAKNCPMNQQRQRQNANQNQGKRQKVQVRQGRLNFTTMADIPEGAPVMTGIFSVSNYPAIILFDSGASHSFISAKCQLPFHHTNGGITISTPGGRVATYQINKNVPIKFGSLIIKTNLLILGLNSVDIILGTDWLTKHQATMDTAARAIEVHSPTCGETTLYLPNQGCTRSCAFVMIESPVERIPLVCDYPDVFPDELPGMPPDRDIEFAIELQTGTAPTSKRPYRMPPAELAELKKQLQELLDKGFIRPSTSPWGCPALFVKKKDESLRMGVDYRPLNAVTIKNKYPLPHIDVLFDQLLREIKFLGHTISQDGISVDPEKVQEVMYWKPPTTVRQIRSFLGLAGYYRRFIPDFSRIAKPMTELLKKGVKYNWSQKCEDAFHTLRQHLTTAPVLAQPDNTKPFEVYCDASGTGLGCVLMQDNRVIAYASQALRPHEQNYPTHDLELAAVVHALKIWRHFLMGAHCNIYTDHKSLKYLFTQADLNMRQRRWLELIKDYDLEVHYHPGKANVVADALSRKAQCNCALNYISVEPTMQEQIVRAQIEDKGVQVIKEMIKQKAEKYKCFRQDSKGILWFGDRLVVPKDPELRKKILDEAHLSKFSMHPGSNKMYHDLRSLYWWTRMKREIAKYISECDTCQRIKVIHLKVAGPLQPLPIPSWKWEDICIDFIVGLPNTSRHHDSIWVIVDRLTKTAHFLPVHTTHKTEKYAEIYVDPIVRLHGIPKTIVYDRGALFVARFWEQLQESLGTHAIRSSAYHPQTDGQTERVNQILEDMLRACVLHYGKNWDKCLSLAEFSYNNSYQSSLKMAPFEALYGRRCRTPLNWSQAGEREIFGPDLVLEAEEKVRVIKKNLEAAQARQKSYHDKRRKPLQFEVGDHVYLKVSPTKGV

SEQ ID NO: 10517 - protein, 1518 aa, Zea mays
  Clone ID: TF_ZM4871.C2.o15.fg.pep
MDPKGKGIVINDKEKESFVNEPKDDKPTDSGSGHKRRDGKKKKTRRIKEIVYYDDSDESSSSQKDNDDNDYDKRKTMELVEGELGRFAMIRGEEPTQTNNRLKTLINKIRSYGSTRWTDHDIVRLLLRSFTVLDPHLVNNIRENPRYTKMSPEEVLWKFVSGRMMIKEARYVDDALNGPIHEPQPIALKATRSKESLPSKVAQIEATGLNDEEMALIIKRFKTALKDRKGQPSKTKTKGKRSCFKCGKIGHFIANCLDNESDQEQGSKREKKAYKKAKGKAHLGKEWDSDCSSSDSKNEGLAATAFNKSSLFPNERHTCLMVKEKKVCTRDSTTYDSSSDEEIDYSSLFKGLDRTKVDKINELIDALNEKDKLLEKQEDLLYEEHDKFVEAQKSYALEVKRNEMLSCELSSCHETISSLRSINDGLNAKLEIASKSNSCVEHVMICNRCKDFDIDACSEHIASIAKLSDEVASLNAQLKTSKSEFDKLKFARDAYTIGRHPSIKDGLGFKREAKNLTSHKAPIPAKEKGKAPMASSPKKNHAFMYHDRRQSYRSCNAYNAFDSHAMFASSSSYMHGRDMSRRYVVHMPRRNVVNVPRKVNEPSTIYHALNASFAICRKDRKIVARKLGAKCKGDKTCIWVPKDICANLVGPNMSWVYASGGSSWIIDSGCTNHMTGEKKMFTSYVKNKDSQDSIIFGDGNQGKDKSETQGTLKRFLRRAQNEFELKVKKIRSDNGSEFKNLQVEEYLEEEGIKHEFSAPYTPQQNGVVERKNRTLIDMARTMLGEFKTPERFWSEAVNTACHAINRVYLHRLLKKTSYELLTGNKPNVSYFRVFGSKCYILVKKGRNSKFAPKAVEGFLLGYDSNTKAYRVFNKSSGLVEVSSDVVFDETNGSPREQVVDLDDVDEEDVPTAAIRTMVIGDVRPQEQKEQDQPSSSTMVHPPTQEDEQVYQKEAYDQGGAQDDQVMEEEAQSAPPTQVRAMIQRDHPVDQILGDISKGVTTRSRLVNFCKHYSFVSSIEPFRVEEALLDPDWVLAMQEELNNFKRNEVWTLVPRPKQNVVGTKWVFRNKQDEHGVVTRNKARLVAKGYAQVAGLDFEETFAPVARLESIRILLAYAAHHSFRLFQMDVKSAFLNGPIKEEVYVEQPPGFEDERYPDHVCKLSKVLYGLKQAPRAWYECLRDFLIANAFKVGKADPTLFTKTCDGDLFVWQIYVDDIIFGSTNKKSCEEFSRVMTQKFEMSMMGELNYFLGFQVKQLKDDTFISQTKYTQDLLKRFGMKDAKPAKTPMGTDGHTDLNKGGKSVDQKAYQSMIGSLLYLCASRPDIMLSVCMCARFQSDPKECHLVAVKRILRYLVATPCFDLIGYSDSDYAGCKVDRKSTSGTCQFLGRSLVSWNSKKQTSVALSTAEAEYVAAGKCCAQLLWMRQTLQDFGYNLSKVPLLCDNESAIRMAGNPVEHNRTKHIDIRHHFLRDHQQKGDIEVFHVSTENQLADIFTKPLDEKTFCRLRSELNVLDSRNLD

SEQ ID NO: 10518 - protein, 1631 aa, Zea mays
  unsure (1)..(1631): unsure at all Xaa locations
  Clone ID: TF_ZM4926.C1.o9.fg.pep
MDPKGKGIVINDKEKESFVNEPKDDKPTDSGSGHKRRDGKKKKTMRINEIVYYDDSDGSSSSQKDNDDNDYDKRKTIHKNAQATTVLLASLCRDEYHKVSGLDNAKQIWDTLKISHEGNDVTLLTKMELVEGELGRFAIIRGEEPTQTYNRLKTLINKIRSYRSTQWTDHDVVRLMLRSFTVLDPHLVNNIRENPRYTKMSPEEVLGKFVNGRMMIKEARYVDDALNGPINEPQPFALKATRSKEALPSKVAQVEAAGLNDEEMALIIKRFKTTLKGHKGQLSKTKTKGKRSCFKCGKIGHFIANCLDNDSDQEQGNKREKKKAYKKAKGEAHLGKEWDSDCSSSDSDNEGLAATTFNKSSLFPNEHHTCLMAKEKKVCTRNNATYDSSSDEEIDYSSLFKGLDRTKIDKINELIDALNEKDKLLQKQEDLLYEEHDKFVEAQKSHALEVKRNEMLSCELSSCHETISSLRSINDDLNAKLVIASKSNSCVEHVMICNRCKDFDIDACSEHLVSISKLNDELASLNAQLKTSKNEFDKLKFARDAYTIGRHPSIKDGLGFKREAKDLTSYKAPISAKEKGKAPMASSAKRNHAFMYHDRRQSYRSCNANDAFVSHAMFASSSSYRHDRDMSRRNAVHMPRRNVVNIPRKVNEPSTIYHVLNASFAIYRKDRKIVARKLGAKCKGDKTCIWVPKDICTNLVGPNKSWVYASGGSSWIIDSGCTNHMTGEKKMFTSYVKNKDSQDLIIFGDGNQGKVKGLDVSVFRRSDGSLAFKGVLDGKLYLVDFAKEEAGLDACLIAKTSMGWLWHRRLAHVGMKNLHKLLKGEHVIGLTNVTFEKDRPCAACQAGKQVGGAHHSKNVMTTSRPLEPLHMDLFGPVAYLSIGGSKYGLVIVDDFSRFTWVFFLQDKTETQGTLKRFLRRAQNEFELNVKKIRSDNGSEFKNLQVEEYLEEEGIKHKFSAPCTPQQNGVVERKNRTLIDMARTMLGEFKTPECFWSEAVNTACHAINRVYLHRLLKKTSYELLTGNKPNVSYFRVFGSKCYILVKKGRNSKFAPKAVEGFLLGYDSNTKAYRVFNKSSGLVEVSSDVVFDETNGSPREQVVDFDDVDEEDVPTAAIRTMAIGDVRPQEQGERDQPSSSTMVHPPTQDDEQEVCDQGGAQDDHVIEEEAQPAPPTQVRAMIQRDHPIDQILGDISKGVITRSRLVNFCEHYSFVSSIEPFRVEEALLDPDWVLAMQEELNNFKRNEVWTLVPRPKQNVVGTNWVFRNKQDKHGVVTRNKARLVAKGYAQVAGLDFEETFAPVARLESIRILLAYAAHHSFRLFQMDVKSAFLNGPIKEEVYVEQPPGFEDERYPDHVCKLSKALYGLKQAPRAWYECLRDFLIANAFKVGKADPTLFTKTCDGDLFVCQIYVDDIIFGSTNQKSCEEFSRVMTQKFEMSMMGELSYFLGFQVRQLKDGTFISQTKYTQDLIKRFGMKDAKPAKTPMGTDGHTDLNKGGKSVDQKAYRSMIGSLLYLYASRPDIMLSVCMCARFQSDPKECHLVAVKRILRYLVATPCFGIWYPKGSTFDLIGYSDSDYAGCKVDRKSTSGTCQFLGRSLVSWSSKKXNFVALSTAEAEYVAAGXCCVQLLWM

SEQ ID NO: 10519 - protein, 635 aa, Zea mays
  Clone ID: TF_ZM4991.C3.o7.fg.pep
MDPKGKGIVINDKEKESFVNEPKDDKPTDSGSGHKRKDGKKKKTRRIKEIVYYDDNDESTSSQKDNDDNDYDKRKTVNSNFSFDYSRIPHSSNAHLLSIPLGKPPHFDGEDYGFWSHKMRSHLFSLHPSIWLIVENGMKFDSSDSPTFINEQIHKNAQATTVLLASLCRDEYHKMELVEGELGRFAMIRGEEPTQTYNRLKTLINKIRSYGSTRWTDHDVVHLMLRSFTVLDPHLVNNIRENPRYTKMSPEEVLGKFISGRMMIKEARYVDDALNGPIHEPQPIALKATRSKEVLPSKVAQVEAAGLNDEEMALIIKRFKTALKGRKGQPSKTKTKGKRSCFKCGKIGHFIANCLDNDSDQEQGGKREKKKAYKKAKGEAHLGKEWDSDCSSSDSENEGLAATAFNKSSLFPNERHTCLMAKEKKVCTRDSTTYDSSSDDESSDEQIDYSSLFKGLDRTKIDKINELIDALNEKDRLLEKQEDLLYEEHDKFVSAQNSLALEVKRNEMLSSEVSTCHDSISSLKRINNDLNAKLEVANKSNSCVEHVMICTRCKDFDIDACSEHLVCISKLNDEVASLNAQVKTSKSEFDKLKFARDAYTIGRHPSIKDGLGFKREAKNLTSHKAPISAREGPYG

SEQ ID NO: 10520 - protein, 1319 aa, Zea mays
  Clone ID: TF_ZmC951_407.pep
MLHQGEEPQAMYNRLKTLVNQVRNLGSTKWDDHEMVKVIFRSLVFLNPTQVQLIRGDPRYQLMSPEEVIGKFVSFELMIKGSKQIIERGATSTPEVQPVAFKATEEKKEESTSSRLPIDASKLDNEEMTLIIKRFRQILKQRKGKDYKPRSKKVCYKCGKPDHLIAKCPLSSDSDSGDDKKGKRREKKRYYKKKGGDAHVCREWDSDESSTDSSDEDATNIAVTKGLLFPNVGHKCLMAKDGKRKKVKSRSSTKYATSSDEASSSDDEDDLLTLFANLNMQQKEKLNELISAIHDKDELLDTQEDFLIKENKKHVKVKNAYAQEIEKCENLTSELSTCHDTISNLRFENDKLIAKVEKLNVCDDSIVNLRNDNASLIAKIDKLNASLSSLKVENEKLIAKAKDLNVCNVSISNLRDENAILHAKIVELNTCKPSTSTVSHVSICTRCRDVNVDAIHDHIAMIKQQNDNIAKLDAKIAEHELENEKFKFARSMLYSGRCPGIKDGIGFQKGDNVYASGGSSWIIDSGCTNHMIGEKKMFSSYEKNHDPQRAITFGDGNQGLEKSQTQETLKGFLRRAQNEFGLRIKKIRSDNGTEFKNSQIEGFLEDEGIKHEFSSPYTPQQNGVVERKNRSLLDMARTMLDEYKTSDRFWAEAINTACYAINCLYLHRILKKTSYELLTGKKPNVSYFRVFGSKCFILVKRGRKSNFAPKAVEGFLLGYDSNTRAYRVFNKSTRLVEVSGDIVFDETNGSQVEQVDLDELDDEETLCVTLRNMSIGDVCPKESKDSPQAQDQPSSSNQASPPTQDEDQAQDDENEDQEDEPPQEEGNDQGGDARDQDKDDNDGPRPPYPRVHQAIQRDHPVNSILDDIHKGVTTRSRVAHFCEHYSFVSSIEPYRVEDALRDSDWVLAMQEELNNFTRNEVWHLAPHPNQNVVGTKWVFRNKQDEHGVVTRNKARLVAKGYSQVKGLDFGETYAPVARLESIRILLAYATYHGFKFYQMDVKSAFLNGPIKEEVYVEQPPGFEDSEYPNYVYKLSKALYGLKQAPRAWYECLRDFLITNSFKVGKADPIIFTKNIAKDLFVCQIYVDDIIFGSTNKSTCEEFSRIMIQKFEMSMMGELKYFLGFQVKQLQEGTFICQTKYIQDILNKFGMKDAKPIKTPMGTNGHLDLDTRGCKIDKKSTSGTCQFLGRSLVSWASKKQNSVALFTAEAEYIAAGHCCAQLLWMGQTLRDYGYKLSKVLLLCDNESAIRMADNPVEHNRTKHIDIRYHFLRDHQQREDIEIAYVSTKEQLANIFTNPLDEKTFSKLRNELNILDSRNFD

SEQ ID NO: 10521 - protein, 529 aa, Zea mays
  Clone ID: TF_ZM4640.C5.o2.fg.pep
MLNIAQCSDREKVLYASGRLTGPAADWWDSYVVAHDAADTITWAEFTTEFRNYHILAGLMKIKKKEFLSLKQGNMSVSVYKDKFIKLSRYAPDEVRLLDKALAIEHKRVQLGDLKRKAITQGQGYTSSSRRRTTPSSVHSTGVSTDTSHSSGCPHWHPVRPTGQKTGPTCFKCSQVGHYANACPVGNSGTPAQNKQQTPSKGYSIARVNQVSADATPDGADITLGTFYVNAIPATILFDSGATHSFMSARYANTIEIPLQHMRKPMIVITPIGPVEANHITHKLALTIMGREIWATAIVLEESSIDLILGMSWLRKANDIIQCARGTVELTNPKGERFQVQIAVTTSSRRAMFFIAEEFVGENIRVVRDFPYVFPEELPGMPPERSLNDVTIKNKYSLPRIDDLFDQMRGARVFSKIDPRSGYHQMKIRPSDIPNTVFSTRYGLYEFTVMSFGLTNAPAYFMNLMNKVFMEYLDKFVVVLIDDILIYSKNDSYYWRFIEGFSKISKHMTSLLEKGKEFKWTEKCQESFD

SEQ ID NO: 10522 - protein, 1469 aa, Zea mays
  Clone ID: TF_ZmC119_1021.pep
MNPPNPPPGGVDPLVAAQMAVMQQMTDTMADMRAQMQQERQEMRQEREDIRQELRQEREEIRQERRAQQQQLQQQMQQQQQQQQQQQVPLPPPPPPVPPRDKHREFMSHKPPTFASSPDPLDADDWLKSIEKMLNIAQCTDREKVLYASGRLTGPAADWWDSYTAAHDAADTITWAEFSTQFRNYHIPAGMIKIKKKEFLSLKQGNMSVSEYRDKFIQLSRYAPEEVAEDERKQEHFIEGLNGPLQYALVAHTFPSFQRLLDKALAIEHKRVQLSDLKRKAISQGQGSSSVRPRYVPPQGTPTRPGGPRPVQYAPQGSPRTPTRQATPTGTPTRSTGQKTSPTCFKCSQIGHYANACPMGNSARVNQVSVDDTPDGGDIVLGMFYVNAIPATILFDSGATHSFMSARYANTNEIPLLNMRKLLIVITPKGPVEANQMTRRLTLTIMGREFGATAIILESSSIDLILGMSWLRKANAVIACGRGIVELTTTKGERFQVNIAVTSSSMRAMFFMPEEFVGDNIRVVRDFPDVFPEELPGMPPDREVEFVIDLLPGTAPISKRPYRMAVEELKELKKQLTELQEAGYIRPSSSPWGAPVLFVQKKDGSQRMCVDYRSLNDVTVKNKYPLPRIEDLFDQMRGARVFSKIDLRSGYHQMKIRPSDIPKTTFSTRYGLYEFTVMSFGLTNAPAYFMNLMNKVFMEYLDRFVVVFIDDILIYSRNESDHVQHLRLVLQKLRDNQLYAKFSKCEFWIDKVSFLGHIISNGGIAVDPAKVKEIMEWIVPTTVTEIRSFLGLAGYYRRFIEGFSKIAKPMTSLLEKGREFKWDEKCQESFDQLKERLMSPPVLIMPDLQKGFDIYCDACGQGLGCVLMQEGHVIAYASRQLRKHELNYPTHDLELAAVVHALKIWRHYVMGTKCQVYTDHKSLKYIFTQKDLNLRQRRWLELIKDYDLEIHYHPGKANLVADALSRKEHVHSAFVVQLPDELAKDFERLNLGIVTHTEGVTIELEPTLEQEIRKEGRGPEFTEDEQGTIWFKNRICVPDIDSLRETILKDAHDSVYSIHPGSTKIYQDLKQKYWWYGLKRDVAAHVAMCDVCQRVKAEHQRPAGLLHPLKIPEWKWEEIDMDFIVGLPRTSAGYDSIWVIVDRLTKVAHFIPVKTTYSGAKLAELYMARIVCLHGVPKKIVSDRGSQFTSRYWKKLHESLDTRLNFSSAYHPQTDGQTERTNQVLEDMLRACALKHGGSWDKSLSYAEFSYNNSYQASLKMSPFEALYGRKCRTPLYWDQTGERQLFGPEIIQEAEEQVQQIRENLRTAQSRQKSYADTRRRLLEFKEGDYVYLKVSPLRGMRRFKVKGKLSPRFIGPFLILKRVGEVAYQLELPDHLADVHDVFHVSQLKKCLRVPEEQLPMEDLSVQEDLTYAEYPIKILDTLTRVTRNKVIKMCKVQWSHHGEDEATWEREEELRIDFPHLFPRSS

SEQ ID NO: 10523 - protein, 1348 aa, Zea mays
  Clone ID: TF_ZM4625.C2.o3.fg.pep
MAEREEIRQERRAQQQLQQQFQQQQQQQQVPFPPPPPPVPPRDKHQEFMSHKPPTFASSPDPLDADDWLKSIEKMLNIAQCSDREKVLYASGRLIDPAADWWDSYTAAHDAADTITWVEFSTQFRNYHIPAGLMKIKKKEFLSLKQGNMSVSEYRDKFIQLSRYALDERLLDKALAIEHKRVQLGDLKRKAISQGQGSSSVCPRYVPPQGTPTRLGGPHPVQYAPQASPRTPPTRQATPNGTPTRPTGQKTDPTCFKCSQIGHYANACPMGNSGTPAKNKQQTPGKGYSIARVNQVSVDATPDGADIVLGMFYVNAIPATILFNSGATHSFMSTRYANTNEIPLLNMRKPMIVITPKGPIEANQMTRRLTLTIMGREFGATAIILEASSIDLILGMSWLRKAKAIIACGRGTIELTSPKGETFQVQFAVTTSSKRAIYFIPEEFVGDNIRVVTYFPDVFPEELPGMPPDREVEFVIDLLPGTAPISKRPYKMSVEELKELKKQLTELQEAGYIHLSSSPWGAPVLFVQKKDGSQRMCVDYRSLNDVTVKNKYPLPRIEDLFDQMRGARVFSKIDLLSGYHQMKIRPSDIPKTAFSTRYGLYEFTVMSFGLTDAPAYFMNLMNKVFMEYLDRFVVVFIDDILIYSKSESDHEEHLRLVLQKLRDNQLYAKFSKCEFWIDKVPFLGHIISNGGIAVDPVKVKEIMEWSVPTTVTEIQSFLGLAGYYRRFIEGFSKIAKPMTSLLEKGREFKWDEKCQDNFDQLKKRLMAPPVLIMPDLQKGFDIYCDACGQGLGCVLMQEGHVIAYASRQLRKHELNYPTHDLELAAVVHALKIWRHYIMGTKCQVYMDHKSLKYIFTQKDLNLRQRRWLELIKDYDLEIHYHPGKANLVTDALSRKEHGVTIELEPTLEQEIRKGQVGDAKIQEIKDLIMEGRVPDFTEDEQGTIWFNDRICVPEIDSLRETILKEAHDSDYSIHPGSTKMYQDLKQKYWWYGLKRDVAAHVAKCDVCQRVKAEHQSPAGLLHPLKIPEWKWEEIGMDFIVGLPRTPVGYDSIWVIVDRLTKVAHFIPVRTNYTGAKLVELYMTRIVCLHGVPKKIVSDRGSQFTSRFWKKLHESLDTRLNFSSAYHPQTDGQTERTNQVLEDMLRACALKHGGSWDKSLPYAEFSYNNSYQASLKMSPFEALYGRKCRTPLQKSYADNRRRLLEFKEGDHVYLKVSPIQGMRRFKVKGKLSPRFIGPFLILKRVGEVAYQLELLDHLSNVHDVFYVSQLKKCLTVPEEQLPMEDLSVQDDLTYAEYPIKILDTLTRVTRNKVIKMCKVQWSHHGEDEATWEREEDLRIDFPHLFPRPS

SEQ ID NO: 10524 - protein, 1712 aa, Zea mays
  unsure (1)..(1712): unsure at all Xaa locations
  Clone ID: TF_ZM5057.C1.o8.fg.pep
MDPKGKRIVINDKEKESFVNEPKDDKHTDSGSGHKRKDGKKKKTRRIKEIVYYDDSDESTSSQKDNDDNDYERRKPVNSNFSFDYSRIPQSTNAHLLSIPLGKPPHFDGEDYGFWSHKMRSHLFSLHPSIWEIVESGMKFDSSDSPMFINEQIHRNAQATTMLLASLCRDEYHKVSGLDNAKQIWDTLRISHEGNDVTLLTKMELVEGELGRFAMIRGVEPTQTYNRLKTLINKIRSYRSTRWTDHDVVRLMLRSFTVLDPHLVNNIRENPRYTKMWPEEVLGKFVSGRMMIKEARYVDDALNGPIHEPQPIALKATRSKEALPSKVAQVEAAELNDEEMALIIKRFKTALKGRKGQPSKTKTKGKRSCFKCGMVGHFIANCPDNDSDQEEGNKREKKKNYKKAKGEAHLGKEWDSDCSSSDSDNEGLAATTFNKSSLFPNEHHTCLMAREKKVSAHNTSTYASSSEDESSDDDEIDYSCLFKGLDRTRVDKINELIDALNDKNRLLEKQEDLLYDEHDKFVEAQKSLALEIKRNEMLSCELSTCHDSISSLKSINDDLNAKLEIANKSTSCVEHVVLCTRCKDFNIDACSEHLVSISKLNDEVASLNAQLKTSKSEFDKLKFARDAYTIGRHPSIKDGLGFKREAKNLTSHKAPIPAKEKGKAPMASSAKRNHAFMYHDRKQSYKSCNAYDAFDSHAMFASSSSYMHGKDMSRRYIVHMPRRNVVNVPRKVNEPSTIYHALNASFAICRKDRKIVARKLGAKCKGDKTCIWVPKTIVTNLVGPNKSWVYASGGSSWIIDSGCTNHMTGEKKMFTSYVKNKDSQDSIIFGDGNQGKVKGLDVSVIRRSDGSLAFKGVLDDTLYLVDFAKEEAGLDACLIAKTNMGWLWHRRLAHVGMKNLHKLLKGEHVTGLTNVQFEKDRPCAACQAGKQDKSETQGTLKRFLRRAQNEFELKVKKIRSDNGSEFKNLQVEEYLEEEGIKHEFSAPYTPQQNGVVERKNRTLIDMARTMLGEFKTPERFWSEAVNTACHAINRVYLHRLLKKTSYELLTGNKPNVSYFRVFGSKCYILVKKGRNSKFAPKVVEGFLLGYDSNTKAYRVFNKSSGLVEVSSNVVFDETNGSPREQVVDYDDVDEEEVPTTAIRTMAIGDVRPQEQDEQDQPSSSTMVQPPTQDDEQEACDQGGAQDDHVMEEEAQPAPPAQVRAMIQRDHPVDQILGDISKGVTTRSRLVNFCEHYSFVSSIEPFRVEEALLDPDWVLAMQEELNNFKRNEVWTLVPRPKQNVVGTKWVFHNKQDEHGVVTRNKARLVAKGYAQVAGLDFEETFAPVARLESIRILLAYAAHHSFRLFQMDVKSAFLNGPIKEEVYVEQPPGFEDERYPDHVCKLSKALYGLKQAPRAWYECLRDFLIANAFKAGKADPTLFTKTCDGDLFVCQIYVNDIIFGSTNQKSCEEFSRVMTQKFERSMMGELSYFLGFQVRQLKDGTFISQTKYTQDLIKRFGMKDAKPXKTPMGTDGHTDLNKGGXCHLVAVKRILRYLVATPCFGIWYPKGSTFDLIGYSDSDYAGCKVDRKSTSGTCQFLGRSLVSWSSKKQTSVALSTAEAEYVAAGQCCAQLLWMRQTLRDFGYNLSKVPLLCDNESAIRMADNPVEHSRTKHIDIRHHFLRDHQQKGDIEVFHVSSENQLADIFTKPLDEQTFCKLRSELNVLDSRNLD

SEQ ID NO: 10525 - protein, 831 aa, Zea mays
  unsure (1)..(831): unsure at all Xaa locations
  Clone ID: TF_ZmC10872_12.pep
MALIIKSFCQILKQRRGKDYKPRSKKVCYKCDKPGHFIAKCPLSSDSDKGDDKRKKRRXKKRYYKKKGGDAHVCREWDSDESSTDSSSDEDTTNIIVXTKGLLFPNVGHKCLMAKDDKKKVKSRASTKYATSSDEENSSDDEDNLLALFANLNMQQKEKLNELIGAIHEKYELLDNQEDFLIKENKKHVKVKNAYAQEVERCEKLTSELSTCHDIISNLRNENAKLIAKVEKLDVCDDSIVSLRNDNASLITKIDKFNASLSSLKIENKKLIAKAKDLNVCNVSISNLKNENAISHAKIDELNACKPSTSTVSHVSICTRCRDVNVDAIHDNIAMIKQQNDHIEKLDAKIAEHDMENENFKFARSMLYSGRCPGIGFQQGGNVKLNAPKRLSNFVKGKAPMPQDNEGYILYPAGYPEDKIKRIHAKKTHSVSHHAFIYKNEASSSRHSTHVKMPKMKSPIASNDHNISFKTFDASYVLTNKSGKVVAKYVGAKHKGSKTCVWVPKVYASGGSSWIIDSGCTNHMTGEKRMFSSYEKNHDPQRAITFGDGNQGLVKGLGKIAISPGHSISNVFLVDSLDYNLLSVSQLCKMGYNCLFTNIDVTVFRRSDDSVAFKGVLEGQLYLVDFNRAELDTCLIAKTNMGWLWHRRLAHVGMKNFHKLLKGEHILGLTNVHFEKDRICSACQAGKQVDVHHPHKNIMTTDRPLELLHMDLFGPIAYISIDGSKYYLVIVDDYSRFTWVFFLQDKSQTQETLKGFLRWAQNEFGLRIKKIRSDNGTEFKNSQIEGFLEDEGIKHEFSSPYTPQQNGVVERKNRTLLDMTRTKLDEYKTSE

SEQ ID NO: 10526 - protein, 1588 aa, Zea mays
  Clone ID: TF_ZmC4916_426.pep
MDPNGKGMMVNDKEKESIFNEPRDDNPLTQDQVTRRGTGRRRGRSRRSFTTTTTPPLLHQETTTTMTRLKRNRIWEIVENGMHFDSTDNPVFINEQIHKNAQATTVLLAFLCRDEYNKVSDLDNAKQIWDTLKISHEGNDTTMITKMELVEGELGRFAMIRGEEPTQTYNRLKTLVNKIRSYGSTRWTDHDVVRLMLRSFMVIDPHLVNLIRENPRYTKMTPEEILGKFVSGRMMVKEARYVDDALNGPLPVHEPQTIALKATSNREKLPSKVAQVEAAGLNEDEMALIIKRFKTALKGRKEYPNKNKARGKRSCFKCGNTGHSIAQCPDNDDDHEQEKHGKREKKKVYKKAKGKAHLGKEWDSDYSSSDSDDEGLAASAFNKSSLFPNECHTCLMAKEKKVSVRDSPKYSTSSDEDSSDDEVDYSTLFKGLDRAKVEKINELIDALNEKDRLLEKQEDILYEEHDKFVSAQKSLALETKRNEMLSSKLSACHESISRLKILNDDLNAKLEVANQSSSCVEHVVICNRCKDFDIDACDEHLTSITKLSDEVASLNAQLKTCKVDFDKQKFARDAYAIGRHPSIKDGLGFRKETRNLTSQKTPVLNKEKEKAPMASSSKKCHAYIYDRKFSRNAHYNRSYNAFNSHAMFASSSTFVHGRSKPRRNHVVHHVPRKVYASGGSSWIIDSGCTNHMTGEKKMFTSYVKNKDSQDSIIFGDGNQGKVKGLGKIAITSEHSISNVFLVESLGYNLLSMFLSLERSDGSLAFKGVLDNKLYLVDFSREEVDLDACLIAKTSMSWLWHHRLAHVGMKNLHKLLKGEHVLGLTNVCFEKDRPCATCQAGKLVGSTHHSKNVMTTSRPLELLHMDLFGPVAYLSIGGSKYGLVIVDDFSRFTWVFFLQDKSETQGTLKRFLRRAQNEFELKVKKIRSNNGSEFKNLQVEEYLEEEGVKNEFSAPYTPQQNGVVERKNRTLIDMVRTMLGEFKMLERFWSEAVNTACHAINRLYLHHLLKKTSYELLTDNKPNVSYFRVFGRKCYILAKKGRHSKFAPKAVEGFLLGYDSNTKAYRVFNKSSALVEVSSDVVFYETNGSPREQVDLDDINEDDVPTAAIRTMAIGDVRPQEQQEQDQPSSSIMVHPPTQDDGQVPQEEACDQGGAQEEQAMEEEAPPAPPTQVRATIQRNHPVDQILGDISKGVTTRSRLANFCEHYSFVSSIEPFRVEEALQDPDWVLAMQEQLNNFKRNEVWSLVPRPKQNVVGTKWVFRNKQDEHRVVTRNKARLVAKRLCPSRRLFQMDVKSAFLNGPIKEEVYVEQPPDFEDDRYPHHVCKLSKALYGLKQAPRAWYECLRDFLIANSFKVGKADPTLFTKTCNGDLFVCQIYVDDIIFGSTNQKSCEEFSRVMTQKFEMSMMGELNYFLGFQVKQLKDGTFISQTKYTQDLPMRFGMKDTKPAKTPMGTDGHVDLNKGGKSIDQKAYWSMIRSLLYLCASRPYIMLSVCMCARYQSDPRECHLVAVKRILRYLVSTPCFGIWYPKGSTFDLIGYSDSDYAGCKVDRKSTSGTCQFLGRSLVSWSSKKQTSIALSTAEAEYVAT

SEQ ID NO: 10527 - protein, 1667 aa, Zea mays
  Clone ID: TF_ZM4405.C4.o1.fg.pep
MNTVMKNNKSGIGYNAFVQKKAITQYKPKQTHKPIKCFECGNEGHFAHNCKAKPPTPLPKHSRPFAFNAHYVLRKVANGKIKVNYKTGGSHWVIDSGCTQHMTGNPRMFTSLDENVDGQDKITFGDNSKGKVQGLGKVAISNDLSISNVLLVAPLSFNLLSVGQLCDLGLQCLFTPSEVIVTKMDDESMVFKGFRYNNLYLVDFTSEDADLRTCLFTKASLGWLWHRRLAHVGMSTLKKVLKKDMVRGLKDVVFEKDKPCSACQAGKQVANTHPTKAFMSTSRPLELLHMDLFGPTNYVSAGGNLYCLVIVDDFSRYTWVFFLHDKSEVASIFKKFAKKAQNEFDCKIKKIRSDNGKEFDNTNIHEYCDEIGIKHEVSATYTPQQNGVVERKNRILITLARTMIDEYNTPERFWAEAVNTACYASNRLFPHRLLAKTPYELLNGKKPDVSFFRVFGCKCYIYKKRHHLGKFQRRCDIGFLLGYSLKSKAYRVFNHATGVVEETYDVEFDETNGSQGALENLDDVGDEPLREAMKNMPIGAIKPKEDEEEVQIIDRPSSSNVPQDDEKYERHANEDTFVSYEQARVQAEDVDAPGSSSQVVDRRNSSLLQAHPESQIIGSPSQGVITRSHRHATFIEHHSFVSCVEPTCIDEALQDPDWVNAMHEELNNFTRNEVWTLEKPPQDARIIGTKWVFRNKQDDQGVIVRNKARLVAKGFSQVEGLDFGETFAPVARLEAICILLAYASCYDIKLYQMDVKSAFLNGFINELVYVEQPPGFEDPRYPNHAYRLSKALYGLKQAPRAWYERLRDFLIEKGFKIGTVDTTLFTKKHNGDIFICQVYVDDIIFGSTNDYHCKEFGELMSKEFEMSMIGELTYFLGFQVKQMKDGNFLSQEKYTKDLLKRFNMEKCKPIKTPMPTNGHLDLDEGGNPVNQTLYRSMIGSLLYLTASRPDIMFSVCMCARFQSNPKKAHLRAVKRILRYLRHTTSVGLWYPKGATFDLIGYSDSDYGGCKIDRKSTSGGCHLLGRSLVSWTSKKQNSVALSTAEAEYIAAGACCTQILYMKQTLLDYGVVLEKVPLLCDNESAVKIANNPVQHSRTKHIDIRHHFLRDHVAKGDIILEGVRHQIRMPRTKNASAPGGGDDEEPRRPFRQVKGKTVYLEQQEGRKKRYVPVESWLPAQRDPAAGDLFSTRIQESFFRAQMSAQIALRVHRLLDLPAFLLAAGADSEAHLTYLPGLQTLLTISGRYVEEWVRVFYASVWIDPDHHWIRFRFEREDVTITASQIRQLFGFPESTTRLHSLCYGSSDPPHRPHGGVAPGTAHVAALFRPPFTDGSRRSPADFTTAAKYLYELIRRTLLPRMGYREATTHIQLWLLGALVSHSEFDVVDFLICEIEDTVLDGIRARRQLPYAHYLCHIFAQLIQPPRFQSTLEASRLFDTQGTTADDDDDDDDFGVPPPPPPPMPPRSHDHEAGSSRAAPAPPSAMDPALATILANLAAEQARLSETMLSMFQSMQDRQDALQQQLLQDRAESRAFMALMLQHSGISAPPVQSAPPPPLHAPVVPSILSGPPVGTSPLRPVTLAFTSPVLSSVCPQPPVPPASAVTTTAVAVSVTASVPVAPAARPQSESVPAPASTADPGSETDSDPPPAFALLPRPRPNAPPPPPPASDV

SEQ ID NO: 10528 - protein, 1482 aa, Zea mays
  Clone ID: TF_ZmC3792_17.pep
MSDNRRRCNRRAQQEQHDQQEENQRQPPPPPPMSVEQMFLMQTQAVQAIGQTLAAMQQAQQQPQPQLQVQMPQMPRDKRGEFMRGHPPTFAHSADPMDAEDWLRAVERELRTAQCDDREKVLYGPRQLRGAAQSWWESYLATHADPEAITWEEFSESFRRYHVPEGLMIVKKEEFLALKHGPMSVSEYRDKFLQLSRYAPEDVNTDAKRQYRFMRGLVDPLHYQLMNHTFPTFQHLIDRAVMTEKKRKDMEDRKRKMSGPQSGGISRPRFSGSSSQQGRPGHPQGYQNQNQRPHQQQFQRQYPQQQQQYRQHSQQGGNQYQKQNNQAPRLPAPAANQSNQAAPAQGGGRGCFHCGDQGHWAMQCPKKMAQQQTNPNAPARQGVLQPAAGNRNQAYNRGKVNHLEAEAIQDAPDVAVGMFSVESHPAKVLFDTGATHSFVTATWVELHNISVEAMVPPMRINSVGGKVQTDKICSNIMVEIRGIGFPSDLIVIGTPGIDVILGMNWLMKYEANVSCDKRTITLKSPSGEEVVAELRMPKSEEGVCHQISVDSKEPNPLEAIKVVSDFPDVFPEELTGMPPERKVEFAIELIPGTAPISKRAYRVSGPELVELKKQIDEMLEKGYIRPSTSPWAAPVLFVEKKDGTKRMCIDYRALNEVTVKNKYPLPRIEDLFDQLRGASVFSKIDLRSGYHQLRIRPSDIPKTAFITKYGLYEFTVMSFGLTNAPAFFMYLMNSVFMDYLDKFVVVFIDDILIYSQSEEDHVEHLKMVLQRLREHQLYAKLGKCEFWIHEVLFLGHIINQDGLAVDPKKVADILNWKAPKDVRGIKSFIGMAGYYRRFIEGFSKIARPMTALLAKKVEFKWTQKCQEAFEELKNRLTTAPVLVLPDVHKSFSVYCDASYTGLGCVLMQEGRVVAYSSRQLKIHEKNYPTHDLELAAVVHALKTWRHYLYGQKCDIYTDHKSLKKSQVNMLASYPMPYELAKEFDRLSLGFLNSTQGVTVELEPTLEREIKEGQKDDENINKIRQLILEGRGKDFREDEEGVIWFKDRLCVPDLKPIRGLILKEAHETAYSIHPGSEKMYQDLKRRFWWYGMKREIAEYVAICVSCQRTKAEHQRPAGLLQPLRIPQWKWDEIGMDFIVGLPRTRAGYDSIWVVVDRLTKVAHFIPVKTTYTGATLAELYMSRIVCLHGVPKKIVSDRGTQFTSHFWQQLQEALGTHLNFSSAYHPQTDGQTERTNQILEDMLRACALQDKSGWDKRLPYAEFSYNNSYQASLKMSPFQALYGRSCRTPLHWDQPGERQVFGPDILLEAEENIKMVRENLKTAQSRQRSYADRRRRELSFEVGDYVYLKVSPIRGVRRFGVKGKLAPRYVGPYQIQAKRGEVAYQLDLPESLSAVHNVFHVSQLKKCLRVPEEQLPVEGLEVQEDLTYIEKPTQILEFADRVTRRNTIRMCKVRWGHHSEDEATWEREDDLKAKYPELFADQP

SEQ ID NO: 10529 - protein, 1454 aa, Zea mays
  Clone ID: TF_ZmC3792_22.pep
MPQMPRDKRGEFMRGHPPTFAHSADPMDAEDWLRAVERELRTAQCDDREKVLYGPRQLRGAAQSWWESYLATHADPEAITWEEFSESFRRYHVPEGLMIVKKEEFLALKQGPVSVSEYRDKFLQLSRYAPEDVNTDAKRQYRFMRGLVDPLHYQLMNHTFPTFQHLIDRAVMTEKKRKDMEDRKRKMSGPQSGGISRPRFSGSSSQQGRPGHPQGYQNQNQRPHQQQFQRQYPQQQQQYRQHSQQGGNQYQKQNNQAPRLPAPAANQSNQAAPAQGGGRGCFHCGDQGHWAMQCPKKLAQQQTNPNAPTRQGVLQPAAGNRSQAYNRGKVNHLEAEAIQDAPDVAVGMFSVESHPAKVLFDTGATHSFVTATWVELHNISVEAMMPPMRINSVGGKVQTDKICSNVRVEIRGIGFPSDLIVIDTPGVDVILGMNWLMKYEANVSCDKRTVTLKSPSGEEVVAELWMPKSVEGACHQISVDSKEPNPLEAIKVVSDFPDVFPEELTGMPPERKVEFAIELVPGTAPISKRAYRVSGPELVELKKQIDEMLEKGYIRPSTSPWAAPVLFVEKKDGTKRMCIDYRALNEVTVKNKYPLPRIEDLFDQLRGASVFSKIDLRSGYHQLRIRPSDIPKTAFITKYGLYEFTVMSFGLTNAPAFFMYLMNSVFMDYLDKFVVVFIDDILIYSQSEEDHVEHLKMVLQRLREHQLYAKLGKCEFWIHEVLFLGHIINQDGLAVDPKKVADILNWKAPKDVRGIKSFIGMAGYYRRFIEGFSKIARPMTALLAKKVEFKWTQKCQEAFEELKNRLTTAPVLVLPDVHKPFSVYCDASYTGLGCVLMQEGRVVAYSSRQLKIHEKNYPTHDLELAAVVHALKTWRHYLYGQKCDIYTDHKSLKYIFTQSELNMRQRRWLELIKDYELEIHYHPGKANVVADALSRKSQVNMLASYPMPYELAKEFDRLSLGFLNSTQGVTVELEPTLEREIKEGQKDDESINKIRQLILEGRGKDFREDEEGVIWFKDRLCVPDLKPIRELILKEAHETAYSIHPGSEKMYQDLKRRFWWYGMKREIAEYVAICDSCQRTKAEHQRPAGLLQPLRIPQWKWDEIGMDFIVGLPRTRAGYDSIWVVVDRLTKVAHFIPVKTTYTGATLAELYMSRIVCLHGVPKKIVSDRGTQFTSHFWQQLQEALGTHLNFSSAYHPQTDGQTERTNQILEDMLRACALQDKSGWDKRLPYAEFSYNNSYQASLKMSPFQALYGRSCRTPLHWDQPGERQVFGPDILLEAEENIKMVRENLKIAQSRQRSYADRRRRELSFEVGDYVYLKVSPIRGVRRFGVRGKLAPRYVGPYQIQAKRGEVAYQLNLPESLSAVHNVFHVSQLKKCLRVPEEQLPVEGLEVQEDLTYIEKPTQILEFADRVTRRNTIRMCKVRWGHHSEEEATWEREDDLKAKYPELFADQP

SEQ ID NO: 10530 - protein, 1805 aa, Zea mays
  Clone ID: TF_ZM3616.C5.o3.fg.pep
MARLRHTARKSVIPFLPSRLAERPLHRTVSGQSSHLERLHHRLREEQERRRQHREQQGSSSPPQREVESVRPRSSVAQLEAPPAPPRDVPAVGGATGGDPGGDPDDDDSDHSTESSEPQEAEGWVARPITRDAARGCHFHDALDTLLRQAFDRHTWSIEYRCVVYQHSCGRYPDRWEATCLVRRPEDDLRGAEAVSEHYSISERDTAEAAMQDAARRALSQYCSLFGGVADGLNLRYYPRRPTGSTESVVVSPVGEANPRLSSTVNLVAVLNTELDHSLDELSRARTEIAELRAELAERHHQEGGSPAPVGTQHPYRSPPRGHHTYGSPIVRSMLMYECLPQMSDNRRRCNRRAQLEQHDQQEENQRQPPPPPPMSVEQMFLMHTQAVQAIGQTLAAMQQAQQQPQPQLQVQMPQMPRDKRGEFMRGHPPTFAHSADPMDAEDWLRAVERELRTAQCDDREKVLYGPRQLRGAAQSWWEFYLATHADPEAITWEEFSESFRRYHVPEGLMIVKKEEFLALKQGPLSVSEYRDKFLQLSRYAPEDVNTDAKRQYRFMRGLVDPLHYQLMNHTFPTFQHLIDRAVMTEKKRKDMEDRKRKMSGPQSGGISRPRFSGSSSQQGRLGHPQGYQNQNQRPHQQQFQRQYPQQQQQYRQHSQQGGNQYQKQNNQAPRLPAPAANQSNQAAPAQGGGRGCFHCGDQGHWAMQCPKKTAQQQTNPNAPARQGVLQPAAGNRNQAYNRGKVNHLEAEAIQDAPDVAVGMFSVESHPAKVLFDTGATHSFVTATWVELHNISVEAMMPPMRINSVGGKVQTDKICSNIMVEIRGIGFPSDLIVIDTPGIDVILGMNWLMKYEANVSCDKRTITLKSPSGEEVVAELRMPKSEEGVCHQISVNSKEPNPLEAIKVVSDFPDVFPEELTSMPPERKVEFAIELIPGTAPISKRAYRVSGPELVELKKQIDEMLEKGYIRPSTSPWAAPVLFVEKKDGTKRMCIDYRALNEVTVKNKYPLPRIEDLFDQLRGASVFSKIDLRSGYHQLRIRPSDIPKTAFITKYGLYEFTVMSFGLTNAPAFFMYLMNSVFMDYLDKFVVVFIDDILIYSQSEEDHVEHLKMVLQRLREHQLYAKLGKCEFWIHEVLFLGHIINQDGLAVDPKKVADILNWKAPKDVRGIKSFIGMAGYYRRFIEVFSKIATPMTALLAKKVEFKWTQKCQEAFEELKNRLTTAPVLVLPDVHKSFSVYCDASYTGLGCVLMQEGRVVAYSSRQLKIHEKNSPTHDLELAAVVHALKTWRHYLYGQKCDIYTDHKSLKYIFTQLELNMRQRRWLELIKDYELEIHYHPGKANVVADALSRKSQVNLLASYPMPYELAKEFDRLSLGFLNSTQGVTVELEPTLDREIKEGQKDDENINKIRQLILEGRGKDFREDEEGVIWFKDRLCVPDLKPIRELILKEAHETAYSIHPGSEKMYQDLKRRFWWYGMKREIAEYVAICGSCQRTKAEHQRPAGLLQPLRIPQWKWDEIGMDFIVGLPRTRAGYDSIWVVVDRLTKVAHFIPVKTTYTGATLAELYMSRIVCLHGVPKKIVSDRGTQFASHFWQQLQEALGTHLNFSSAYHPQTDGQTERTNQILEDMLRACALQDKSGWDKRLPYAEFSYNNSYQASLKISPFQALYGRSCRTPLHWDQAGERQVFGPDILLEAEENIKMVRENLKTAQSRQRSYADRRRRELSFEVGDYVYLKVSPIRGVRRFGVKGKLAPRYVGPYQIQAKRGEVAYQLDLPESLSAVHNVFHVSQLKKCLRVPEEQLPVEGLEV

SEQ ID NO: 10531 - protein, 1441 aa, Zea mays
  Clone ID: TF_ZM4327.C5.o5.fg.pep
MSVEQMFLMQTQAVQAIGQTLAAMQQAQQQPQPQLQVQMPQMPRDKRGEFMRGHPPTFAHSADPMDAEDWLRAVERELRTAQCDDREKVLYGPRQLRGAAQSCEYRDKFLQLSRYAPEDVNTDAKRQYRFMRGLVDPLHYQLMNHTFPTFQHLIDRAVMTEKKRKDMEDRKRKMNGPQSGGISRPRFSGSSSQQGRPGHPQGYQNQNQRLHQQQFQRQYPQQQQQYRQHSQQGGNQYQKQNNQAPRLPAPAANQSNQAAPAQGGGRGCFHCGDQGHWAMQCPKKTAQQQTNPNAPARQGVLQPAAGNRSQAYNHGKVNHLEAEAIQDAPDVAVGMFSVESHPAKVLFDTGATHSFVTATWVELHSISVEAMMPPMRINSVGGKVQTDKICSNIMVEIRGIGFPSDLIVIDTPEIDVILGMNWLMKYEANVSWDKRTVTLKSPSGEEVVAELRMPKSEEGVCHQISVDSKEPNPLEAIKVVSDFPDVFPEELTGMPPERKVEFAIELIPGTAPISKRAYRVSGPELVELKKQIDEMLEKGYIRPSTSPWAAPVLFVEKKDGTKRMCIDYRALNEVTVKNKYPLPRIEDLFDQLRGASVFSKIDLRSGYHQLRIRPSDIPKTAFITKYGLYEFAVMSFGLTNAPAFFMYLMNSVFMDYLDKFVVVFIDDILIYSQSEEDHVEHLKMVLQRLREHQLYAKLGKCEFWIHEVLFLGHIINQDGLAVDPKKVADILNWKAPKDVRGIKSFIGMAGYYRRFIEGFSKIARPMTALLAKKVEFKWTQKCQEAFEELKNRLTTAPVLVLPDVHKSFSVYCDASYTRLGCVLMQEGRVVAYSSRQLKIHEKNYPTHDLELAAVVHALKTWRHYLYGQKCDIYTDHKSLKYIFTQSELNMRQRRWLELIKDYELEIHYHPGKANVVADALSRKSQVNMLASHPMPYELAKEFDRLSLGFLNSTQGVTVELEPTLEREIKEGQEDDENINKIRQLILEGRGKDFREDEEGVIWFKDRLCVPDLKPIRELILKEAHETAYSIHPGSEKMYQDLKRRFWWYGMKREIAEYVAICDSCQRTKAEHQRPAGLLQPLRIPQWKWDEIGMDFIVGLPRTRAGYDSIWVVVDRLTKVAHFIPVKTTYTGATLAELYMSRIVCLHGVPKKIVSDRGTQFTSHFWQQLQEALGTHLNFSSAYHPQTDGQTERTNQILEDMLRACALQDKSGWDKRLPYAEFSYNNSYQASLKMSPFQALYGRSCRTPLHWDQPGERQVFGPDILLEAEENIKMVRENLKTAQSRQRSYADRRRRELSFEVGDYVYLKVSPIRGVRRFGVKGKLAPRYVGPYQIQAKRGEVAYQLDLPESLSAVHNVFHVSQLKKCLRVPEEQLPVEGLEVQEDLTYIEKPTQILEVADRVTQRNTIRMCKVRWGHHSEEEATWEREDDLKAKYPELFADQP

SEQ ID NO: 10532 - protein, 1793 aa, Zea mays
  Clone ID: TF_ZM4454.C1.o11.fg.pep
MARLRHTARKSVIPFLPSRLAERPLHRTVSGQSSHLERLHHRLREEQERRRQHGEQQGSSSSPQQEVETVRPRSSVAQLEAPLVPPRDAPAVGGATGGDPDDDDSDHSTESSESQEAEGWVARPITRDAARGCHFHDALDTLLRQAFDRHTWSIEYRCVVYQHSRGRYPDRWEATCLVRRPEDDLRGAEAVSEHYSISERDTAEAAMQDAARRALSQYCSLFGGVADGLNLRYYPRRPTGSTESVVVSPVGEANPRLSSTVNLVAVLNTELDHSLDKLSRARTEIAELRAELAERHHQEGGSPAPVGTQHPYRSPPRGHHTYGSPVCADATGVLSWSSMTSRRKIRGSLPPPPPMSVEQMFLMQTQAVQAIGQTLAAMQQAQQQPQPQLQVQMPQMPRDKRGEFMRGHPPTFAHSADPMDAEDWLRAVERELRTAQCDDREKVLYGPRQLRGAAQSWWESYLATHANPEAITWEEFSESFHRYHVLEGLMIVKKEEFLALKQGPLSVSEYRDKFLQLSCYAPEDVNTDAKRQYRFMRGLVDPLHYQLMNHTFPTFQHLIDRAVMTEKKRKDMEDRKRKMSGPQSGGISRPRFSGSSSQQGRPAANQSNQAAPAQGGGRGCFHCGDQGHWAMQCPKKTAQQQTNPNAPARQGVLQPAAGNRNQAYNRGKVNHLEAEAIQDAPDVAVGMFSVESHPAKVLFDTGATHSFVTATWVELHSISVEAMMPPMRINSVGGKVQTDKICSNIMVEIRGIGFPSDLIVIDTPGIDVILGMNWLMKYEANVSCDKRTITLKSPSGEEVVAELRMPKSEEGVCHQISVDSKEPNPLEAIKVVSDFPDVFPEELTGMPPERKVEFAIELIPGTAPISKRAYRVSGPELVELKKQIDELLEKGYIRPSTSPWAAPVLFVEKKDGTKRMCIDYRALNEVTIKNKYPLPRIEDLFDQLRGASVFSKIDLRSGYHQLRIRPSDIPKTAFITKYGLYEFTVMSFGLTNAPAFFMYLMNSVFMDYLDKFVVVFIDDILIYSQSEEDHVEHLKMALQRLREHQLYAKLGKCEFWIHEVLFLGHIINQDGLAVDPKKVADILNWKAPKDARGIKSFIGMAGYYRRFIEGFSKIARPMTALLAKKVEFKWTQKCQEAFEELKNRLTTAPMLVLPDVHKSFSVYCDASYTGLGCVLMQEGRVVAYSSRQLKIHEKNYPTHDLELAAVVHALKTWRHYLYGQKCDIYTDHKSLKYIFTQSELNMRQRRWLELIKDYELEIHYHPGKANVVADALSRKSQVNMLASHPMPYELAKEFDRLSLGFLNSTQGVTVELEPTLEREIKEGQKDDENINKIRQLILEGRGKDFREDEEGVIWFKDRLCVPDLKPIRELVLKEAHETAYSIHPGSEKMYQDLKRRFWWYGMKREIAEYVAICDSCQRTKAEHQRPAGLLQPLRIPQWKWDEIGMDFIVGLPRTRAGYDSIWVVVDRLTKVAHFIPVKTTYTGATLAELYMSRIVCLHGVPKKIVSDRGTQFTSHFWQQLQEALGTHLNFSSAYHPQTDGQTERTNQILEDMLRACALQDKSGWDKRLPYAEFSYNNSYQASLKMSPFQALYGRSCRTPLHWDQPGERQVFGPDILLEAEENIKMVRENLKTAQSRQRSYADRRRRELSFEVGDYVYLKVSPIRGVRRFGVKGKLAPRYVGPYQIQAKRGEVAYQLDLPESLSAVHNVFHVSQLKKCLRVPEEQLPVEGLEVQEDLTYIEKPTQILEVADRVTRRNTIRMCKVRWGHHSEEEATWEREDDLKAKYPELFADQP

SEQ ID NO: 10533 - protein, 214 aa, Zea mays
  Clone ID: TF_ZM4581.C2.o10.fg.pep
MEDLSAMTTTTVIRKIAAFEISQKMGQEEPTSSRPYAFACDEKKKGKKKAPTPRSLSEEEEEEERKSKEREDVLHVGRRVTSGTTVQICPNAQKRGAKARHSQVSKLGMILQAKMILHGLTATNPHHSYHGHHTSALWQEDNTTAEVNKPGEGETMVCRLCYKECHKSYQCKVKTEDKQKQKLKQKPTSKISNTYINKVDKKVATPYLIKKKKN

SEQ ID NO: 10534 - protein, 1854 aa, Zea mays
  Clone ID: TF_ZM4889.C4.o1.fg.pep
MVLMARLRHTACKSVIPFLPSRLAERPLHRTVSGQSSHLERLHHHLREEQERRRQHREQQGSSSPPQQEVESVRPRSSVAQLEAPPAPPRDAPAVGGATGGDLGGDPDDDDSDHSTESSEPQEAEGWVARPITRDAARGCHFHDALDTLLRQAFDWHTWSIEYRCVVYQHGRYPDRWEATCLVRRPEDDLRGAEAVSEHYSISERDTAEATMQDAARRALSQYCSLFGGVADGLNLRYYPRRPTGSTESVVVSPVGEGNPRLSSTVNLVVVLNTELDHSLDELSRARTEIAELRAELAERHHQEGGSPAPIGTQHPYRSPPRGHHTYGSPMSDNRRRCNRRAQQEQHDQQEEHQRQPPPPPPMSVEQMFLMQTQAVQAIGQTLAAMQQAQQQPQPQLQVQMPQMPRDKRGEFMRGHPPTFAHSADPMDAEDWLRAVERELRTAQCDDREKVLYGPRQLRGAAQSWWESYLATHADPEAITWEEFSESFRRYHVPEGLMIVKKEEFLALKQGPLSVSEYRDKFLQLSRYAPEDVNTDAKRQYRFMRGLVDPLHYQLMNHTFPTFQHLIDRAVMTEKKRKDMEDRKRKMSGPQSGSISRPRFSGSSSQQGRPGHPRGYQNQNQRPHQQQFQRQYPQQQQQYRQHSQQGGNQYQKQNNQAPRLPAPATNQSNQAAPAQGGGRGCFHCGDQGHWAMQCPKKLAQQQTNPNAPTRQGVLQPAAGNHSQAYNRGKVNHLEAEAIQDAPDVAVGMFSVESHPAKVLFDTGATHSFVTATWVELHNISVEAMMPPMRINSVGGKVQTDKICSNIMVEIRGIGFPSDLIVIDTPGIDVILGMNWLMKYEANVSCDKRTVTLKSPSGEEVVAELRMPKSEEGVCHQISVDSKEPNPLEAIKVVSDFPDVFPEELTGMPPERKVEFAIELIPGTAPLSKRAYRVSGPELVELKKQIDEMLEKGYIRPSTSPWAAPVLFVEKKDGTKRMCIDYRALNEVTVKNKYPLPRIEDLFDQLRGASVFSKIDLRSGYHQLRIRPSDIPKTAFITKYGLYEFTVMSFGLTNASAFFMYLMNSVFMDYLDKFVVVFIDDILIYSQSEEDHVEHLKMVLQRLREHQLYAKLGKCEFWIHEVLFLGHIINQDGLAVDPKKVADILNWKAPKDVRGIKSFIGMVGYYRRFIEGFSKIARPMTALLAKKVEFKWTQKCQEAFEELKNRLTTAPVLVLPDVHKSFSVYCDASYTGLGCVLMQEGRVVAYSSRQLKIHEKNYPTHDLELAAVVHALKTWRHYLYGQKCDIYTDHKSLKYIFTQSELNMRQRRWLELIKDYELEIHYHPGKANVVADALSRKSQVHMLVSYPMPYELAKEFDRLSLGFLNSTQGVTVELEPTLEREIKEGQKDDENINKIRQLILEGRGKDFREDEEGVIWFKDRLCVPDLKPIRELILKEAHETAYSIHPGSEKMYQDLKRRFWWYGMKREIAEYVAICDSCQRTKAEHQRPAELLQPLRIPQWKWDEIGMDFIVGLPRTRASYDSIWVVVDRLTKVAHFIPVKTTYTGATLAELYMSRIVCLHGVPKKIVSDRGTQFTSHFWQQLQEALGTHLNFSSAYHPQTDGQTERTNQILEDMLRACALQDKSGWDKRLPYAEFSYNNSYQASLKMSPFQALYGRSCRTPLHWDQPGERQVFGPDILLEAEENIKMVRENLKIAQSRQRSYADRRRRELSFEVGDYVYLKVSPIRGVRRFGVKGKLAPRYVGPYQIQAKRGEVAYQLNLPESLSAVHNVFHVSQLKKCLRVPEEQLPVEGLEVQEDLTYIEKPTQILEFADRVTRRNTIRMCKVRWGHHSEEEATWEREDDLKAKYPELFADQP

SEQ ID NO: 10535 - protein, 1520 aa, Zea mays
  Clone ID: TF_ZM4985.C1.o5.fg.pep
MSDNRRAQQEQHDQQEEHQRQPPPPPPMSVEQMFLMQTQAVQAIGQTLAAMQQAQQQPQPQLQVQMPQMPRDKRGEFMRGHPPTFAHSADPMDAEDWLRAVERELCTAQCDDREKVLYGPRQLRGAAQSWWESYLATHADPEAITWEEFSENFRRYHVPEGLMIVKKEEFLDLKQGPLSVSEYRDKFLQLSRYAPEDVNTDAKRQYRFMRGLVDPLHYQLMNHTFPTFQHLIDRAVMTEKKRKDMEDRKRKMSGPQSGSISRPRFSGSSSQQGRPGHPQGYQNQNRRPHQQQFQRQYPQQQQQQYRQNSQQGGNQYQKQNNQAPRLPAPATNQSNQAAPAQGGGRGCFHCGDQGHWAMQCPKKMAQQQTNPNAPTRQGVLQPAAGNRGQAYNRGKVNHLEAEAIQDAPDVAVGMFSVESHPAKELFDTGATHSFVTAIWVEMHNISVEAMMPPMRINSVGGKVQADRICSNIRVEIRGIGFPSDLIVIDTLEVDVILGMNWLMKYEANVSCDKRTVTLKSPSGEEVVAELRMPKSAEGVCHQISVDSKEPNPLEAIKVVSDFPDVFPEELTGMPPERKVEFAIELIPGTVPISKRAYRVSGPELVELKKQIDELLEKGYIRPSTSPWAAPVLFVEKKDGTKRMCIDYRALNEVTVKNKYPLPRIEDLFDQLRGASVFSKIDLRSGYHQLRIRPSDIPKTAFITKYGLYEFRVMSFGLTNAPAFFMYLMNSVFMDYLDKFVVVFIDDILIYSQSEEDHVEHLKMVLQRLREKQLYAKLSKCEFWIHEVLFLGHIINQDGLAVDPKKVADILNWKAPKDVRGIKSFIGMAGYYRRFIEGFSKIARPMTALLAKKVEFKWTQKCQEAFEELKNRLTTAPVLVLPDVHKPFSVYCDASYTGLGCVLMQEGRVVAYSSRQLKIHEKNYPTHDLELAAVVHALKTWRHYLYGQKCDIYTDHKSLKYIFTQSELNMRQRRWLELIKDYELEIHYHPGKANVVADALSRKSQVNMLATYPMPYELAKEFDRLSLGFLNSIQGVTVELEPTLEREIKEGQKDDENINNIRQLILEGRGKDFREDEEGVIWFKDRLCVPDIKPIRKLILKEAHETAYSIHPGSEKMYQDLKRRFWWYGMKREIAEYVAICDSCQRTKAEHQRPAGLLQPLRIPQWKWDEIGMDFIVGLPRTRAGYDSIWVVVDRLTKVAHFIPVKTTYTGAMLAELYMSRIVCLHGVPKKIVSDRGTQFTSHFWQQLQEALGTHLNFSSAYHPQTDGQTERTNQILEDMLRAYALQDKSGWDKRLPYAEFSYNNSYQASLKMSPFQALYGRSCRTPLHWDQPGERQVFGPDILLEAEENIKMVRENLKIAQSRQRSYADRRRRELSFEVGDYVYLKVSPIRGVRRFGVKGKLAPRYVGPYQIQAKRGEVAYQLDLPESLSAVHNVFHVSQLKKCLRVPEEQLPVEGLEVQEDLTYIEKPTQILEFADRVTRRNTIRMCKVRWGHHSEEEATWEREDDLKAKYPELFADQP

SEQ ID NO: 10536 - protein, 1802 aa, Zea mays
  Clone ID: TF_ZM4995.C3.o5.fg.pep
MARLRHTAHKSVIPFLPSRLAERPLHRTVSGQSSHLERLHHRLREEQERRRQHGEQQGSSSSPQQEVETVRPRSSVAQLEAPLVPPRDVPAVGGATGGDPDDDDSDHSTESSEPQEAEGWAFDRHTWLIEYRCVVYQHSRGRYPDRWEATCLVRRPEDDLRGAEAVSEHYSISERDTAEAAMQDAARRALSQYCSLFGGVADGLNLRYYPRRPTGSTESVVVSPVGEANPRLSSTVNLVAVLNTELDHSLDELSRARTEIAELRAELAERHHQEGGSPAPVGTQHPYRSPPRGHHTYGSPIVRSMLMYECLPQMSDNRRRCNRRAQLEQHDQQEENQRQPPPPPPMSVEQMFLMQTQAVQAIGQTLAAMQQAQQQPQPQLQVQMPQMPRDKRGEFMRGHPPTFAHSADPMDAEDWLRAVERELRTPNATTGRSESFRRYHVPEGLMIVKKEEFLALKQGPMSVSEYRDKFLQLSRYAPEDVNTDAKRQYRFMRGLVDPLHYQLMNHTFPTFQHLIDRAVMTEKKRKDMEDRKRKMSGPQSGGISRPRFSGSSSQQGRSGHPQGYQNQNQRPHQQQFQRQYPQQQQQYRQHSQQGGNQYQKQNNQAPRLPAPAANQNNQAAPAQGGGRGCFHCGDQGHWAMQCPKKSAQQQINPNAPARQGVLQPAAGNRNQAYNRGKVNHLEAEAIQDAPDVAVGMFSVESHPAKVLFDTGATHSFVTATWVELHNISVEAMMPPMRINSVGGKVQTDKICSNIMVEIRGIGFPSDLIVIGTPGIDVILGMNWLMKYEANVSCDKRTITLKSSSGEEVVAELRMPKSEEGVCHQISVDSKEPNPLEAIKVVSDFPDVFPEELTGMPPERKVEFAIELIPGTAPISKRAYRVSGPELVELKKQIDEMLEKGYIRPSTSPWAAPVLFVEKKDGTKRMCIDYRALNEVTIKNKYPLPRIEDLFDQLRGASVFSKIDLRSGYHQLRIRPSDIPKTTFITKYGLYEFTVMSFGLTNAPAFFMYLMNSVFMDYLDKFVVVFIDDILIYSQSEEDHVEHLKMVLQRLREHQLYAKLGKCEFWIHEVLFLGHIINQDGLAVDPKKVADILNWKAPKDVRGIKSFIGMAGYYRRFIEGFSKIARPMTALLAKKVEFKWTQKCQEAFEELKNRLTTAPVLVLPDVHKSFSVYCDASYTGLGCVLMQEGRVVAYSSRQLKIHEKNYPTHDLELAAVVHALKTCRHYLYGQKCDIYTDHKSLKYIFTQSELNMRQRRWLELIKDYELEIHYHPGKANVVADALSRKSQVNMLASHPMPYELAKEFDRLSLGFLNSTQGVTVELEPTLEREIKEGQKDDENINKIWQLILEGRGKDFREDEEGVIWFKDRLCVPDLKPIRELILKEAHETAYSIHPGSEKMYQDLKRRFWWYGMKREIAEYVAICDSCQRTKAEHQRPAGLLQPLRIPQWKWDEIGMDFIVGLPRTRAGYDSIWVVVDRLTKVAHFIPVKTTYTGATLAELYMSRIVCLHGVPKKIVSDRGTQFTSHFWQQLQEALGTHLNFSSAYHPQTDGQTERTNQILEDMLRACALQDKSGWDKRLPYAEFSYNNSYQASLKMSPFQALYGRSCRTPLHWDQPGERQVFGPDILLEAEENIKMVRENLKTAQSRQRSYANRRRRELSFEVGDYVYLKVSPIRGVRRFGVKGKLAPRYVGPYQIQAKRGEVAYQLDLPESLSAVHNVFHVSQLKKCLRVPEEQLPMEGLEVQEDLTYIEKPTQILEFADRVTRRNTIRMCKVRWGHHSEEEATWEREDDLKAKYPELFADQP

SEQ ID NO: 10537 - protein, 1785 aa, Zea mays
  Clone ID: TF_ZM4158.C1.o6.fg.pep
MDPKGKGIVINDKEKESFVNEAKDDKPTDSGSGHRRKEGKKKKTRRIKEIVYYDDSDESTSSQKDDDHNDYEQRKPVNSNFSFDYSRIPQSSNSHLLSIPLGKPPHFDGEDYGFWSHKMRSHLFSLHPSIWEIVDSGMHFNSSDSPIFINEQIHKNAQATTVLLASLCRDEYNKLVEGELGRFAMIRGEETTQTYNRLKTLINKIRSYGSTRWTDHDVVRLMLRSFTVLDPHLVNNIRENPRYTKMSPEEVLGKFVSGRMMIKEARYVDDALNGPINEPQPFALKATRSKEALPSKVAQIEAVGLNDEEMALIIKRFKTVLKGHKGQPSKTKAKGKHSCFKCGKFGHFIANCPDNDSDQEKGNKRDSDNEGLAATAFNKSTLFPNERHTCLMAREKKVCTHNSTYASSSEDESSDEDEVDYSCLFKGLDRSKIDKINELIDALNEKNILLEKQEDLLYEEHDKFVEAQKSLALEIKRNEMLACEVSTCHDSISNLKSINDDLNAKLVEANKSNFCVEYVEICTRCKDINIDDYSEHLACISKLNEEVASLNAQLKTSKSDFEKLKFARDAYTVGRHPSIKDGLGFKREAKNLTSHKAPIPTKEKGKAPMATSTKRNHAFIYHDRRQTRNAYRSYNAYDDFSHAMFASSSSYVHNRNVGRRDVVHNMPRKNIIHAPRKVVNEPSTIYCALNASFAICRKDRKIIARKLGAKCKGDKTCIWVPKDICANLVGPNMSWVYASGGSSWIIDSGCTNHMTGEKKMFTSYVKNKDSQDSIVFGDGNQGKVKGLVESLGYNLLSVSQLCNMGYNCLFTNVDVSVFRRSDGSLAFKGVLDGKLYLVDFAKEEAGLDACLIAKTSMGWLWHRRLAHVGMKNLHKLLKGEHVIGLTNVQFEKDRPCAACQAGKQVGGAHHSKNVMTTSRPLELLHMDLFGPVAYLSIGGSKYGLVIVDDFSRFTWVFFLQDKSETQGTLKRFLRRAQNEFELKVKKIRSDNGSEFKNLQVEEFLEEEGIKHEFSAPYSPQQNGVVERKNRTLIDMARTMLGEFKTPECFWTEAVNTACHAIKKVYLHRLLKKTSYELLTGNKPNVSYFRVFGSKCYILVKKGRNSKFAPKAVEGFLLGYDSNTKAYRVFNKSSGLVEVSSDVVFDETNGSPREQVVDCDDVDEEDVPTAAIRTMAIGDVRPQEQDERDQPSSSIMVHPPTQDDERVHQQEACDQGGAQDDHVMEEEAEPAPPTQVRAMIQRDHPVDQILGDISKGVTTRSRLVNFCEHYSFVSSIEPFRVEEALLDPDWVLAMQEELNNFKRNEVWTLVPRPKQNVVGTKWVFRNKQDEHGVVTRNKARLVAKGYAQVAGLDFEETFAPVARLESIRILLAYAAHHSFRLYQMDVKSAFLNGPIKEEVYVEQPPGFEDERYPDHVCKLSKALYGLKQAPRAWYECLRDFLIVNAFKVGKADPTLFTKTCDGDLFVCQIYVDDIIFGSTNQKSCEEFSRVMTQKFEMSMMGELNYFLGFQVKQLKDGTFISQTKYTHDLLKRFGMKDAKPAKTPMGTDGHTDLNKGGKSVDQKAYRSMIGSLLYLCASRPDIMLSVCMCARFQSDPKECHLVAVKRILRYLVATPCFGLWYPKGSTFDLVGYSDSDYAGCKVDRKSTSGTCQFLGRSLVSWNSKKQTSVALSTAEAEYVAAGQCCAQLLWMRQTLRDFGYNLSKVPLLCDNESAIRMAENPVEHSRTKHIDIRHHFLRDHQQKGDIEVFHVSTENQLADIFTKPLDEKTFCRLRSELNVLDSRNLD

SEQ ID NO: 10538 - protein, 173 aa, Zea mays
  unsure (1)..(173): unsure at all Xaa locations
  Clone ID: TF_ZmC1020407_1.pep
LNYDPGWIKITVILSDANVPGEGELXIMSYIRGQRNLPGFNPDTRHCLYGLDADLIMLXLATHEVHFSILRDVVFTPGQQDKCFLCGQVGHLAANCEGKAKRKAGEYDEKGEAIVPKKPYQFLNNWNLREYLGYEFRMANPAFQIDFGRIVDDFIFMCFFVGNDFLPHMATLG

SEQ ID NO: 10539 - protein, 1055 aa, Zea mays
  unsure (1)..(1055): unsure at all Xaa locations
  Clone ID: TF_ZmC5679_1.pep
MGVPAFYRWLAEKYPMVVVDVVEEEPVEIEGVKVPVDTSKPNPNSLEFDNLYLDMNGIIHPCFHPEDRPSPTTFGEVFQCMFDYIDRLFVMVRPRRLLYMAIDGVAPRAKMNQQRSRRFRAAKDAADAAAEEERLREEFEREGRKLPPKQQSQTCDSNVITPGTEFMAVLSVALQYYIHRRLNYDPGWKQIKGXHKIIYVLPGQRNLSGFNPNTRHCLYGLDADLIMLALATHEVHFSILREVVYTPGQQDKCFLCGQVGHLAANCEGKVKRKAGEFDEKGGAIVPKKPYQFLNIWTLREYLEYEFRMPNPPFKIDFERIVDDFIFMCFFVGNDFLPHMPTLEIREGAINLLMAVYKKEFPSMGGYLTDSCTPDLSRVEHFIQAVGSYEDKIFQKRARLHQRQAERIKREKAQAKRGDDLDPHVRDDLIVPIQRFQGSRLASGAVPVPYEQNGSHKDNKERNSRARKAARVSTSGSSIASALVEAENDLEAQECENKEELKSMLKDALREKSDIFNSDNPEEDKVKLGEPGWRERYYEEKFGARTPEQIEEIRRDVVLKYTEGLCWVMHYYYEGVCSWQWFYPYHYAPFASDLSGLGQLNIKFELGTPFKPFDQLMGVFPAASAHALPLQYRRLMTDPNSPIIDFYPTDFEVDMNGKRYSWQGIAKLPFIDEDRLLAEIKKVEHTLTPEEARRNSIMCDMLFVNGSHPLSPYIYSLNSKFGHLPDKRRNEIKEKLDPSASGGMNGYITLCSGDPCPPIFRSPVDGLEDIMDNQVICSIYNLPDHHKHIAQPPVGVIMPKKIVEAGDLKPPPVLWHEDSGRRPHDNSNRQNPSGAISGRQLGEAAHRLVINSLNAQGRGQHSGTSMPYRTIMNGLHHLDVASPVSDQGMRPQVGQSAGPPGWYVPRGSVSNGQPPAYASSGSGHYQYESSGHSQYEQGNHGRQQSHPYARDGFHDTRGRVPPAYGYQQSNMYPSGPGLYGQPPSAYPGVHGGGYQPPPYGGGQQWQQQSYSSYAVRGPYGGRPPPTRADSGSQQPQNRYGALDRSNNRRPSSGYRR

SEQ ID NO: 10540 - protein, 131 aa, Zea mays
  unsure (1)..(131): unsure at all Xaa locations
  Clone ID: TF_LIB3060-078-Q1-K6-A1.pep
SFWVDNQXGXSDTVXDGSVPLYDREFTLHSTPLGGSSNTERVDKDDSRCFNCGSYSHAMKDCPKPRDNVAISNARKQHNLKRNQSNVNRVQNRYYQKTPGKFDDLKAGVLGPETRQCLGIGVLTIPFAVKI

SEQ ID NO: 10541 - protein, 406 aa, Zea mays
  Clone ID: TF_ZmC6869_1.pep
LLLFLDVAFLASRGVKRARVESKEPSVRVIYSDLTRESKRKLMQLMQQWSEWQARRMHHLEEAVEVTLESGEETYYPALHVGSEKSCAVSFWVDNQARESDTVDDGSVPLYDREFTLHSTPLGGSSNTERVDKDDSRCFNCGSYSHAMKDCPKPRDNVAISNARKQHNLKRNQSNVNRVQNRYYQKTPGKFDDLKAGVLGPETRQCLGIGENDPPPWLHRMRELGYPPGYLDVVDDEDRPSGITIFGDGEVKLEYEEGELSEQGEASPPKKKMTVEFPGINAPIPENGDQWLWGSTPPQSSGRHHSLDSRDFHDRGPPGADHYSPRYHSHDFGPLRPSIGRSHSDRGWRSPPRYDNPPADDGAWTPHSYPSRQHLGHYSSSSEMSSRHSRDKDRDRHDSRHYHHRR

SEQ ID NO: 10542 - protein, 1551 aa, Zea mays
  unsure (1)..(1551): unsure at all Xaa locations
  Clone ID: TF_ZmC951_287.pep
MSGASAKREFGTGEKPATSHGKAPSEESTNKVKGSPSHNKSGWSGDKKKMRKVVYYETDSLSPSTSGSDTPSVTSKLHERKKFSKIPLRYPRISKCTPLLSVPLGKPPMFDGEDYNMWSDKMRHHLTSLHTSIWDVVEIGVQREEYNKVQGLKSAKEIWDVLKTAHEGDEVTKITKQETIEEELGLFRLNQGEDPQAMYNRLKTLVNQVRNLGSTKWDDHEMVKVILRSLVFLNPTQVQLILGNPRYTLMSPEEVIGNFVSFELMIKGSKKIIELDGPSTSKAQPVAFKATEEKKEESTSSRQPIDASKLDNEEMALIIKSFRQILKQRRGKDYKPRSKKVCYKCGKPGHFIAKCLLSSDSDRGEDKKGKRREKKRYHKKRGGDAHVCRKWDSDESSSDSSSDEDAANIAVTKGLLFPNVGHKCLMAKNGKRKKVKSKSSTKYETSSDEDNCCDEEDNLRTLFANLNMQQKEKLNELISAIHEKDDLLDSQEDFLIKENKKHVKVKNAYALEVEKCEKLSSELSTCIDIIANLRNENAKLIAKVDSNVSYVSIPNLRDDNVNLLAKIEELNVSLASLRNENENLIAKAKDLDVCNASISDLRDKNDILRAKIVELNSCKPSTSTIEHVSICTRCRDINVDATHDHLALIKKQNDHIAQLNAKINEHDLENENFKFARSMLYNGRRPGIKDGIGFQKGDNVKLNAPPKRLSNFVKGKAPMPQDNEGYILYPAGYPESKIRRIHSRKSHSGPNHAFMYKGETSSSRQSTRAKLPRKKTPIASNDHNISFKTFDASYVLTNKSGKVYASGGSSWIIDSGCTNHMTREKKMFSSYEKNQDPQRAITFGDGNQGVTVFRRSDDSIAFKGVLEGKXSHTQETLKGFLRXAQNEFGLRIKKIRSDNGTEFKNSQIEGFLEEEGIKHEFSSPYTPQQNGVVERKNRTLLDMARTMLDEYKTSDRFWAEAVNTTCYAINRLYLHRIIKKTSYELLTGKKPSVSYFRVFGSKCFILVKRGRKSKFAPKAVEAFLLGYDSNTRAYRVFNKSTGLVEVSCDIVFDETYGSQVEQVDLDELDDEEAPCVVLRNMSIGYVCPKESKEPTQAQDQASSSMQASPPTQDEDQAQDDENEDQEDEPPQEEDNDQGXDDNDQEKEDEQEVXPYRVEDALRDSNRVLAMQEELNNFIRNEWVFRNKQDEHVVVTRNKARLVAKGYSQVEGLDFGETYAPIARLESIHILLAYATYHGFKLYQMDVKSAFLNGPIKEEVYVEQPPGFEDSEYPNHVYKLSKALYGLKQAPRAWYECLRDFLITNGFKVRKANPTLFTKTIANDLFVCQIYVDDIIFGSTNKSTCEEFSRIMIQKFEMSMMGELKYFLGFQVRQLQEGTFISQTKYIQDILTKFGMKDAKPIKTPMGTNGHLDLDTRGCKIDRKSTSGTCQFLGRSLVSWASKKQNSVAISTAEAEYIVAGHYCAQLLWMRQTLRDYGYKLSKVPPLYDNESAIRMADNLVEHSRTKHIAIRYHFLRDHQQRGDIEIAYVSTKEQLADIFTKSLDEKNLYQT

SEQ ID NO: 10543 - protein, 185 aa, Zea mays
  Clone ID: TF_LIB5117-003-Q1-PF1-H3.pep
PSPLPPLSPAIPSSSPPSTPRFRTLCDAACSAARPSPVSPAATVADGAPTPLQSYKDALLSPAPPHLHRRRLLAFLSSPVKKLCHKCYSAEHLVRDCRDPVRCRDCGRSGHLSSACKFEPLLPPSLVSPASHPPLPPRRLSNELLRSLSRSRSTSPPNSPMSRAPPREHWLDRYYREVEAERTIP

SEQ ID NO: 10544 - protein, 1844 aa, Zea mays
  Clone ID: TF_ZmC951_385.pep
MSGDHAKKEMETGDKPTTSHGKTSSEESRNKGKGKEKKSSSHKSHRSGDKKKKMRKVVYYETDTSSPSTSGSNASSITSKRHERKKFSKIPLRYPRISKRTPLLSVPLGKPPLFDGEDYNMWSDKMRHHLTSLHTSIWNVVEFGVQVPSVGDEDYDSDEVAQIHHFNSQATTILLASLTREEYNKVQGLKSAKEIWDVLKTAHEGDEVTKITKREMIEGELGRFMLHQGEDPQAMYNRLKTLVNQVHNLGSEKWDDHEMVKVILRSLVFLNPTQVQLIRGDPRYKLMSPEEVIGKFVSFELTIKGSKKIIEQGTSSTLEAQPVAFKATEEKKEESTSSRQPIDASKLDNEEMTLIIKSFRQILKQRRGKDYKPCSKKVCYKCGKPGHFIAKCLISSDSDRGDDKKGRRKEKKRNHKKKGGDAHVCHEWDSDESSTDSSSDEDAANIAVNKGLLFPNVGHKCLMAKDGKKKKVKSKSSTKYESSSDDNASDEEDNLRTLFANLNMQQKEKLNELISAIHEKDELLDTQEDFLIKENKKHVKVKNAYALEVEKCEKLSTLGLKMKKMLTKAKNLDVCNASISDLRSENDILHAKIVELKTCKPSTSTVEHVSICTRCRDVDIDAIHDHMVLIKQQNDHIAKLDAKIAEHELENENFKFARSMLYSGRRPGIKDGIGFQRGDNVKLNAPPKRLSNFVKGKAPIPQDNEGYILYPVGYPESKIRRIHSRKSHSGPNHAFMYKGETSSSRQSTHAKLPRKKTPTASNDSKISFKTFDASYVLTNKSGKVYASGDSSWIIDSGCTNHMTGEKKMFSSYEKNQDPQRAITFGDGNQGLVKGVTVFRRSDDSIAFKGVLEGQLYLVDFDRAELDTCLIAKTNMGWLWHRRLAHVGMKNLHKLLKGEHILGLTNVHFEKDRICSACQAGKQVGVHHPHKNIMTTDRPLELLHMDLFGPIAYISIGGSKYCLVIVDDYSRFTWVFFLQEKSQTQETLKGFLRRAQNEFGLRIKKIRSDNGTEFKNSQIEGFLEEEGIKHEFSSPYTPQQNGVVERKNRTLLDMARTMLDEYKTSDRFWAEAVNTACYAINRLYLHRILKKTSYELLTGKKPNISYFRVFGSKCFILVKRGRKSKFAPKTVEGFLLGYDSNTRAYRVFNKSSGQVEVSCDVVFDETNGSQVEQVDLDEIGDEEAPCIALRNMSIGDVCPKESEEPPNAQDQPSSSTQASPPTQNEDEAQVDEGGDQRDEPPQDDGNDQGGDANDQGKEDEEPRPPHPRAHQAIQRDHPVDTILGDIHKGVTTRSRVAHFCEHYSFVSPIESHRVEEALQDSDWVVAMQEELNNFTRNEVWHLVPCPNQNVVGTKWVFRNKQDEHGVVTRNKARLVAKGYSQVEGLDFGETYAPIARLESIRILLAYATYHGFKLYQMDVKSAFLNGPIKEEVYVEQLPVFEDSEYPNHVYKLSKALYGLKQAPRAWYECLRNFLITNGFKVGKADPTLFTKTLENDLFVCQIYVDDIIFGSTNESTCEEFSRIMTQKFEMSMMGELKYFLGFQVKQLQEGTFISQTKYTQDILSKFGMKDAKPIKTPMGTNGHLDLDTEGKSVDQKVYRSMIGSLLYLCASRPDIMLSVCMCARFQADPKEAHLTVVKRILRYLAYTPKFGLWYPRGSTFDLIGYSDADWAGCKIDIKSTSGPCQFLGRSLVSWASKKQNSVALSSAEAEYIAAGHCCAQLLWMRQTLRDYGYKLTKVPLLCDNESAIRMADNPVEHSRTKHIAIQYHFLRDHQQRGDIEIAYINTKEQLANIFTKPLDEKTFTKLRHELNILDSRNLYRYFAHIAQLYTFDHLFHITMTNVFFK

SEQ ID NO: 10545 - protein, 1655 aa, Zea mays
  unsure (1)..(1655): unsure at all Xaa locations
  Clone ID: TF_ZM3738.C1.o1.fg.pep
MSGGDGPPPVFDGDDFPYWKIRMEAYLEAIDIGVYKAATQGFPEPRDPTNLVGDEFNYEKWNAKAKNTLFRGLCKDVFNRVRNHKNAHDLWMDICALHEGTRSEREERYHIAMRKLNSFEMLANENANAMYSRLNILVEEVNGLGLTQISQPDVVRKILSVLPIDKYGHIVTVLHQMDLSVTTPTQILGKINAHEMKTTKMLKKXIEKASNLIQERKNSFPTKESPFLRWTATTVVSSVILLINATSPRRISSRARNKMTTMMKRRKRNSSRGRMGSKRGSTRRRMERHILLVTGSPTXESSSGSSSSEKENDEKVAAIAGDFSSPPPSPSSTSHICLMARGERKVQNDINIVDDSDSDSDSDEEFASPSYDELADLLKEYTQIIRKSKAKCDRLKNENESLNAKYDIVIKASDEIKEENKTMSSTVNELTNSLKDAKEKCDKLNEANRELQNRLVKIKEDYTQIKFDHDNLLVENELLSCKTHEAINPVVKIDVATSCDDLSQEEQTSLHAELTEKVEVLTLDNQKLKNYLTDATTRGNVAIENNDFNNELAVDNQRLKMSVQKFNKGQYLQNELLMNTVMKNNRSGHFAHNCKAKPPTPLPKHSRPFAFNAHYVLRKVANGKVNYKTGGSHWVIDSGCTQHMTGNPRMFTSLDENVDGQDKITFGDNSKGKVQGLGKVAISNDLSISNVLLVAPLSFNLLSVGQLCDLGLQCLFTPTEVIVTKMDDESMVFKGFRYNNLYLVDFTSEDANLRTCLFTKASLGWLWHRRLAHVGMSTLKKVLKKDMVRGLKDVVFEKDKPCSACQAGKQVANTHPTKAFMSTSRPLELLHMDLFGPTNYVSVGGNLYCLVIVDDFSRYTWVFFLHDKSEVASIFKKFAKKAQNEFDCKIKKIRSDNGKEFDNTNIHEYCDEIGIKHEVSATYTPQQNGVVERKNRTMITLARTMIDEYNTPEKFWAEAVNTACYASNRLFPHRLLEKTPYELLNGKKPDISFFRVFGCKCYIYKKHHHLGKFQRRCDIGFLLGYSLKSKAYRVFNHATGVVEETYDVEFDETNGSQGALENLDDVGDEPLREAMKNMPIGAIKPKEDEEEVQIIDMPSSSNVPQNDEKDERHANEDTFVSHEQARVQAEDIDAPGSSSQVVDRRNSSLLQAHPQNQIIESPSQGVITRSHRHASFIEHHSFVSCVEPTCIDEALQDPDWVNAMHEELNNFTRNEVWTLEKPPQDARIIGTKWVFRNKQDDQGVIVRNKARLVAKGFSQVEGLDFGETFAPVARLEAIRILLAYASCYDIKLYQMDVKSAFLNGFINELVYVEQPPGFEDPRYPNHAYRLSKALYGLKQAPRAWYERLRDFLIEKGFKIGTVDTTLFTKKHNGDIFICQVKQMKDGNFLSQEKYTKDLLKRFNMEKCKPIKTPMPTNGHLDLDEGGNPVNQTLYRSMIGSLLYLTASRPDIMFSVCMCARLQSNPKKAHLRAVKRILRYLRHTTSVGLWYPKGATFDLIGYSDSDYAGCKIDRKSTSGGCHLLGRSLVSWTSKKQNSVALSTAEAEYIAAGACCTQILYMKQTLLDYGVVLEKVPLLCDNESAVKIANNPVQHSRTKHIDIRHHFLRDHVAKGDIILEGVRLEDQLADIFTKPLDKTRFCMLRNELNILDLRNFM

SEQ ID NO: 10546 - protein, 1654 aa, Zea mays
  unsure (1)..(1654): unsure at all Xaa locations
  Clone ID: TF_ZM4509.C5.o5.fg.pep
MSGAHAKKEMVTGEKPATSHGKAPSGESDNKKREESPPRVKSHRSGDKKKKMKKVVYYKTDSSSPSTSSSDASSVTSKRHERKKFSKIPLRYPRISKRTPLLYVPLGKPPEPSVGDEGYDSDEVAQIRHFNSQATTILLASLSREEYNKVQGLKSAKEIWDVLKTAHEGDEVTKITKRETIEGELGRFMLHQGEEPQAMYNRLKTLVNQVRNLGSTKWDDHEMVKVILRSLVFLNPTQVQLIRGDPRYKLMSPEEVIGKFVSFELMIKGSKQIIERGATSTPEVQPVAFKATEEKKEESTSSRLPIDASKLDNEEMALIVKSFRQIRKQRRGKDYKPRSKNVCYKCGKHGHFIAKCPLSSDSDRGDDKKGRRQEKKYYKKKGGDAHVCREWDSDESSTDSSSDEDAANITVNKGLLFPNVGHKCLMAKDGKKKKVKSRASTKYATSSDEASSSDDGDDLLTLFANLNMQQKEKLNELISAIHEKDELLDSQEDFLIKENKKHVKVKNAYAQEIEKCEKITSEQSTCHNTISNLRFENDKLIAKVEKLNDSDDSLVNLRNDNANLIAKIDKLNASLSSLKIENEKLISKPKDSNVCNVSISNLRDENAILHAKIVELNTCKPSTSTVSHVSICTRCRDVNVDAIHDHIAMIKKQNDHIAKLDAKVAEHELENENFKFARSMLYSGRRPGINDGIGFQQGGNVKLNAPKRLSNFVKGKAPMPQDNEGYILYPAGYPKDKIRRIHAKKTHSVSHHAFIYKNEASSSRRSTHVKMPKKKSPIALNDHNISFKTFDASYVLTNKSGKVVAKYVGAKHKGSKTCVWVPKVLVSNVKGPKTVWVYASGGSSWIIDIGCTNHMNGGKRMFSSYEKNHDPQRAITFGDGNQGVTIFRRSDDSVAFKGVLEGQLYLIDFNRAELDTCLIAKTNMSWLWHRRLAHVGMKNLHKLLKGEHILGLTNVYFEKDRICSTCQAGKQVGVHHPHKNIMTTDRPLELLHMDLFGPIAYISIGGKTLKRFLRRAQNEFGLRIKKIRSDNGTEFKNSQIEGFLEDEGIKHEFSSPYTPQQNSVVERKNRTLLDMARTMLDEYKTSDRFWVEAVNTACYAINRLYLHRILKKTSYELLTGKKPNVSYFRVFGSKCFILIKRGRKPKFAPKAVEGFLLGYDSNTRAYRVFNKSTRLVEVSCDIVFDETNDSQVEQVDLDELDDEEAPCVALRNMSIGDVCPKESEEPPHAQDQPSSSNQASPPTQDEDQAQDDENEDQEEPPQEEDNNQGGDANDQYKEDDEGPAPPHRRVHQAIQRDHPVNSILGDIHKRRVEDALRDSDWVLAMQEELNNFTRNEVWHLVPRPNQNIVGTKWVFHNKQDEHGVVTRNKARHVAKEYSQVEGLDFGETYAPVARLESICILLAYATYHGFKLYQMDMKSAFLNRPIKEEVYVEQPPGFEDSEYPNHVYKLSKALYGLKQAPRAWYECLRDFLIANGFKVGKTDPTLFTKTIANDLFXMVQKFEMSMMGELKYFLGFQVKQLQXGTFISQTKYIQDILTKFGMKDAKPIKTPMGTNGHLDLDMGGCKIDRKSTSETCQFLERSLVSWASKKQNFVALSTAEAEYIAAGHCCTQLLWMRQTLRDYDYKLIKVPLLCDNESAIRMADNPVSTATLST

SEQ ID NO: 10547 - protein, 731 aa, Zea mays
  Clone ID: TF_ZM4581.C2.o19.fg.pep
MSGAHAKKEMVTGEKPATSHGKAPSGESDNKKREESPPRVKSHRSGDKKKKMKKVVYYKTDSSSPSTSSSDASSVTSKRHERKKFSKIPLRYPRISKRTPLLYVPLGKPPEPSVGDEGYDSDEVAQIRHFNSQATTILLASLSREEYNKVQGLKSAKEIWDVLKTAHEGDEVTKITKRETIEGELGRFMLHQGEEPQAMYNRLKTLVNQVRNLGSTKWDDHEMVKVILRSLVFLNPTQVQLIRGDPRYKLMSPEEVIGKFVSFELMIKGSKQIIERGATSTPEVQPVAFKATEEKKEESTSSRLPIDASKLDNEEMALIVKSFRQIRKQRRGKDYKPRSKNVCYKCGKHGHFIAKCPLSSDSDRGDDKKGRRQEKKYYKKKGGDAHVCREWDSDESSTDSSSDEDAANITVNKGLLFPNVGHKCLMAKDGKKKKVKSRASTKYATSSDEASSSDDGDDLLTLFANLNMQQKEKLNELISAIHEKDELLDSQEDFLIKENKKHVKVKNAYAQEIEKCEKITSEQSTCHNTISNLRFENDKLIAKVEKLNDSDDSLVNLRNDNANLIAKIDKLNASLSSLKIENEKLISKPKDSNVCNVSISNLRDENAILHAKIVELNTCKPSTSTVSHVSICTRCRDVNVDAIHDHIAMIKKQNDHIAKLDAKVAEHELENENFKFARSMLYSGRRPGINDGIGFQQGGNVKLNAPKRLSNFVKGKAPMPQDNEGYILYPA

SEQ ID NO: 10548 - protein, 550 aa, Zea mays
  Clone ID: TF_ZM4939.C2.o4.fg.pep
MDAQFDVTQEWLDRVKIARKGLRGTKRSLQVRLANRSPEVSGEAQPPWGGGSTALVNPDQSADVDPRAIDLAMKIAERMFLKMKEDEAKNKIEEEENDRWRPNDESTSSQGSSFKSTSHMCFIANGSDSESESEDEEEQESDSEDEDDLQQFFAQLSKKHRMSLLKLMKRAEEQKEMLHKQEDFLIRKIEDLEKLTKEHEKLKCSHDDLVQRYEDISIEQIKVVNHSSYIAQLENKNAMFKNTIERLNIENLALQEKHDMLVCSHNKFMDSHIMLEMAHEVVLTNLKSYQPHMCTCVEIETISPCANNCCYQASQSSIELEISGISDISITQENKELKEEVGRLRRSLTLLKGKCHAQPSHDNRDNMVKKLEKGTTVACTKPLQKNTKLFKKGMSKIHGKKINDHTICSNNVPMCFNKERSKRSDRRCYGCKEKGHEIGSCPHMKNKDLAQSRKMIIKKDESKRQMHCKDKHRICYNCRKKGHLFKVCPNGKTPKPNLSIHSNMLRRPKFDSCATKVMSSPHSRTKAVWVPKSLLANLDGPIMRWVPKCT

SEQ ID NO: 10549 - protein, 1391 aa, Zea mays
  unsure (1)..(1391): unsure at all Xaa locations
  Clone ID: TF_ZM5005.C1.o15.fg.pep
MEAYLEAIDIGVYKAATQGFLEPRNPTNLVGDEFNYEKWNAKAKNTLFRGLCKDVFNRVRNHKNAHDLWMDICALHEGTRSEREERYHIAMRKLNSFEMLANENANAMYSRLNILVEEVNGLGLTQISQQDVVRKILSVLPIDKYGHIVIVLHQMDLSVTTPTQILGKINAHDMYMHINDKDESYSKRKDLALKANQERKGKAKVQIEEESSSDDDLNANIALMVRKTTKMLKKLNREGIKFDSRKKKFFSSKRKPISEMDCYNCGELGHLAHQCNKPKKNKFKGKKEDDNDDEKKEKRFFKRKDGKHKRFHKKKNGKAYIVGDWLTDIESSSGSSSSEEENDEKVATIVGNFSSPPPSPSSTSHLCLMARGDRNIQNDIDITDDSDSDSDEEFASPSYDELADLLKEYTQIIRKSKAKCDKLKNENESLNAKYDIDKCDKLNEANRELKDRLVKIKEDYTKIKFDNDNLLVENELLSYNTHEAINPVVKIDVATSCDDLNQGEQTSVHDELTEKVEVLTLDNQKLKRYLTDATTRGKVAIENNDFNNELAVDNERLKNEVNYKTGGSHWVIDSGCTQHMTGNPRMFTSLDENVDGQDKITFGDNSKGKVQGLGKVAISNDLSISNVLLVAPLSFNLLSVGFRYNNLYLVDFTSEDVDLRTCLFTKASLGWLWHRRLAHVGMSTLKKVLKKDMVRGSKDVVFEKNKPCSACQAGKQVANTHPTKAFMSTSRPLELLHMDLFGPTNYVSAGGNLYCLVIVDDFSRYTWVLFLHDKSEVASIFKKFAKKAQNEFDCKIKKIRSDNGKEFDNTNIHEYCDEIGIKHEVSATYTPQQNGVVERKNRTLITLARTMIDEYNTPERFWAEAVNTACYASNRLFPHWLLAKTPYELLNGKKPDVSFRVFGCKCYIYKKRHHLGKFQRRCDIGFLLGYSFKSKEYRVFNHATGVVEETYDVEFDETNGSQGALENLDDVGDEPLREAMKNMPIGAIKPKEDEEEVQDIGRPSSSNVPQDDEKDERHANEDTFVSHEQARPTCIDEALQDLDWVNAMHEELNNFTHNQVWTLEKPPQDARIIGTKWVFRNKQDDQGVIVRNKARLVAKGFSQVEGLDFGETFAPVARLEAIRILLAYASCYDIKLYQMDVKSAFLNGFINEHVYVEQPPGFEDPRYPNHAYRLSKALYGLKQAPRAWYERLRDFLIEKGFKIGTVDTTLFTKKHNGDIFICQVYVDDTIFGSTNDYHCKEFGELMSKEFKMSMIEKYTKDLLKRFNMEKCKPIKTPMPTNGNPDLDEGGNPVNQTLYRSMIGSLLYLTASRPDIMFSVCMCARFQSNPKKVHLRSIKRILRYLRHTLSVGLWYPKGATFDLIDYSDSDYAGCKIDRKSTSGXCHLLGRSL

SEQ ID NO: 10550 - protein, 672 aa, Zea mays
  Clone ID: TF_ZmC4916_457.pep
MDPKGKGIVINDKEKESFVNEPRDDKSNDSGSGHKRRDGKKKKTRRIKEIVYYDSDESSSSQKDDDHDKQRKPVNSNFSFDYSRIPQSSNSHLLSIPLGKPPHFDGEDYGFWSHKMRSHLFSLHPSIWEIVDSGMHFNSSDSPIFINEQIHKNAQATTVLLASLCRDEYNKVSGLDNAKQIWDTLKISHEGNDATLLTKMELVEGELGRFAMIRGEEPTQTYNRLKTLINKIRSYGSTRWTDHDVVRLMLRSFTVLDPHLVNNIRENPRYTKMSLEEVLGKFVSGRMMIKEARYVDDALNGPINEPQPFALKATGNKEALPSKVAQIEAAGLNEEEMALIIKRFKTVLKGRNGQPSKTKTKGKRSCFKCGKLGHFIANCLDNDSDQEKGNKREKKKHYKKAKGEAHLGKEWDSDCSSSDSDNEGLAATAFNKSTLFPNECHTCLMAREKKVCTRNSTYASSSEDESSDEDEVDYSCLFKGLDRSKIDKINELIDALNEKNILLEKQEDLLYEEHDKFVEAQKSYALEVKRNEMLSFELSTCHETISTLKGVNNDLNAKLEVANKSNSCVENVVICNRCKDFDIDACSEHIASIAKLNNEVASLNAQLKTSKSEFDKLKFARDAYTIGRHPSIKDGLGFKREAKNLTSHKTPISTKEKGKAPVANSVKKNHAF

SEQ ID NO: 10551 - protein, 306 aa, Zea mays
  Clone ID: TF_ZmC8013_1.pep
METPPAKDGLKMFDGMGSTSAAMERVINSSSVELPLLTKANYHEWALVMQVSLEAMELWDAVEAVCKERPKDRRAMAAILRGVPPEMKAGLAVKKTAKEAWEAVRSMRIGDDRVKAASVQRLWKEYENVGFCDGESVGDFALRINGLVASLREMGETLEDHRVVKKILRVVPKRLKQVAVAIEMLTDLNTTTIEELVGRLRVAEDADADDAKAKEVSTEGVGQLLLTEAQWEARRRERNKQRKPRDGDKRRGNGDRGNNGDDEHSDGDDDASSMASGSSRRGWSRNKGQCFECGGYGHIARFCREK

SEQ ID NO: 10552 - protein, 394 aa, Zea mays
  Clone ID: TF_ZM4488.C6.o1.fg.pep
MGMIRKINLMGVPLQVEDILFNIDRKKQRKRGCLACGEKGHFRDSCPTMAKPKKERSRGKALTSVRTWDDSSSEDEPPRTRSHWSSSRSSRSSHKCLMARGNKSIPSSSDENSSDDEGLLENFETFANLNSELSTKIELLESSVPSNTADDDLIKKNEKLKAKLASSQNTIENLLEKMEILSIHNDELTTKLENIGSTPGASLVKILEIIKKDASTSCFDLMDDTNPCNQVLVENIVIETCSDEVAKENEQLRQEVARLGKALYDKKGKAKQIQLPQYNTTAGVNKPMEGETVICRLCHKESHKSFQCKTMTGDKPRQKLKQKPSSKISNTYIKKVDKKTATPYLIKKKKNGKVIAIKANKQANKGKGAKRIWVPKEIISTMKSTKKVWIPKGK

SEQ ID NO: 10553 - protein, 1483 aa, Zea mays
  unsure (1)..(1483): unsure at all Xaa locations
  Clone ID: TF_ZmC951_363.pep
MKKVVYYETDSLSPSTSGSKSASASSKRHERKKYSKMPLRYPRISKRTPLLSVALGKPPMLEGEDYSMWSDKMRHHLTSLHKSIWDIVEYGAQVPKKGEKDYDSEEVEQIQHFNSQATTILLASLSREEYNKVQGLKNAKEIWDVLKTVHEGDEVTKITKRETIEGELGRFMLYQGEEPQVMYNRLKTLVNQVRNLGSTKWDDHEMVKVILRSLVFLNPMQVQLIHGDPRYTLMSPEEVIGKFVSFELIIKGSKKIIEQGASSTPDVQPVAFKATEEKKEDSTPSRVPIDASKLDNEEMTLIIKSFRQILKQRRGKDYKSRSKKVCYKCGKPSHFIAKCPLSSDSDRDNDKRGKKKEKKRYYKKKGGDAHVCREWDSDESSIDSSSDEDAANIAITKGLLFPNVGHKCLMAKDDKRKKVKSKSSTKYETSRDEDNSSDDEDNLLILFANLNMQQKEKLNELISAIHEKDELLDSQEDFLIRKCEKLSSELSTCHDVISNLRNENAKLIAKVEKSNICDDSIVNLRNDNASSIAKIEKLNASLASLRNENEKLIAKAKELNVCNVSISNLRDENAILHAKIVELNSCKPSTSTIEHVTICTKCRDVNIDAIHDHIAMIKQQNDHIAKLDAKIAEHELENENFKFARSMLYSGRCPGIKDGIGFQQGGNVKLNAPPKRLSNFVKGKAPMPQNNEGYILYPAGYPEHKIRRIHYRKSHSGPNHDFMYKSEASSSRQSTHAKLPKKKTPIASNDHNISFKTFDASYVLTNKSGKVVAKYAGGKHNGSKTCVWVPKVYASGGSSWIIDSECTNHMTGENMFSSYEKNQDPQRAITFGDGNQGVTVFRRSDDSVAFKGVLEGQLYLVDFDRAELDTCLIAKTNMGWLWHRRLAHMGMKNLHKLIKGEHILGLTNVHFEKDRVCSACQAGKQEKSQTQETLKGFLRRAQNEFGLSIKKIRSDNGTQFKNSQIEGFLEEEGIKHEFSSLYTPQQNGVVERKNRTLLDMARTMLDEYKTSDRFWAEAVNTACYAINRLYLHRILKKTSYELLTGKKPNVSYFRVFGSKCFILVKRGRKSKFAPKAVEGFLLGFDSNTRAYRVFNKSTGLVEVSCDIVFDETNSSQVKQVDLDELDDEEAPCVTLRNMSIGDVCPKESEEPPQAQDQPSSPMQASPPTQDESEAQNDEGEDQEDEPPQEEGNDQGXDVNNQDKEDDXPHRVEEALQDSDWVLAMQEELNNFTRNKLYQMDVKSAFLNGPIKEEVYVEQPPGFEDKFSRIMTQKIEMSMMGELKYFLGFQVKQLQEGTFISQTKYIQDILTKFGMKDAKPIKTPMGTNGHLDLDTGGCKINRKSTSGTCQFLGRSLVSWASKKQNSVALYTAEAEYIAAGHCCAQLLWMRQTLRDYGYKLTKVPLLCDNESAIRIADNPVEHSRTKHIAIRYHFLRDHQQKGDIKIAYVNTKEQLADIFTKPLDEQTFTKLRHELNILDSRNFD

SEQ ID NO: 10554 - protein, 1089 aa, Zea mays
  unsure (1)..(1089): unsure at all Xaa locations
  Clone ID: TF_ZM4578.C3.o6.fg.pep
MYNRLKTLVNQVCNLGSTKWDDHEMVKVILRSLIFLNPTQVQLIHGDPRYKLMSPEEVIGKFVSFELMIKCSKQIIERGATSTPEVQPVAFKAMEEKKEEYTSSRLPIDASKLDNEEMALIIKSFRQILKQRKERDYKPHSKKVCYKCGKPSHFIAKCPLSSDSDRGDDKKGRRKEKKKYYKKKGGDAHVCREWDSDESSTDSSFDEDTANIAFNKGLLFPNVGHKCLMARDDKMKIKSRASTKYATSSEEENSSDDEDNLLALFTNLNMQQKEKLNELIAGVTVFRRSDDSVAFKGVLEGQLYLVDFNRAELDTCLIAKTNMGWLWHRRLAHVGMKNLHKLLKGEHILGLTNVHFEKDRICSACQAGKQVGVHHPHKNIMTTDRPLELLHMDLFGLIAYISIGGSKYCLVIVDDYSRFTWVFFLQEKSQTQETLKGFLRRTQNEFGLRIKKIRSNNGTEFKNSQIEGFLEDEGIKHEFSSPYTPQQNGVVERKNRTLLDMARTMLDEYKTSDRFWAEAVNIACYSINRLYLHRIIKKTSYELLTGKKPNVSYFRVFGSKCFILVKRGRKSKFAPKAVKGFLLGYDSNTRAYRVFNKSTGLVEVSCDIVFDETNGSQVEQVDLDELDDEEAPCIALRNMSIGDVCPKESEEPPHAQDQPSSSNQASPPTQDEDQAQDDENEDQEDEPPQEEGNDQGGDAHDQDKEDDEGPRPPHPRVHQVIQRDHPVNSILSNIHKGVTTRSCVAHFCEHYSFVSSIEPYRVEDALWDLDWVLAMQEELNNFTRNEVWHLVPRPNQNVVGTKWVFHNKQDEHGVVTRNKAQLVAKGYSQVEGLDFGETYAPVARLESIRILLAYASYHGFKLYQMDVKSAFLNGPIKEEVYVEQPPGFEDNVYDGGVEVFLGFQVKQLQEGTFISQTKYTQDILTKFGMKDVKPIKTPMGTNGHLDLNTGGCKIDRKSTSRTCQFLGRSLVSWASKKQNSVALSTAEAEYIAAGHCCAQLLWMRQTLRDYGYKLTKVPLLCDNESAIRMADNPVEHSRTKHIAIQYHFLRDHQQRGDIEIAYVSTKEQLADIFTKPLDEKTFTXLRHEL

SEQ ID NO: 10555 - protein, 428 aa, Zea mays
  Clone ID: TF_ZM4590.C5.o1.fg.pep
MSGDHAKKEMETGEKPTTSHGSTSSEESRTKRKEKKKDSSKGKEKRSSSHHKEKKEKSSSHKPHRSGDKKKRMRKVVYYETDSSSASTSGSDAASVTSKRQERKKYRDENYDEDEVAQIEHFNSQATTIFLASLSREEYNKVQGLKNAKEIWDLLKTAHEGDELTKITKRETIEGELGCFRLRQGEEPQDMYNRLKTLVNQVRNLGSKKWNDHEVVKVILRSLIFLNPTQVQLIRGNPRYTLMTPEEVIGNFVSFECMIKGSKKNNELDDPSTSEAQPVAFKATEEKKKESTPSRQPIDASKLDNEEMALIIKSFRQILKQRKRKDYKSRSKKVCYKCGKPSHFIAKCPLSSDSDRDNDKKGKRREKKRYHKKRGGDAHVCREWDSDESSTDSSDDEDAANIAVTKGLLFPNVGHKCLMAKDGKRKKP

SEQ ID NO: 10556 - protein, 1329 aa, Zea mays
  Clone ID: TF_ZM4903.C2.o1.fg.pep
MREIETGDKSASLGRTHSRESAHKHKEESSSSIKSQRKGKPPMFDGEYYSMWIDKMRHHLTSLHKSIWDIVEYGAQVPKEGDNDCDSEEVKQIQHFNSQATTILLASLSREEYNKVQGLKSAKEIWDVLKTAHEGYEVTKITKRETIEGELGRFMLHQGEEPQAMYNRLKTLVNQVRNLGSTKWDDHEMVKVILRSLVFLNPTQVQLIRGDPRYKLMSPKEVIGKFVSFELMIKGSKKIIEQGATSTPEVQPVAFKATKEEKKDSTPSRIPIDASKLDNEEMSLIIKSFRQILKQRRGKDYKPRSKKVCYKCGKPSHFIAKCPLSSDSDRGDDKKGKRREKKSSTDSSSDEDAANITVTKGLLFPNVGHKCLMEKDGKKKKVKSRSSTKYATSSDEDNCSDDEDNLLILFANLNMQQKEKLNELISVIHEKDELLDSQEDFLIKENKKHVKTKNAYAQEVEKNKKLTSELSTCHDTISSLRNENAKLIANVEKLDVCDDSIVNLRNDNASLIAKIDKLNASLTSLKFENEKLIAKAKDLNVCNVSISNLRDENAILHAKIVELNICKPSTSTVEHVYASGGSSWIIDSGCTNHMTGEKRMFSSYEKNQDPQRAITFGDGNQGVTVFRRSDGSVAFKGVLEGQLYLVDFNRVELDTCLIAKTNMGWLWHRRLAHVGMKNLHKLLKGEHILGLTNVHFEKDREKSQTQETLKRFLRRAQNEFSLRIKTIRSDNGTEFKNSQIEGFLEEEGIKHEFSSPYTPQQNGVVKRKNRTPLDMARTMLDEYKTSDRFWAEAVNTACYAINRNMSIGDVCPKESKEPPHAQDQPSSSMQAFQPTQDEDQAQDDEDEDQEEPPQEEDNDQGGDANDQDKEDDEGPRPPHPRVHQAIQRDNPMNTILGDIHKGPHRVEEAHQDSDWVLAMQEELNNFTRNEVWHLVPRPNQNVVGTKWVFSNKQDEHGVVTRNKPQLVAKGYSQVEGLDFGETYAPVARLKSIRILLAYATYHGFKLYQMDVKSAFLNGPIKEEVYVEQPPGFEDSEYPNHIYKLSKALYGLKQAPRAWYECLRDFLIANGFKVGKSDPTLFTKTIANDLFVCQIYVDDIIFESTNKSTCEEFSRIMIQKFEMSMMGELKYFLGFQAKQLQEGTFISQTKYIQDILAKFGMKDAKPIKTPMGTNGHLDLDTGGCKIDRKSTSGTCQFLGRSLVSWASKKQNSVALSTAEVEYIVVGHCCAQLLWMRQTLRDYGYKLTKVPLLCDNESAIRMADNPVEHSRTKHIVIRYHFLRDHQQRGDIEIAYINTKEQLADIFTKPLDEKTFTKLRHELNILDSRNFD

SEQ ID NO: 10557 - protein, 464 aa, Zea mays
  Clone ID: TF_ZM4983.C2.o13.fg.pep
MARRRSQKNKKTPPKKNNEVTLEVLLSDCSNYASWSTRVINAFRTIDSQLEQVLDKSIIPSNYDKENASEEDQRCIRLNYLAYDILSNSLSKEDYRAFIMNYNEYIPDAHGIWTRIKSKFNESKHISSYDAYTSFSPCETNPLKEEEENERWRLNDESTSPKENLKSQQPHSCTCIQIETILPCANACCSSTSKSSFELEFSGTKDDTCQELKEENEKLRTSLTQLKGKCTAQPSQDNRDYMVKKLETGTTVACTKSLEEKVKDLRIVKSKEQKKKINTSAKSLNHASMQGNIQGNDQATLHTKKSKKCSECFENGHLIRSCPYIKENGLIINKDDKHCFRCSKKGHLVKSCPYEEQKCIVLEKKIFTNHVASKKQGKKKSSRYDDRLWYICRKKGHQCKDCPIGNYPAPNLSIDSYVTRQSKIATCARKVMSLPSASTKDIWVPRSLMTNLDGPIKRWGPKYA

SEQ ID NO: 10558 - protein, 124 aa, Zea mays
  unsure (1)..(124): unsure at all Xaa locations
  Clone ID: TF_ZmC14166_328.pep
RYKQMSPEEVIGKFMSFELMIKDSKHIVNLEXGATFTPEVQPVAFKATEEKKEESTPSRLPINPSKLDNEEMTLIIKIFWXILKQRKGKPAXKRVCYRCGKSGHFIAKCPYTSDSDRDDDKKGK

SEQ ID NO: 10559 - protein, 1522 aa, Zea mays
  Clone ID: TF_ZmC951_355.pep
MSGDHAKKEMVTGEKPATSHGKTPSGEFGNKMKGSPSHNKSHWSGEKKKKMKKVVYYETDSSSPSTSGSNTPSITSKRHERKKFSKIPLRYPRIPKHTPLLSVPLGKPPVFEGEDYSMWSARMKGHLTSLHKSIWDVVEYGAQVPQVGDKDYDSDEADQIRHFNSQATTILLVSLSREEYNKVHGFETTKDIWDVLKTVHEGDEESQAMYNRLKTLVNQVRNLGSTKWDDHEMVKVILRSLVFLNPTQVQLIRGDPRYKLMSPEEVIRKFVSFELMIKGSKQIIERGATSTPEVQPVAFKATEEKKEESTSSRLPIDASKLDNEEMTLIIKSFCQILKQRRGKDYKPRSKKVCYKCGMPGHFIAKCPLSSDSDRGDDKKGRRKEKKKYYKKKGGDAHVCWEWDSDESSTDSSDEDAANITVNKGLLFHNVGHKCLMAKDGKKKVKSRASTKYATSSDEENSSDDEDNLLALFANPNMQQKEKLNELIGVIHEKDELLDSQEDFLFKENKKHVKVKNAYAQEVEKCEKLTSELSTCHDTIFNLRNENAKLIAKVENLNVCDDSLVKLKNDNANLIAKIDKLNESIASLKIENNKLITKAKNLNVCNDIVSNLRNENVMLHAKIDELNVCKPSTSTIEHVTICTRCRDINVDAIHDHLALIKQQNDHIAQLSAKINEHDLENENFKFARSMLYNGRRPGIKDDIGFQQGDNVKLNAPKKLSNFVKGKAPMVQDNEGYILYPAGYPEHKIRRIHSRKSHSGSHHAFMYKSEASSFRQSTHAKFPKKKTPTASNDHNISFKTFDASYVLTNKSGKVVAKYVGAKHKGSKTCVWVPKVYASGGSSWIIDSGCTNHMTGEKRMFSSYEKNHDPQRAITFGDGNQDIGVTVFTRSDDSVAFKGVLEGQLYLVDFNRAELDTCLIAKTNMGWLWHRRLAHVGMKNLHKLLKGEHILGLTNVHFEKDREKSQTQETLKGFLRWAQNEFGLRIKKIRSDNGTEFKNSQIEGFLEDEGIKHEFSSPYTPQQNGVVERKNRTLLDLARTMLDEYKTSDRFWAEAINTACYAINRLYLHRILKKTSYELLTGKKPNVSYFRVFGSKCFILVKRGRKSKFAPKDVEDFLLGYDSNTRAYRVFNKSTGLVEVSCDIVFDETNGSQVEQVDLDELDDEEAPCVALRNMSIGDVCPKESEEPPQAQDQPSSSIQASPPTQDEDQAQDDENEDQEKLPQEEDNDQGGDANDQNKEDDEGPRPPHPRVHQEIQQDHLVNSLLGDIYKGVTTRSRVAHFCEYYSFVSSIDPYRVKDALRDSDWLLAMQEELNNFTRNEVWHLVPHANQNVVGTKWVFHNKQDEHGVVTRNKARLVAKGYSQVEGLDFGETYAPIARLESIRILLAYAIYHGFKLYQMDVKSAFLNEPIKEEVYVEQPPGFKDSEYPNHVYKLSKVLYGLKQAPRAWYECLRDFLITNGFKVGKADPTLFTKTIANDLFVCQIYVDDIIFGSTNKSTCEEFSRIMIQKFEMSMMGELKYFLGF

SEQ ID NO: 10560 - protein, 542 aa, Zea mays
  Clone ID: TF_ZM4596.C2.o8.fg.pep
MYNRLKTMVNQVRNLGSTKWDDYEMVKVILRSLVFHSPTQVQLIRGDSRYKQMSSKEVIDKFVSFELMLKDSKHIVNSNQGATSTPDVQPVAFKPTKEKKEEPTPTSRFPIDASKLDNEKMTLIIKSFWHVLKQRKGKDYKPRSKRVCYRCGKSGHFIAKCPYTSDSDRDDDKKGKKEMTKKRYYNKKKGGEAHMGRKWDSDKSSTDSSFDEDAANIVINKGLLFPNVGHKCLMVKDSKKKKVHSRDTTKYTTSDDEGNSSDDNDDLTSLFANLSKDQKKKINELIETINEKDDILEYQEDLLIKENKKFVKLKDVYALEVEKCENLSKELNICNDSISCLITENVSLIYKIKELNACKPSTSTIEHVTVCTKCRDVNIDAMNDHLAMIKEQNDHINKLNAKIVEHELENENFKFARSMLYNGRRPSIKDVIGFQQGSQSNVKLNAPKNMLSNFVKGKAPMVQDREESSQASKAEHILGLTNVHFEKDRICSACQAGKQVGAHHPHKNIMMTERPLELLHMDLFGPIAYIIIGGRKSQTQET

SEQ ID NO: 10561 - protein, 323 aa, Zea mays
  Clone ID: TF_ZM4948.C1.o9.fg.pep
MSRDHAKREIMTGDKPASSGKTLSRESDNKYKEESSSSIKSHQRGDKKKRKNKVVYYETDSLSPSTSGTDSSTTSKRHEHKKYKVYNKVQGLKNAKEIWDVLKTAHEGDKVTKITKRETIEAEFGRFVLNKGEEPQVMYNRLKTMVNQVRNLGSTKWDDHEMVKVILRSLVFCNPTQLQLIRGDPRYKQMSPEEVIGKFVSFELMIKDSKHIVNLEQGATSTPEVQPVAFKATEEKKEESTLSRLPIDTSKLDNEEMALIIKSFRQILKQRRGKDYKPHSKRVCYRCGKSGHFIAKCPYSSESDRDEDKKGKKKYYKKKGGEA

SEQ ID NO: 10562 - protein, 1392 aa, Zea mays
  Clone ID: TF_ZmC119_1038.pep
MGGLAPVRNCDATVQVLGWGGHDTTGTPLRPSQVTNRERSMTQDVGRRRRSSASDSIGDWVLDEMEKGAGAMAPSTPTFTLRSILEKDKLNGTNYTDWIRNLRIVLRAEKKEDVLDTPLPEDPGENATAAAKTAYKKAMDANLEVSCLMLACMEPELQMQFESNHEVYDMIVALKDMFQTQARTERFNVSKAFLECKLAEGAAVGPHVIKMVGYSQRLEKLGFPISQELATDFILASLPPSYGNFITNYHMHGAERGLNELCGMLKTAEGDIKKSAGSSGHVMAVQNKPNFKKKGKSQKKKGKAKDTVSKPNQKPKAGPAADAECFYCKELGHWKRNCKQYLASIKDRGGKGTAAAGTLAIHITEIFLADSYINSWVFDTGSVAHICNSMQGMIRSRSVKRGEVDFRVGNNARVATLTVGTMQLHLPSGFILELNNCYLVPSMSQNIMSPSCLMKDGYSFASENNGCVISKNGMFVAFASIMNGLFILNLDDAPICNISAKRPRPNDLSPTYMWHCRLGHISENRMKKLHSDGLLTSFDFESYETCEACLLGKMTKAPFTGLPERTLDLLELIHTDVCGPMSTTARGGFQYFITFTDDFSRYGYVYLMKHKSESLEKFKEFQNEVENQRGKKIKALRSDRGGEYLSHEFSNHLKSCGIVPQLTPPGTPQRNGVSERRNRTLLDMVRSMMSQSDLPLSFWGYALETAAFTLNRVPSKSVVKTPYEMWTGKTPSLSFLKIWGCEVYVKRLQSDKLTPKSDKCMFVGYPKETLGYYFYHRSEGKVFVARNGVFLEKEFLKREKSKQKVYLEEVQDEPVGQDSTSDANVAEQVETSMARESPPQPRRSARLREARGEVLLLGNGEVLLLDNDEPATYSEAMMDPDSEKWHVAMRSEIDSMGENQVWNLVDPPDGVRPIECKWIYKKKKDMDGNVHIYKARLVAKGFRQVQGVDYDETFSPVAMLKSIRIILAIAAYFDYEIWQMDVKTAFLNGNLDEDVYMIQPEGFVDPINAGKICKLQKSIYGLKQASRSWNIRFDEVIKGLGFHQNEEEACVYKKESGSAVVFLILYVDDILLIGNDIPMLESVKASLKKSFSMKDLGEAAYILGIRIYRDRSKRLIGLSQDTYIDKVLKRFNMEQSKKGFIPMSHGKHLSQMQCPATANERERMSKVPYASAIGSIMYAMISTRPDVSYAISATSRYQADPGEDHWTAVKGILKYLRRTKDMFLVYGGKEELVVTGYTDASFQTDPDELKSQSGFVFTINGGAVSWKSSKQETVTDSTTEAEYIAASESAKEGVWIRKFLIELGVFPNASSPLNLYCDNNGAIAQAKEPRNHQKNKHVLRKFHLIREFIRRGEIKICKIHTDLNVADPLTKPLPQPKHEAHVRSMGIRYLLD

SEQ ID NO: 10563 - protein, 1424 aa, Zea mays
  Clone ID: TF_ZmC119_814.pep
MAPSTPTFTLRSILEKDKLNGTNYTDWIRNLRIVLRAEKKEDVLDTPLPEDPGENATAAAKTAYKKAMDANLEVSCLMLACMEPELQMQFETNHEVYDMIVALKDMFQTQARTERFNVSKAFLECKLAEGAAVGPHVIKMVGYSQRLEKLGFPISQELATDFILASLPPSYGNFITNYHMHGAERGLNELCGMLKTAEGDIKKSAGSSGHVMAVQNKPNFKKKGKSQKKKGKGKDTVSKPNQKPKAGPAADAECFYCKELGHWKRNCKQYLASIKDRGGKGTAAAGTLAIHITEIFLADSYINSWVFDTGSVAHICNSMQGMIRSTSVKRGEVDFRVGNNARVAALTVGTMQLHLPSGFILELNNCYLVPSMSRNIMSPSCLMKDGYSFASENNGCVISKNGMFVAFASIMNGLFILNLDDAPICNISAKRPRPNDLSPTYMWHCRLGHISENRMKKLHSDGLLTSFDFESYETCEACLLGKMTKAPFTGLPERTLVLLELIHTDVCGPMSTTARGGFQYFITFTDDFSRYGYVYLMKHKSESLEKFKEFQNEVENQRGKKIKALRSDRGGEYLSHEFSNHLKSCGIVPQLTPPGTPQRNGVSERRNRTLLDMVRSMMSQSDLPLSFWGYALETAAFTLNRVPSKSVVKTPYEMWTGKTPSLSFLKIWGCEVYVKRLQSDKLTPKSDKCMFVGYPKETLGYYFYHRSEGKVFVARNGVFLEKEFLKREKSKQKVYLEEVQDEPVGQDSTSDANVAEQVETSMARESPPQPRRSARLREARGEVLLLGNGEVLLLDNDEPATYSEAMMDPDSEKWHVAMRSEIDSMGENQVWNLVDPPDGVRPIECKWIYKKKKDMDRNVHIYKARLVAKGFRQVQGVDYDETFSPVAMLKSIRIILAIAAYFDYEIWQMDVKTAFLNGNLDEDVYMIQPEGFVDPINAGKICKLQKSIYGLKQASRSWNIRFDEVIKGLGFHQNEEEACVYKKESGSAVVFLILYVDDILLIGNDIPMLESVKASLKKSFSMKDLGEAAYILGIRIYRDRSKRLIGLSQDTYIDKVLKRFNMEQSKKGFIPMSHGKHLSQMQCPATANERERMSKVPYASAIGSIMYAMISTRPDVSYAISATSRYQADPGFVFTINGGAVSWKSSKQETVTDSTTEAEYIAASESAKEGVWIRKFLIELGVFPNASSPLNLYCDNNGAIAQAKEPRNHQKNKHVLRKFHLIREFIRRGEIKICKIHTDLNVADPLTKPLPQPKHEAHRSLPVILQNIHIITPIKSRDIGLDKTMHPLGPLLQIISEDMHGDLLKKVLFGTFESIVSQVVPKLGGYTPWVHLPKTLGGSCIPSKFLHLRAQAPMVTNEIVIEAMIKGLQPGPTTQYFARKPPQTLEKLLQKMDEYIRADNDFRQRREEAYRYSVRPKICIKTYK

SEQ ID NO: 10564 - protein, 1300 aa, Zea mays
  Clone ID: TF_ZmC119_998.pep
MAPSTPTFTLRSILEKDKLNGTNYTDWIRNLRIVLRAEKKEDVLDTPLPEDPGENATAAAKTAYKKAMDANLEVSCLMLACMEPELQMQFETNHEVYDMIVALKDMFQTQARTERFNVSKAFLECKLAKGAAVGPHVIKMVGYSQRLEKLGFPISQELATDFILASLPPSYGNFITNYHMHGAERGLNELCGMLKTAEGDIKKSAGSSGHVMAVQNKPNFKKKGKSQKKKGKGKDTVSKPNQKPKAGPAADAECFYCKELGHWKRNCKQYLASIKDRGGKGTAAAGTLAIHITEIFLADSYINSWVFDTGSVAHICNSMQGMIRSRSVKRGEVDFRVGNNARVAALTVGTMQLHLPSGFILELNNCYLVPSMSRNIMSPSCLMKDGYSFASENNGCVISKNGMFVAFASIMNGLFILNLDDAPICNISAKRPRPNDLSPTYMWHCRLGHISENRMKKLHSDGLLTSFDFESYETCEACLLGKMTKAPFTGLPERTLDLLELIHTDVCGPMSTTARGGFQYFITFTDDFSRYGYVYLMKHKSESLEKFKEFQNEVENQRGKKIKALRSDRGGEYLSHEFSNHLKSCGIVPQLTPPGTPQRNGVSERRNRTLLDMVRSMMSQVPSKSVVKTPYEMWTGKTPSLSFLKIWGCEVYVKRLQSDKLTPKSDKCMFVGYPKETLGYYFYHRSEGKVFVARNGVFLEKEFLKREKSKQKVYLEEVQDEPVGQDSTSDANVAEQVETSMERESPPQPRRSARLREARGEVLLLGNGEVLLLDNDEPATYSEAMMDPDSEKWHVAMRSEIDSMGENQVWNLVDPPDGVRPIECKWIYKKKKDMDGNVHIYKARLVAKGFRQVQGVDYDETFSPVAMLKSIRIILAIAAYFDYEIWQMDVKTAFLNGNLDEDVYMIQPEGFVDPINAGKICKLQKSIYGLKQASRSWNIRFDEVIKGLGFHQNEEEACVYKKESGSAVVFLILYVDDILLIGNDIPMLESVKASLKKSFSMKDLGEAAYILGIRIYRDRSKRLIGLSQDTYIDKVLKRFNMEQSKKGFIPMSHGKHLSQMQCPATANERERMSKVPYASAIGSIMYAMISTRPDVSYAISATSRYQADPGEDHWTAVKGILKYLRRTKDMFLVYGGKEELVVTGYTDASFQTDPDELKSQSGFVFTINGGAVSWKSSKQETVTDSTTEAEYIAASESAKEGVWIRKFLIELGVFPNASSPLNLYCDNNGAIAQAKEPRNHQKNKHVLRKFHLIREFIRRGEIKICKIHTDLNVADPLTKPLPQPKHEAHVRSMGIRYLLD

SEQ ID NO: 10565 - protein, 631 aa, Zea mays
  Clone ID: TF_ZM3660.C11.o1.fg.pep
MDANLEVSCLMVACMEPELQMQFETNHEVYDMIVALKDMFQTQARTERFNVSKAFLECKLAEGAAVGPHVIKMVGYSQRLEKLGFPISQELATDFILASLPPSYGNFITNYHMHGAERGLNELCGMLKTAEGDIKKSAGSSGHVMAVQNKPNFKKKGKAKDTVSKPNQKPKAGPAADAECFYCKELGHWKRNCKQYLASIKDRGGKGTAAAGTLAIHITEIFLADSYINSWVFDTGSVAHICNSMQGMIRSRSVKRGEVDFRVGNSARVAALTVGTMQLHLPSGFILELNNCYLVPSMSRNIMSPSCLMKDGYSFASENNGCVISKNGMFVAFASIMNGLFILNLDDAPICNISAKRPRPNDLSPTYMWHCRLGHISENRMKKLHSDGLLTSFDFESYETCEACLLGKMTKAPFTGLPERTLDLLELIHTDVCGPMSTTARGGFQYFITFTDDFSRYGYVYLMKHKSESLEKFKEFQNEVENQRGKKIKALRSDRGGEYLSHEFSNHLKSCGIVPQLTPPGTPQRNGVSERRNRTLLDMVRSMMSQSDLPLSFWGYALETAAFTLNRVPSKSVVKTPYEMWTGKTPSLSFLKIWGCEVYVKRLQSDKLTPKSDKCMFVGYPKETLGYYFYH

SEQ ID NO: 10566 - protein, 1107 aa, Zea mays
  Clone ID: TF_ZM4447.C1.o15.fg.pep
MAPSTPTFTLRSILEKDKLNGTNYTDWIRNLRIVLRAEKKEDVLDTPLPEDPSENATAAAKTTYKKAMDTNLEVSCLMLACMEPELQMQFETNHEMHDMIVALKDMFQTQARTERFNVSKAFLECKLAESAAVGPHVMKMVGYSQRLEKLGFPISQELATDFILASLPTSYGNFITNYHMHGAERGLNELCGMLKTAEGDIKKSAGSSSHVMAVQNKPNFKKKGKSQKKKGKAKDTVSKPNQKPKAGPAADAECFYCKELGHWKRNCKQYLASIKDRGGKGTTAAGTLAIHITEIFLADSYINSWVFYTGSVAHICNSMQGMIRSRSVKRGEVDFWVGNNARVAALTVGTMQLHLPSGFILELNNCYLVPSMSRNIMSPSCLMKDGYSFASENNGCVISKNGMFVAFASIMNGLFILNLDDAPICNISAKMPRPNDLSPTYMWHCRLGHISENRMKKLHSDGLLTSFDFESYETCEACLLGKMTKAPFTGLLERTLDLLELIHTDVCGPMSTTSRGGFQYFITFTDDFSRYGYVYLMKHKSESLEKFKEFQNEVENQRGKKIKALRSDRGGEYLSHEFSNHLKSCGIVPQLTPPGMPQRNGVSERHNRTLLDMVRSMMSQSDLPLSFWGYALETAAFTLNRVPSKSVVKTPYEMWTGKTPSLSFLKICGCAVYVKRLQSDKLTPKSDKCMFVGYPKETLGYYFYHRSEGKVFVARNGVFLEKEFLKREKSKQKVYLEEVQDEPVGQDSTSDANVAEQVETSMARESPPQPRRPIECKWIYKKKKDMDGNVHIYKARLVAKGFRQVQGVDYDETFSLMDVKTAFLNGNLDEDMYMIQPEGFVDPINAGKICKLQKSIYGLKQASRSWNIRFDEVIKGLGFHQNKEEACVYKKESGSSVVFLILYVDDILLIGNDIPMLESVKASLKKSFSMKDLGEAAYILGIRIYRDRSKRLIGLSQDTYIDKVLKRFNMEQSKKGFIPMSHGKHLSQMQCPATANERERMSKVPYASAIGSIMYAMISTRPDVSYAISATSRYQADPGEDYWTAVKGILKYLRRTKDMFLVYGSKKELFVTGYTDASFQTDPDELKSQSGFVFTINGGVVSWKSSK

SEQ ID NO: 10567 - protein, 1012 aa, Zea mays
  Clone ID: TF_ZM4489.C3.o3.fg.pep
MVGYSQRLEKLGFPISQELATDFILASLPPSYGNFITNYHMHGAERGLNELCGMLKTAEGDIKKSAGSSGHVMAVQNKPNFKKKGKSQKKKGKAKDTVSKPNQKPKAGPAADAECFYCKELGHWKRNCKQYLSSIKDRGGKGTAAAVPSMSRNIMSPSCLMKDDYSFASENNGCVISKNGMFLAFASIMNGLFILNLDDAPICNISAKRPRPNDLSPTYMWHCRMGHISENHMKKLHSDGFLTSFDFESYETCEACLLGKMTKAPFTGLPERTLDLLELIHTDVCGPMSTTARGGFQYFITFTDDFSRYGYVYLMKHKSESLEKFKEFQNEVENQRDKKIKALRSDRGGEYLSHEFSNHLKSCGIVPQLTPPGTPQRNGESERRNRTLLDMVRSMMSQSDLPLSFWGYALETAAFTLNRVPSKSVVKTPYEMWTGKTPSLSFLKIWGCEVYVKRLQSDKLTPKSDNCMFVGYPKETLGYYFYHRSEGKVFVAWNEAMMDLDSEKWQVAMRSEIDSMGENQVWNLVDLPDGVRPIECKWIYKKKKDMDGNVHIYKARLVAKGFRQVQGVDYDETFSLVAMLKSIRIILAIATYFDYEIWQMDVKTAFLNGNLDEDVYMIQPEGFVDPINAGKICKLQKSIYGLKQASRSWNIRFDEVIKGLGFHQNEEEACVYKKESGSAVVFLILYVDDILLIGNDIPMLESVKASLKKSFSMKDLGEAAYILGIRIYRDRSKRLIGLSQDTYIDKVLKRFNMEQSKKGFIPMSHGKHLSQMQCPATANERERMSKVPYASAIGSIMYAMISTRPDVSYAISATSRYQADPGEDHWTTVKGILKYLRRTKDMFLVYGGKEELVVTGYTDASFQTDPDELKPQSGFVFTINGGAVSWKSSKQETVTDSTTEAEYIAASESAKEGVWIRKFLIELGVFPNASSPLNLYCDNNGAIAQAKEPRNHQKNKHVLRKFHLIREFIRRGEIKICKIHIDLNVADPLTKPLPQPKHEAHMRSMGITYLLD

SEQ ID NO: 10568 - protein, 1188 aa, Zea mays
  Clone ID: TF_ZM4630.C4.o4.fg.pep
MAPSTPTFTLRSILEKDKLNGTNYTDWIRNLRIVLRAEKKEDVLDTPLPEDPGENATAAAKTAYKKAMDANLEVSCLMLACMEPELQMQFETNHERLEKLGFPISQELATDFILASLPPSYGNFITNYHMHGAERGLNELCGMLKTAEGDIKKSAGSSGHVMAVQNKPNFKKKGKSQKKKGKAKDTVSKPNQNPKAGPAADAECFYCKELGHWKRNCKQYLASIKDRGGKGTAAAGTLAIHITEIFLADSYINSWVFDTGSVAHICNSMQGMIRSRSVKRGEVDFRDGYSFASENNGCVISKNGMFVAFASIMNGLFILNLDDAPICNISAKRPRPIDLSPTYMWHCRLGHISENRMKKLHSDGLLTSFDFESYETCEACLLGKMTKAPFTGLPERTLDLLELIHTDVCGPMSTTARGGFQYFITFTDDFSRYGYVYLMKHKSESLEKFKEFQNEVENQRGKKIKALRSDRGGEYLSHEFSNHLKSCGIVPQLTPPGTPQRNGVSERRNRTLLDMVRSMMSQSDLPLSFWGYALETAAFTLNRVPSKSVVKTPYEMWTGKTPSLSFLKIWGCEVYVKRLQSDKLTPKSDKCMFVGYPKETLGYYFYHRSEGKVFVARNGVFLEKEFLKREKSKQKVYLEEVQDEPVGQDSTSDANVAEQVETSMARETPPQPRRSARLREARGEVLLLGNGEVLLLDNDEPATYSEAMMDPDSEKWHVAMRSEIDSMGENQVWNLVDPPDVQGVDYDETFSPVAMLKSIRIILAIAAYFDYEIWQMDVKTAFLNGNLDEDVYMIQPEGFVDPINAGKICKLQKSIYGLKQASRSWNIRFDEVIKGLGFHQNEEEACVYKKESGSAVVFLILYVDDILLIGNDIPMLESVKASLKKSFSMKDLGEAAYILGIRIYRDRSKRLIGLSQDTYIDKVLKRFNMEQSKKGFIPMSHGKHLSQMQCPATANERERMSKVPYASAIGSIMYAMISTRPDVSYAISATSRYQADPGEDHWTAVKGILKYLRRTKDMFLVYGGKEELVVTGYTDASFQTDPDELKSQSGFVFTINGGVVSWKSSKQETVTDSTIEAEYIAASESAKEGVWIRKFLIELGVFPNASSPLNLYCDNNGAIAQAKEPRNHQKNKHVLRKFHLIREFIRRGEIKICKIHTDLNVADPLTKPLPQPKHEAHVRSMGIRYLLD

SEQ ID NO: 10569 - protein, 1067 aa, Zea mays
  Clone ID: TF_ZM4992.C3.o2.fg.pep
MAPSTPTFTLRSILEKDKLNGTNHTDWIRNLRIVLRAEKKEDVLDSPLPEDPGENATAAAKTAYKKAMDANLEVSCLMLACMEPELQMQFETNHEVYDMIVALKDMFQTQARTERFNVSKAFLECKLAEGAAVGPHVIKMVGYSQRLEKLGFPISQELATDFILASLPPSYGNFITNYHMHGAERGLNELCGMLKTAEGDIKKSAGSSGHVMAVQNKPNFKKKGKSQKKKGKGKDTVSKPNQKPKAGPAADAECFYCKELGHWKRNCKQYLASIKDRGGKGTAAAGTLAIHITEIFLADSYINSWVFDTGSVAHICNSMQGMIRSRSVKRGEVDFRLTPPGTPQRNGVSERRNRTLLDMVRSMMSQSDLPLSFWGYALETAAFTLNRVPSKSVVKTPYEMWTGKTPSLSFLKIWGCEVYVKRLQSDKLTPKSDKCMFVGYPKETLGYYFYHRSEGKVFVARNGVFLEKEFLKREKSKQKVYLEEVQDEPVGQDSTSDANVAEQVETSMARESPPQPRRSARLREARGEVLLLGNGEVLLLDNDEPATYSEAMMDPDSEKWHVAMRSEIDSMGENQVWNLVDPPDGVRPIECKWIYKKKKDMDGNVHIYKARLVAKGFRQVQGVDYDETFSPVAMLKSIQIILAIAAYFDYEIWQMDVKTAFLNGNLDEDVYMIQPEGFVDPINAGKICKLQKSIYGLKQASRSWNIRFDEVIKGLGFHQNEEEACVYKKESGSAVVFLILYVDDILLIGNDIPMLESVKASLKKSFSMKDLGEAAYILGIRIYRDRSKRLIGLSQDTYIDKVLKRFNMEQSKKGFIPMSHGKHLSQMQCPAMANERERMSKVPYASAIGSIMYAMISTRPDVSYAISATSRYQADPGEDHWTAVKGILKYLRRTKDMFLVYGGKEELVVTGYTDASFQTDPDELKSQSGFVFTINGGAVSWKSSKQETVTDSTTEAEYIAASESAKEGVWIRKFLIELGVFPNASSPLNLYCDNNGAIAQAKEPRNHQKNKHVLRKFHLIREFIRRGEIKICKIHTDLNVADPLTKPLPQPKHEAHVRSMGIRYLLD

SEQ ID NO: 10570 - protein, 113 aa, Zea mays
  Clone ID: TF_uC-zmflteosinte082f08b1.pep
QQYSSSICSAPGYSSSSWRRAESSSGDSADTPHWSGCPLWRPGKARRQRTGPTCFKCSQVGHYAIACPMGNSNTPAQNKQQTPTSDKGFSIARVTQVSAEATPNGADIAIGMK

SEQ ID NO: 10571 - protein, 428 aa, Zea mays
  unsure (1)..(428): unsure at all Xaa locations
  Clone ID: TF_ZM4631.C1.o5.fg.pep
MDAEDWLRTVERELHTAQCNDREKVLYGPRQLRGTVQSSWESYLATHANPESITWEEFRDNFRRYHVPEGLMIVRKEEFLALKQGPLSVSEYRDKFLQLSRYVPEDVNTSKRQQXHFSHSSKVTSTSTSISIKTSNSSAKGSFLSSSSSTVRXNKQGGNQYQRQGNQAARLLAPATNQNNQAAPAQGGSRACFHCGEQGHWANHCPKKVAQKQPAPNAPVRQNAMQQGGNNRGQPRAQYGKVNHLESDTVQKTPGVALGEEVLWSWSCLDQXKGSCHQVTAHIEEIKPSEAINVVSEFPDVFPEELLGMPPERKVEFAIELIPGTTPISKRDYRVSGPELVELKKQIDELSEKGYIRPSTSPWAAPVLFVEKDGTKRMCIDYRSLNEVTIKNKYPLPRIEDLFDQLRGASLFSKIETRAMVGAPGFSI

SEQ ID NO: 10572 - protein, 641 aa, Zea mays
  Clone ID: TF_ZM4545.C3.o1.fg.pep
MSGDHTKKEVMTGEKPATSHEKTPSRESGSKVKGESPSHNKSHRSGDKEKKMKKVVYYETDSSSPSTSDSDTSSVTSKRHECKKFSQIPLRYPRFSKHTPLLSVPLGKPPVFRVKVPSLGDEDYDSDEVDQIRHFNSQATTILLASLSREEYNKVQGLKSAKEIWDVLKTAHEGDEVTKITKMETVEGKLGRFMLNQGEEPQAMYNRLKTLVNQVRNLGSTKWDDHEMVKEVIGKFVSFELMIKGSKKIIEQGASSTPEMQLVAFKATEEKKEESTSSRPPIDASKLDNEEMALIIKSFRQTLKQRRGKDYKPHSKKVCYKCGKPSHFIAKCPISSDIDRGDDKKGKRREKKRYYKKKGGDAHLCREWDSDESSTNSSDEDAANIVVNKGLVFPNVGHKCLMAKDGKKKKVKSRSSTKYATSSDEDNSSDDEDNLLTLFANLNMQQKEKLNELISAIHEKDELLDSQEDFLIKENNKHVKVKNAYAQEVERFDDCDNSIVSLRNDNANLIAKIDKLNESLSSLKIENDKLIAKAKELDVCNVSIFYLRNENAILHAKIDDLNACKPSTSSVDHVSICTRCRDINVDAIHDHLAMIKQQNDHIAKLDAKIAEHELENEKFKFARSMLYSGRRPGIKDGIGFQ

SEQ ID NO: 10573 - protein, 1622 aa, Zea mays
  Clone ID: TF_ZM4926.C2.o1.fg.pep
MSGEHAKKEMETGDKPATSHGKASSEESRNKKKGKEKKASSHKSHRSGDKKKKMRKVVYYETDTSSPSTSGSDAPSITSKRHERKKFSKIPLHYPRTSRHTPLLSVPLGKPPTFDGEDYARWSDLMKFHLTSLHKSIWNVVEFGAQVPSVGDEDYDEDEVAQIEHFNSQATTILIASLSREEYNKVQGLKSAKEVWDVLKTAHEGDELTKITKREMIEGELCRFHLRQGEEPQDMYNRLKTLVNQVRNLGSKKWDDHEVVKVILRSLIFLNPTQVQLIRGNPRYTLMTPEEVIGNFVSFEFMIKGSRKINELDGPSTSKAQPVAFKATEEKKEESTPSRTPIDASKLDNEEMALVIKSFRQILKQRRGKDYKPRSKKVCYKCGKPSHFIAKCPISSDSDRGDDKKGRRKEKKWYYKKKGGDAHVCREWDSDESSSDSSDDEDAANIAVTKGLLFPNVGHKCLMAKDDKKKKVKSKSSTRYESSSDDNASDEEDNLRTLFANLNMQQKEKLNELISAIHEKDDLLDSQEDFLIKENKKHVKVKNSYALEVEKCEKLSSELSTCHETIDNLRNENANLLAKVDSIACNVSIPNLRNDNDDLLAKIEELNMSLASLRIENEKLHAKVVELKSCKPSTSIVEHTSICTRCRDVDVNAIHDHMALIKQQNDRIAKLDAKIAEHEHENEKFKFARSMIYSGRRPGIKDGIGFQKGNNVKLNAPPKKLSNFVKGKAPMPQDNEGYILYPAGYPESKIRRIHSRKSHSGPNHAFMYKGETSSSKQPTRAKLPKKKTPNASNDHDISFKTFDASYVLTNKSGKVYASGGSSWIIDSGCTNHMTGEKKMFSSYEKNQDPQRAITFGDGNQGVTVFRRSDDSIAFKGVLEGQLYLVDFDRAELDTCLIAKTNMGWLWHRRLAHVGMKNLHKLLKGEHILGLTNVHFEKDRICSACQAGKQVGAHHPHKNIMTTDRPLELLHMDLFGPIAYISIGGKTLKGFLRQAQNEFGLRIKKIRSDNGTEFKNSQIEGFLEEEGIKHEFSSPYTPQQNGVVERKNRTLLDMARTMLDEYKTSDRFWAEAVNTACYAINQLYLHRILKKTSYELLTGKKPNISYFRVFGSKCFILVKRGRKSKFAPKTVEGFLLGYDSNTRAYRVFNKSSRQVEVSCDVVFDETNGSQVEQVDLDEIGDEEAPCIALRNMSIGDDEAQVDEVQDQANEPPQDDDNDQGGDAHDQDKEDEEPRPPHPRVHQAIQRDHPVDTILGDIHKGVTTRSRVAHFCEHYSFVSSIEPHRVEEALQDSNWVVAMQEELNNFTRNEVWHLVPRPNQNVVGTKWVFRNKQDEHGVVIRNKARLVAKGYSQVEGLDFGETYAPVARLESIRILLAYATYHGFKLYQMDVKSAFLNGPIKEEVYIEQPPGFEDSEYPNHVYKLSKALYGLKQAPRAWYECLRDFLITNGFKVGKVDPTLFTKTLENDLFVCQIYVDDIIFGCTNESTCEEFSRIMTQKFEMSMMGELKYFLGFQVKQLQEGTFLSQTKYTQDILSKFGMKDAKPIKTPMGTNGHLDLDEGGKFVDQKVYRSMIGSLLYLCASRLDIMLSVCMCARFQADPKEAHLTAVKRILRFLVYTPKFGL

SEQ ID NO: 10574 - protein, 1539 aa, Zea mays
  Clone ID: TF_ZM4932.C3.o1.fg.pep
MSGEHAKREMEIGNKPIGDKPTTSHEKASSEESRKKGKGKEKKASSHKSHQSGNKKKKMRKVVYYETDTSSPSTSGSDAPSVISKRHERKKFSKIPLRYPRIPKHTPLLSVPLGKPLTFDGEDYARWSDLMRFHLTSLHKSIWDVVEFGVQVPSVGDEDYDEDEVAQIEHFNSQATTILLASLSREEYNKVQGLKSAKEVWDVLKTAHEGDELTKITKRETIKGELVRNLGSKKWDDHEMVKVILRSLIFLNPTQVQLIRGNPRYTLMTPEEVIGNFVSFEYMIKGSKKINELDDPSTSEAQPVAFKATKEKKEESTPSRQPIDASKLDNEEMAFVIKSFRQILKQRRRKDYKPRSKKVCYKCGKPSHFIAKCPISSDSDRGDDKKGRRKEKKKYYKKKGGDAHVCREWDSDESSSDSSSDEDAANIAINKGLLFPNVGHKCLMAKDGKKKKVKSKSSTRYESSSDDNASDEEDNLRTLFANLNMQQKEKLNGLISAIHEKDDLLDSQEDFLIKENKKHVKVKNAYALEVEKCEKLSSELSICHKTIDNLRNENANLLAKVDSNVCDVSIPNPRSDNDDLLAKIEELNISLASLRDENEKLLAKAKDFDVCNATISDLRSKNDILHAKVVELKSCKPSTSTVEHTSICTRCRDVDINAIHDHMDLIKQQNDHIAKLDAKIAEHELENENFKFARSMLYSGRRPGIKDGIGFQQGGNVKLNAPPKKLSNFVKGKAPMPQDNEGYILYPVGYPESKIRRIHSRKSHSGPNHAFMYKGETSSSRQPTRAKLPKKKTPSASNDHDISFKTFDASYVLTNKFGKVYASGGSSWIIDSGCTNHMTGEKKMFSSYEKNQDPQRAITFGDGNQGVTVFRRSDDSIAFKGVLEGQLYLVDFDRAELDTCLIAKTNMGWLWHHRLAHVGMKNLHKLLKGEHILGLTNVHFEKDRICSACQAGKQVGAHHPHKNIMTTDRPLELLHMDLFGPIAYISIGGSKYCLVIVDDYSRFTWVFFLQEKSHTQETLKGFLRRAQNEFGLRIKKIRSDNETEFKNSQIEGFLEEEGIKHEFSSPYTPQQNGVVERKNRTLLDMERTMLDEYKTSDQFWAEAVNTACYAINRVFGSKCFILIKRGRKSKFAPKTVEGFLLGYDSNTRAYRVFNKSSGQVEVSCDVVFDETNDSQVEQVDLDEIGEEEAPCIALRNMSIGDVCPKEPEEPPSAQDQPSSSTQASPPTQNEDEAQSDEGENQANEPPQDDDNDQGGDANDQDKEDEEPRPPHPRVHQAIQRDHPVDTILGDIHKGVTTRSRVAHFCEHYSFVSSIEPRRIEEALQDSDWVVAMQEELNNFTRNEVWHLVPRPNQNVVGTKWVFRNKQDEHGVVTRNKARLVAKGYSQVEGLDFSETYAPVARLESIRILLAYATYHGFKLYQMDVKSAFLNGPIKEEVYVEQPPGFEDSEYPNHVYKLSKALYGLKQAPRAWYECLRDFLITNGFKVGKADPTLFTKTLENDLFVCQIYVDDIIFGSTNESTCEEFSRIMTQKFEMSMMG

SEQ ID NO: 10575 - protein, 192 aa, Zea mays
  Clone ID: TF_ZmC685828_1.pep
AFRSSTRADALCRFYLGLRRDIQDIMDYKEFNTVNKLFQFAMLAETELQGRQHRPRATFGASSTSRTHTPASSHTPSTTPASTRPPSTPAAHVGNLPLQVPTKKHNSLAPAATSSGRSSGIVCHRCHGIGHVKKDCPSQRTYIATDDGYISTSDAEGDDDDSSDVAANDDAMLGADAIVNLRSIMVQRVLSS

SEQ ID NO: 10576 - protein, 551 aa, Zea mays
  Clone ID: TF_ZM3671.C11.o6.fg.pep
MPATRIVSLRLQSTLLKKGDRLNFNFNRGPERFNRGPGQVQPGSREVQPVSRESSAGVFSQDLTDVDPRAIDLAMRIAERMFLKMKEDEAKNKIEEENDRWRPNDESTSSQGLSFKSTSHMCFIANGSDSESESEDEEEQESDSEDEDDLQQFFAQLSKKNRMSLLKLMKRAEEQKEMLHKQEDFLIRKIEDLEKLTKEHEKLKCSHDGLVQRYEDISIEKIRAINHSSYIAQLENKNVMLKNTIEKLNIENLALQEKHDMLVCSHNKFIDSHIMLEMAHEVVLTNLKSYQPHICTCTQVETILSCANKCCSQESQSSIELEISGISDISITQENKELKEEVGRLRRSLTLLKGKCHAQPSQDNRDNMVKKLEKGTTVACTKPLQRNTKLSKKGMSKIYGKKLNAHTICSNNVPMCFNKERSKRSDRRCYGCKEKGHEIDSCPHMKNQDLARSRKMTIKKDESRRQMHCKDKHRICYSCREKGHLFKVCPKGKIPKPNLSIHSDMLRRPKFDSCARKVMSSPHSRTKAIWVPKSLLANHDGPIMRWVPKYT

SEQ ID NO: 10577 - protein, 1325 aa, Zea mays
  unsure (1)..(1325): unsure at all Xaa locations
  Clone ID: TF_ZmC36654_1.pep
MLISQIAQMKPLDGSNYHSWREDIDMITTVGEIDYALRFDKPVEPTVGTPNYDHRWMQYSIDKVKWERSNDKCMIILKRSIKEPLKSSIPECETAKEYLERVASHHQGSSKAYACYLMTEFVNAKYDGNGVRPFIQKMISIVAKINKYLGSPLHEEFVVFMIMKSLPKEFETFHIQYNTSVTDKWNIDQLLAQCVQEEERLKQTGDSVNLIKGNVPRQNKNSKKMFKKQGKQNNQASSSNNNQPRQGGSFSVPPDTCLYCKKTGHYKRKCPEFLQYLLESGKDQVTFVNESLYLEYPSYSWWIDSGATVHVANSLQGLRTSQRLPKGRRTIRVANGVEAAVEAIGDIHLKLVNGFVLLLRDVLYVPSLRRNLISVSRLDDQHIHCHFGDRQCVIQFDNKDVGLAIRRDMLYLLSQSDVVNVLDIPENDPASSGRKRKRSDGETSSKLWHYRLGHISXXRIESLVKEQILHPLDFTDLEQCRDCIKGKFAKQIKKDAKHSTRVLEIIHTDICGPFPVRTVDGFNSFITFTDDYSRYGYIYPIKERSEALDKFKQFKAEVENQHDLKIKIVRSDRXXXYYGRHTEYGQVPGPFARFLRENGIVAQYSTPGXXXXXXXXXXXXXXXXXXXXXXXSYSNLPLGLWMEAXXXAMHILNRVPSKSVARTPYELWTGRKPTLNYFHIWGCPAEARIFNPGQGKLDERTTSCHFIGYPDRSKGYRFYCPDRQTKFIETRHAIFLEDDMIKGSKVLREVDLQEKRIYVPFPMVEEPHFSIPTVVTPTVTPTVGETPAANVASSSATTTEQVASPSAHIGPEPVAQDSSEDDDSVAPSDAPLQEPQVESEPEPSLRRSQRLRKSAIPDDYEVYAAENIECDEIHMSEDIDTEGDPTXXXXXXXXXXXXXXXXXXXXXXXXXXXXXXXXXXXXXXXXXXXXXXXXXXXXXXXXXXXXXXXXXXXXXXXXXXXXXXXXXXXXXXXXXXXXXXXXXXXXXXXXXXXXXXXXXXXXXXXXXXXXXXXXXXXXXXXXXXXXXXXXXXXXXXXXXXXXXXXXXXXXXXXXXXXXXXXXXXXXXXXXXXXXXXXXXXXXXXXXXXXXXXXXXXXXXXXXXXXXXXXXXXXXSYVLGIEIRRDRQKGVLGLSQKSYIENVLKRYNMHKCNASPGPIVKGDKFGEYQCPKNQYEXXKMKSVPYASAIGSIMYAQVCTRPDLAFTTGMLGRYQKNPGIEHWKAVKKALRYLQGTKGLMLTYRRSNSLQIVGYADADWGGCRDTLKSTSGYVFMLSXXAISWKSCKQTARASSTMHAEFVATYEATGQAIWIKKFVPGLRVVDSIE

SEQ ID NO: 10578 - protein, 222 aa, Zea mays
  unsure (1)..(222): unsure at all Xaa locations
  Clone ID: TF_ZmC36654_4.pep
EFVVFMIMKSLPKEFETFHIQYNTSVTDKWNIDQLLAQCVQEEERLKQTGDSVNLVKGNIPRQNKNSKKKFKKQGKQNNQASSSNNNQPRQGGSFSVPPDTCLYCKKTGHYKRKCPEFLQYLLESXGLRTSQRLPKGRRTIRVANGVEAAVEAIGDIHLKLVNGFVLLLRDVLYVPSLRRNLISVSRLDDQHIHCHFGDRQCVIQFDNKDVGLAIRRDMLFF

SEQ ID NO: 10579 - protein, 489 aa, Zea mays
  Clone ID: TF_ZM4446.C1.o1.fg.pep
MSSDSDLFVDAHDLWTKVKLKIFKSICTTSAPSIAGSTNLSKGEEQERWTPNDGSTSPTGSSPTSYTCLVANDESGDESDDEEEYEDEESTSSQGTFSCFASTDNNDRENETDDVEEEEIRHFYTHLNKEDKALLVKLLRRIKEQSETLLRLEETLIKTNDSLEKMTKEHEELKCSHDDLVQQYDSVLIEQRNNDDDLSCVAQLKMENAMLERQVELLNLEKLALGEKYDMLSYSHNKLVDDHIMLDIAHEVVITSLNLCEPHSCTCAHLDNISPCANPCCSKESQCLNEHQATGSKEKLLINKERNKKAKQLRRRRRAQDIYKHVVNKLEEEGTAARVKLCEKEAPKNKKRRGKRRCFKCNESSHLIASCPYKDKDEGMRRCFGCNDKDHMITSCPLMKNQRRTPSKMTLTKEKDKQQVSCQVERHFCYMCGERGHLSKSQGGKGKMSKKWKNQDLGTSISQVFGILSSTRQGQDKGSGTSVKELPRD

SEQ ID NO: 10580 - protein, 187 aa, Zea mays
  Clone ID: TF_ZmC1239986_1.pep
MPRILASGKAEVGADRTPDFQLSCKPEGDLNSGNVWSHRRAAGLDAAPRLNGQRPYPAASDGIEGDWSVVRPRYWWRKSWTSTERTRQYHQFDVKGTGLFKLKLKGKCYNCFSPDHLAFCCQAPSRCWLCLQSGHRARYCSRISYQGTFTAAGFFPKPVEQPSRTPTYHEARPWTDDLHKLEHCGRT

SEQ ID NO: 10581 - protein, 1697 aa, Zea mays
  Clone ID: TF_ZmC36592_163.pep
MENPWVIRTSYCSEEEGFPHLLRSCALRLGIRKKPEYVWKEYRENGMEKCSMAVYLGESRNYPNHPPFQITFIGHRFPDTCQSVARKALKQLCQNYSREIFETPLRYFPPSNKNTPTWKKRLQALSGGDPIEDDPTIVYMAGYLHTLDNHYDELSSHCTHLNSRVESLEQQVKELKQEKASLQESLSIVEGEEANTREAYRTLKIDFDKKLKTLAPRKKIQKKTTNQGCQTEKKKKKAPLALPPPRIDDWSDEEDVSLASLDDLLKAFGDTLDKELASTSKNALMASDKTTPTASGIGAGFPRRAEGEVVREESETHLPAPPPLPLDLAQVLANQTRLIEVLTRNLENQRPNGGRPQDKMGDFLRLKPPTFAGSSNPLDADDWMRTIKRKLEAIGCPENQRVQLAAHQLSGMALAWWDTFNVTIRDATWAEFEAAFREHHVPQGLFMELARYAPDDVSTESKKMARFLKGLRPELKTILASQDFLNFSHLSNKAMQVERAKEEEKGHLKRKFQVLRAQQQDRHQKTRSFGFPPKGPNFSRPAGPTPSRFSQQSQSSFHSPSVASNQPPANACWHCGDPSHLKNNCPQLKPPGPAYSNSVNGPKNTSASAPKAPSVVSQQNKTPYQGRARVNHVDAQEAQQAPGVVLGEFLVEFTPATVLFDSGASHSFIATSFVEKYGIPSTPLEIPLVTRTPGSDLLCQLKCSQVRILLSGVVFLADLTVLPSKGIDVILGMDWLAKHKGIISCADKTVLLTDQQGKSVSCQAQPPASDLMMFNLITESISVVEEFMDVFPEELSGMPPEREVEFYIDLIPGTAPIAKRPYRMAPTELAELKLQIADLQQKGYIRPSSSPWGAPVLFVSKKDGSMRMCIDYRSLNEVTIKNKYPLPRIDDLFDQLQGAKYFSKIDLRSGYHQLRIKEADIQKTAFVTRYGQYEFTVMSFGLTNAPAFFMNLMNKVFMEELDKFVVVFIDDILIYSKNREDHKRHLRIVLGKLRAHQLYAKLSKCEFWLEKIAFLGHILTAEGIEVDPSKVEAVSKWRQPTNVSEVRSFLGMAGYYRRFIKGFSSIARPMTELLKKDHKFVWTPKCEGSFQIIKEKLTTAPVLSLPDIHQDFVVFCDASRQGLGCVLMQNEKVIAYASRLLKPHEQNYPTHDLELAAIVHALKIWRHYLIGNKCHIFTDHKSLRYIFTQPDLNLRQRRWLELIKDYDLEIHYHPGKANVVADALSRKPFGIKGTNFLEDWKKESAQLNACLGINDSLEVKPMLEDLIGKAQRLDSETARLVEKARKEQLPDLRTDDQGVLWFKHRLCVPKGEAREVLLKEAHDSAYSIHPGTTKMYLDLKTRYWWKGMKKEIAQYVARCDICQRTKAEHQKPAGLLQPLPIPEWKWEEIGMDFVTGLPQTQKGNDSIWVIIDRLTKVAHFIPVKTTFGGATLARIYLKEIVRLHGIPRKIVSDRGTQFTSKFWTSLQKAMGTKLDFSTAYHPQTDGQTERVNKVLEDLLRAYPSHVVQRGGKALEGPAFVKEAEEKVALIRRRLLEAQSRQKSYADNRRRELRFEEGDFVYLKVSPMRGVRRFQVKGKLAPRFVGPYPIIGRVGPAAYRLELPESMSDIHNVFHVSQLRKCLQAPESHLEEETVQIQKDLQYREKPVKVLDSAIRKTRTSEVKLCKVQWSREGEEEATWESEDFLRREYPYLFPNPV

SEQ ID NO: 10582 - protein, 1653 aa, Zea mays
  unsure (1)..(1653): unsure at all Xaa locations
  Clone ID: TF_ZM5033.C2.o1.fg.pep
MDPRGKGMVVNDKEKESFVNDPKDDKPTDSALAHKRKDERKKKTRRIKEIVYYNSDESSSSQKDDDIDYEKKKTFQCSFAFHSPRKTPHFDGEDYGFWSHKMRSHLFSIHPSIWEIVENGMHFDSTDSPMFINEQIHKNAQATTVLLASLCRNEYHKVSGLDNAKQIWDTLKISHEGNDVTMLTKMELVEGELGRFAMIRGEEPTQTYNRLKTLVNKIRSYGSTRWTDHDVVRLMLRSFTVLDPHLVNNIRENPRXHQDDTRGDTWKVXSGRMMIKEARYVDDALNGPIQEPQTIALKATRSKEALPSKVAQVEAAGLNNEEMALIIKRFKTALRGRKEHPNKTKTKGKRSCFKYGKIGHFIANCPDNDSDQEQGNKREKKKAYKKAKGEAHLGKECDSDCSSSDSDNEGLAATAFNKSALFPNEHHTCLMAREKKVSTRDTSTYASSSDEESSDDEIDYSCLFKGLDRTKVDKINELIDALDDKNRLLEKQEDLLYEEHDKFVEAQKSLALEIKRNEILSCELSSCHDSISSLKSINDDLNAKLEVATKSTSCVEHVAICNRCKDFNIDACSEHLVCISKLNDEVAILNAQLKTSKNDFDKLKFARDAYMIGRHPSIKDGLGFKREVKNLTSHKAPISIKEKGKAPMANSIQKNHAFLYHDRKYSTNVHHDRSCNDVVSHAYDSNAMFASSSSMMYDRSLARKNVYASRGSSWIIDSGCTNHMMGKKRMFSSYVKNKDSQDSIIFGDGNQSKVKGLGKIAISSEHSISNVFLVESLGYNLLSVSQLCNMGYNCLFTNVDVFVFRRSDGSLAFKGVLDDKLYLVDFAKEEAGLDACLIAKTSMGWLWHRRLAHVGMKNLHKLLKGEHIDLVQLVKQDKSETQGTLKRFLRRAQNEFELKVKKIRSDNGSEFKNLQVEEYLEEEGIKHEFSAPYTPQQNGVVERKNRTLLDMARTMLGEFKTPERFWTEAVSTACHAINRVYLHRLLKKTSYELLTGNKPNMSYFRVFGSKCYILVKKGRNSKFAPKAVEGFLLGYDSNTKAYRVFNKSSGLVEVSSDVVFNETNGSPREQVCDLDDADEEDVPTTAIRTMAIGDVRPQEQNERDQPSSSTMVHPPTQDDEQVHQEEACDQGGAQDDHAMEEEAQPAPPTQVRAMIQRDHPVDQILGDISKGVTTRSRLVNFCEHYSFVSSIEPFREELNNFKRNEVWTLVPRPKQNVVGTKWVFRNKQDEHGVVTRNKARLVAKGYAQVAGLDFEETFAPVARLESIRILLAYATHHSFRLFQMDVKSSFLNGPIKEEVYVEQPPGFEDERYPDHVCKLFKALYGLKQAPRAWYECLRDFLVANAFKVGKADPTLFTKTCDGDLFVCQIYVDDIIFGSTNQKSCEEFSRVMTQKFEMSMMGELSYFLGFQVKQLKDGTFISQTKYTQDLIKRFGMKDAKPAKTPMGTDGHTDLNKGGKSVDQKAYRSMIGSLLYLCASRPDIMLSVCMCARFQSDPRECHLVPVKRILRDLVATPCFGIWYPKGSTFDLIGYSDSDYAGCKVDRKSTSGQCCAQLLWMRQTLRDFGYNLSKVPLLCDNESAIRMADNPVEHSRTKHSDIRHHFLRDHQQKGDIEVFYVSTENQLADIFTKPLDESTFCTLRSELNVLDSRNLE

SEQ ID NO: 10583 - protein, 1360 aa, Zea mays
  Clone ID: TF_ZmC951_459.pep
MSGGSTKREIETGTSHGKAPSRESGAKRREESPPRVKSHWSGDKKKKMKKVVYYETNSLSPSTSSSDAPSITSKRHEHKKFKEYNKVQRLKSSKEIWDVLKTTHEGDEVTKITKRKTIEGELSRFFLNKGEEPQTMYNRLKTMVNQVRNLGSTKWDDHEMVKVILRSLVFRNPTQVQLIRGSKQIVNLEQGGTSTPEVQPIAFKATEEKKEESTSSRLPIDASKLDNEEMVLIIKSFRQILKQRRGKDYKPHSKRVCYKCGKASHFIAKCPMSSDSDRDNDKKGRKKEKKYYKKKGGDAHVCREWDSDMSSTESSSDEDATNIAVNKGLLFPNVGHKCFMAKDGKKKKVKSRASTKYTTSSDEGSSSEDEDNLLTFFVNLNMHQKEKLNELIGAIHEKDELLDSQDEFLIKENKKHVKGKAPMAQDNEGYILYPTGYLEHKIRRIHAKKYHSVSHHAFMYKNEASSSRHPTHVKMPKKKTPTASNEPNVSFKTFDASYVLTNKSGKVVAKYVGGKHKGSKTCVWVPKVYASGGSSWIIDSGCTNHMTGEKRMFSSYEKNEDPQRAITFGDGNQGVTVFRRSDDSVAFKGVLEGQLYLVDFNRAELDTCLIAKTNMGWLWHRQLAHVGMKNLHKLLKGEHILGLTNVYFEKDREKSQTQETLKGFLKRAQNEFRLRIKKIRSDNWMEFKNSQIEGFLEEEGIKHEFSSPYTPQQNGVVERKNRTLLNMARTMLDEYKTPDRFWAEAINTACYSINRFYLHRILKKTSYELLTGKKPNVSYFRVFGSKCFILVKRGKKSKFAPKAVESFLLGYDSNTRAYRVFNKSTGLVEVSCDIVFDETNGSQVEQVDLDELHDEEAPCVLLRNMSIGDVCPKESEDPLIHKINHHLPIKHPHQLKMRIGLKAMKMKIKNMSHLKRRTKWVFHNKQDEHGVVTRNKARLVAKGYSQVEGLDFGETYAPVARLESIRILLPYATYHGFKLYQMDVKSAFLNGPIKEEVYVEQPPGFEDSEYPNHVYKLSKALYGLKQAPRAWYECLRDFLITNGFKVGKVDPTLLTKTIAKDLFVCQIYVDDIIFGSTNKSTCEEFSRIMIQKFEMSMMGELKYFLIFQVKQLQEGTFISQTKYIQDILTKFGMKDAKPIKTPMGTNGHLDLDTGGKSVDQKVYWSMIGSLLYLCASRPDIMLSVCMCARFQADPKEVHLRAVKTIMRYLVYTPKFGLWYPKGSTFDLIGYSDADWAGCKIDRKSTSGTCQLLGRSLMSWASKKQNSVAFSTTEAEYIAVGHCCAQLLWMRQTLRDYGYKLSKVPLLCDNESATRMADNPVEHSRTKHIDIRYHFLRDHQQRGDLEIAYVSTKEQLADIFT

SEQ ID NO: 10584 - protein, 1062 aa, Zea mays
  Clone ID: TF_ZmC119_1382.pep
MDPKGKGMVVNDNEKESIFNEPRDDKVNDSSSSQKKKDGKKKRRIRKVVYYDSDESSSSQKDDEYEEKKKMVNSNFSFDYSRILHNSNAHLLSIPLGKPPHFDGEDYGFWSHKMRSHLFSLHPSIWKIVENRMQFDSSDNSMFINEQIHKNAQATTVLLTSLCREEYNKVSDLDNAKQIWDTLKISHEGNDVTMLTKMELVEGELGRFAMIRGEEPTQTYNRLKTLVNKIRSYGSTRWTDHDVVRLMLRSFTILDPHLVNSIRENPRYTKMTPEEILGKFVSGRMMIKEARYVDDALNGPIHEPQTIALKATRSREALPSKVAQVEAAGLNEEEMALIIKCFKTALKGRKEHPNKSKTKGKRSYFKCGKVGHFIANCPNNDSDQDQEKKREKKKTYKKAKGEAHLGKEWNSDCSSSDSDDEGLAASAFNKSSLFPNEHHTCLMAKEKKVSTRNNTTYASSSDDESSDDEIDYACLFKGLDRTKIDKINELIDALNEKNRLLEKQEDLLYEEHDKFVSVQNSLALEVKRNEMLSRELSTCHESISSLKSINDDLNAKLEIANKSTSYEEHVVICNRCKDFNVDACSEHLVAISKLSNEVTSLNAQLKTSKNEFDKLKFVRDAYTIGRHPSIKDGLGFKREAKNLTSHKAPIPAKEKGKAPMANSAQKNHAFIYDRKFSRNVHHDRSCNAYDSNAMFASSSSYVHGRDMPKKNVIHHMPRRNVAQDPRKIVNEPSTIYHACNASFVICRKDKKVYASGGSSWIIDSGCTNHMTGEKKMFTSYVKNKDSQDSIIFGDGNQGKVKGLGKIAISSEHSISIVFLVESLGYNLLSVSQLCNMGYNCLFTNVDVSVFRRSDGSLAFKGVLDVKLYLVDFAKEEAGLDACLIAKTSMGWLWHRRLAHVGMKNLHKHLKGEHVLGLTNVTFEKDRPCAACQAGKQVGNAHHSKNVMTTSRPLELLHMDLFGPVAYLSIGGSKYGLVIVDDFSRFTWVFFLQDKSKTQGTLKRFLRRAQNEYELKVKKIRSDNGYEFKNLQAEEYCHTQVSGAPRPGREHNHQVCWDQVSHI

SEQ ID NO: 10585 - protein, 180 aa, Zea mays
  unsure (1)..(180): unsure at all Xaa locations
  Clone ID: TF_ZmC173187_1.pep
KTTVEVWASLKTRFVGADWVMTARLPTLKGEFDKLCMEDREQLDDYADKISGMSRVTSXLGTMLDDDAMVKKLLNTILDRLFPAVAGIEQFCNVEMMALEEALNGLKVFDERFRRRTRVGGKRREDQLLTEIEWKARQKPKSSIRRCFNCGIRSHFARDCHKPKKEEALLADDGEEATLL

SEQ ID NO: 10586 - protein, 182 aa, Zea mays
  Clone ID: TF_ZM3652.C7.o2.fg.pep
MGMILKINLMGVPLQVDDLFFNIDRKKQRKRGCFVCGEKGHFRDSCPTMVEHKKGRGKGKALTSVKTWDDSSSEEEPPRTRSHRSSSRSSRKCLMARGLLEKFETFANLNCELSTKIAQLESSAPSTATDDGLIKKNEKLKAKLSSSQEAIENLLGKMEILSINNNELTIKPENIGSTQGHL

SEQ ID NO: 10587 - protein, 551 aa, Zea mays
  Clone ID: TF_ZM4328.C2.o1.fg.pep
MSGDHAKREIVTDGNKSASSERTHSRESDHKHKEESSSSIKSQRRGDKKKKMKKVVYYETDSSSPSTSGSDSSSTTSKRHERKKYSKMSLRYSRISKRTPLLSVPLGKPPSFDVRNLGSTKWDDHEMVKVILRSLVFRNPTQVQLIHGDPRYKLMSPKEVIGKFVSFELMIKGSKQIINLEQGGTSTPEVQPVAFKATGEKKEESTSSRLPIDASKLDNEEMALIIKSFCQILKERKGKDYKPRSKKVCYKCGKSGHFIAKCPFSSDRSDDKRGKKKEKKRYYKKKGGDAHVCQEWDSDVGSTDSSDEDAANIAVNKGLLFPNVGHKCLMAKDGKKKKVERLNACIDSIVNLKNDNASLIAKIDKLNESISSLKIESDSLISKARDLNVCNDSISCLRNENATLHAKIEELKSCKPSTSTVTHVSICTRCRDINVDAIHDHLALIKEQNDHIAQLTTKINEHEIQNEKFKFARSMLYNGRRPGIKDGIGFQQGSNVKLNAPTRLSNYVKGKAIMAQDNEGYILYPDGYPEHKIRRIHARKSHSVSHHDFMY

SEQ ID NO: 10588 - protein, 513 aa, Zea mays
  Clone ID: TF_ZmC24260_18.pep
MSGGLRNESASKLEKVEIASTSSFGADVDPRAIDLAMRIAERMFLKMKEDEAKNKIEEENDRWRPNDESTSSQGSSFKSTSHMCFIANGSDSESESEDEEEQESDSEDEDDLQQFFAQLSKKHRMSLLKLMKRAEEQKEMLHKQEDFLIRKIEDLEKLTKEHEKLKCSHDDLVQRYEDISIEQIKVVNHSSYIAQLENKNAMFKNTIERLNIENLALQEKHDMLVCSHNKFMDSHIMLEMAHEVVLTNLKSYQPHICTCTQVETILSCANKCCSQESQSSIELEISGISDISITQENKELKEEVGRLRRSLTLLKGKCHAQPSQDNRDNMVKKLEKGTTVACTKPLQKNTKLSKKGMSKIHGEKINAHIICSNNVPMCFNKERSKRSDRRCYGCKEKGHEIGSCPHMKNQDLARSRKMTIKKDESKRQMHCKDKHRICYNCRERGHLFKVCPKGKTPKPNLSIHSNMLRRPKFDSCARKVMSSPHSRTKAIWVPKSLLANLDGPIMRWVPKCT

SEQ ID NO: 10589 - protein, 455 aa, Zea mays
  unsure (1)..(455): unsure at all Xaa locations
  Clone ID: TF_ZM4986.C1.o4.fg.pep
MDPKGKRMVVNDKEKESFLNEPRDDKPTDSGSSHKKDGKKKRRIKKIVYYDSDGSSSSPRDDDYDEKKKLYGSVFINEQIHKNAQATTVLLASLCRDEYNKVSGLDNAKQIWDTLKISHEGNDATMITKMELVEGELGRFAMIMGEEPTQTYNRLKTLVNKIRSYGSTRWTDHDVVRLMLRSFTVIDPHLVNLIRENPRYTKMTPEEILGKFVSGRMMVKEARYVDGALNGTMPIYEPQPVTLKATSSNREALPSKVAQVEATGLNEDEMALIIKRFKTALKGRKEHPNKSKAKGKCSCFKCGKTGHFIANCLDNANDQEQEKSRKREKKKAYKKAKGEVHLGKEWDSDCSSSDSDDEGLAASAFNKSSLFPXNERHTCLMAKEKXEHVVICNRCKDFDVDACVEHLTSITKLNGEVASLNAQLKTCKNDFDKLKFARDTYTVGRHPSIKDGLGF

SEQ ID NO: 10590 - protein, 120 aa, Zea mays
  Clone ID: TF_ZM4874.C3.o1.fg.pep
MALIIKRFKTTLKGRKEHPNKNKTKGKRSCFKCGKIGHFIANYPDNDSDQEKKSGKWEKKKNYKKAKGEAHLGKEWDSDCSSSDSNNEGLAATAFNKSSLFPNEHHTCLMAREKKVLMMI

SEQ ID NO: 10591 - protein, 1496 aa, Zea mays
  unsure (1)..(1496): unsure at all Xaa locations
  Clone ID: TF_ZM5039.C4.o3.fg.pep
MDPKGKGMVINDKEKESFINEPKDDKPTDSGSSHKKKDGKKKRRIKKIVYYDSDESSSSQRDDDDKKKKTVNSNFSFDYSRIPQNSNAHLLSIPLGKPPHFDGEDYGFWSHKMRSHLFSLHPSIWEIVENGMQFDSTDNPMFINEQIHKNAQATTVLLASLCREEYHNISHEGNDATMITKMELVEGELGRFAMIRGEEPTQTYNRLKTLVNKIKSYGSTRWTDHDVVRLMLRSFTVLDPHPVNSIRENPRXHQDDARGNTRKVXSGRKMIKEARYVDEALNGPMPIHEPQTVALKAISSREGLPSKVAQVEAAGLNEDEMALIIKRFKTVLKGRKEHPNKSKTKGKRSCFKCGKIGHFIANYPDNNSDQEQGKNGKRENKKVYKKAKGEAHLGKEWDSDCSSSDSNDEGLAATAFNKSSLFPNDHHTCLMAKEKKVSTRNTIAYASSSDDESSDDEVDYASLFKGLDRTKIDKINELIDALNEKNRLLERQEDLLYEEHDKFVYASGGSSWIIDSGCTNHMTREKKMFTSYIKNKDSQDSIIFGDGNQGKVKGLVKIAISSEHSISNVFLVESLGYNLLSVSQLCNMGYNCLFTNVDVSVFRRSDGSLAFKGVLYDKLYLVDFAKEEAGLDACLIAKTSMGWLWHRRLAHVGMKNLHKLLKREHVLGLTNVTFEKDRPCAACQAGKQVGSSHHSKNVMTTSRPLELLHIDLFGPVAYLSIGGSKYGLVIVDDFSRFTWVFFLQDKSETQGTLKRFLRRAQNEFELKVKKIRSDNGSEFKNLQVEEYLEEKGIKHEFFAVYTPQQNDVVERKNRTLIDMARTMLGEFKALERFWSEAVNTTCHAINRVYLHRLLKKTSYELLTGNKPNVSYFRVFGSKCYILVKKGRNSKFAPKAVEGFLLGYDSNTKAYRVFNKSSGLVEVSSDVVFDETNGSPSEQVDIDDVDEEDVPTAAIRTMAIGDVRPQEQKEQDQPSSSTMVHPPTQDDGQAHQEEACDQGGAQDDHVMEEEAPQAPPTQVRATIQRNHPVDQILGDISKGDEHGVVTRNKVRLVAKGYAQVVGLDFEETFAPVARLESIRILLAYAAHHSFRLFQIDVKSAFLNGPIKEEVYVEQPPGFEDERYPDHVCKLSKALYGLKQAPRAWYECLRDFLIANAFKVGKADPTLFTKTCDGDLFVCQIYVDDIIFGSTNQKSCEEFSRVMTQKFEMSMMGELNYFLGFQVKQLKDGTFISQTKYTQDLIKRFGMKDAKPAKTPMGTDGHVDLNKGGKSVDQKAYRSMIGCLLYLCASRPDIMLSVCMCPRFQSDPRECHLVAVKRILRYLVATPCFGIWYPKGSTFDLIGYSDSDYAGCKVDRKSTSGTCQFLGRSLVSWSSKKQNSVALSTAEAEYVVAGQCCAQLLWMRQTLRDFGYNLSKVPLLCDNESAIRMADNPVEHSRTKHIDIRHHFLRDHQQKGDIEVFYVSTENQLADIFTKPLDESTFCRLRSELNVLDSRNLD

SEQ ID NO: 10592 - protein, 114 aa, Zea mays
  Clone ID: TF_ZmC18109_16.pep
SFAARAPKTLAPADRGAPLVPATRIKDGSAGASGMVSKSGGKDGSRLNGCSSRASLTSMPPSVKTECEILQSANVKIFTFNNLKAAIGNFVFARFRVLQTYPLNKNLVLEIKKG

SEQ ID NO: 10593 - protein, 519 aa, Zea mays
  unsure (1)..(519): unsure at all Xaa locations
  Clone ID: TF_ZmC824_1.pep
MIHIVMDIFEIMISMINYLLYVIIIMLIYGIKMIWKMPIILTHQKPNVRHFSVSGFAAVLKPDPFDGKNFLIWKAKMVLWLTVMSCFHAAEGKPVNLPPEDEAKFKAEDNLFRGAVISALDTKFQKSYIILPTGKELWNALIGXFGVTDAGSELYLMXQLYDYKMVENRSVVEQAHEFQALAKQLKLFPCPLPHKFVAGGIIAKLPPSWKDFATSLKHKRQEFNVEELIGTLDVEERARTKDSGKGVETSTANVVQKRNFRKFNKKKNQNKQENTNKPVQTAQFKKKKNNNKGKGGCFVCGSDQHWARECPDRKFTHDKKSANVVTTETGDETSGYGNSLPFVLSVCNSPEWWMDSGANIHVCADASMFSSYQVGRSGALLMGNGSHAHVLGVGTVILKFTSGKTVPLKSVQHVPFIKKNLVSASMLCRDGYKVVLESNKCVMSKHGTFVGKGYDCGGLFRLSLHDVCNKMVNSVIRDVPFITHSWMAKFLLCRSVVNSAACFYGLFWTCAFIVSSVCA

SEQ ID NO: 10594 - protein, 262 aa, Zea mays
  unsure (1)..(262): unsure at all Xaa locations
  Clone ID: TF_ZM4511.C1.o4.fg.pep
MRTIDSQLEQILDKSIIPSSYDKKNASEEDQRCIRLYYLAYDILSNSLSKEDYRAFIMRYDEPIHDAHDIWTKIKSKFNESKHVSSYDASTSFSPCETNPLKEKEENERWRPNDESTSPKASKSSFELEFLGIKDDTCQELKEENERLRTSLTQLKGKCTAQPSQDNRDYMVKKFEIGTTVACTKSLEENVKDLRNXSRGRNKRRKSIPLPKTSTKCSECFEKGHFIRSCPYIKENGLILNKDDKRCFKCSKKGHLVKSFPM

SEQ ID NO: 10595 - protein, 1159 aa, Zea mays
  Clone ID: TF_ZM5032.C3.o6.fg.pep
MPPRTRKTVRKSTGPIGVPRHQLAPRHEDSSSGSNDPIGDLEAQVEQLRTELCHRNNVWVEDDELAERDLALDWAVNSHSIAWDKEAKARARVAELSTAVDNLQILSEWELDLLVQRVKPLAEDPLEADEWIRVIEQKFGLLRCTETQKPLFAAQQLRGPASTWWGNYVAIQPAGHQITWDKFRLAFREHYIPEGVLHMKQEEFMKLKQGGTVSQQVQPFVPQKMVTYLDLSYSRAVSTALAVEAKYAGPGKSKGYGGDRPNQGPEKRQRLVIRPFNQNCSSPRPPSYPFKQPVFICPATTPTSTNQPSAPGTRFPALPSSSTGCFNYGKSGHFIKDCPYPKKNRSNDQQSSGSSAQGKGNPANNTSGKNMKKTGRIYYMQMATTPEGEPVLLGTFLMANHPAVILFDSGASHTFISKKFVEQHCIPYNESREGFIIHSPGGQIFTKEVDFHVPVTLAERDFPTNMIVLKGQDIDVILGMNWLAQHKAILNTDLRSIRLSYGQEEVLLSIPVAIPAKPIGRVYEAIIPEIQDIPVVCEFSDVFPEDLPGLPPERDVEFVIGLKPAIFVKKKDQTLRMCVDYRPLNEVTIKNKYPLPRIDILFDQLTGARVFSKIDLRLGYHQIRIRPEDIPKTAFTTRCDEAFEQLKVLLTTAPVLAQPDIEKPFDVYCDASDHKSLKYIFTQSELNMRQRRWLELIKDYELEIHYHPGKANVVADALSRKAFYHCLTMKTSDITLCQEMEKLDLGMIQHETSNHLKLESVLLQRIIDAQRKDEGMKHIHEKMEAGKANCFRRDNQGVVWFNNRIVVPKNDEIRQQILDEAHLSRYFIHPGSTKMYHDLKQHYWWTKMKIEIARYVAKCNTCRRVKAIHMKTAGPLQSLPIPTWKWEDISMDFIMGLPRTAKGYDSVWVIIDRLTKIAHFLPVKVKYPVIAYAELYIARILSLHGVPKTIVSDRGPQFLSKFIEELHKSLGERCFFRSDMEKETEEKVRRIIHNLKEAQARQKSYADKRRQPLHFKVEDHVYLKVSPMKGVSRFGVKGKLAPRYIGHFPILERYGPVAYRLQLPETLSAVHNVFHVSQLKKCLRVPDRTIEVTDVALELDLTYSKHPVQVLDQKDRISQRKTLKFYKIQWNQHTEDEATWETQDFLDKNFPGFIASCKL

SEQ ID NO: 10596 - protein, 355 aa, Zea mays
  Clone ID: TF_ZmC1324486_2.pep
MSTKEFEELALDGHNYPTWASDIEITFASRGIIDAIAAPITGTDPVNEVKKNTALFLLRLYIHKDLKQEYLMERCPHNLWKALKERYEQQKELIWPSANHEWNHLRLQDFKSVAEYNHALHSICSKLKFCEKEPSEADKIEKTLSTMLPEDRILHQQYRSSNFQRYSQLMHTLTQAEKHHELLLKNAQQRPPGSAPLPEVHFNVHKTENKKGFKKNFKNPPGSRKFKKNKFHKKGKGKGKGNDKPLPSKGNRACLKCGTEGHFARDCTCPKHLVLLYQQSLKKPKSDKPGFEAHFNSTEAPIEVGSSSLASGDLKNTLAKEHLNVVDNKPPLLQEDESDDMIIEYMSKDPFGDLA

SEQ ID NO: 10597 - protein, 547 aa, Zea mays
  Clone ID: TF_ZM4353.C2.o2.fg.pep
MSGDHAKREIVTGDKAKSSGRKNEWTPSRESSDKYKEESASSIKSHRKGKPPYFDGKDYCMWSDKMRHHLTSLHESIWDIVEFEVQAPQVGDEDYDSDEAIQIRHFNSQETSILLASLCREEYNKMQGLKNAKEIWDVLKMAHEGDKVTKVPKRETIEGELSRFILNKGEEPQAKYNRLKTMVNQVRNLGSTKWDDYEMVKVILRSLVFLNPTQVQLIYGDPRYKQMSPEEVIGRFVSFELMIKDSKHIVNLEQGATSTLEVQPVAFKATEENKEESTRSRLPIDASKLDNEEITLIIKCFRPILKQKKGKDYKPRSKRLCYRCGKSGHFIAKCPYTTDSDRDDDKKGKKKMEKKRYYKKKGGEAHIGREWDSDESSTDSSDDKDATNIAINKGLLFPNISHKCLMAKNDKRKKVEKCENLSKELNICNDSISCLRDENASLNAKIEELNACNISTSTVEHITICTRCRDVNIDAIDDHLTIIKEQNDHIAKLNAKIAEHELENENFKFDCSMLYNGRHPGIKDGISFQQGSQSNTKLNAPKNRLSN

SEQ ID NO: 10598 - protein, 491 aa, Zea mays
  Clone ID: TF_ZM4678.C6.o4.fg.pep
MDVDLEAPPPPPPTAAAVTRRSPSPSAPMVVGTIAARRGEPHAPSMLRADASSSLAIAQMGWPHLPPPMGGPNGPRSGRHDGRLGGGGGEEARPLRGQWRSALSAALLLDVEQWAGGGSARPEVGPGAACPAERRRRHRPAVRGRGGLAESATSSPSADGEGGSTGTRAMAALGAGKDRHDGHAGPLPPRRGRLHGGATGAQERSLAAAGAGRSLLAPPPGGNMSTKEFEELALDGHNYPTWASDIEITFASRGIIDAIAAPITGTDPVNEPSEADKIEKTLSTMLPEDRILHQQYRSSNFQRYSQLMHTLTQAEKHHELLLKNAQQRPPGSAPLPEVHFNVHKTENKKGFKKNFKNPPGPRKFNKNKFHKKGKGKGNGKPLPSKGNRACLKCGTEGHFARDCTCPKHLVLLYQQSLNKPKSNKPGFEAHFNSTEAPIEVGSSSLASGDLKNTLAKEHLNVVDNKPPLLQEDESDDMIIEYMSKDPFGDLA

SEQ ID NO: 10599 - protein, 144 aa, Zea mays
  Clone ID: TF_LIB3068-010-Q1-K1-C8.pep
GRMMIKEARYVDDALNGPINEPQPFALKATRSKEALPSKVAQIEAVGLNEEEMALIIKRFKTVLKGHKGQPSKTKTKGKRSCFKCGKIGHFIANWPDNDSDQEKENKREKKKHYKKAKGQAHLGNEWASDCSSSDSDNEGLAAT

SEQ ID NO: 10600 - protein, 1429 aa, Zea mays
  unsure (1)..(1429): unsure at all Xaa locations
  Clone ID: TF_ZmC36592_178.pep
TRNSLAPRRTPSWLRIKPSLPPQGLEQGFPRRAEGEVDREESETHLPAPPPLPLDIAQVLANQTRLIEVLTQNLENQRPNGGRPQDRMGDFLRLKPPTFAGSSNPLDADDWMRTIKRKLEAISCPENQRVQLAAHQLSGMALAWWDTFNITIRDATWAEFEAAFREHHVPQGLVQLKEDEFRELTQDGRSISEYVHKFTELSRYAPDDVISEAKKMARFLKWLRPELKTILASQDFLSFSHLSNKAIQVERAREEEKGHLKRKFQVLRAQQQDRHQKTRSFGFPPKGPNFSRPAGPTPSRFSQQSQSSFHSPSVASNQPPVNACWHCGDPSHFKNNCPQLKPQGPAYSNSMNGPKNTSAPAPKAPSAVSQQNKTPYQGRARVNHVDAQEAQQAPGVVLGEFLVEFTPATVLFDSGASHSFIATSFVEKHGIPSTPLEIPLVTRTPGFDLLCQLKCSQVRILLSGVVFLADLTVLPSKGIDVILGMDWLTKHKGIISCADETVLLTDQQGNISVVEEFMDVFPEELPGMPPEREVEFYIDLIPGTAPIAKRPYRMAPTELAELKLQISDLQQKGYIRPSSSPWGAPVLFVSKKDGSMRMCIDYRSLNEVTIKNKYPLPRIDDLFDQLQGAKYFSKIDLRSGYHQLRIKEADIQKTAFVTRYGQYEFTVMLFGLTNAPAFFMNLMNKVFMEELDKFVVVFIDDILIYSKNREDHKRHLRIVLGKLRAHQLYAKLSKCEFWLEKIAFLGHILTAEGIEVDPSKVEAVSKWRQPTNVSEVRSFLGMVGYYRRFIKGFSSIARPMTELLKKDHKFVWTPKCEESFQIIKEKLTTAPVLSLPDIHQDFVVFCDASRQGLGCVLMQNEKVIAYASRLLKPHEQNYPTHDLELAAIVHALKIWRHYLIGNKCHIFTDHKSLRYIFTQPDLNLRQRRWLELIKDYDLEIHYHPGKANVVADALSRKPFGIKGTNFLEDWKEESAQLNACLGNNDSIEVKPMLENLIRKAQHLDPETARLVEKARKEQLPDLRTDNQGVVWFKHRLCVPKGEAREVLLKEAHDSAYSIHPGTTKMYLDLKTRYWWKGMKKEIAQYVARCDICQRTKVEHQKPAGLLQPLPIPEWKWEEIGMDFVTGLPRTQKGNDSIWVIIDRLTKVAHFIPVKTTFGGATLARIYLKEIVKLHGIPRKIVSDRGTQFTSKFWTSLQKAMGTKLDFSTAYHPQTDGQTERTPLMWSNVGEKALEGPAFVKEAEEKVALIRRRLLEAQSRQKSYADNRRRELRFEEGDFVYLKVSPMRGVRRFQVKGKLAPCFVGPYPIIGKVGPAAYRLELPESMSDIHNVFHVSQLRKCLQAPESHLEEETVQIQKDLQYHEKPVKILDLAVRKTRTSEVKLCKVQWSREGEEEATWESEDFLRREYPYLFPNXSKSRGRDSFKWVGL

SEQ ID NO: 10601 - protein, 1548 aa, Zea mays
  Clone ID: TF_ZM3657.C15.o1.fg.pep
MEDSLAIRTSYCSEVEGFPHLLRSCALRMGIRKKPEYVWTEHIEGGMEKCSMAVYLGESRNYPNHPSFQVTITGYRFHDTCQNVARKALRQLCQNYNKVIFETPLHYFPPSNKNTPTWRKRLQALSGGDPIENDPTIVYMAGYLHTLDNQYDDLALHCTSLTSRVESLEQKSLLMAEGEEANTREAYRTLKLDYDKKLKKLAPARKIRKKTKSQGCQTEQKEENPPRNPSDTEEMSLASLDDLLKEFGDTLEKEFGSTLDSTRMASDRTTPTASGIGARLPLGAEGEAGREGGETHLPAPPELPLDLAQVLANQTRLIEVLTRSLENQRPGGGRPQDKMGEFLRLKPPTFAGSSNPLDANDWLRTIKRKLEAIACPENQRVQLAAHQLSGMALAWWDTFSEAVRDATWAEFEAAFREHHFTELARYAPEDVSTEARKMARFLRGLRPELKTILASQDFHSFSHLSNKAIQVERAKEEEKGHIKRKFQVLRAQQQERHQRARPLGLPPRGPSFNKQSGPTPSRYSQQSQSSLQAPSVASNQPPANACWHCGDPSHFKNNCPQLKASGPTYSNSVNGPKIPSAPTPKALPSSSQQSRTQYQGRARVNHVDAQEAQQAPGVVLGASHSFIAAKFVEKHGIPSTPLAIPLVTRTPRSDLLCKLRCSQVRILLSGVVFLADLTILPSQGIDVILGMDWLAKHKGIISCASKTVLLTDHQGKAVSCQAQPPANDPMMFNLIAESMSVIKEFEDVFPEELPGMPPERGVEFYIDLIPGTAPIAKRPYRMAPTELAELKLQISELQEKGYIRPSSSPWGAPVLFVTKKDGSMRMCIDYRSLNEVTIKNKYPLPRIDDLFDQLQGAKYFSKIDLRSGYHQLRIKEADIQKTAFNTRYGQYEFTVMPFGLTNAPAFFMNLMNKVFMEELDKFVVVFIDDILIYSKSRKDHEHHLRIVLGRLRAHQLYAKLSKCEFWLEKIAFLGHILTAEGIEVDPSKVEAVSNWKQPSNVSEVRSFLGMAGYYRRFIKGFSSIAKPMTELLKKDNKFMWTPKCEESFQIIKEKLTTAPVLTLPDIHQDFVIFCDASKQGLGCVLMQNEKAIAYASRLLKPHEQNYPTHDLELAAIVHALKIWRHYLIGNKCHIFTDHKSLKYIFTQPDLNLRQRRWLELIKDYDLEIHYHPGKANVVADALSRKPFGVKGTNFLEDWKRESAQLNACLGDNGGLEVKPNLEDLICKAQRLDAETARLMGRARKEQLPGLRTDEQGVLWFKNRLCVPVGEARGTLLNEAHNSAYSIHPGTTKMYLDLKARYWWKGMKKEIAQYVARCDTCQRTKAEHQKPAGLLQPLPIPEWKWEEIGMDFVTGLPRSQRGNDSIWVIIDRLTKVAHFVPVKTTFGGAALARIYLKEIVRLHGIPRKIVSDRGTQFTSKFWKGLQQAMGTKLDFSTAYHPQSDGQTERVNKVLEDLLRACVLTFDRDWESSLPYAEFSYNNSHQASIKMSPFEALYGRKCQTPLMWSNVGERTLEGPDFVKEAEEKVALIRRRLLEAQSRQKSYADNR

SEQ ID NO: 10602 - protein, 1602 aa, Zea mays
  Clone ID: TF_ZM4489.C3.o4.fg.pep
MEASLAIKSSYCSEVEGFPRLLRSCALRMGIRKKPEYVWTEHLEGGMIRCSMAVYLGESQSYPNQRSFQVTFTEAHFLDACQNVARKALRQLCQNYNKVIIETPLRYFPPSNKNTPTWRKRLQALSGGDPIENDPTIVYMAGYLHTLDNQYDDLALHCTSLTSQVESLEQKVRELSEEKASLQENLSLAEGEEANTREAYRTLKLDYDKKLKKLAPARKTRKKTKSQGCQTEQQEENPPRNQSDPEDMSLASLDDLLLEFGDTLEKEFGGTLATLFPWHMASDRTTPTASGIGARLPLGAEGEAGGEGGETHLPAPPELPLDLAQILANQTRLIEVLTRSLENQRPGGGRPQDRMGEFLRLKPPTFAGSSNPLDADDWLRTIKRKLEAIACPENQRVQLAAHQLSGMALAWWDTFSEAIRDATWAEFEAAFREHHVPQGIVQLKEDEFRELTQGGRTVSEYVHKFTELARYAPEDVSTEARKMARFLRGLRPELKTILASQDFHSFSHLSNKAIQVERAKEEEKGHIKRKFQVLRAQQQERHQRARPFGLPPRGPSFHKQSGPSPSRFSQQSQSSHQAPSVASNQPPANACWHCGDPSHFKNNCPQLKAPGPTYSNSVNGPKVPSAPTPKALPSNSQQSRTQYQGRAREFEDVFPEELPGMPPEREVEFYIDLIPGTAPIAKRPYRMAPTELAELKLQISELQQKGYIRPSSSPWGAPVLFVTKKDGSMRMCIDYRSLNEVTIKNKYPLPRIDDLFDQLQGAKYFSKIDLRSGYHQLRIKEADIQKTAFVTRYGQYEFTVMPFGLTNAPAFFMNLMNKVFMEELDKFVVVFIDDIIIYSKNRKDHEHHLRIVLGRLRAHQLYAKLSKCEFWLEKIAFLGHILTAEGIEVDPSKVEAVSNWKQPSNVSEVRSFLGMAGYYRRFIKGFSSIAKPLTELLKKDNKFVWTPKREESFQIIKEKLTTAPVLTLPDIHQDFVIFCDASKQGLGCVLMQNEKVIAYASRLLKPHEQNYPTHDLELAAIVHALKIWRHYLIGNKCHIFTDHKSLKYIFTQPDLNLRQRRWLELIKDYDLEIHYHPGKANVVADALSRKPFGIKGANFLEDWKKESAQLNACLGDNGSLEVKPNLEDLICKAQRMDAETTKLMERARKEQLPDLRADNQGTLWFRDRLCVPVGETRETLLNEAHNSAYSIHPGTTKMYLDLKARYWWKGMKREIAQYVARCDTCQRTKAEHQKPAGLLQPLPIPEWKWEEIGMDFVTGLPRSQRGNDSIWVIIDRLTKVAHFIPVKTTFGGAALARLYLKEIVRLHGIPRKIVSDRGTQFTSKFWKGLQQAMGTKLDFSTAYHPQSDGQTERVNKVLEDLLRACVLAFDRDWESSLPYAEFSYNNSHQASIKMSPFEALYGRKCQTPLMWSNVGERTLEGPDFVKEAEEKVALIRRRLLEAQSRQKSYADNRRRELRFEEGDFVYLKVSPMRGVKRFQMKGKLAPRFVGPYPIISRIGPVAYRLELPESMSDIHNVFHVSQLRKCLKVPETRIKAEAIQIQKDLQYREKPVKILDSAVRRTRNLEVKLCKVQWSRDGEEEATWESEDFLRREYPYLFPNTV

SEQ ID NO: 10603 - protein, 1480 aa, Zea mays
  Clone ID: TF_ZM4715.C4.o1.fg.pep
MENPWLIRISYCSEEEGFPHLLRSCALRLGIRKKPEYVWKEYRENGIEKCSMAVYLGESQNYPNHPPFQITFIGHSFPDTCQSVARKALKQLCQNYSREISETPLRYFPPSNKNTPTWRKRLQSLSGGDPTEDDPTIVYMAGYLHTLDNHYDELSSHCTHLNSRVESLEQQVKELKQEKASLQESLNIAEGEEANTREAYRTLKMDYDKKLKKLAPKKKIQKKTTNQGCQTEKKKKKAPLALPPPRIDDWSDDEDVSLASLDDLLKAFGDTLDKEFATWWDTFNVTIRDATWAEFEAAFREHHVPQGLVQLKEDEFRELTQDGRSVSEYVHKFTELARYAPDDVSTESKKMARFLKGLRPELKTILASQDFLNFSHLSNKAMQVERAKEEEKGHLKRKFQVLRAQQQDRHQKTRSFGFPPKGPNFSRPAGPTPSRFSQQSQSSFHSPSVASNQPPANACWHCGDPSHFKNNCPQLKVPVPAYSNSVNGPKNTSTSTPKAPSAVSQQNKAPYQGRARVNHVDAQEAQQAPGVVLEELPGMPPEREVEFYIDLIPGTAPIAKRPYRMAPTELAELKLQIVDLQQKGYIRPSSSPWGALVLFVSKKDGSMRMCIDYRSLNEVTIKNKNPLPRIDDLFDQLQGAKYFSKIDLRSGYHQLRIKEADIQKTAFVTRYGQYEFTVMSFGLTNAPTFFMNLMNKVFMEELDKFVVVFIDDILIYSKSREDHKRHLRIVLGKLRAHQLYAKLSKCEFWLEKIAFLGHILTAEGIEVDPSKVEAVSKWRQPTNVSEVRSFLGMAGYYRRFIKGFSSIARPMIELLKKDHKFAWTQKCEGSFQVIKEKLTTALVLSLPDIHQDFVVFCDASRQGLGCVLMQNEKVIAYASRLLKSHEHNYPTHDLELAAIVHALKIWRHYLIGNKCHIFTDHKSLRYIFTQPDLNLRQRRWLELIKDYDLEIHYHPGKANVVADALSRKPFGIKGTNFLEDWKKESAQLNACLGNNDSLEVKPMLEDLICKAQRLDSETARLVEKARKEQLPDLRTDDQGVLWFKHRLCVPKGEAREVLLKEAHDSAYSIHPGTTKMYLDLKTRYWWKGMKNEIAQYVARCDICQRTKAEHQKPAGLLQPLLIPEWKWEEIGMDFVTGLPRTQKGNDSIWVIIDRLTKVAHFIPVKTTFGGATLARIYLKEIVRPHGIPRKIVSDRGTQFTSKFWTSLQKAMGTKLDFSTAYHPQTDGQTERVNKVLEDLLRACVLAFDRSWESSLPYAEFSYNNSYQASIKMSPFEALYGRKCQTPLMWSNVGGKALEGPAFVKEAEEKVALIRRRLLEAQSRQKSYTDNRRRELRFEEGDFVYLKVSPMHGVRRFQVKGKLAPRFVGPYPIIGRVGPAAYRLELPESMSDIHNVFHVSQLRKCLQAPESHLEEETVQIQKDLQYREKPVKILDSAVRKTRTSEVKLCKVQWSREGEEEATWESEDFLRREYPYLFPNPV

SEQ ID NO: 10604 - protein, 930 aa, Zea mays
  Clone ID: TF_ZM4912.C1.o17.fg.pep
MGDFLRLKPPTFAGSSNPLDADDWMHTIKRKLEAIGCPENQRVQLAAHQLSGMALAWWDTFNVTIRDATWAEFEAAFREHHVPQGLVQLKEDKFRELTQDGRSVSNYVHKFTKLARYAPDDVNTESKKMARFLKGLRPELKTILASQDFLNFSHLSNKAMQVERAKEEEKGHLKRKFQVLRAQQQDRHQKTRSFGFPPKGPNFGRPAGPTPSRFSQQSQSSFHSSLVASNQPLANACWHCGDPSHFKNNCPQLKPPGPSYSNSVNGPKNTSATAPKAPSAVSQQNKTPYQGRARVNHVDAQEAQQAPGVVLGEFLVEFTPATVLFDSGASHSFIATSFVEKYGIPSTPLEIPLVTRTPGSDLLCQLKCSQVRILLSGVVYLADLTVLPSKGIDVILGIDWLTKHKSIISCADKTVLLTDQQGKSVSCQAQPPASDPMMFYLTTESISVVEEFMDVFPEELLGMPPEREVEFYIDLIPGTAPIAKRPYRMAPTELAELKLQISDLQQKGYIRPSSSPWGAPVLFVSKKDGSMRMCIDYRSLNEVTIKNKYPLPRIDDLFDQLQGAKYFSKIDLRSGYHQLRIKEADIQKTAFVTRYEQYEFTVMSFGLTNAPAFFMNLMNKVFMEELDKFVVVFIDDILIYSRNREDHKRHLRIVLGKLRAHQLYAKLSKYHLTKVAHFIPVKATFGGATLARIYLKEIVRLHGIPRKIVSDRGTQFTSKFWTSLQKAMGTKLDFSTAYHPQTDGQTERVNKVLEDLLRAYPSHVVQRGGKALEGPAFVKEAEEKVALIRRRLLEAQSRQKSYADNRRRELRFEEGDFVYLKVSPMRGVRRFQVKGKLAPRFVGPYPIIGKLRKCLQAPESHLEEETVQIQKDLQYREKPVKILDSAVRKTRTSEVKLCKVQWSREGEEEATWESEDFLRKEYPYLFPNPV

SEQ ID NO: 10605 - protein, 1261 aa, Zea mays
  Clone ID: TF_ZM4948.C2.o9.fg.pep
MALAWWDTFNVTIRDATWAEFEAAFREHHVPQGLVQLKEDKFRELTQDGRSVSEYVHKFTELARYAPDDVNTESKKMARFLKGLRPELKTILASQDFLNFSHLSNKAVQVERAKEEEKGHLKRKFQVLRAQQQDRHQKTRSFGFPPKGPNFSRPVGPTPSRFSQQSQSSFHSPSVASNQPPANACWHCGDPSHFKNNCPQLKPQGPAYSNSVNGPKNTSAPAPKALSAVSQQNKTPYQGRARVNHVDAQEAQQAPGVVLGEFLVEFTPATVLFDSGASHSFIATSFVEKYGIPSTPLEIPLVTRTPGSDLLCQLKCSQVRILLSGVVFLADLTVLPSKVIDVILGMDWLTKHKGIISCTDKTVLLTDQQGKSVSCQAQPPASDPMMFSITTENISVVEEFMDVFPEELPGMPPEREVEFYIDLIPGTAPIAKRPYRMAPTELAELKLQISDLQQKGYIRPSSSPWGAPVLFVSKKDGSMRMCIDYRSLNEVTIKNKYPLPRIDDLFDQLQGAKYFSKIDLRSGYHQLRIKEADIQKTAFVTRYGQYEFTVMPFGLTNAPAFFMNLMNKVFMDELDKFVVVFIDDILIYSKNREDHKRHLWIVLGKLRAHQLYAKLSKCEFWLEKIAFLGHILTAEGIEVDPSKVEAVSKWRQPTNVSEVRSFLGMAGYYRRFIKGFSSIARPMTELLKKDHKFVWTPKCEESFQIIKEKLTTAPVLSLPDIHQDFVVFCDASRQGLGCVLMQNEKVIAYASRLLKPHEQNYPTHDLELAAIVHALKIWRHYLIGNKCHIFTDHKSLRYIFTQPDLNLRQRRWLELIKDYDLEIHYHPGKSNVVADALSRKPFGIKGTNLLEDWKGESAQLNACLGNNDSLEVKPTLEDLICKAQHLDPETARLVGKARKEQLPDLRTDDQGVLWFKHRLCVPKGEAREKGNDSIWVIIDRLTKVAHFIPVKTTFGGATLARIYLKEIVRLHGIPRKIVSDRGTQFTSKFWTSLQKAMGTKLDFSTAYHPQTDGQTERVNKVLEDLLRACVLAFDRSWESSLPYAEFSYNNSYQSSIKMSPFEALYGRKCQTPLMWSNVGEKALEGPAFVKEAEEKVALIRRRLLEAQSRQKSYADNRRRELRFEEGDFVYLKVSPMRGVRRFQVKGKLAPRFVGPYPIIGKVGPAAYRLELPESMSDIHNVFHVSQLRKCLQASESHLEEETVQIQKDLQYREKPVKILDSAVRKTCTSEVKLCKVQWGREGEEEATWESEDFLRREYEST

SEQ ID NO: 10606 - protein, 941 aa, Zea mays
  Clone ID: TF_ZM5108.C7.o8.fg.pep
MSPEKPSDSYVRTTTNNKNIPTWRKRLQALSGGDPIENDPTIVYMAGYLHTLDNQYDDLALHCTSLTSRVESLEQKVRELSEEKASLQESLSLAEGEETNTREAYRTLKMDYDKVLKKLAPARKIRKKTRSQGCQTEQQEENPPRNQSDTEDMSLASLDDLLKEFGDTLEKEFGATLFPWQMASDRTTPTASGIGARLPLGAEGEAGGEGGETHLPAPPELPLDLAQILANQTRLIEVLTRSLENQRPGGERPQDRMGEFLRLKPPTFAGSSNPLDADDWLRTIKRKLEAIACPENQRIQLAAHHLSGMALAWWDTFSEAIRDATWAEFEAAFREHHVPQGIVQLKEDEFRELTQGGRTISEYVHKFTELARYAPEDVSTEARKMARFLRGLRPELKTILASQDFHSFSHLSNKAIQVERAKEEEKGHIKRKFQVLRAQQQERHQRARPFGLPPRGPSFHKQSGPSPSRYSQQSQSSHQAPSVASNQPPANACWHCGDPSHFKNNCPQLKAPGPTYSNSVNGPKIPSAPTPKAFPSSSQQSRAQYQGRARVNHVDAQEAQQAPGVVLGEFLVEFTPASVLFDSGASHSFIAAKFVEKHGIPSTPLAIPLVTRTPGSDLLCKLRCSQVRILLSGVVFLADLTILPSQGIDVILGMDWLAKHKGVISCASKTVLLIDHQGKAVSCQAQPPANDPMIFNLAVESMSVIKEFEDVFPEELPGMPPEREGLQQAMGTKLDFSTAYHPQSDGERTLEGPDFVKEAEEKVALIRRRLLEAQSRQKSYADNRQRELRFEEGDFVYLKVSPMRGVKRFQMKGKLAPRFVGPYPVISRIGPVAYRLELPESMSDIHNVFHVSQLRKCLEVPETRIEAEAIQIQKDLQYREKPEKILDSAVRRTRNSEVKLCKVQWSRDGEEEATWESEDSLRKEYPYLFSSPVRISRARFL

SEQ ID NO: 10607 - protein, 551 aa, Zea mays
  Clone ID: TF_ZmC10872_15.pep
MITGDKPEASGRKNNERTMSKEVGDKHKGDKKKKKRKKSASSIKSQRKGDKKKKKMKKVVYYETDSSSPSTSSVESTTLKRQERKKYKEEPQAMYNRLKAMVNQVRNLGSTKWDDHEMIKMSPEEIISKFVSFELMIKNSKHIVNLDQCATSTPEVQPVAFKVMEEKKEESTPSRLPIDVSKLDNEEMALIIKGFRQILKQRKGKDYKPCSKRVCYRCGKSGHYIAKCPYTSDSDRDDDKKGKKKMENKRYYKRKGGEAHMGREWDSDESSTNSSSDKDAANIAINKGLLFPNVGHKCLMAKDGKRRSGCTNHMKEEKRMFSSYEKNEDPQRAITFGDGNQGLVKDSLDYNLLSVSQLCKMGYSCLFTDVGVTVFRKNNDSIAFKGVLDGQLYLVDFDDNNVELDTCLIAKTNMGWLWHRRLAHVGMKNLHKLLKGEHILGLTNEKSQTQDTLKRFLRWAQNEFGLRIKKIRSNNGTEFKNSQIEGFLEDEGIKHEFSSPYTPQQNGVVKRKNRTLLDMARTMLDEYKTLDRFWAEAINTACYSINRLYLH

SEQ ID NO: 10608 - protein, 1716 aa, Zea mays
  Clone ID: TF_ZmC36592_123.pep
MEDSLAIKSSYCSEVEGFPRLLRSCALRMGIRKKPEYVWTEHFEGGMIRCSMAVYLGESQSYPNQRSFQVTFTGVHFLDACQNVARKALRQLCQNYNKVIIETPLRYFPPSNKNTPTWRKRLQALSGGDPIENDPTIVYMAGYLHTLDNQYDDLALHCTSLTSQVESLEQKVRELSEEKASLQESLSLAEGEEANTREAYRTLKTDYDKVLKKLAPARKIRKKTKSQGCQTERQEENPPRNQSDTEDMSLASLDDLLKEFGDTLEKEFGATLFPWQMASDRTTPTASGIGARLPLGAEGEAGGEGGETHLPAPPELPLDLAQILANQTRLIEVLTRSLENQRPGGGRAQDRMGEFLRLKPPTFAGSSNPLDADDWLRTIKRKLDAIACPENQRIQLAAHQLSGMALAWWDTFSEAIRDATWAEFEAAFREHHVPQGIVQLKEDEFRELTQGGRTVSEYVHKFTELARYAPEDVSTEARKMARFLRGLRPELKTILASQDFHSFSHLSNKAIQVERAKEEEKGHIKRKFQVLRAQQQERHQRARPFGLPPRGPSFHKQSRPSPSRYSQQSQSSHQAPSVASNQPLANACWHCGDPNHFKNNCPQLKAPGPTYSNSVNVPKVPSAPTPKAFPSSSQQSRAQYQGRARVNHVDAQEAQQAPGVVLGEFLVEFTPASVLFDSGASHSFIAAKFVEKHGIPSTPLAIPLVTRTPGSDLLCKLRCSQVRILLSGVVFLADLTILPSQGIDVILGMDWLARHKGVISCASKTVLLIDHQGKAVSCQAQPPANDPMIFNLAVESMSVIKEFEDVFPEELPGMPPEREVEFYIDLIPGTAPIAKRPYRMAPTELAELKLQISELQQKGYIRPSSSPWGAPVLFVTKKDGSMRMCIDYRSLNEVTIKNKYPLPRIDDLFDQLQGAKYFSKIDLRSGYHQLRIKEADIQKTAFVTRYGQYEFTVMPFGLTNAPAFFMNLMNKVFMEELDKFVVVFIDDILIYSKSRKDHEQHLRTVLGRLRAHQLYAKISKCEFWLEKIAFLGHILTAEGIEVDPSKVEAVSNWKQPSNVSEVRSFLGMAEYYRRFIKGFSSIAKPMTELLKKDNKFVWTPKCEESFQIIKEKLTTAPVLTLPDIHQDFVIFCDASKQGLGCVLMQNEKVIAYASRLLKPHEQNYPTHDLELAAIVHALKIWRHYLIGNKCHIFTDHKSLKYIFTQPDLNLRQRRWLELIKDYDLEIHYHPGKANVVADALSRKPFGVKGANFLEDWKKESAQLNACLGDNGSLEVKPNLEDLICKAQRLDAETTKLIERARKEQLPDLRTDNQGALWFKDRLCVPMGETRETLLDEAHNSAYSIHPGTTKMYLDLKTRYWWKGMKREIAQYVARCDTCQRTKAEHQKPAGLLQPLPIPEWKWEEIGMDFVTGLPRSQRGNDSIWVIIDRLTKVAHFIPVKTTFGGAALARLYLKEIVRLHGIPRKIVSDRGTQFTSKFWKGLQQAMGTKLDFSTAYHPQLDGQTERVNKVLEDLLRACVLAFDRDWESSLPYAEFSYNNSHQASIKMSPFEALYGIKCQTPLMWSNVGERTLEGPDFVKEAEEKVALIRRRFQMKGKLAPRFVGPYPVISRIGPVAYRLELPGSMSDIHSVFHVSQLRKCLKVPETRIEAETIQIQKDLQYREKPVKILDSAVRRTRNSEVKLCKVQWSRDGEEEATWESEDSLRKEYPYLFSSPV

SEQ ID NO: 10609 - protein, 1442 aa, Zea mays
  Clone ID: TF_ZM4158.C1.o1.fg.pep
MASDRTTPTASGIGARLPLGAEGEAGGEGGETHLPAPPELPLDLAQILANQTRLIEVLTRSLENQRPGGGRPQDRMGEFLRLKPPTFAGSSNPLDADDWLRTIKRKLEAIACPENQRVQLAAHQLSGMALAWWDTFSEAIRDATWAEFEAAFREHHVPQGIVQLKEDEFRELTQGGRTVSEYVHKFTELARYAPEDVSTEARKMARFLRGLRPELKTILASQDFHSFSHLSNKAIQVERAKEEEKGHIKRKFQSAESELPSGTLRCKQPAASKCLLALRGPQSLQEQLPPVEGTRTNLHQLGEWPQGSIRTHPKAFPSSSQQSRAQYQGRARVNHVDAQEAQQAPGVVLGEFLVEFTPASVLFDSGASHSFIAAKFVEEHGIPSTPLAIPLVTRTPGSDLLCKLRCSQVRILLSGVVFLADLTILPSQGIDVILGMDWLARHKGVISCASKTVLLIDHQGKAVSCQAQPPANDPMIFNLAVESMSVIKEFEDVFPEELPGMPPEREVEFYIDLIPGTAPIAKRPYRMAPTELAELKLQISELQQKGYIRPSSSPWGAPVLFVTKKDGSMRMCIDYRSLNEVTIKNKYPLPRIDDLFDQLQGAKYFSKIDLRSGYHQLRIKEADIQKTAFVTRYGQYEFTVMPFGLTNAPAFFMNLMNKVFMEELDKFVVVFIDDILIYSKSRKDHEQHLRTVLGRLRAHQLYAKLSKCEFWLEKIAFLGHILTAEGIEVDPSKVEAVSNWKQPSNVSEVRSFLGMAGYYRRFIKGFSSIAKPMTELLKKDNKFVWTPKCEESFQIIKEKLTTAPVLTLPDIHQDFVIFCDASKQGLGCVLMQNEKVIAYASRLLKPHEQNYPTHDLELAAIVHALKIWRHYLIGNKCHIFTDHKSLKYIFTQPDLNLRQRRWLELIKDYDLEIHYHPGKANVVADALSRKPFGVKGANFLEDWKKESAQLNACLGDNDGLEVKPNLEDLIRKAQRLDAETTKLLERARKEQLPDLRTDNQGALWFKDRLCVPVGETRETLLDEAHNSAYSIHPGTTKMYLDLKTRYWWKGMKREIAQYVARCDTCQRTKTEHQKPAGLLQPLPIPEWKWEEIGMDFVTGLPRSQRGNDSIWVIIDRLTKVAHFIPVKTTFGGAALARLYLKEIVRLHGIPRKIVSDRGTQFTSKFWKGLQQAMGTKLDFSTAYHPQSDGQTERVNKVLEDLLRACVLAFDRDWESSLPYAEFSYNNSHQASIKMSPFEALYGRKCQTPLMWSNVGERTLEGPDFVKEAEEKVALIRRRLLEAQSRQKSYADNRRRELRFEEGDFVYLKVSPMRGVKRFQMKGKLAPRFVGPYPIISRIGPVAYRLELPESMSDIHNVFHVSQLRKCLKVPETRIEAEAIQIQKDLQYREKPVKILDSAVRRTRNSEVKLCKVQRSRDGEEEATWESEDSLRKEYPYLFSNPV

SEQ ID NO: 10610 - protein, 1046 aa, Zea mays
  Clone ID: TF_ZM4163.C12.o4.fg.pep
MARFLRGLRPELKTILASQDFHSFSHLSNKAIQVERAKEEEKGHIKRKFQVLRAQQQERHQRARPFGLPPRGPSFHKQSGPSPSRYSQQSQSSHQAPSVASNQPPANACWHCGDPNHFKNNCPQLKAPGPTYSNSVNGPKVPSAPTPKAFPSSSQQSRAQYQGRARVNHVDAQEAQQAPGVVLGASHSFIAAKFVEKHGIPSTPLAIPLVTRTPGSDLLCKLRCSQVRILLSGVVFLADLTILPSQGIDVILGMDWLARHKGVISCASKTVLLIDHQGKAVSCQAQPPANDPMIFNLAVESRSVIKEFEDVFPEELPGMPPEREVEFYIDLIPGTAPIAKRPYRMAPTELAELKLQISELQQKGYIRPSSSPWGAPVLFVTKKDGSMRMCIDYRSLNEVTIKNKYPLPRIDDLFDQLQGAKYFSKIDLRSGYHQLRIKEADIQKTAFVTRYGQYEFTVMPFGLTNAPAFFMNLMNKVFMEELDKFVVVFIDDILIYSKSRRDHEQHLRTVLGRLRAHQLYAKLSKCEFWLEKIAFLGHILTAEGIEVDPSKVEAVSNWKQPSNVSEVRSFLGMAGYYRRFIKGFSSIAKPMTELLKKDNKFVWTPKCEESFQIIKEKLTTAPVLTLPDIHQDFVIFCDASKQGLGCVLMQNEKVIAYASRLLKPHEQNYPTHDLELAAIVHALKIWRHYLIGNKCHIFTDHKSLKYIFTQPDLNLRQKRWLELIKDYDLEIHYHPGKANVVADALSRKPFGVKGANFLEDWKKESAQLNACLGDNGSLEVKPNLEDLICKAQRLDAETTKLIERARKGQLPDLRTDNQGALWFKDRLCVPMGETRETLLDEAHNSAYSIHPGTTKMYLDLKTRYWWKGMKREIAQYVAQCDTCQRTKAEHQKPAGLLQPLPIPEWKWEEIGMDFVTGLPRSQRGNDSIWVIIDRLTKVAHFIPVKTTFGGAALARLYLKEIVRLHGIPRKIVSDRGTQFTSKFWKGLQQAMGTKLDFSTAYHPQSDGQTERVNKVLEDLLRACVLAFDRDWESSLPVGDLFSNAMN

SEQ ID NO: 10611 - protein, 256 aa, Zea mays
  Clone ID: TF_ZM4181.C3.o3.fg.pep
MACYLEVVDLGVWRVTHDGMKPPKNPEKLTTNNELVRYMYSRLNLIINELNYIGIKKLGDADIMGQEEQTSSMPYAFACDEKKDKKKAATPSSSSEEEEEKERDDDDQPSTSSLKDKETIQCVGKVEDLLLNINRKKQKRYDASYARRRATSRTTVQIWSNPQRGGAKGYPDYHPKTCLTLKDVIRAHSLRMKGSGSASPEVPLRGLPKNSASLEPNLGEGVSSGGSLPHSRPSHSRAAMFTSPEPVSGDKDKTCE

SEQ ID NO: 10612 - protein, 411 aa, Zea mays
  Clone ID: TF_ZM5106.C1.o3.fg.pep
MSPEKPSDSCARTTTNNKNTPTWRKRLQALSGGDPIENDPTIVYMAGYLHTLDNQYDDLALHCTSLTSQVESLEQKVRELSEEKASLQESLSLAEGEETNTREAYRTLKMDYDKMASDRTTPTASGIGARLPLGAEGEAGGEGGMALAWWDTFSEAIRDATWAEFEAAFREHHVPQGIVQLKEDEFRELNQGGRTVSEYVHKFTELARYAPEDVSTEARKMARFLRGLRPELKTILASQDFHSFSHLSNKAIQVERAKEEEKGHIKRKFQVLRAQQQERHQRARPFGLPPRGPSFHKQSGPSPSRFSQQSQSSHQAPSVASNQPPANACWHCGDPNHFKNNCPQLKAPGPTYSNSVNGPKVPSAPTPKAFPSSSQQSRAQYQGRARVNHVDAQEAQQAPGVVLGVPKSEFF

SEQ ID NO: 10613 - protein, 1104 aa, Zea mays
  Clone ID: TF_ZmC951_452.pep
MSGDHAKREIVTGGDKSASSGRTHSRESDHKHKEESASSIKSQRRGDKKKKMKKWSTTRPTLRHPPPPASNHRPSLLSAMSVRSIVPKVRDKDYDSDEADQIRHFNSQATTILLASLCREEYNKVQGLKTAKEIWDVLKTTHEGDEVTKITKRETIEGELSRFILNQEEEPQSMYNRLMTLVNQVRNLGSTKWDDHEMVKVILRSLVFHNPTQVQLIRGDPRYKLMSPEEVIGKFVSFELMIKGSKHIVNLEQGGTSTPEVQPVTFKAAEEEKKESTPSRIPIDVSKLDNEEMTLIIKSFRQILKQRKGKDYKLRSKRVCYKCGKPSHFIANCLMSSDSDRGDDKRGKRKEKKKYYKKKGGDAHVCREWDSDESSTDSSSDEDATNIAVNKGLLFPNVGHKCLMEKDGKRKSDEGSSSEDEDNLLALFANLNMQQKEKLNELIGAIHEKDELLDSQEEFLIKENKKHVKVKNAYAQEVEKNKNLTKELSICHDTISNLRTENANLFAKVENLKTETKDLNGCNDSISCLRNENAILHAKIEELNACKPSTSNVDHVTICTRCRDINVDAIHDRLALIKQQNDHIAQLTSKINEHKIENEKFKFARSMLYNGRHPGIKDGIGFQQGRNVKLNAPKILSNFVKGKAPMAQDNEGYILYPVGYPEHKIRRIHARKSHSVSHHAFMYKNETSSSSHSTHVKMPKKKSSTASNDHNISFKTFDASYVLINKSDKVVYASGGSSWIIDSGCTNHMTGEKKMFSSYEINEDPKRTITFGDGNQGVTFFRRSNDSVAFKGVLEGQLYLVYFNRAELDTCLIAKTNMGWLWHRRLAHVGMQNLHKLLKGEHILGLTNVQFEKDRVCSACQAGKKVGSHHPHKNITTTDRPLELLHMDLFGSIAYISIGGSKYCLVIVDDYSRFTWVFFLQQKSQTQETLKGFLRRAQNEFGLRIKKIRSDNWTEFKNSQIEGFLEEEGIKHEFSSPYTPQQNGVVERKNRTLLDMARTMLDEYKTPDRFWEEAINTACYSINRLYLHQILFKTSYELLTGKKPNVSYFSVFGSKCFILVKRGRKSKFAPKVVEGFLLGYDSNTRAYRVFNKSTGVGVSRPGGP

SEQ ID NO: 10614 - protein, 1546 aa, Zea mays
  Clone ID: TF_ZM5028.C2.o1.fg.pep
MSGDHAKREIVTGGDKSASSGKTHSREFGHKHKEESASSIKSQRRGEKKKKMKKVVYYETDSSSPSTFGSELSSVTSKRHERKKYMRNLGSTKWDDHEMVKVILRSLIFHNPTQVQLIHGDPRYKLMSPEKVIVKFVSFELMIKGSKQIVEQGGTSTPEMQPVVFKATEEKKEESTSSRLPIDASKLDNEKMALIIKSFCQILKQRKGKDYKPRSKKVCYKCGKSDHFIAKCPISSDSDRGADKRGKKKEKKRYYKKKGGDAHVCWEWDSDMSSTDSSSDEDAANIAVNKGLLFPNVGHKRLMENDDKKKKKEKLNELISAIHEKDELLDSQEEFLIKENKKHVKVKNAYAQEVEKNENLTKELSIRHDTISNLRDENTSLIAKVEKSKVCHDSIDNLRNENASLFAKIDKLNESIASLKTENDKLISKAKDLNVCNVSISNLRNENAMLHAKIDELNACKPSTSNVNHVTICTRCRDINVDAIHDHLALIKQQNDHIAQLTAKINEHEIENENFKFARSMLYNGRRPDIKDGIGFQQGDNVKLNAPKKLSNFVKGKAPMAQDNEGYILYPAGYPEHKIRRIHARKSHSVFHHVFMYKNEASSSRHSTHAKMPKKKTPIASNDPNVSFKTFDASYVLTNKSGKVVAKYVGGKHKGSKTCVWVPKVYASGGSSWIIDSGCTNHMTGEKKMFSSYEKNEDPQRAITFGDGNQDSLDYNLLFVSQLCKMGYNYLFTDIGVTVFRRSDDSLAFKGVLEGQLYLVNFNRAKLDTCLIAKTNMGWLWHRRLAHVGMNNLHKLLKGEHILGLTNVHFEKDREKSQTQETLKGFLRRAQNEFELRIKKIRSDNGTEFKNSQTEGFLEEEGIKHEFSSPYTPQQNGVVERKNRTLLDMARTMLDEYKTPDRFWAEAINTACYSINRLYLHRILKKTSYELLTGKKPNVSYFRVFGSKCFILVKRGRKSKFAPKVVEGFLLGYDSNTRAYRVFNKSTGLVEVSYDIVFDENNGSQVEQVDLDELDDEEAPCVVLRNMSIGDVCPKESEEPTQAQDQPSSSMQASPPTQDEDQAQDDENEDQEDEPPQEEDNDQGGDEANKDKEDDQEQRPPHPRVHQAIQRDHPVNSILGDIHKGVTTRSQVTHFCQHYSFVFSIEPYKVEDALRDSDWVLAMQEELNNFTRNEVWHLVPRPNQNVVGTKWVFRNKQDEHGVMTRNKARLVAKGYSHVEGLDFGETYAPVARLESIRILFAYATYHGFKLYQMDVKSAFLNGPIKEGDFKSSNSKRAPSSTKLNTFQDILTKFGMKDAKPIKTPMGTNGHLDLDTGGKSVDQKVYRSMIGSLLYLCASRPYIMLSVCMCARFQADPKEVHFKAVKRIMRYLVYTPKFGLWYPEGSTFDLIGYSDADWAGCKIDRKSTSRTCQFLGRSLVSWASKKQNSVALSTAKAKYIVAGHCCAQLLWMRQTLRDYSYKLSNVPLLCDNESAIHMADNPVEHSRTKHIDIRYHFLRDRQQRGDIEIAYVSTKEQLADIFTKPLDEKTFTKLRNELNILDSQNFD

SEQ ID NO: 10615 - protein, 573 aa, Zea mays
  Clone ID: TF_ZmC119_782.pep
MSIEQMFLMQTQAVQAIGQTLAAIQQQQQQQQQQAPPQPQMPQMPRDKCAEFMRGHPPTFAHSSDPMDAEDWLHTVERELHTAPCDDREKVLYGPRLLRGAAQSWWESYLATHANPDAITWEEFRGSFRQYHVPAGLMTVKKEEFLALKQGSMSVSEYRDRFLQLSRYAPEDVNIDAKRQYRFLKGLVDPLHYQMMNHTFPTFQHLIDRAIMTKRKRKEMEDRKRKISGPQPGSSNRPRFSGNQPQQFRQNQRPPQQHQQFQRQYPHHQYQNRQNNQSGGANQQNNQAAPAQVGNRACFHCGEQGHWVMQCPKKATQQQLGPNAPAKQNVSQPGAGNRSQPRYNHGRLNHLEAEAVQETPDMIVAFPANLIVMGTQGIDVILGMNWLDKYQAVISCDTRTIKLVSPLGEEVVTELVPPEPKKASCYQMVVDSREADPIERIKIVSEFPDVFPKDLPGMPPERKVEFAIELLSGTAPIFKRAYRISGPELVELKKQIDELSEKGYIQPSTSPWAAPVLLKGKCALGPFLSILVIECQLKCLKCEFMQWMNKVQIKIKGMFLSLSTLVLCTNILV

SEQ ID NO: 10616 - protein, 1276 aa, Zea mays
  Clone ID: TF_ZmC12418_1.pep
MTSFNACSADMMSENRRRGGRRAQQERAAQQEEVPQQQHLPPPPPMSIEQMFLMQTQAVQAIGQTLAAIQQQQQQQQQATPQPQMPQMPRDKRAEFMRGHPPTFAHSSDPMDAEDWLRTVERELHTAQCDDREKVLYGPRLLRGAARSWWESYLATHAHPDAITWEEFRGSFRQYHVPAGLMTVKKDEFLALKQGSSSISEYRDRFLQLSRYAPEDVNTDAKRQYRFLRGLVDPLQYQLMNHTFPTFQHLIDRAIMTERKRKEMEDPAQQNSQAAPAQVGNRACFHCGEQGHWVMQCPKKAAQQQSGPNAPAKQNVSQPGAGNRPQPRYNHRRLNHLEAEAVQETPSMIVGMFPVDSHIAEVLFDTGATHSFITASWVEAHNLPITTMSTPIQIDSAGGRIRADSICLNVSVEIRGIAFPANLIVMGTQGIDVILGMNWLDKFQAVISCDKRTIKLVSPLGEEVVTELVPPEPKKGSCYQIAIDSSEADPIESIKVVSEFPDVFPKDLPGMPPERKVEFAIALLPGTSPIFKRAYRISGPELVELKEQIYELSEKGYIRPSTSPWAAPVLFVEKKDGTKRMCIDYRALNEVTIKNKYPLPRIEDLFDQLRGASVFSKIDLRSAFFMNLMNSVFMDYLDKFVVVFINDILIYSQSEKEHASHLRMVLQRLREHQLYAKLSKCEFWINEVLFLGHIINKEGLAVDLKKVADILNWKAPTDARGIKSFIGMAGYYRRFIEGFSKIAKPMTVLLGNKVELKWTQKCQEAFEALKGKLTTAPVLVLPDVHKPFLVYCDACYTGLGCVLMQEGRVVAYSSRQLKVHEKNYPIHDLELAAVVHALKTWRHYLCGQKCDVYTDHKSLKYIFTQSELNMRQRRWLELIKDYELEIHYHPGKANVVADALSRKSQVNLMVARPMPYELAKEFDRLSLGFLNNSRGVTVELEPTLEREIKEAQKNDEKISEIRRLILEGKGKDFREDAKGVIWFKDCLCVPNVQSIRELILKEAHETAYFDSPWHSAYHPQTDGQTGRTNQILEDMLRACALQDQSGWDKRLPYAEFSYNNSYQDSLKMSPFQALYGRSCRTPLQWDQPGEKQVFGPDILLEAEENIRMVRENLKISQSRQRSYADTRRRELSFEVGDFVYLKVSPIRGVRRFGVKGKLAPRYIGPYQILSRRGEVAYQLSLPENLSAVHDVFHVSQLKKCLRVPEEQLPVEGLEVQKDLTYVEKPVQILEVADRVTRRKTIRMCKVKWNHHSEEEATWEREDDLLAKYPELFASQP

SEQ ID NO: 10617 - protein, 248 aa, Zea mays
  Clone ID: TF_ZmC3792_100.pep
LERKRKEMEDRKRKISGPQPGSSSRPRFSSNQPQQFRQNQRPPQQHQQRQQYQQFQRQYPQHQYQNRQSNQSGGGQFQKQNQQAPHLPAPANQQNSQAAPAQVGNRACFHCGEQGHWVMQCPKKAAQHQSGPNAPAKQNVSHGDDSSSHDTDFSANPEPEGWVARPITRDAATGDRERGIPRKGSFSAKEPGSEPPITDQGFEGWPPEGSTVASDRVGPTPTTGQGFEGQPPEGLHGRLRLLGLRAHY

SEQ ID NO: 10618 - protein, 1489 aa, Zea mays
  Clone ID: TF_ZmC3792_18.pep
MSIEQMFLMQTQAVQAIGQTLAAIQQQQQQQQQAPPQPQMPQMPRDKRAEFMRGHPPTFAHSSDPMDAEDWLRTVERELHTAQCDDREKVLYGPRLLRGAAQSWWESYLATHAHPDAITWEEFRGSFRQYHVPAGLMTVKKEEFLALKQGPLSVSEYRDKFLQLSRYAPEDVNTDAKRQYRFLRGLVDPLQYQLMNHTFPTFQHLIDRAIMTERKRKEMEDRKRKISGPQPGSSNRPRFSSNQPQQFRQNQRPPQQRQQHQQFQRQYPQNQYQNRQSNQSGGQFQRQNQQVPRLPAPANQQNNQVAPAQVGNRACFHCGEQGHWVMQCPKKAAQQQSGPNAPAKQNVPQPGAGNRSQPRYNHGRLNHLEAEAVQETPGMIVGMFPVDSHIAEVLFDTGATHSFITASWVEAHNLPTTTMSTPIQIDSAGGRIRADSICLNISVKIRGIAFPANLIVMGTQGIDVILGMNWLDKYQAVISCDKRTIKLVSPLGKEVVTELVPPEPKKGSCYQMAVDSSEADPIESIKVVSEFPDVFPKDLPGMPPERKVEFAIELLPGTAPIFKRAYRISGPELDELKKQIDELSEKGYIRPSTSPWAAPVLFVEKKDGTKRMCIDYRALNEVTIKNKYPLPRIEDLFDQLRGASVFSKIDLRSGYHQLRIRPSDIPKTAFISKYGLYEFTVMSFGLTNAPAFFMNLMNSVFMDYLDKFVVVFIDDILIYSQSEEEHADHLRMVLQRLREHQLYAKLSKCEFWISEVLFLGHIINKEGLAVDPKKVADILNWKAPTDARGIKSFIGMAGYYRRFIEGFSKIAKPMTALLGNKVEFKWTQKCQEAFEALKEKLTTAPVLVLPDVHKPFSVYCDACYTGLGCVLMQEGRVVAYSSRQLKVHEKNYPIHDLELAAVVHALKTWRHYLYGQKCDVYTDHKSLKYIFTQSELNMRQQRWLELIKDYELEIHYHPGKANVVADALSRKSQVNLMVARPMPYELAKEFDRLSLGFLNNSRGVTVELEPTLEREIKEAQKNDEKISEIRRLILDGKGKDFREDAEGVIWFKDRLCVPNVQSIRELILKEAHETAYSIHPGSEKMYQDLKKKFWWYGMKREIAEHVAMCDSCRRIKAEHQRPAGLLQPLQIPQWKWDEIGMDFIVGLPRTRAGYDSIWVVVDRLTKSAHFIPVKTSYNSAVLAELYMSRIVCLHGVPKKIVSDRGTQFTSHFWQQLHEALGTHLNFSSAYHPQTDGQTERTNQILEDMLRACALQDQSGWDKRLPYAEFSYNNSYQASLKMSPFQALYGRSCRTPLQWDQPGEKQVFGPDILLEAEENIKMVRENLKIAQSRQRSYADTRRRELSFEVGDFVYLKVSPIRGVRRFGVKGKLAPRYIGPYQILARRGEVAYQLSLPENLSAVHNVFHVSQLKKCLRVPEEQLPVEGLEVQEDLTYVEKPAQILAIADRVTRRKTIRMCKVRWSHHSEEEATWEREDDLVAKYPELFASQP

SEQ ID NO: 10619 - protein, 1527 aa, Zea mays
  Clone ID: TF_ZmC3792_19.pep
MSENRRRGGRRAQQERAAPQDEVPQQQHLPPPPPMSIEQMFLMQTQAVQAIGQTLAAIQQQQQQQQQQAPPQPQMPQMPRDKRAEFMRGHPPTFAHSSDPMDAEDWLRTVERELHTAQCDDREKVLYGPRLLRGAAQSWWDSYLATHANPDTITWEEFRGSFRQYHVPAGLMTVKKEEFLALKQGSSSVSEYRDRFLQLSRYAPEDVNTDAKRQYRFLRGLVDPLQYQLMNHTFPTFQHLIDRAIMTERKRKEMEDRKRKISGPQPGSSSRPRFSGNQPQQFRQNQRPPQQHQQRQQYQQFQRQYPQNQYQNRQSNQSGGQFQKQNQQAPRLPAPTNQQSSQAAPAQVGNRACFHCGEQGHWVMQCPKKAAQQQSGPNAPAKQNVSQPGAGNRSQQRYNHGRLNHLEAEAVQETPDMTVGMFPVDSHIAEVLFDTGATHSFITASWVEAHNLPTTTMSTPIQIDSAGGRIRADSICLNVSVEIRGIAFPANLIVMGTQGIDVILGMNWLDKYQAVISCDKRTIKLVSPLGEEVVTELVPPEPKKGSCYQMAVDSSGADPIESIKVVSEFPDVFPKDLPGMPPERKVEFAIELLPGTAPIFKRAYRISGPELDELKKQIDELSEKGYIRPSTSPWAAPVLFVEKKDGTKRMCIDYRALNEVTIKNKYPLPRIEDLFDQLRGASVFSKIDLRSGYHQLRIRPSDIPKTAFITKYGLYEFTVMSFGLTNAPAFFMNLMNSVFMDYLDKFVVVFIDDILVYSQSEEEHADHLKMVLQRLREHQLYAKLSKCEFWISEVLFLGHIINKEGLAVDPKKVADILNWKAPTDARGIKSFIGMAGYYRRFIEGFSKIAKPMTALLGNKVEFKWTQKCQEAFEALKEKLTTAPVLVLPDVHKPFSVYCDACYTGLGCVLMQEGRVVAYSSRQLKVHEKNYPIHDLELAAVVHALKTWRHYLYGQKCDVYTDHKSLKYIFTQSELNMRQRRWLELIKDYELEIHYHPGKANVVADALSRKSQVNLMVARPMPYELAKEFDRLSLGFLNNSRGVTVELEPTLEREIKEAQKNDEKISEIRRLILDGKGKDFREDAEGVVWFKDRLCVPNVQSIRELILKEAHETAYSIHPGSEKMYQDLKKKFWWYGMKREIAEHVAMCDSCRRIKAEHQRPAGLLQPLQIPQWKWDEIGMDFIVGLPRTRAGYDSIWVVVDRLTKSAHFIPVKTNYNSAVLAELYMSRIVCLHGVPKKIVSDRGTQFTSHFWQPLHEALGTHLNFSSAYHPQTDGQTERTNQILEDMLRACALQDQSGWDKRLPYAEFSYNNSYQASLKMSPFQALYGRSCRTPLQWDQPGEKQVFGPDILLEAEENIKMVRENLKIAQSRQRSYADTRRRELSFEVGDFVYLKVSPIRGVRRFGVKGKLAPRYIGPYQILARRGEVAYQLSLPENLSAVHDVFHVSQLKKCLRMPEEQLPVEGLEVQEDLTYVEKPAQILEVADRVTRRKTVRMCKVRWSHHSEEEATWEREDDLMAKYPELFASQP

SEQ ID NO: 10620 - protein, 1346 aa, Zea mays
  Clone ID: TF_ZmC3792_32.pep
MDAEDWLRTVERELHTAQCDDREKVLYGPRLLRGAAQSWWESYLATHAHPNAITWEEFRGSFRQYHVPAGLMTVKKEEFLALKQGSSSVSEYRDRFLQLSRYAPEDVNTDAKRQYRFLRGLVDPLHYQLMNHTFPTFQHLIDRAIMTERKRKEMEDPNQQNSQAAPAQVGNRACFHCGEQGHWVMQCPKKAAQQQSGPNAPAKQNVPQPGAGNRPQPRYNHGRLNHLEAEAVQETPGMIVGMFPVDSHIAEVLFDTGATHSFITASWVEAHNLPITTMSTPIQIDSAGGRIRADSICLNISVEIRGIAFPANLIVMGTQGIDVILGMNWLDKYQAVISCDKRTIKLVSPLGEEVVTELVPPEPKKGSCYQIAVDSNEADPIESIKVVSEFPDVFPKDLPGMPPERKVEFAIELLPGTAPIFKRAYRISGPELVELKEQIDELSEKGYIRPSTSPWAAPVLFVEKKDGTKRMCIDYRALNEVTIKNKYPLPRIEDLFDQLRGASVFSKIDLRSGYHQLRIRPSDIPKTAFITKYGLYEFTVMSFGLTNAPAFFMNLMNSVFMDYLDKFVVVFIDDILIYSQSEEEHADHLRMVLQRLREHQLYAKLSKCEFWISEVLFLGHIINKEGLVVDPKKVATILNWEAPTDARGIKSFIGMAGYYRRFIEGFSKIAKPMTALLGNKVEFKWTQKCQEAFEALKEKLTTAPVLVLPDVHKPFSVYCDACYTGLGCVLMQEGRVVAYSSRQLKVHEKNYPIHDLELAAVVHALKSWRHYLYGQKCDVYTDHKSLKYIFTQSELNMRQRRWLELIKDYELEIHYHPGKANVVADALSRKSQVNLMVARPMPYELAKEFDRLSLGFLNNSRGVTVELEPTLEREIKEAQKNDEKISEIRRLILDGRDKDFRVDAESVIWFKDRLCVPNVQSIRELILKEAHETTYSIHPGSEKMYQDLKKKFWWYGMKREIAEHVARCDSCRRIKAEHQRPAGLLQPLQIPQWKWDEIGMDFIVGLPRTRAGYDSIWVVVDRLTKSAHFIPVKTNYNSAVLAELYMSQIVCLHGVPKKIVSDRGTQFTSHFWWQLHEALGTHLNFSSAYHPQTDGQTERTNQILEDMLRACALQDQSGWDKRLPYAEFSYNNSYQASLKMSPFQALYGRSCRTPLQWDQPGEKQVFGPDILLEAEENIKMVRENLKIAQSRQQSYADTRRRELSFEVGDFVYLKVSPIRGVRRFGVKGKLAPRYIGPYQILARRGEVAYQLSLPENLSAVHNVFHVSQLKKCLRVPEEQLPVEGLEVQEDLTYVEKPVQILEIADRVTRRKTIRMCKVRWNHHSEEEATWEREDDLMAKYPELFAS

SEQ ID NO: 10621 - protein, 1855 aa, Zea mays
  Clone ID: TF_ZmC3792_4.pep
MARLRHTARKSVIPFLPSRLAERPLRRPVAGQSSHLERLHHRLREEQERRRQEQRSSSLSLHQEIESVRSCSPVLPLEPPPAPPLGAPASGVAAGGDPDNGGGDDSSSHDTDFSANPEPEGWVARPITRDAARGCHFHDALDTLLRRAFDRHTWSVEYRCVVYQHSRGVYPDRWEATCLVRCPENSLQGAEACSEHYSISERDSAEAAMQDAARRALSHYCSVFGGAADGLDLKYYPRRSSGSTGGVIVSPVGEGNPRLSSTVNLAAVLNTELDHALDELSRARAEIALLRAERAERRYLDGGSPAPVGTQHPVWVSPAFWFTYYVNKMSENRRRGGRRAQQERAAPQDEVPQQQHLPPPPPMSIEQMFLMQTQAVQAIGQTLAAIQQQQQQQQQQAPPQPQMPQMPRDKRAEFMRGHPPTFAHSSDPMDAEDWLRTVERELHTAQCDDREKVLYGPRLLRGAAQSWWESYLATHANPDTITWEEFRGSFRQYHVPAGLMTVKKEEFLALKQGSSSVSEYRDRFLQLSRYAPEDVNTDAKRQYRFLRGLVDPLQYQLMNHTFPTFQHLIDRAIMTERKRKEMEDRKRKISGPQSGSSSRPRFSGNQPQQFRQNQRPPQQHQQRQQYQQFQRQYPQNQYQNRQSNQSGGQFQRQNQQTPRLPAPANQQNSQAAPAQVGNRACFHCGEQGHWVMQCPKKAAQQQSGPNAPAKQNVPQPGAGNRSQQRYNHGRLNHLEAEAVQETPGMTIGMFPVDSHIAEVLFDTGATHSFITASWVEAHNLPITTMSPPIQIDSAGGRIRADSICLNISVKIRGIAFPANLIVMGTQGIDVILGMNWLDKYQAVISCDKRTIKLVSPLGEEVVTELVPPEPKKGSCYQMTVDSSEADPIESIKVVSEFPDVFPKDLPGMPPERKVEFAIELLPGTAPIFKRAYRISGPELDELKKQIDELSEKGYIRPSTSPWAAPVLFVEKKDGTKRMCIDYRALNEVTIKNKYPLPRIEDLFDQLRGASVFSKIDLRSGYHQLRIRPSDIPKTAFITKYGLYEFTVMSFGLTNAPAFFMNLMNSVFMDYLDKFVVVFIDDILVYSQSEEEHADHLRMVLQRLREHQLYAKLSKCEFWISEVLFLGHIINKEGLAVDPKKVADILNWKAPTDARGIKSFIGMAGYYRRFIEGFSKIAKPMTALLGNKVEFKWTQKCQEAFEALKEKLTTAPVLVLPDVHKPFSVYCDACYTGLGCVLMQEGRVVAYSSRQLKVHEKNYPIHDLELAAVVHALKTWRHYLYGQKCDVYTDHKSLIHIFAQSELNMRQRRWLELIKDYELEIHYHPGKANVVADALSRKSQVNLMVARPMPYELAKEFDRLSLGFLNNSRGVTVELEPTLEREIKEAQKNDEKISEIRRLILEGKGKDFREDAEGVVWFKDRLCVPNVQSIRELILKEAHETAYSIHPGSEKMYQDLKKKFWWYGMKREIAEHVAMCDSCRRIKAEHQRPAGLLQPLQIPQWKWDEIGMDFIVGLPRTRAGYDSIWVVVDRLTKSAHFIPVKTNYNSAVLAELYMSRIVCLHGVPKKIVSDRGTQFTSHFWQQLHEALGTHLNFSSAYHPQTDGQTERTNQILEDMLRACALQDQSGWDKRLPYAEFSYNNSYQASLKMSPFQALYGRSCRTPLQWDQPGEKQVFGPDILLEAEENVKMVRENLKIAQSRQRSYADTRRRELSFEVGDFVYLKVSPIRGVRRFGVKGKLAPRYIGPYQILARRGEVAYQLSLPENLSAVHDVFHVSQLKKCLRMPEEQLPVEGLEVQEDLTYVEKPAQILEIADRVTRRKTVRMCKVRWSHHSEEEATWEREDDLMAKYPELFASQP

SEQ ID NO: 10622 - protein, 1449 aa, Zea mays
  Clone ID: TF_ZmC3792_46.pep
MPQMPRDKRAEFMRGHPPAFAHSSDPMDAEDWLRTVERELHTAQCDDREKVLYGPRLLRGAAQSWWESYLATHANPDAITWEEFRGSFRQYHVPAGLMTVKEEFLALKQGPSSVSEYRDRFLQLSRYAPEDVNTDAKRQYRFLRGLVDPLQYQLMNHTFPTFQHLIDRAIMTERKRKEMEDRKRKISGPQPGSSSRPRFSGNPPQQFRQNQRPPQQRQLHRQFPRHQPQHRYQNRQSNQSGGQFQRQNQQAPRLPTPANQQNSQAAPAQVGNRACFHCGEQGHWVMQCPKKAAQQQSGPNAPAKQNVSQPGAGNRPQQRYNHGRLNHLEAEAVQETPGMIVGMFPVDSHIAEVLFDTGATHSFITASWVKAHNLPTTTMSTPIQIDSAGGRIRADSICLNITVEIRGIAFPANLIVMGTQGIDVILGVNWLDKYQAVISCDKRTIKLVSPLGKEVVTELVPPEPKKGSCYQMAVDSSEADPVESIKVVSEFPDVFPKDLPGMPPERKVEFAIELLPGTAPIFKRAYRISGPELVELKKQIDELSEKGYTRPSTSPWAAPVLFVEKKDGTKRMCIDYRALNEVTIKNKYPLPRIEDLFDQLRGASVFSKIDLRSGYHQLRIRPSDIPKTAFITKYGLYEFTVMSFGLTNAPAFFMNLMNSVFMDYLDKFVVVFIDDILIYSQSEEEHADHLRMVLQRLREHQLYAKLSKCEFWISEVLFLGHIINKEGLAVDPKKVADILNWKAPTDARGIKSFIGMAGYYRRFIEGFSKIAKPMTALLGNKVEFKWTQKCQEAFEALKEKLTTSPVLILPDVHKPFSVYCDACYTGLGCVLMQEGRVVAYSSRQLKVHEKNYPIHDLELAAVVHALKTWRHYLYGQKCDVYTDHKSLKYIFTQTELNMRQRRWLELIKDYELEIHYHPGKANVVADALSRKSQVNLMVARPMPYELAKEFDRLSLGFLNNSRGVTVELEPTLEREIKEAQKNDEKISEIRRLILDGRGKDFREDAEGVIWFKDRLCVPNVQSIRELILKEAHETAYSIHPGSEKMYQDLRKKFWWYGMKRKIAEHVAKCDSCRRIKAEHQRPAGLLQPLQIPQWKWDEIGMDFIVGLPRTRAGYDSIWVVVDRLTKSAHFIPVKTSYNSAVLAELYMSRIVCLHGVPKKIVSDRGTQFTSHFWQQLHEALGTHLNFSSAYHPQTDGQTERTNQILEDMLRACALQDQSGWDKRLPYAEFSYNNSYQASLKMSPFQALYGRSCRTPLQWDQPGEKQVFGPDILLEAEENIKMVRENLKIAQSRQQSYADTRRRELSFEVGDFVYLKVSPIRGVRRFGVKGKLAPRYIGPYQILSKRGEVAYQLSLPENLSVVHDVFHVSQLKKCLRVPEEQLPVEGLEVQEDLTYVEKPAQILEIADRVTRRKTIRMCKVRWNHHSEEEATWEREDDLVAKYPELFASQP

SEQ ID NO: 10623 - protein, 1490 aa, Zea mays
  Clone ID: TF_ZmC3792_6.pep
MSIEQMFLMQTQAVQAIGQTLAAIQQQQQQQAPPQPQMPQMPRDKRAEFMRGHPPTFAHSSDPMDAEDWLRTVERELHTAQCDDREKVLYGPRLLRGAAQSWWESYLATHANPDAITWEEFRGSFRQYHVPAGLMTVKKEEFLALKQGSSSVSEYRDRFLQLSRYAPEDVNTDAKRQYRFLRGLVDPLQYQLMNHTFPTFQHLIDRAIMTERKRKEMEDRKRKISGPQPGSSSRPRFSGNQPQQFRQNQRPPQQHQQRQQYQQFQRQYPQHQYQNRQSNQSGGQFQKQNQQAPRLPAPANQQNSQAAPAQVGNRACFHCGEQGHWVMQCPKKAAQQQSGPNAPAKQNVSQPGAGNRPQPRYNHGRLNHLEAEAVQETPGMTVGMFPVDSHIAEVLFDTGATHSFITASWVEAHNLPITTMSTPIQIDSAGGRIRADSICLNVSVEIRGIAFPANLIVMGTQGIDVILGMNWLDKYQAVISCDKRTIKLVSPLGEEVVTELVPPEPKKGSCYQMAVDSSEADPIESIKVVSEFPDVFPKDLPGMPPERKVEFAIELLPGTAPISKRAYRISGPELVELKKQIDELSEKGYIRPSTSPWAAPALFVEKKDGTKRMCIDYRALNEVTIKNKYPLPRIEDLFDQLRGASVFSKIDLRSGYHQLRIRPSDIPKTAFITKYGLYEFTVMSFGLTNAPAFFMNLMNSVFMDYLDKFVVVFIDDILVYSQSEEEHADHLRMVLQRLREHQLYAKLSKCEFWISEVLFLGHIINKEGLAVDPKKVADILNWKAPTDARGIKSFIGMAGYYRRFIEGFSKIAKPMTALLGNKVEFKWTQKCQEAFEALKEKLTTAPVLVLPDVHKPFSVYCDACYTGLGCVLMQEGRVVAYSSRQLKVHEKNYPIHDLELAAVVHALKTWRHYLYGQKCDVYTDHKSLKYIFTQSELNMRQRRWLELIKDYELEIHYHPGKANVVADALSRKSQVNLMVARPMPYELAKEFDRLSLGFLNNSRGVTVELEPTLEREIKEAQKNDEKISEIRRLILDGRGKDFREDAEGVVWFKDRLCVPNVQSIRELILKEAHETAYSIHPGSEKMYQDLKKKFWWYGMKREIAEHVAMCDSCRRIKAEHQRPAGLLQPLQIPQWKWDEIGMDFIVGLPRTRAGYDSIWVVVDRLTKSAHFIPVKTNYNSAVLAELYMSRIVCLHGVPKKIVSDRGTQFTSHFWQQLHEALGTHLNFSSAYHPQTDGQTERTNQILEDMLRACALQDQSGWDKRLPYAEFSYNNSYQASLKMSPFQALYGRSCRTPLQWDQPGEKQVFGPDILLEAEENIKMVRENLKIAQSRQRSYADTRRRELSFEVGDFVYLKVSPIRGVRRFGVKGKLAPRYIGPYQILARRGEVAYQLSLPENLSAVHDVFHVSQLKKCLRVPEEQLPVEGLEVQEDLTYVEKPAQILEVADRVTRRKTVRMCKVRWSHHSEEEATWEREDDLMAKYPELFASQP

SEQ ID NO: 10624 - protein, 1493 aa, Zea mays
  Clone ID: TF_ZmC3792_8.pep
MSIEQMFLMQTQAVQAIGQTLAAIQQQQQQQQQQAPPQPQMPQMPRDKRAEFMRGHPPTFAHSSDPMDAEDWLRTVERELHTAQCDDREKVLYGPRLLRGAAQSWWESYLATHANPDTITWEEFRGSFRQYHVPAGLMTVKKEEFLALKQGSSSVSEYRDRFLQLSRYAPEDVNTDAKRQYRFLRGLVDPLQYQLMNHTFPTFQHLIDRAIMTERKRKEMEDRKRKISGPQPGSSSRPRFSGNQPQQFRQNQRPPQQHQQRQQYQQFQRQYPQNQYQNRQSNQSGGQFQKQNQQAPRLPAPANQQNSQAAPAQVGNRACFHCGEQGHWVMQCPKKAAQQQSGPNAPAKQNVSQPGAGNRPQPRYNHGRLNHLEAEAVQETPDMTVGMFPVDSHIAEVLFDTGATHSFITASWVEAHNLPTTTMSTPIQIDSAGGRIRADSICLNVSVEIRGIAFPANLIVMGTQGIDVILGMNWLDKYQAVISCDKRTIKLVSPLGEEVVTELVPPEPKKGSCYQMAVDSSEADPIESIKVVSEFPDVFPKDLPGMPPERKVEFAIELLPGTAPISKRAYRISGPELVELKKQIDELSEKGYIRPSTSPWAAPVLFVEKKDGTKRMCIDYRALNEVTIKNKYPLPRIEDLFDQLRGASVFSKIDLRSGYHQLRIRPSDIPKTAFITKYGLYEFTVMSFGLTNAPAFFMNLMNSVFMDYLDKFVVVFIDDILVYSQSEEEHADHLRMVLQRLREHQLYAKLSKCEFWISEVLFLGHIINKEGLAVDPKKVADILNWKAPTDARGIKSFIGMAGYYRRFIEGFSKIAKPMTALLGNKVEFKWTQKCQEAFEALKEKLTTAPVLVLPDVHKPFSVYCDACYTGLGCVLMQEGRVVAYSSRQLKVHEKNYPIHDLELAAVVHALKTWRHYLYGQKCDVYTDHKSLKYIFTQSELNMRQRRWLELIKDYELEIHYHPGKANVVADALSRKSQVNLMVARPMPYELAKEFDRLSLGFLNNSRGVTVELEPTLEREIKEAQKNDEKISEIRRLILDGRGKDFREDAEGVVWFKDRLCVPNVQSIRELILKEAHETAYSIHPGSEKMYQDLKKKFWWYGMKREIAEHVAMCDSCRRIKAEHQRPAGLLQPLQIPQWKWDEIGMDFIVGLPRTRAGYDSIWVVVDRLTKSAHFIPVKTNYNSAVLAELYMSRIVCLHGVPKKIVSDRGTQFTSHFWQQLHEALGTHLNFSSAYHPQTDGQTERTNQILEDMLRACALQDQSGWDKRLPYAEFSYNNSYQASLKMSPFQALYGRSCRTPLQWDQPGEKQVFGPDILLEAEENIKMVRENLKIAQSRQRSYADTRRRELSFEVGDFVYLKVSPIRGVRRFGVKGKLAPRYIGPYQILARRGEVAYQLSLPENLSAVHDVFHVSQLKKCLRVPEEQLPVEGLEVQEDLTYVEKPAQILEVADRVTRRKTVRMCKVRWSHHSEEEATWEREDDLMAKYPELFASQP

SEQ ID NO: 10625 - protein, 1885 aa, Zea mays
  Clone ID: TF_ZM3392.C2.o1.fg.pep
MRLVMIMLMVMMARLRHTARKSVIPFLPSRLAERPLRRPVAGQSSHLERLHHRLHEEQERRRQGQQGSSFSLQQEIESVRSCSPVLPLEAPPAPPLGAPASGVAAGGDLDDGDDDDSLSHDTDFPADHEPEGWVARPITRDAARGCHFHDALDTLLRRALDRRTWSIEYRCVVYQHSRGVYPYRWEATCLVRRPENSLQGAEACSEHYSISERDSAEAAMQDAARRALSHYCLVFGGVADGLDLKYYPRRPSGSTGGVIVSPVGEGNPRLSSTVNLAVVLNTELDHALDELSRARAEIALLRAERAERRHLDDGSPAPVGTQHPYRSPRRGRQSYDNPDLLLKNSILFSYAARVARSVLMCGCVLQMSENRRRGGRRAQQERAAPQDEVPQQQHLPPPPPMSIEQMFLMQTQAVQAIGRTLAAIQQQQQQQQAPPQPQMPQMPRDKRAEFMRGHPPTFAHSSDPMDAEDWLRTVERELHTAQCDDREKVLYGPRLLRGAAQSWWESYLATHANPDAITWEEFKGSFRQYHVPAGLMTVKKEEFLALKQGSSSVSEYRDIFLQLSRYAPEDVNTDAKRQYRFLRGLVDPLHYQLMNHTFPTFQHLIDRAIMTERKRKEMEDRKRKISGPQPGSSSRPRFSGNQPQQSRQNQRPPQQHQQSQRQYPQHQYQNRQNNQSGGQFQRQNQQAPRLPAPASQQNNQAAPAQVGNRACFHCGEQGHWVMQCPKKAAQQQSGPNAPAKQNVPQPGAGNRSQSRYNHGRLNHLEAEAVQETPGMIVGMFPVNSRIAEVLFDTGATHSFITASWVEAHNLPITTMSTPIQIDSAGGRIRTDSICLNISVEIRGIAFPANLIVMGTQGIDVILGMNWLDKYQAVISCDKRTIKLVSPLGEEVVTELVPPEPKKGSCYQMAVDSSEADPIESIKVVSEFPDVFQKDLPGMPPERKVEFAIELLPGTAPIFKRAYRIPGPELVELKKQIDELSEKGYIRPSTSPWAAPVLFVEKKDGTKRMCIDYRALNEVTIKNKYPLPRIEDLFDQLRGASVFSKIDLRSGYHQLRIRPSDIPKTTFITKYGLYEFTVMSFGLTNAPAFFMNLMNSVFMDYLDKFVVVFIDDILVYSQSEEKHADHLRMVLQRLREHQLYAKLSKCEFWISEVLFLGHIINKEGLAVDPKKVADILNWKAPTDARGIKSFIGMAGYYRRFIEGFSKIAKPMTALLGNKVEFKWTKKCQEAFEALKEKLTTAPVLVLPDVHKPFSVYCDACYTGLGCVLTQEGRVVAYSSRQLKVHEQNYPIHDLELAAVVHALKTWRHYLYGQKCDVYTDHKSLKYIFTQSELNMRQRRWLELIKDYELEIHYHPGKANVVADALSRKSQVNLMVARLMPYELAKEFDRLSLGFLNNSRGVTVELEPTLEREIKEAQKNDEKISEIRRLILDGRGKDFREDAEGVIWFKDRFCVPNVQSIRELILKEAHETAYSIHPGSEKMYQDLKKKFWWYGMKREIAEYVAMCDSCRRIKAEHQRSAGLLQPLQIPQWKWDEIGMDFIVGLPRTRAGYDSIWVVVDRLTKSAHFIPVKTNYSSVVLAELYMSRIVCLHGVPKKIVSDRGTQFTSHFWQQLHEALGTHLNFSSAYHPQTDGQTERTNQILEDMLRACALQDQSGWDKRLPYAEFSYNNSYQASLKMSPFQALYGRSCRTPLHWDQPGEKQVFGPDILLEAEENIKMVRENLKIAQSRQRSYADTRRRELSFEVRDFVYLKVSPIRGVRRFGVKGKLAPRYIGPYQILARRGEVAYQLSLPENLSAVHDFFHVSQLKKCLRVPEEQLLVEGLEVQEDLTYVEKPAQILEVADRVTQRKTIRMCKVKWKHHSEEEATWEREDDLMAKYPELFASQP

SEQ ID NO: 10626 - protein, 1358 aa, Zea mays
  Clone ID: TF_ZM3641.C5.o1.fg.pep
MSIEQMFLMQTQAVQAIGQTLAAIQQQQQQQQQAPPQPQMPQMPRDKRAEFMRGHPPTFAHSSDPMDAEDWLRTVERELHTAQCDDREKVLYGPRLLRGAAQSWWESYLATHAHPDAITWEKFRGSFRQYHVPAGLMTVKKEEFLALKQGPLSVSEYRDKFLQLSRYAPEDVNTDAKRQYRFLRGLVDPLQYQLMNHTFPTFQHLIDRAIMTERKRKEMEDPNQQSSQAAPAQVGNRACFHCGEQGHWVMQCPKKAAQQQSGPNAPAKQNVPQPGAGNRSQPRYNHGRLNHLEAEAVQETPGMIVGMFPVDSHIAEVLFDTGATHSFITASWVEAHNLLITTMSTPIQIDSAGGRIRADSICLNISVEIRGIAFPANLIVMGTQGIDVILGMNWLDKYQAVISCDKRTIKLVSPLGGEVVTELVPPEPKKGSCYQIAVDSSEADPIESIKVVSEFPDVFPKDLPGMPPERKVEFAIELLPGTAPIFKRAYRISGPELDELKKQIDELSEKGYIRPSTSPWAAPVLFVEKKDGTKRMCIDYRALNEVTIKNKYPLPRIEDLFDQLRGASVFSKIDLRSGYHQLRIRPSDIPKTAFISKYGLYEFTVMSFGLTNAPAFFMNLMNSVFMDYLDKFVVVFIDDILVYSQSEEEHANHLRMVLQRLREHQLYAKLSKCEFWISEVLFLGHIINKEGLAVDPKKVADVLNWKAPTDARGIKSFIRMAGYYRRFIEGFSKIAKPMTALLGNKVEFKWTQKCQEAFEALKEKLTTAPVLVLPDVHKPFSVYCDACYTGLGCVLMQEGRVVAYSSRQLKVHEKNYPIHDLELSAVVHALKSWRHYLYGQKCDVYTDHKSLKYIFTQSELNMRQRRWLELIKDYELEIHYHPGKANVVADALSRKSQVNLMVARPMPYELAKEFDRLSLGFLNNSRGVTVELEPTLEREIKEAQKNDEKISEIRRLILEDKGKDFRKDAEGVIWFRDRLCVPNVQSIRELILKEAHETAYSIHPSSEKMYQDLKKKFWWYGMKREIAEHVAMCDSCRRIKAEHQRPAGLLQPLQIPQWKWDEIGMDFIVGLPRTRAGYDSIWVVVDRLTKSAHFIPVKTNYSSAVLAELYMSRIVCLHGVPKKIVSDRGTQFTSHFWQQLHEALGTHLNFSSAYHPQTDGQTERTNQILEDMLRACALQDQSGWDKRLPYAEFSYNNSYQASLKMSPFQALYGRSCRTPLQWDQPGESKGVRRFGVKGKLAPRYIGPYQVLARRGEVAYQLSLPENLSVVHDVFHVSQLKKCLRVPEEQLPVEGLEVQEDLTYVEKPVQILEIADRVTRRKTIRMCKVRWNHHSEEEATWEREDDLMAKYPELFASQP

SEQ ID NO: 10627 - protein, 1063 aa, Zea mays
  Clone ID: TF_ZM3651.C4.o2.fg.pep
MSIEQMFLMQTQAVQAIGQTLAAIQQQQQQQQQAPPQPQMPQVPRDKRAEFMRGHPPTFAHSSDPMDAEDWLRTVERELHTAQCDDREKVLYGPRLLRGATQSWWESYLATHANPDTITWEEFRGSFRQYHVPAGLMTVKKEEFLALKQGSSSVSEYRDRFLQLSRYAPEDVNTDAKRQYRFLRGLVDPLQYQLMNHTFPTFQHLIDRAIMTERKRKEMEDRKRKISGPQSGSSSRPRFSGNQPQQFRQNQRPPQQHQQRQQYQQFQRQYPQNQYQNRQSNQSGGQFQKQNQQAPRLPAPANQQNSQAAPAPVGNRACFHCGEQGHWVMQCPKKAAQQQSGPNAPAKQNVSQPGAGNRSQQRYNHGRLNHLEAEAVQETPDMTVGMFPVDSHIAEVLFDTGATHSFITASWVEAHNLPTTTMSTPIQIDSAGGRIRADSICLNISVKIRGIAFPANLIVMGTQGIDVILGMNWLDKYQAVISCDKRTIKLVSPLGEEVVTELVPPEPKKGSCYQMTVDSSEADPIESIKVVSEFPDVFPKDLPGMPPERKVEFAIELLPGTAPIFKRAYRISGPELDELKKQIDELSEKGYIRPSTSPWAAPVLFVEKKDGTKRMCIDYRALNKVTIKNKYPLPRIEDLFDQLRGASVFSKIDLRSGYHQLRIRPSDIPKTAFITKYGLYEFTVMSFGLTNAPAFFMNLMNSVFMDYLDKFAVVFIDDILIYSQSEEEHADHLRMVLQRLREHQLYAKLSKCEFWISEVLFLGHIINKEGLAVDPKKVADILNWKAPTDARGIKSFIGMAGYYRRFIEGFSKIAKPMTALLGNKVEFKWTQKCQEAFEALKEKLTTAPVLVLPDVHKPFSVYCDACYTEMRCLHRPQESEVHIHSIRIEHEATKMVRENLKIAQSRQRSYADTRRRELSFEVGDFVYLKVSPIRGVRRFGVKGKLAPRYIGPYQILARRGEVAYQLSLPENLSAVHDVFHVSQLKKCLRVPEEQLPVEGLEVQEDLTYVEKPAQILEVADRVTRRKTVRMCKVRWSHHSEEEATWEREDDLKAKYPELFASQP

SEQ ID NO: 10628 - protein, 1456 aa, Zea mays
  Clone ID: TF_ZM4166.C3.o1.fg.pep
MESHDLRAERESRLVGGNEIDGFGYDYGTGKWYSFRLERMARLRHTARKSVIPFLPSRLAERPLRRPVAGQSSRLERLHHCLHEEQERRRQEQQGSSFSLQQEIESVRSCSPVLPLEAPLAPPLDAPASGVAAGGDSDDGGGDDSSSHDTDFSADQEPEGWVARPITRDAARGCHFHDALGTLLRWALKRCTWSIEYRCVVYQHSRGVYPDRWEATCLMSENRRRGGRRAQQEQAAQQEEVPQQQQLPPPPPMSIEQMFLMQTQAVQAIGQTLAAIQQQQQAPPQPQMPQMPRDKRAEFMRGLMTVKKEEFLALKQGSSSVSEYRDRFLQLSRYAPKDVNTDAKRQYRFLRGLVDPLQYQLMNHTFPTFQHLIDRAIMTERKRKEMEDRKRKISGPPPGSSNRPRFSGNQPQQFRQNQHPPQYQQFQRQYPQHQYQNRQNNQSGGGQFQRQNQQTPRLPAPAAQQNSQAAPAQIGNRACFHCGEQGHWVMQCPKKAAQQQSGPNAPAKQNVSQPGAGNRSQPRYNQGRLNHLEAEAVQKTPGMIVGIFPVDSHIAEVLFDTGATHSFITASWVEAHNLPITTMSTPIQIDSAGGTIRADSICLNVSVEIRGIAFSANLIVMGTQGIYVILGMNWLDKYQAVISCDKRTIKLVSPLGEEVVTELVPPEPKKGSCYQMVVDSSEADPIESIKVVSEFPDVFPKDLPGMPPERKVEFAIELLPGTAPIFKRAYRVSGPELVELKKQIDELSEKGYIRPSTSPWAAPVLFVEKKDGTKRMCIDYRALNEVTIKNKYPLPRIEDLFDQLRGASVFSKIDLRSGYHQLRIRPSNIPKTAFVTKYGLYEFTVMSFGLTNAPAFFMNLMNSVFMDYLDKFMVVFIDDILIYSQSEEEHADHLRMVLQRLREHQLYPKLSKCEFWISEVLFLGFSKIAKPMTALLGNKVEFKWTQRCQEAFEALKEKLTTAPVLVLPDVHKPFSVYCDACYTGLGCKANVVADALSRKSQVNLMVARPMPYELAKEFDRLSLGFLNNSRGVTVELEPTLEREFKEAQKNDEKISEIRRLILDGRGKDFWEDAEGVVWFKDRLCVPNVQSIRELILKEAHETAYSIHPGSEKMYQDLKKKFWWYGMKREIAEHVAMCDSCRRIKAEHQRPTGLLQPLQIPQWKWDEIGMDFIVGLPHTRAGYDSIWVVVDRLTKSAHFIPVKTNYSSVVLVELYMSRIVCLHGVPKKIVSDRGTQFTSHFWQQLHEALGTHLNFSSAYHPQTDGQTERTNQILEDMLRACALQDQSGWDKRLPYAEFSYNNSYQASLKMSPFQALYGRSCRTPLQWDQPGEKQVFGPDILLEAKENIKMVRENLKIAQSRQRSYADTRRRELSFEVGDFVYLKVSPIRGVRRFGVKGKLAPRYIGPYQILARRGEVAYQLSLPENLSAVHDVFHVSQLKKCLRVPEEQLPVEGLEV

SEQ ID NO: 10629 - protein, 1422 aa, Zea mays
  Clone ID: TF_ZM4276.C3.o1.fg.pep
MSIEQMFLMQTQTVQAIGQTLAAIQQQQQQQQQAPPQPQPQMPRDKRAEFMRGHPPTFAHSSDPMDAEDWLRTVERELHTAQCDDREKVLYGPRLLRGAAQSWWESYLATHAHPDAITWEEFRGSFRQYHVLAGLMTVKKEEFLALKQGPSSVSEYRDRFLQLSRYAPEDVNTDAKRQYRFLRGLVDPLQYQLMNHTFPTFQHLIDRAIMTERKRKEMEDRKRKISGPQPGSSNRPRFSGSQPQQFRQNQRPPQQHQQFQWQYPQHQYQNRQSNQSGGQFQRQNQQAPRLPAPAAQQNSQAAPAQVGNRACFHCGEQGHWVMQCPKKATQQQSGPNAPAKQNVPQPGAGNRSHTRYNHGRLNHLEAEAVQETPGMIVGMFPVDSHIAEVLFDTGATHSFITASWVEAHNLPITTMSTPIQIDSAGGRIRADSICLNISVEIRGIAFPANLIVMGTQGIDVILGMNWLDKYQAVISCDERTIKLVSPLGEEVVTKLVPPGPKKGSCYQMAVDSSEADPIESIKVVSEFPNVFPKDLPGMPPERKVEFAIELLPGTAPIFKRAYRISGPELVELKEQIDELSEKGYIRPSTSPWAAPVLFVEKKDGTKRMCIDYRALNEVTIKNKYPLPRIEDLFDQLRGASVFSKIDLRSGYHQLRIRPSDIPKTAFISKYGLYEFTMMSFGLTNAPAFFMNLMNSVFMDYLDKFVGVFIDDILIYSQSEEEHADHLRMVLQRLREHQLYTKLSKCEFWISEVLFLGHIINKEGLAVDPKKVADILNWKAPTDARGIKSFIGMAGYYRRFIEGFSKIAKPMTALLGNKVEFKWTQKCQEAFEALKEKLTTVPVLVLPDVHKPFSVYCDACYTGLGCVLMQEGRVVAYSSRQLKVHEKNYPIHDLELAAVVHALKTWRHYLYGQKCDVYTDHKSLKYIFTQSELNMRQRRWLELIKDYELEIHYHPGKANVVADALSRKSQVNLMVARPMPYELAKEFDRLSLGFLNNSRGVTVELEPTLEREIKEAQKNDEKISEIRRLILDGRGKDFREDAEGVIWFKVRLCVPNVQSIRELILKEAHETAYSIHPGSEKMYQDLKKKFWWYGMKREIAEHVAMCGSCRRIKAEHQRPAGLLQPLQIPQWKWDEIGMDFIVGLPRTRAGYDSIWVVVDRLTKSAHFIPVKTNYSSAVLAELYMSRIVCLHGVPKTIVSDRGTQFTSHFWQQLHEALGTHLNFSSAYHPQTDGQTERTNQILEDMLRASEENIKMVRENLKIAQSRQRSYADTRRRELSFEVGDFVYLKVSPIRGVRRFGVKGKLAPRYIGPYQILARRGEVAYQLSLPENLSAVHDVFHMSQLKKCLRVPEEQLPVEGLEVQEDLTYVEKPVQILEVADRVTRRKTIRMCKVRWNHHSEEEATWEREDDLMAKYPELFASPP

SEQ ID NO: 10630 - protein, 1442 aa, Zea mays
  Clone ID: TF_ZM4452.C4.o1.fg.pep
MSIEQMFLMQTQAVQAIGQTLAAIQQQQQQQQQAPPQPQMPQMPRDKRAEFMRGHPPTFAHSSDPMDAEDWLRTVEWELHTAQCDDREKILYGPRLLRGAAQSWWESYLATHAHPDAITWEEFRGSFRQYHVPVGLMTVKKEEFLALKQGSLSVSEYRDKFLQLSRYAPEDVNTDAKRQYRFLRGLVDPLQYQLMNHTFPTFQHLIDRAIMTERKRKEMEDRKRKISGPQPGSSNRPRFSGNQPQQFRQNQRPPQQHQQFQRQYPQHQYQNRQSNQSGGQFQRQNQQAPRLPAPANQQNSQAAPAQVGNRACFHCGEQGHWVMQCPKKAAQQQSGPNAPAKQNVSQPGSGNRSQPRYNHGRLNHLEAEAVQETPSMIVGMFPVDSHIAEVLFDTGATHSFITASWVEAHNLPITTMSTPIQIDSAGGRIRADSICLNISVKIRGIAFPANLIVMGTQGIDVILGMNWLDKYQAIISCDKRTIKLVSPLGEEVVTELVPPEPKKGSCYQLAVDSSEADPIESIKVVSEFPDVFPKDLPGMPPERKVEFAIELLPGTAPIFKRAYRISGPELVELKEQIDELLEKGYIRPSTSPWAAPVLFVEKKDGTKRMCIDYRALNEATIKNKYPLPRIEDLFDQLRGASVFSKIDLRSGYHQLRIRPSDIPKTAFISKYGLYEFTVMSFGLTNAPAFFMNLMNSVFMDYLDKFVVVFIDDILIYSQSEEEHADHLRMVLQRLREHQLYAKLSKCEFWINEVLFLGHIINKEGLAVDPKKVADILNWKAPTDARGIKSFIGMAGYYRRFIEGFSKIAKPMTALLGNKVEFKWTQKCQEAFEALKEKLTTAPVLVLPDVHKPFSVYCDACYTGLGCVLMQEGRVVAYSSRQLKVHERNYPIHDLELAAVVHALKSWRHYLYGQKCDVYTDHKSLKYIFTQSELNMRQRRWLELIKDYELEIHYHPGKANVVADALSRKSQVNLMVARPMPYELAKEFDRLSLEFLNNSRGVTVELEPTLEREIKEAQKNDEKISEIRRLILEGKGKDFRKDAEGVIWFRDRLCVPNVQSIRELILKEAHETAYSIHPGSEKMYQDLKKKFWWYGMKREIAEHVAMCDSCRRIKAEHQRPVGLLQPLQIPQWKWDEIELYMSRIVCLHGVPKKIVSDRGTQFTSHFWQQLHEALGTHLNFSSAYHPQTDGQTERTNQILEDMLRACALQDQSGWDKRLPYAEFSYNNSYQASLKMSPFQALYGRSCRTPLQWDQPGEKQVFGPDILLEAEENIKMIRENLKIAQSRQRSYADTRRRELSFEVGDFVYLKVSPIRGVRRFGVKGKLAPRYIGPYQVLARRGEVAYQLSLPENLSAVHDVFHVSQLKKCLRVPEEQLPVEGLEVQEDLTYVEKPVQILEVADRVTRRKTIRMCKVRWDHHSEEEATWEREDDLMAKYPELFASQP

SEQ ID NO: 10631 - protein, 620 aa, Zea mays
  unsure (1)..(620): unsure at all Xaa locations
  Clone ID: TF_ZM4455.C2.o1.fg.pep
MGLGVCGSLCQGGDEDDGFGYDYGTSKWYSFRLERMARLRHTARKSVIPFLPSRLAKRPLRRPVTGQSSHLERLHHRLQEEQEGRRQELEQQDSSFSLQQEIESVRSCSPVLPLGAPPAPPLSAPAAGVAAGGDPDDEGGDSSSSHNTDLSEEQELEGWVARPITRDVARGCHFHDALDTLLHRALDRRTWSIEYRCVVFQHSRGVYPDRWEATCLVPRPENSLQGAGVCSEHYSISERDSTKADMQEAARRALSHYCSVLGGVADGLNLNCGLSARSIITWRMAPPLPSGLSTRTAHLSVDTMLKMSDNRRRGGRRAQQEQAAPQDEAPHQQLPPPPLMMIERMFLMQTQVVQAIGQTLAAIQQQQPPPQPQMPRDKRAEFMRGLMTVKKEEFLALKQGPMSVSEYRDKFLQLSRYAPEDVNTDAKRACFHCGEQGHWVMQCPKKAAQQQSGPSAPAKQNVSQPGPGNRSQPHYNHGRLNHLEAEAVQETPGGEVVAELISPEPRKGSCHQMATDSKEPDSLEIIKVVSEFSDVFPEDLPGMPPERKVEFAIELLSGTAPISKRAYRVSGPELVELKKQINELSEKGYIRPSTSPWXCPVLFVEKKDGTRRMCIDYRAL

SEQ ID NO: 10632 - protein, 1521 aa, Zea mays
  Clone ID: TF_ZM4455.C2.o4.fg.pep
MLICSVLLKNSILFPYAARFARSVLMCGCILQMSENRRRGGRRAQQERAAQQDEVPQQQHLPPPPPISIEQMFLMQTQAVQAIGQTLAAIQQQQQQQQAPPQPQMPQMPRDKRAEFMRGHPPTFAHSSDPMDAEDWLRTVERELHTAQCDDREKVLYGPRLLRGAAQSWWESYLATHANPDTITWEEFRGSFRQYHVPAGLMTVKKEEFLALKQGPLSVSEYRDKFLQLSRYAPEDVNTDAKRQYRFLRGLVDPLQYQLMNHTFPTFQHLIDRAIMTERKRKEMEDRKRKISGPQPGSSNRPRFSGNQPQQFRQNQRPPQQHQQFQRQYPQHQYQNRQSNQSGGQFQRQNQQAPRLPAPANQQNSQAAPAQVGNRACFHCGEQGHWVMQCPKKAAQQQSGPNAPAKQNVPQPGAGNRPQQRYNHGRLNHLEAEAVQETPGMIVGMFPVDSRIAEVLFDTGATHSFITASWVEAHNLPITTMSTPIQIDSAGGRIRADSICLNISVEIRGIAFPANLIVMGTQGIDVILGMNWLDKYQAVISCDKRTIKLVSPLGKEVVTELVPPEPKKGSCYQMAVDSSEADPIESIKVVSEFPDVFPKDLPGMPPERKVEFAIELLPGTAPIFKRAYRISGPELVELKKQIDELSEKGYIRPSTSPWAAPVLFVEKKDGTKRMCIDYRALNEVTIKNKYHLPRIEDLFDQLRGAIDLRSGYHQLRIRPSDIPKTAFITKYGLYEFTVMSFGLTNAPAFFMNLMNSVFMDYLDKFVVVFIDDILVYSQSEEEHADHLRMVLQRLREHQLYAKLSKCEFWISEVLFLGHIINKEGLAVDPKKVADILNWKAPTDARGIKSFIGMAGYYRRFIEGFSKIAKPMTALLGNKVEFKWTQKCQEAFEALKEKLTTTPVLVLPDVHKPFSVYCDACYTGLGCVLMQEGRVVAYSSRQLKVHEKNYPIHDLELAAVVHALKTWRHYLYGQKCDVYTDHKSLKYIFTQSELNMRQRRWLELIKDYELEIHYHPGKANVVADALSRKSQVNLMVARPMPYELAKEFDRLSLGFLNNSRGVTVELEPTLEREIKEAQKNDEKISEIRRLILEGKGKDFREDAEGVIWFKDRLCVPNVQSIRELILKEAHETAYSIHPGSEKMYQDLKKKFWWYGMKREIAEHIPQWKWDEIGMDFIVGLPRTRAGYDSIWVVVDRLTKSAHFIPVKTSYNSAVLAELYMSQIVCLHGVPKKIVSDRGTQFTSHFWQQLHEALGTHLNFSSAYHPQTDGQTERTNQILEDMLRACVLQDQSGWDKRLPYAEFSYNNSYQASLKMSPFQALYGRSCRTPLQWDQPGEKQVFGPDILLEAEENIKMVRENLKIAQSRQRSYADTRRRELSFEVGDFVYLKVSPIRGVRRFGVKGKLAPRYIGPYQILARRGEVAYQLSLPEKLSAVHDVFHVSQLKKCLRVPEEQLPVEGLEVQEDLTYVEKPAQILEIADRVTRRKTIRMCKVRWNHHSEEEATWEREDDLMAKYPELFASQP

SEQ ID NO: 10633 - protein, 720 aa, Zea mays
  Clone ID: TF_ZM4545.C13.o2.fg.pep
MSIEQMFLMQTQAVQAIGQTLAAIQQQQQQQQQAPPQPQMPRDKRAEFMRGHPPTFAHSSDPMDAEDWLRTVERELHTAQCDDREKVLYGPRLLRGAAQSWWESYLATHAHPDAITWEEFRGSFRQYHVPAGLMTVKKEEFLALKQGPSSISEYRDKFLQLSRYAPEDVNTDAKRQYRFLRGLVDPLQYQLMNHTFPTFQHLIDRAIMTERKRKEMEDRKRKISGPQPGSSNRPRFSGNQPQQFRQNQRPPQQHQQFQRQYPQHQYQNRQSNQSGGQFQRQNQQAPRLPAPTAQQNNQAAPAQVGNRACFHCGEQGHWVMQCPKKAAQQQSGPNAPAKQNVPQPGAGNRSQPRYNHGRLNHLEAEAVQETPDMIVVGLPRTRAGYDSIWVVVDRLTKSAHFIPVKTNYSSAVLAELYMSRIVCLHGVPKKIVSDRGTQFTSHFWQQLHEALGTHLNFSSAYHPQTDGQTERTNQILEDMLRAYALQDQSGWDKRLPYAEFSYNNSYQASLKMSPFQALYGRSCRTPLQWDQPGEKQVFGPDILLEAEENIKMVRENLKIAQSRQRSYADTRRRELSFEVGDFVYLKVSPIRGVRRFGVKGKLAPRYIGPYQILARRGEVAYQLSLPENLSAVHDVFHVSQLKKCLRVPEEQLPVEGLEVQEDLTYVEKPVQVLEVADRVTRRKTIRMCKVRWNHHSEEEATWEREDDLMAKYPELFASQP

SEQ ID NO: 10634 - protein, 1434 aa, Zea mays
  Clone ID: TF_ZM4578.C2.o10.fg.pep
MSIEQMFLMQTQAVQAIGQTLAAIQQQQQQQQQAPPQPQMPQMPRDKRAEFMRGHPPTFAHSSDPMDAEDWLRTVERELHTAQCDDREKVLYGPRLLRGAAQSWWESYLATHAHPDAITWEEFRGSFRQYHVPAGLMTVKKEEFLALKQGSLSVSEYRDRFLQLSRYAPEDVNTDAKRQYRFLRGLVDPLQYQLMNHTFPTFQHLIDRAIMTERKRKEMEDRKRKISGPQPGSSNRPRFSGNQPQQFRQNQRPPQQHQQFQRQYPQHQYQNRQSNQSGGQFQRQNQQAPRLPAPASQQNSQAAPAQVGNRACFHCGEQGHWVMQCPKKAAQQQSGPNAPAKQNVPQPGAGNRSQSRYNHGRLNHLEAEGVQETPGMIVGMFPVDSHIAEVLFDTRATHSFITASWVEAHNLPITTMSTPIQIDSAGGRIRADSICLNISVEIRGIAFSANLIVMGTQGIDVILGMNWLDKYQAVISCDKRTIKLVSPLGEEVVTELVPPEPKKGSCYQIAVDSSEADPIERIKVVSEFPDVFPKDLPGMPPERKVEFAIELLPGTAPIFKRAYRISGPELVELKKQIDELSEKGYIRPSTSPWAAPVLFVEKKDGTKRMCIDYRALNEVTIKNKYPLPRIEDLFDQLRGASVFSKIDLRSGYHQLRIRPSDIPKTAFISKYGLYEFTVMSFGLTNVPAFFMNLMNSVFMDYLDKFVVVFIDDILVYYQSEEEHADHLRMVLQRLREHQLYAKLSKCEFWISEVLFLGHIINKEGLAVDPKKVADILNWKAPTDARGIKSFIGMAGYYRRFIEGFSRIAKPMTALLGNQVEFKWTQKCQEAFEALKEKLTTTPVLVLPDVHKPFSVYYDACYTELAAVVHALKTWRHYLYGQKCDVYTDHKSLKYIFTQSELNMRQRRWLELIKDYELEIHYHPGKANVVADALSRKSQVNLMVTRPMPYELAKEFDRLSLGFLNNSRGVTVELEPTLEREIKEAQKNDEKISEIRRLILDGRGKDFREDAEGVIWFKDRLCVPNVQSIRELILKEAHETAYSIHPGSEKMYQDLKKKFWWYGMKREIAEHVAMCDSCRRIKAEHQRPAGLLQPLQIPQWKWDEIVVDRLTKSAHFIPVKTNYSSAVLAKLYMSRIVCLHGVPKKIVSDRGTQFTSHFWQQLHEALGTHLNFSSAYHPQTDGQTERTNQILEDMLRACALQDQSGWDKRLPYVEFSYNNSYQASLKMSPFQALYGRSCRTPLQWDQPKEKQVFGPEILLEAEENIKMVRENLKIAQSRQRSYADTRRRELSFEVGDFVYLKVSPIRGVRRFGVKGKLAPRYIGPYQILARRGEVAYQLSLPENLSVVHDVFHVSQLKKCLRVPEEQLLVEGLEVQEDLTYVEKPVQILEVADRVTRRKTIRMCKVRWNHHSEEEATWEREDDLMAKYPELFASQP

SEQ ID NO: 10635 - protein, 1846 aa, Zea mays
  Clone ID: TF_ZM4581.C2.o8.fg.pep
MMARLRHTARKSVIPFLPSRLAERPLRRPVAGQSSHLERLHHHLHEEQEHRRQEQQGSSFSLQQEIESVRSCSPVLPLEAPPAPPLGAPAPGVAAGGDPDDGGGDDSSSHDTDFSADQEPEGWVARPITRDAARGCHFHDALDTLLRRALDRRTWSIEYRCVVYQHSRGVYPDHWEATCLVRRPDNILQGAKVCSEHYSISERDSAEAAMQDAARRALSHYCSVLGGMSENRRRGGRRAQQEQAAQQEEVPQQQQLPPPPPMSIEQMFLMQTQAVQAIGQTLAAIQQQQQQPPPQPQMPQMPRDKCAEFMRGHPPTFAHSSDPMDAEDWLRMWNGNCIPLSAMTGRKFCLMTVKKEEFLALKQGSSSLSEYRDRFLQLPCYAPEDVNTDAKRQYRFLRGLVDPLQQNQRPPQHQQFQRQYPQHQYQNRQNNQSGGGQFQRQNQQAPRLPAPATQQNSQVAPAQVGNRACFHCGEQGHWVMQCPKKAAQQQSGPNAPAKQNVSQPGAGNRSQPRYNHGRLNHLEAEAVQETPDMIICMFPVDSHIAEVLFDTGATHSFITASWVEAHSLPITTMSTPIQIDSAGGRIRADSICLNVSVEIRGIAFPANLIVMGTQGIDVILGMNWLDKYQAFISCDKRTIKLVSPLGEEVVTELVPPKPKKGSCYQMAVDSSEADPIESIKVVSEFPDVFPKDLPGMPPERKVEFAIELLPGTAPILKRAYRVSGPELVELKKQIYELSEKGYIRPSTSPWAAPVLFVEKKDGTRRMCIDYRALNEVTIKNRYPLPRIEDLFDQLRGASVFSKIDLRSGYHQLMIRPSDIPKMAFITKYGLYEFTVMSFGLTNAPAFFMNLMNSVFMDYLDKFVVVFYDDILIYSQGEEEHADHLRMVLQILREHQLYANLSKCEFWISEVMFLGHIINKEGLAVDSKKVADILNWKAPTDARGIKSFVGMAGYYRRFIEGFSKVAKPMTALLGNKLKVHEKNYPIHDLELAAVVHALKTWRHYLYGQKCDVYTDHKSLKYIFTQSELNMRQRRWLELIKDYELEIHYHPGKANVVADALSRKSQVNLMVACPMPYELAKEFHRLSLGFLNNTRGVTIELEPTLEREIKEAQKNDEKISEIRRLILDGKGKDFREDAEGVIWFKDRLCVPNVQSIRELILKEAHETAYSIHHGSEKMYQDLKKKFWWILPGPLLCAHFICLRANIRRYPGDWCRTGGGSQISSPSMAPTSGSGSGTQANRPPLSSRGAATRRGRVTSNRSTINRADAAGTPTSTPTPSADPSSAGDATASGTPTPSSSTNAPPAAAQPQSGIDNVIVEDDDTVIVGTKRKLKSDVWLEFEQVTVGGKLKAQCNWCKKQLVGDSKAGTTHLHSHLGSCQSRQVRKGLKQATLKLSKDEHGAIIVDKYVFDQQVARKELAIMICVHEYPLSMVDHVGFRRFCAALQPLFKTMSRNTIKKDILDMFIYVPAPHTGEIISDVLYEVLQDWQIEKKVSTVTLDNCTTNDNLMCCMQDKLPLSSLMLDGKLYLEEPTLPRTQELDIISWWQHAGIKYPTLRKIARDIMAIPVTTVASESVFSTGGRCTALCVAVQQSKTKTCVADLLLLSKEKHVLLSKLLSKLQRKSLLSKEMKPKISLFSAYHPQTDGQTKRTNQILEDMLRACALQDQSGWDKRLPYAEFSYNNIYQASLKMSPFQALYGRSCRTPLQWDQPGEKQVFGPDILLEAEENIKMVRENLKIAQSRQRSYADTRRRELSFEVGDFVYLKVSPIRGVRRFGVKGKLAPRYIGLYQILARRGEVAYQLSLPENLSAVHDVFHVSQLKKCLRVPEEQLPVEGLEVQEDLTYIEKPA

SEQ ID NO: 10636 - protein, 1484 aa, Zea mays
  Clone ID: TF_ZM4632.C2.o2.fg.pep
MSIEQMFLMQTQAVQAIGQTLAAIQQQQQQQAPPQPQMPQMPKDKRAEFMRGHPPTFAHSSDPMDAEDWLRTVERELHTAQCDDREKVLYGPRLLRGAAQSWWESYLATHAHPDAITWEEFRGSFRQYHVPAGLMTVKKEEFLALKQGPLSVSEYRDRFLQLSRYAPEDVNTDAKRQYRFLRGLVDPLQYQLMNHTFPTFQHLIDRAIMTERKRKEMEDRKRKISGPQPGSSSRPRFSGNQPQQFRQNQRPPQQHQQFQRQYPQNQYQNRQSNQSGGQFPKQNQQAPRLPAPANQQNSQAAPVQVGNRACFHCGEQGHWVMQCPKKAAQQQSGPNAPAKQNVSQPGAGNRSQPRYNHGRLNHLEAEAVQETPGMIVGMFPVDSHIAEVLFDTGATHSFITASWVEAHNLPITTMSTPIQIDSAGGRIRADSICLNISVKIRGIAFPANLIVMGTQGIDVILGMNWLDKYQAVISCDKRTIKLVSPLGKEVVTELVPPEPKKGSCYQMVVDSSEADPIESIKVVSEFSDVFPKDLPGMPPERKVEFAIELLPGTAPIFKRAYRISGPELDELKKQIDELSEKGYIRPSTSPWAAPVLFVEKKDGTKRMCIDYRALNEVTIKNKYPLPRIEDLFDQLRGASVFSKIDLRSGYHQLRIRPSDIPKTAFISKYGLYEFTVMSFGLTNAPAFFMNLMNSVFMDYLDKFVVVFIDDILVYSQSEEEHADHLRMVLQRLREHQLYAKLSKCEFWISEVLFLGHIINKEGLAVDPKKVADILNWKAPTDAKGIKSFIGMAGYYRRFIEGFSKIAKPMTALLGNKVEFKWTQKCQEAFEALKEKLTTAPVLVLPDVHKPFSVYCDACYTGLGCVLMQEGRVVAYSSRQLKVHEKNYPIHDLELAAVVHALKTWRHYLYGQKCDVYTDHKSLKYIFTQSELNMRQRRWLELIKDYELEIHYHPGKANVVADALSRKSQINLMVARPMPYELAKEFDRLSLGFLNNSRGVTVELEPTLEREIKEAQKNDEKISEIRRLILDGKGKDFREDAEGVIWFKDRLCVPNVQSIRELILKEAHETAYSIHPGSEKMYQDLKKKFWWYGMKREIAEHVAMCDSCRRIKAEHQRPAGLLQPLQTPQWKWDEIGMDFIVGLPRTRAGYDSIWVVVDRLTKSAHFIPVKTNYNSAVLAELYMSRIVCLHGVPKKIVSDRGTQFTSHFWQQLHEALGTHLNFSSAYHPQTDGQTERTNQILEDMLRACALQDQSGWDKRLPYAEFSYNNSYQASLKMSPFQALYGRSCRTPLQWDQPGEKQVFGPDILLEAEENIKMVRENLKIAQSRQRSYADTRRRELSFEVGDFVYLKVSPIRGVRRFGVKGKLAPRYIGPYQILAKRGEVAYQLSLPENLSAVHNVFHVSQLKKCLRVPEEQLPVEGLEVQEDLTYVEKPAQILEIADRVTRRKTIRMCKVRWNHHSEEEATWEREDDLVAKYPELFASQP

SEQ ID NO: 10637 - protein, 1823 aa, Zea mays
  Clone ID: TF_ZM4640.C7.o1.fg.pep
MKLWKETSRSSKITTSSRCGLAATPSRLPVKAAMARLRHTARKSVIPFLPSRLAERPLRRPVAGQSSHLERLHHRLREEQERRRQEQQGSSFSLHQEIESVRSCSPVLPLEAPPAPPLGAPASGVAAGGDPDDGDGDDSSSHDTDFSANPEPEGWVARPITRDAARGCHFHDALDTLLRRAFDRHTCRGVYPDRWEATCLVRCPENSLQGAEACSEHYSISERDSAEAAMQDAARRALSHYCSVFGGAADGLDLKYYPRRPSGSTGGVIVSPVGEGNPRLSSTVNLAAVLNTELDHALDELSRARAEIALLRAERAERHHLDGGSPAPMSENRRRGGRRAQQERAAQQDEVPQQQHLPPPPPMSIEQMFLMQTQAVQAIGQTLATIQQQQQQQQQAPPQPQMPQIPRDKRAEFMRGHPPTFAHSSDPMDAEDWLRTVERELHTAQCDDREKVLYGPRLLRGAAQSWWESYLATHAHPDAITWEEFRGSFRQYHVPAGLMTVKKEEFLALKQGSSSVSEYRDRFLQLSRYAPEDVNTDAKRQYRFLRGLVDPLQYQLMNHTFPTFQHLIDRAIMTERKRKEMEDRKRKISGPQPGSSNRPRFSGNQSQQFRQNQRPPQQHQQFQRQYPPHQYQNRQSNQSGGQFQRQNQQAPRLPAPANQQNSQAAPAQVGNRACFHCGEQGHWVMQCPKKAAQQQSGPSAPAKQNVPQHGVGNRSQPRYNHGRLNHLEAEAVQDTPGMIVGMFPVDSHIAEVLFDTGATHSFITASWVEAHNLPITAMSTPIQIDSAGGRIRADSICLNISVEIRGIAFPANLIVMGTQGIDVILGMNWLDKYQAVISCDKRTIKLVSPLGKEVVTELVPPEPKKGSCYQIAVDSSEADPIESIKVVSEFPDVFPKDLPGMPPERKVEFAIELLPGTAPIFKRAYRISGPELDELKKQIDELSEKGYIRPSTSPWAAPVLFVEKKDGTKRMCIDYRALNEVTIKNKYPLPRIEDLFDQLRGASVFSKIDLRSGYHQLRIRPSDIPKTAFISKYGLYEFTVMSFGLTNAPAFFMNLMNSVFMDYLDKFVVVFIDDILVYSQSEEEHEDHLRMVLQRLREHQLYAKLSKCEFWISEVLFLGHIINKEGLAVDPKKVADILNWKAPTDARGIKSFIGMAGYYRRFIEGFSKIAKPMTALLGNKVEFKWTQKCQEAFEALKEKLTTAPVLVLPDVHKPFSVYCDACYTGLGCVLMQEGRVVAYSSRQLKVHEKNYPIHDLELAAVVHALKTWRHYLYGQKCDVYTDHKSLKYIFTQSELNMRQRRWLELIKDYELEIHYHPGKANVVADALSRKSQVNLMVARPMPYELAKEFDRLSLGFLNNSRGVTVELEPTLEREIKEAQKNDEKISEIRRLILDGRGKDFREDAEGVIWFKDRLCVPNVQSIRELILKEAHETAYSIHPGSEKMYQDLKKKLWWYGIKREIAEHIPQWKWDEIGMDFIVGLPRTRAGYDSIWVVVDRLTKSAHFIPVKTNYSSAVLAELYMSWIVCLHGVPKKIVSDRGTQFTSHFWQQLHEALGTHLNFSSAYHPQTDGQTERTNQILEDMLRACALQDQSGWDKRLPYAEFSYNNSYQASLKMSPFQALYGRSCRTPLQWDQPGEKQVFGPDILLEAEENIKMVRENLKIAQSRQRSYADTRRRELSFEVGDFVYLKVSPIRGVRKFGVKDKLAPRYIGPYQILARRGEVAYQLSLPENLSAVHNVFHVSQLKKCLRVPEEQLPVEGLEVQEDLTYVEKPVQILEVADRVTRRKTIRMCKVRWNHHSEEEATWEREDDLMAKYPELFASQP

SEQ ID NO: 10638 - protein, 1490 aa, Zea mays
  Clone ID: TF_ZM4679.C3.o2.fg.pep
MSIEQMFLMQTQAVQAIGQTLAAIQQQQQQQQQQAPPQPQMPQMPRDKRAEFMRGHPPTFAHSSDPMDAEDWLRTVERELHTAQCDDMEKVLYGPRLLRGAAQSWWESYLATHANPDTITWEEFRGSFRQYHVPAGLMTVKKEEFLALKQGSSSVSEYRDRFLQLSRYAPEDVNTDAKRQYRFLRGLVDPLQYQLMNHTFPTFQHLIDRAIMTERKRKEMEDRKRKISGPQPGSSSRPRFSGNQPQQFRQNQRPPQQRQQHQQFQRQYPQHQYQNRQSNQSGGQFQRQNQQAPRLPAPANQQNSQAAPAQVGNRACFHCGEQGHWVMQCPKKAAQQQSGPNAPAKQNVSQPGAGNRPQQRYNHGRLNHLEAEAVQETPGMIVGMFPVDSHIAEVLFDTGATHSFITASWVEAHNLPTTTMSTPIQIDSAGGRIRADSICLNISVEIRGIAFPANLIVMGTQGIDVILGMNWLDKYQAVISCDKRTIKLVSPLGKEVVTELVPPEPKRGSCYQMAVDSSEADPVESIKVVSEFPDVFPKDLPGMPPERKVEFAIELLPGTAPIFKRAYRISGPELVELKKQIDELSEKGYIRPSTSPWAAPVLFVEKKDGTKRMCIDYRALNEVTIKNKYPLPRIEDLFDQLRGASVFSKIDLRSGYHQLRIRPSDIPKTTFITKYGLYEFTVMSFGLTNAPAFFMNLMNSVFMDYLDKFVVVFIDDILIYSQSEEEHADHLRMVLQRLREHQLYAKLSKCEFWISEVLFLGHIINKEGLAVDPKKVADILNWKAPTDARGIKSFIGMAGYYRRFIEGFSKIAKPMTALLGNKVEFKWTQKCQEAFEALKEKLTTSPVLVLPDVHKPFSVYCDACYTGLGCVLMQEGRVVAYSSRQLKVHEKNYPIHDLELAAVVHALKTWRHYLYGQKCDVYTDHKSLKYIFTQTELNMRQRRWLELIKDYELEIHYHPGKANVVADALSRKSQVNLMVARPMPYELAKEFDRLSLGFLNNSRGVTVELEPTLEREIKEAQKNDEKISEIRRLIPDGRGKDFREDAEGVIWFKDRLCVPNVQSIRELILKEAHETAYSIHPGSEKMYQDLKKKFWWYGMKREIAEHVAKCDSCRRIKAEHQRPAGLLLPLQIPQWKWDEIGMDFIVGLPRTRAGYDSIWVVVDRLTKSAHFIPVKTSYNSAVLTELYMSRIVCLHGVPKKIVSDRGTQFTSHFWQQLHEALGTHLDFSSAYHPQTDGQTKRTNQILEDMLRACALQDQSGWDKRLPYAEFSYNNSYQASLKMSPFQALYGRSCRTPLQWDQPGEKQVFGPDILLEAEENIKMVRENLKIAQSRQRSYADTRRRELSFEVGDFVYLKVSPIRGVRRFGVKGKLAPRYIGPYQILSKRGEVAYQLSLPENLSAVHDVFHVSQLKKCLRVPEEQLPVEGLEVQEDLTYVEKPAQILEIADRVTRRKTIRMCKVRWNHHSEEEATWEREDDLVAKYPELFASQP

SEQ ID NO: 10639 - protein, 1399 aa, Zea mays
  Clone ID: TF_ZM4716.C1.o4.fg.pep
MSIEQMFLMQTQAVQAIGQTLAGIQQQQQQQQAPPQPQMPQMLRDKRGLMTVKKEEFLALKQGSSSVNEYRDRFLQLSRYAPEDVNTDAKRQYRFLRGLVDPLQYQLMNHTFPTFQHLIDRVIMTERKRKEMEDRKRKISGPQPRSNSRPRFSGNQPQQFRQNQRPPQQHQQFQRQYPQHQYQNRQSNQSGGQFQRQNQQAPHLPAPANQQNNQAAPAQVGNRACFHCGEQGHWVMQCPKKAAQQQSGPNAPAKQNVPQPGAGNRSQPRYNHGRLNHLEAEAAQETPGMIVGMFPVDSHIAEVLFDTGAMHSFITALWVEAHNLPITTMSTPIQIDSAGGRIRADSICLNVSVEIRGIAFPANLIIMGTQGIDVILGMNWLDKYQAVISCDKRTIKLVSPLGEEVVTELVPPEPKKGSCYQMAVDSSEADPIERIKVVSEFPDVFPKDLPGMPPERKVEFAIELLPGTAPIFKRAYRISGPELVELKKQIDELSEKGYIRPSTSPWAAPVLFVEKKDGTKRMCIDYRALNEVTIKNKYPLPRIEDLFDQLRGASVFSKIDLRSGYHQLRIRPSDIPKTAFITKYGLYEFTVMSFGLTNAPAFFMNLMNSVFMDYLDKFVVVFIDDILIYSQSEEEHADHLRMVLQRLREHQLYAKLSKCEFWINEVLFLGHIINKEGLAVDPKKVADILNWKAPTDARGIKSFIGMAGYYRRFIEGFSKIAKPMTALLGNKVEFKWTQKCQQAFEALKEKLTTAPVLVLPDVHKPFSVYCDACYTGLGCVLMQEGRVVAYSSRQLKVHEKNYPIHDLELTAVVHALKTWRHYLYGQKCDVYTDHKSLKYIFTQSELNMRQRRWLELIKDYELEIHYHPGKANIVADALSRDSQVNLMVARPMPYELAKEFDRLSLEFLNNSRGVTVELEPTLEQEIKEAQKNDEKISEIRRLILDGRGKDFREDAEGVIWFKDRLCVPNVQSIRELILKEAHETAYSIHPGSEKMYQDLKNKIWWYGMKREIAEHVAMCDSCRRIKAEHQRPAGLLQPLQIPQWKWDEIGMDFIVGLPRTRAGYDSIWVVVDRLTKSAHFIPVKTNYSSAVLAELYMSRIVCLHGVPKKIVSDRGTQFTSHFWQQLHEALGTHLNFSSAYHPQTDGQTERTNQILEYMLRACALQDQSGWDKRLPYAEFSYNNSYQASLKMSPFQALYGRSCRTLLQWDQPGEKQVFGPDILLEAEENIKMVRENMKIAQSRQRSYADTRRRELSFEVGDFVYLKVSPIRGVRRFGVKGKLAPRYIGPYQIISRRGEVAYQLSMPENLSAVHDVFHVSQLKKCLRVPEEQLPVEGLEVQEDLTYVEKPVQILEVADRVTRRKTIRMCKVKWNHHSEEEATWEREDDLMAKYPELFASQP

SEQ ID NO: 10640 - protein, 1481 aa, Zea mays
  Clone ID: TF_ZM4786.C2.o2.fg.pep
MSIEQMFLMQTQAVQAIGQTLAAIQQQQQQQQQQAPPQPQMPQMPRDKRAEFMRGHPPTFAHSSDPMDAEDWLRTVERELHTAQCDDREKVLYGPRLLRGAAQSWWESYLATHANPDTITWEEFRGSFRQYHVPAGLMTVKKEEFLALKQGSSSVSEYRDRFLQLSRYAPEDVNTDAKRQYRFLRGLVDPLQYQLMNHTFPTFQHLIDRAIMTERKRKEMEDRKRKISGPQPGSSSRPRFSGNQPQQFRQNQRPPQQHQQRQQYQQFQRQYPQNQYQNRQSNQSGGQFQKQNQQAPRLPAPANQQNSQAAPAQVGNRACFHCGEQGHWVMQCPKKAAQQQLGPNAPGKQNRYNHGRLNHLEAEAVQETPGMIVGMFPVDSHIAEVLFDTGATHSFITASWVEAHNLPTTTMLTPIQIDSAGGRIRADSICLNVSVEIRGIAFPANLIVMGTQGIDVILGMNWLDKYQAVISCDKRTIKLVSPLGEEVVTELVPPEPKKGSCYQMAVDSSEADPIESIKVVSEFPDVFPKDLPGMPPERKVEFAIELLPGTAPISKRAYRISGPELVELKKQIDELSEKGYIRPSTSPWAAPVLFVEKKDGTKRMCIDYRALNEVTIKNKYPLPRIEDLFDQLRGASVFSKIDLRSGYHQLRIRPSDIPKTAFITKYGLYEFTVMSFGLTNAPAFFMNLMNSVFMDYLDKFVVVFIDDILVYSQSEEEHADHLRMVLQRLREHQLYAKLSKCEFWISEVLFLGHIINKEGLAVDPKKVADILNWKAPTDARGIKSFIGMAGYYRRFIEGFSKIAKPMTALLGNKVEFKWTQKCQEAFEALKEKLTTAPVLVLPDVHKPFSVYCDACYTGLGCVLMQEGRVVAYSSRQLKVHEKNYPIHDLELAAVVHALKTWRHYLYGQKCDVYTDHKSLKYIFTQSELNMRQRRWLELIKDYELEIHYHPGKANVVADALSRKSQVNLMVARPMPYELAKEFDRLSLGFLNNSRGVTVELEPTLEREIKEAQKNDEKISEIRRLILDGRGKDFREDAEGVVWFKDRLCVPNVQSIRELILKEAHETAYSIHPGSEKMYQDLKKKFWWYGMKREIAEHVAMCDSCRRIKAEHQRPAGLLQPLQIPQWKWDEIGMDFIVGLPRTRAGYDSIWVVVDRLTKSAHFIPVKTNYNSAVLAELYMSRIVCLHGVPKKIVSDRGTQFTSHFWQQLHEALGTHLNFSSAYHPQTDGQTERTNQILEDMLRACALQDQSGWDKRLPYAEFSYNNSYQASLKMSPFQALYGRSCRTPLQWDQPGEKQVFGPDILLEAEENIKMVRENLKIAQSRQRSYADTRRRELSFEVGDFVYLKVSPIRGVRRFGVKGKLAPRYIGPYQILSKRGEVAYQLSLPENLSAVHDVFHVSQLKKCLRVPEEQLPVEGLEVQEDLTYIEKPAQILEVADRVTRRKTIRMCKVRWNHHSEEEATWEREDDLMAKYPELFASQP

SEQ ID NO: 10641 - protein, 1492 aa, Zea mays
  Clone ID: TF_ZM4888.C3.o2.fg.pep
MSIEQMFLMQTQAVQAIGQTLAAIQQQQQQQQQAPPQPQMPQVPRDKRAEFMRGHPPTFAHSSDPMDAEDWLRTVERELHTAQCDDREKVLYGPRLLRGAAQSWWESYLATHANPDTITWEEFRGSFRQYHVPAGLMTVKKEEFLALKQGSSSVSEYRDRFLQLSRYAPEDVNTDAKRQYRFLRGLVDPLQYQLMNHTFPTFQHLIDRAIMTERKRKEMEDRKRKISGPQSGSSSRPRFSGNQPQQFRQNQRPPQQHQQRQQYQQFQRQYPQNQYQNRQSNQSGGQFQKQNQQAPRLPAPANQQNSQAAPAQVGNRACFHCGEQGHWVMQCPKKAAQQQSGPNAPAKQNVPQPGAGNRSQQRYNHGRLNHLEAEAVQETPDMTVGMFPVDSHIAEVLFDTGATHSFITASWVEAHKLPITTMSTPIQIDSAGGRIRADSICLNISVKIRGIAFPANLIVMGTQGIDVILGMNWLDKYQAVISCDKRTIKLVSPLGEEVVTELVPPEPKKGSCYQMTVDSSEADPIESIKVVSEFPDVFPKDLPGMPPERKVEFAIELLPGTAPIFKRAYRISGPELDELKKQIDELSEKGYIRPSTSPWAAPVLFVEKKDGTKRMCIDYRALNEVTIKNKYPLPRIEDLFDRLRGASVFSKIDLRSGYHQLRIRPSDIPKTAFITKYGLYEFTVMSFGLTNAPAFFMNLMNSVFMDYLDKFVVVFIDDILVYSQSEEEHADHLRMVLQRLREHQLYAKLSKCEFWISEVLFLGHIINKEGLAVDPKKVADILNWKAPTDARGIKSFIGMAGYYRRFIEGFSKIAKPMTALLGNKVEFKWTQKCQEAFEALKEKLTTAPVLVLPDVHKPFSVYCDACYTGLGCVLMQEGRVVAYSSRQLKVHEKNYPIHDLELAAVVHALKTWRHYLYGQKCDVYTDHKSLKYIFTQSELNMRQRRWLELIKDYELEIHYHPGKANVVADALSRKSQVNLMVARPMPYELAKEFDRLSLGFLNNSRGVTVELEPTLEREIKEAQKNDEKISEIRRLILDGRGKDFREDAEGVVWFKDRLCVPNVQSIRELILKEAHETAYSIHPGSEKMYQDLKKKFWWYGMKREIAEHVAMCDSCRRIKAEHQRPAGLLQPLQIPQWKWDEIGMDFIVGLPRTRAGYDSIWVVVDRLTKSAHFIPVKTNYNSAVLAELYMSRIVCLHGVPKKIVSDRGTQFTSHFWQQLHEALGTHLNFSSAYHPQTDGQTERTNQILEDMLRACALQDQSGWDKRLPYAEFSYNNSYQASLKMSPFQALYGRSCRTPLQWDQPGEKQVFGPDILLEAEENIKMVRENLKIAQSRQRSYADTRRRELSFEVGDFVYLKVSPIRGVRRFGVKGKLAPRYIGPYQILARRGEVAYQLSLPENLSAVHDVFHVSQLKKCLRVPEEQLPVEGLEVQEDLTYVEKPAQILEIADRVTRRKTVRMCKVRWSHHSEEEATWEREDDLKAKYPELFASQP

SEQ ID NO: 10642 - protein, 1486 aa, Zea mays
  Clone ID: TF_ZM4897.C1.o18.fg.pep
MQDAARRALLHYCLVLGGVADGLDLKYYPRCPSGSIGGVIVSPVGEDNPRLNSTVNLAAVLNTELDHALDELSRARAEIALLRAERAERRHLDDGSPAPVGTQHPYRSPRCQRTGAEEEGVLSRSEPLSRKRCPSNSICRPPPPMSIEQMFLMQTQAVQAIGQTLAAIQQQQQQQQQAPPQPQMPQMPTDKRAEFMRGHPPTFAHSSDPMDAEDWLRTVERELHTAQCDDREKVLYGPRLLREAAQSWWESYLATHAHLDAITWEEFRGSFRQYHVPAGLMTVKKEEFLALKQGPLSVSEYRDRFLQLSRYAPEDVNTDAKRQYRFLRGLVDPLQAIMTERKRKEMEDRKRKISGPQPGSTNRPRFSGNQPQQFRQNQRPPQQHQQFQRQYPQHQYQNHQSNQSGGQLQRQNQQAPRLPSPANQQNNQAAPAQVGNRACFHCGEQGHWVMQCPKKAAQQQSGPMPSKAECVSAWKVLFDTGATHSFITASWVQAHNLPITTMSTPIQIDSAGGRIRADSICLNISVEIRGIAFPANLIVMGTQGIDVILGMNWLDKYQAVISCDKRTIKLVSPLGEEVVTELVPSEPKKGSCYQIAVDSSEADPIESIEVVSEFPDVFPKDLPGMPPERKVEFAIELLPGTAPIFKRAYRISGPELVELKEQIDELSEKGYIRPSTSPWAAPVLFVEKKDGTKRMCIDYRALNEVTIKNKYPLPRIEDLFNQLRGASVFSKIDLRSGYHQLRIRPSDIPKTAFITKYGLYEFTVMSFGLTNAPAFFMNLMNSVFMDYLDKFVVVFIDDILIYSQSEEEHADHLKMVLQRLREHQLYAKLSKCEFWINEVLFLGHIINKEGLAVDPKKVADILNWKAPTDARGIKSFIGMAGYYRRFIEGVFEDCETNNKVEFKWTQKCQEAFEALKEKLTTAPVLVLPDVHKPFSVYCDACYTGLGCVLMQEGRVVAYSSRQLKVHEKNYPIHDLELAVVVHALKTWRHYMYGQKCDVYTDHKSLKYIFTQSELNMRQRRWLELIKDYELEIHYHPGKANVVADALSRKSQVNLMVARPMPYELAKEFDKLSLGFLNNSRGVTVELEPTLEREIKEAQKNDEKISEIRRLILDGRGKDFREDAEGVIWFKDRLCVPNVQSIRELILKEAHETAYSIHPGSEKMYQDLKKKFWWYGLKREIAEHVAMCDSCRRIKAEHQRPAGLLQPLQIPQWKWDEIGMDFIVGLPRTRAGYDSIWVVVDRLTKSAHFIPVKTNYSSAVLAELYMSRIVCLHGVPKKIVSDRGTQFTSHFWQQLHEALGTHLNFSSAYHPQIDGQTERTNQILEDMLRACALQDQSGWDKRLPYAEFSYNNSYQASLKMSPFQALYGRSCRTPLQWDQPGEKQVFGLDILLEAEENIKMVRENLKIVQSRQRSYADTRRRELSFEVGDFVYLKVSPIRGVRRFGVKGKLAPRYIGPYQILSRRGEVAYQLSLPENLSAVHDVFHVS

SEQ ID NO: 10643 - protein, 1371 aa, Zea mays
  Clone ID: TF_ZM4906.C4.o1.fg.pep
MSENRRRGGRRAQQEQAAQQEEVPQQQQLPPLPPMSIEQMFLMQTQAVQAIGQTLATIQQQQQQAPPQPQMPRDKRAEFMRGLMTVKKEEFLALKQGSSSVSEYRDRFLQLSRYALEDVNTDAKRQYRFLRGLVDPLQYQLMNHTFSTFQHLIDRAIMTERKRKEMEDRKRKISGPQPGSSIRPRFSGNQSQQFRQNQRPPQQHQQFQRQYPQHQYQNRQNNQSRGGQFQRQNQQTLRLPALAAQQNSQAAPAQVGNRACFHCGEQGHWVMQCPKKTAQQQSGPNAPAKQNVSQPGAGNRSQPRYNHGRLNHLEAEAIQETPDMIVGMFPVDSHIAEVLFDAGATHSFITASWVEAHNLPITTMSTPIQIDSAGGRIRANSICLNVCVEIRGIAFPANLIVMGTQGIDVILGMNWLDKYQAVISCDKRTIKLVSPLGDEVVTELVPPEPKKGSCYQMVVDSSEADPIESIKIVSEFPDVFPKDLPGMPPERKVEFAIELLPGTAPIFKRAFRISVPELVELKKPIDELSEKGYIRPSTSPWAAPVLFVEKKDGTKRMCIDYRALNEVTIKNKYPLPRIEDLFDQLRGASVFSKIDLRSGYHQLRIRPSDIPKTAFITKYGLYEFTVMSFGLTNAPAFFMNLMNSVFMDYLDKFVVVFIDDILIYSQSEEEHASHLRMKVADILNWKAPTDAQGIKSFIGMAGYYRRFIEGFSKIAKPMTALLGNKVEFKWTRKCQEAFEALKEKLTTTPILVLPDVHKPFSVYCDACYTGLGCVLMQEGRVVAYSSRQLKVHEKNYPIHDLELAAVVHALKTWRHYLYGQKCDVYIDHKSLKYIFTQSELNMRQRRWLELIKDYELEIHYHPGKANVVADALSRKSQINLMVARPMPYELAKEFDRLSLGFLNNTRGVTVELEPTLEWEIKEAQKNDEKISEIRRLILDGRGKDFREDAEGVIWFKDRLCVPNVQSIRELILKEAHETAYSIHPGSEKMYQDLKKKFWWYGMKREIAEHVAMCDSCRRIKAEHQRPAGLLQPLQIPQWKWDEIGMDFIVGLPRIRAGYDSIWVVVDRLTKSAHFIPVKTNYSSAVLAELYMSRIVCLHGVPKKIVSDRGTQFTSHFWQQLHEALGTHLNFSSAYHPQTDGQTERTNQILEDMLRACALPDQSGWDKRLPYAEFSYNNSYQASLKMSPFQALYGRSCRTPLQWDQPGEKQVFGPDILLEAEENIKMVRENLKIAQSRQRSYADTRRRELSFEVGDFVYLKVSPISGVRRFGVKGKLAPRYIGPYQILARRGELKKCLRVPEEQLPVEGLEVQEDLTYTEKPAQILEIADIVTRRKTIRMCKVKWDHHSEEEATWEREDDLMAKYPELFASQP

SEQ ID NO: 10644 - protein, 293 aa, Zea mays
  Clone ID: TF_ZM4999.C2.o18.fg.pep
MDAEDWLRTMERELHTAQCDDGEKVLYGPRLLRGVAQSWWESYLATHANLDTITWEEFRGSFRQYHVPAGLMTMKKEEFLALKQGSSSYQLMNHTFPTFQHLIDRAIMTERKRKEMEDCKRKISGPQPGSSNRPRFSSNQPQQFRQNQRPPQQQQFQRQFPQHQNRQNNQSGGGQFQRQNQQAPRLPAPANQQNSQAAPAQVGNRACFHCGEQGHWVMQCPKKAAQQQSGPNAPAKQSVSQPGAGNCSQPRYNHGRLNHLEAEAVQETPGMIVGMFLVDSHIAEVLFDTGAMH

SEQ ID NO: 10645 - protein, 1696 aa, Zea mays
  Clone ID: TF_ZM5011.C3.o1.fg.pep
MESHDLRAEWESRLVGGYEIDDSGYDYGAGKWYSFRLERMARLRHTARKSVIPFLPSRLAERPLRRPVAGQSSHLERLHHRLREDQERRRQEQQGSSFSLQQEIESVRSCSPVLPLEAPPAPPLGAPASGVAAGGDPDDGGGDDSSSHDTDFSANPEPEGWVARPITRDFSAFWFIYYVNEMSENRRRGGRRAQQERAAQQEEVPQQQHLPPPPPMSIEQMFLMQTQAVQAIGQTLAAIQQQQQAPPQPQMPQMPRDKRAEFMRGHPPTFAHSSDPMDAEDWLRTVERELHTAQCDDREKVLYGPRLLRGAAQSWWESYLATHAHPDAITWEEFRGSFRQYHVPAGLMTVKKEEFLALKQGPLSVSEYRDRFLQLSRYAPEDVNTDAKRQYRFLRGLVDPLQYQLMNHTFPTFKHLIDRAIMTERKRKEMEDRKRKISGPQPGSSNRPRFSGNQPQQFRQNQRPPQHQQFQRQYPQHQYQNRQSNQSGGQFQRQNQQAPHLPAPANQQNSQAAPAQVGNRACFHCGEQGHWVMQCPKKAAQQQSGPNAPAKQNVSQPGSGNRSQPRYNHGRLNHLEAEAVQETPGMIVGMFPVDSHIAEVLFDTGATHSFITASWVEAHNLPITTMSTPIQIDSAGGRIRADSICLNISVKIRGIAFPANLIVMGTQGIDVILGMNWLDKYQTVISCDKRTIKLVSPLGEEVVTELVPPEPKKGSCYRIAVDSSGADPIESIKVVSEFSDVFPKDLPGMPPERKVEFAIELLPGTAPIFKRAYRISGPELVELKEQIDELSEKGYIRPSTSPWAAPVLFVEKKDGTKRMCIDYRALNEVTIKNKYPLPRIEDLFDQLRGASVFSKIDLRSGYHQLRIRPSDIPKTAFISKYGLYEFTVMSFGLTNAPAFFMNLMNSVFMDYLDKFVVVFIDDILVYSQSEEEHADHLRMVLQRLREHQLYAKLSKCEFWISEVLFLGHIINKEGLAVDPKKVADILNWKAPTDARGIKSFIGMAGYYRRFIEGFSKIAKPMTALLGNKVEFKWTQKCQEAFEALKEKLTTAPVLVLPDVHKPFSVYCDACYTGLGCVLMQEGRVVAYSSRQLKVHEKNYPIHDLELAAVVHALKTWRHYLYGQRCDVYTDHKSLKYIFTQSELNMRQRRWLELIKDYELEIHYHPGKANVVADALSRKSQVNLMVARPMPYELAKEFDRLSLRFLNNSRGVTVELEPTLEREIKEAQKNDEKISEIRRLILDGRGKDFREDAEGVIWFKDRLCVPNVQSIRELILKEAHETAYSIHPGSEKMYQDLKKKFWWYGMKREIAEHVAMCDSCRRIKAEHQRPAGLLQPLQIPQWKWDEIGMDFIVGLPRTRAGYDSIWVVVDRLTKSAHFIPVKTNYSSAVLAELYMSRIVCLHGVPKKIVSDRGTQFTSHFWQQLHEALGTHLNFSSAYHPQTDGQTERTNQILEDMLRACALQDQSGWDKRLPYAEFSYNNSYQASLKMSPFQALYGRSCRTPLQWDQPGEKQVFGPDILLEAEENIKMVRENLKIAQSRQRSYADTRRRELSFEVGDFVYLKVSPIRGVKRFGVKGKLAPRYIGPYQVLARRGEVAYQLSLPENLSAVHDVFHVSQLKKCLRVPEEHLPVEGLEVQEDLTYVEKPVQILEVADRVTRRKTIRMCKVRWDHHSEEEATWEREDDLMAKYPELFASQP

SEQ ID NO: 10646 - protein, 1370 aa, Zea mays
  Clone ID: TF_ZM5011.C5.o1.fg.pep
MSIEQMFLMQTQAVQAIGQTLAAIQLQQQQQQQAPPQPQMPQMLRDKRAEFMRGHPPTFAHSSDPMDVEDWLRTVERELHTAQCDDREKVLYGPRLLRGAAQSWWESYLATHAHPDAITWEEFRGSFRQYHVPAGLMIVKKEEFLALKQGPLSVNEYRDRFLQLSRYAPEDVNTDAKRQYRFLRGLVDPLQYQLMNHTFPTFQHLIDRAIMTERKRKEMEDCKRKISGPQPGSSNRPRFSGNQPQQFRQNQRPPQQHQQFQRQYPQHQYQNRQSNQSGGQFQRQNQQAPRLPAPANQQNSQAAPAQVGNRACFHCGEQGHWVMQCPKKAAQQQSGPNAPAKQNVPQPGAGNRSQPRYNHGRLNHLEAEAVQETPDMIVGMFPVDSHIAEVLFDTGATHSFITASWVEAHNLPITTMSTPIQIDSAGGRIRADSICLNISVEIRGIAFAANLIVMGTQGIDVILGMNWLDKYQAVISCDKRTIKLVSPLGEEVVTELVPPEPKKGSCYQLAVDSSEADPIESIRVVSEFPDVFPKDLPGMPPERKVEFAIELLPGTAPIFKRAYRISGPELVELKEQIDELSEKGYIRPSTSPWAAPVLFVEKKDGTKRMCIDYRALNEVTIKNKYPLPRIEDLFDQLRGASVFSKIDLRSGYHQLRIRPSDIPKTAFITKYGLYEFTVMSFGLTNAPAFFMNSMNSVFMDYLDKFVVVFIDDILVYSQSEEEHADHLKMVLQRLREHQLYAKLSKCEFWISEVLFLGHIINKEGLAVDPKKVADILNWKAPTDARGIKSFIGMAGYYRRFIEGFSKIAKPMTALLGNKVEFNWTQKCQEAFEALKEKLTTAPVLVLPDVHKPFSVYCDACYIGLGCVLMQEGRVVAYSSRQLKVHEKNYPIHDLELAAVKCDVYTDHKSLKYIFTQSELNMRQRRWLELIKDYELEIHYHPGKANVVADALSRKSQVNLMVARPMPYELAKEFDRLSLGFLNNSRGVTVELEPTLEREIKEAQKNDEKISEIRRLILDGRGKDFREDAEGVIWFKDRLCVPNVQSIRELILKEAHETSYSIHPGSEKMYQDLKKKFWWYGMKREIAEHVAMCDSCRRIKAEHQRPAGLLQPLQIPQWKWDEIGMDFIVGLPRTRAGYDSIWVVVDRLTKSAHFIPVKTNYSSVVLAELYMSRIVCLHGVPKKIVSDRGTQFTSHFWSAYHLQTDGQTERTNQILEDMLRACALQDQSGWDKRLPYAEFSYNNSYQASLKMSPFQALYGRSCRTPLQWDQPGEKQVFGPDILLEAEENIKMLKKCLRVPEEQLPVEGLEVQEDLTYVEKPVQILEVADRVTRRKTIRMCKVRWNHHSEEEATWEREDDLMAKYPELFASQP

SEQ ID NO: 10647 - protein, 1501 aa, Zea mays
  Clone ID: TF_ZM5030.C4.o1.fg.pep
MLICSVLLKNSILFPYAARFARSVLMCGCILQMSENRRRGGRRAQQERAAQQEEVPQQQHLPPPPPMSIEQMFLMQTQAVQAIGQTLAAIQQQQQQQAPPQPQMPQMPRDKRAEFMRGHPPTFAHSSDPMDAEDWLRTVERELHTAQCDDREKVLYGPRLLRGAAQSWWESYLATHAHPDAITWEEFRGSFRQYHVPAGLMTVKKEEFLALKQGPLSVSEYRDKFLQLSRYAPEDVNTDAKRQYRFLRGLVDPLQYQLMNHTFPTFQHLIDRAIMTERKRKEMEDRKRKISGPQPGSSSRPRFSGNQPQQFRQNQRPPQQHQQFQRQYPQNQYQNRQSNQSGGQFQRQNQQPPRLPAPANQQNSQAAPAQVGNRACFHCGEQGHWVMQCPKKAAQQQSGPNAPAKQNVPQPGAGNRSQPRYNHGRLNHLEAEAVQETPGMIVGMFPVDSHIAEVLFDTGATHSFITASWVEAHNLPITTMSTPIQIDSSGGRIRADSICLNISVKIRGIAFPANLIVMGTQGIDVILGMNWLDKYQAVISCDKRTIELVSPLGEEVVTELVPPEPKKGSCYQMAVDSSEADPIESIKVVSEFPDVFPKDLPGMPPERKVEFAIELLPGTAPIFKRAYRISGPELDELKKQIDELSEKGYIRPSTSPWAAPVLFVEKKDGTKRMCIDYRALNEVTIKNKYPLPRIEDLFDQLRGASVFSKIDLRSGYHQLRIRPSDIPKTAFISKYGLYEFTVMSFGLTNAPAFFMNLMNSVFMDYLDKFVVVFIDDILIYSQSEEEHADHLRMVLQRLREHRLYAKLSKCEFWISEVLFLGHIINKEGLSVDPKKVADILNWKAPTDARGIKSFIGMAGYYRRFIEGFSKIAKPMTALLGNKVEFKWTQRCQEAFEALKEKLTTTPVLVLPDVHKPFSVYCDACYTGLGCVLMQEGRVVAYSSRQLKVHEKNYPIHDLELAAVVHALKSWRHYLYGQKCDVYTDHKSLKYIFTQSELNMRQRRWLELIKDYELEIHYHPGKANVVADALSRKSQVNLMVARPMPYELAKEFDRLSLGFLNNSRGVTVELEPTLEREIKEAQKNDEKISEIRRLILEGKGKDFREDAEGVIWFKDRLCVPNVQPIRELILKEAHEIAYSIHPGSEKMYQDLKKKFWWYGMKREIAEHVARSLSGNGMKSSAHFIPVKTNYNSAVLAELYMSRIVCLHGVPKKIVSDRGTQFTSHFWQQLHEALGTHLNFSSAYHPQTDGQTERTNQIREDMLRACALQDQSGWDKRLPYAEFSYNNSYQASLKMSPFQALYGRSCRTPLQWDQPGEKQVFGPDILLEAEENIKMVRENLKIAQSRQRSYADTRRRELSFEVGDFVYLKVSPIRGVRRFGVKGKLAPRYIGPYQILARRGEVAYQLSLPENLSAVHNVFHVSQLKKCLRVPEEQLPVEGLEVQEDLTYVEKPVQILEIADRVTRRKTIRMCKVRWNHHSEEEATWEREDDLMAKYPELFASQP

SEQ ID NO: 10648 - protein, 1516 aa, Zea mays
  Clone ID: TF_ZM5033.C3.o1.fg.pep
MSENRRRGGRRAQQERAAQQDEVPQQQHLPPPPPMSIEQMFLMQTQAVQAIGQTLVAIQQQQQAPPQPQMPQMPRDKRAEFMRGHPPTFAHSSDPMDAEDWLRTVERELHTAQCDDREKVLYGPRLLRGAAQSWWESYLATHAHPDAITWEEFRGSFRQYHVPAGLMTVKKEEFLALKQGPLSVSEYRDRFLQLSRYAPEDVNTDAKRQYRFLRGLVDPLQYQLMNHTFPTFQHLIDRAIMTERKRKEMEDRKRKISGPQPGSSNRPRFSGNQPQQFRQNQRPPQQYQQFQRQYPQHQYQNRQSNQSGGQFQRQNPQAPRLPAPANQQNNQAAPAQVGNRACFHCGEQGHWVMQCPKKAAQQQSGLNAPAKQNVPQPGSGNRSQPRYNHGRLNHLEAEAVQETPGMIVGMFPVDSHIAKVLFDTGATHSFITTSWVEAHNLPITTMSTPIQIDSAGGRIRADSICLNISVEIRGIVFPANLIVMGTQGIDVILGMNWLDKYQAVISCDKRTIKLVFPLGEEVVTELVPPEPKKGSCYQIAVDSREADPIERIKVVSEFPDVFPKDLPGMPPERKVEFAIELLPGTAPIFKRAYRISGPELVELKKQIDELSEKGYIRPSTSPWAAPVLFVEKKDGTKRMCIDYRALNEVTIKNKYPLPRIEDLFDQLRGASVFSKIDLRSGYHQLRIRPSDIPKTAFISKYGLYEFTVMSFGLTNAPAFFMNLMNSVFMDYLDKFVVVFIDDILIYSQSEEEHADHLRMVLQRLREHQLYAKLSKCEFWISEVLFLGHIINKEGLAVDPKKVADILNWKAPTDARGIKSFIGMAGYYRRFIEGFSKIAKPMTALLGNKVEFKWTQKCQETFEALKEKLTIAPVLVLPDVHKPFSVYCDACYTGLGCVLMQEGRVVAYSSRQLKVHEKNYPIHDLELAAVVHALKTWRHYLYGQKCDVYTDHKSLKYIFTQSELNMRQRRWLELIKDYELEIHYHLGKANVVADALSRKSQINLMVARPMPYELAKEFDKLSLGFLNNSRGVTVELEPTLEREIKEAQKNDEKISEIRRLILDGRGKDFREDAEGVIWFKDRLCVPNVQSIRELILKEAHETAYSIHPGSEKMYQDLKKKFWWYGMKREIAEHVAMCDSCRRIKAEHQRPAGLLQPLQIPQWKWDEIGMDFIVGLPRTRAGYDSIWVVVDRLTKSAHFIPVKTNYSSAVLVELYMSRIVCLHGVPKKIVSDRGTQFTSHFWQQLHEALGTHLNFSSAYHPQTDGQTERTNQILEDMLRACALQDQSGWDKRLPYAEFSYNNSYQASLKMSPFQALYGRSCRTPLQWDQPGEKQVFGPGILLEAEENIKMVRENLKIAQSRQRSYADTRRRELSFEVGDFVYLKVSPIRGVRRFGVKGKLAPRYIGPYQILARHGEVAYQLSLPENLSAVHDVFHVSQLKKCLRVPEEQLPVEGLVVQEDLTYVEKPVQILEVADRVTRRKTIRMCKVKWNHHSEEEATWEREDDLMAKYPELFASQP

SEQ ID NO: 10649 - protein, 1428 aa, Zea mays
  Clone ID: TF_ZM5035.C1.o2.fg.pep
MRLTPCYVGHLTGILGPSSIAVWSTSTVAGSTRTAGRQPAWCAVRRTVSRVLRSAQSTILSLSGTQLRQPCKMLHGVRFRTTARFSMSENRRRGGRRAQQERAAPQDEVPQQQHLPPPPPMSIEQMFLMQTQAVQAIGQTLAAIQQQQQQQQQQQAPPQPQMPQMPRDKRAEFMRGHPPTFAHSSDPMDAEDWLRTVERELHTAQCDDREKVLYGPRLLRGAAQSWWESYLATHAHPDAITWEEFRGSFCQYHVPAGLMTVKKEEFLALKQGPLSVSEYRDRFLQLSRYAPEDVNTDAKQQYRFLRGLVDPLQYQLMNHTFPTFQHLIDKAIMTERKRKEMEDPNQQNSQAAPAQVGNRACFHCGEQGHWVMQCPKKAAQQQSGPNAPAKQNVPQPGADNRPQPRYNHGRLNHLEAEAVQETPGMIVAGGRIRADSICLNISVEIRGIAFPANLIVMGTQGIDVILGMNWLDKYQAVISCDKRTIKLVSPLGEEVVTELVPPEPKKGSCYQIAVDSSEADPIERIKVVSEFPDVFPKDLPGMPPERKVEFAIELLPGTAPIFKRAYRISGPELDELKKQIDELSEKGYIRPSTSPWAAPVLFVEKKDGTKRMCIDYRALNEVTIKNKYPLPRIEDLFDQLRGASVFSKIDLRSGYHQLRIRPSDIPKTAFISKYGLYEFTVMSFGLTNAPAFFMNLMNSVFMDYLNKFVVVFIDDILVYSQSEEEHADHLKMVLQRLREHQLYAKLSKCEFWISEVLFLGHIINKEGLDVDPKKVADILNWKAPTDARGIKSFIGMAGYYRRFIEGFSKIAKPMTALLGNKVEFKWTQKCQEAFEALKEKLTTAPVLVLPDVHKPFSVYCDACYTGLGCVLMQEGRVVAYSSRQLKVHEKNYPIHDLELAAVVHALKSWRHYLYGQKCDVYTDHKSLKYIFTQSELNMRQRRWLELIKDYELEIHYHPGKANVVADALSRKSQVNLMVARPMPYELAKEFDRLSLGFLNNSRGVTVELEPTLEREIKEAQKNDEKINEIRRLILDGRGKDFREDAESVIWFKDRLCVPNVQSIRELILKEAHETAYSIHPGSEKMYQDLKKKFWWYGMKREIAEHVAMCDSCRRIKAEHQRPAGLLQPLQIPQWKWDEIGMDFIVGLPRTRAGYDSIWVVVDRLTKSAHFIPVKTNYSSAVLAELYMSRIVCLHGVPKKIVSDRGTQFTSHFWQQLHEALGTHLNFSSAYHPQTDGQTERTNQILEDMLKACALQDQSGWDKRLPYAEFSYNNSYQASLKMSLFQALYGRSCRTPLQWDQPGEKQVFGPDILLEAEENIKMVRENLKIAQSRQQSYADTRRRELSFEVGDFVYLKVSPIRGVRRFRVKGKLPPRYIGPYQILARRGEVAYQLSLPENLSAVHDVFHVSQLKMCLRVPEEQLPVEGLEV

SEQ ID NO: 10650 - protein, 646 aa, Zea mays
  Clone ID: TF_ZM5061.C1.o5.fg.pep
MDTHRPPHFDATNFPYYSARMACYLEAVDLGVWRVTRDGMKPLNNREKPTTSEEKEIHLNARAKNCLYEYLSMDIFNQVFTLKTANEIWLKLHELHNGTSNVREQKHCLVLNEYNSFAMKDDELVRDMYSRLNLIINELNSIGINKLGDADIVRKIISLLPQQRYGSIITILHNMEDLSNMTPTIVIGKIAAFEMSRKMSRGEEPTSSRPYAFACDERKGKKKAPTPSSSSEEEEEEESDDDEDNQPCTSSSEDEETVEDLLFNIDRKKQRKRGCFACGEKGHFRDNCPNMAKPKKERSKGKALTSVRTWDDSSSEDEPPRTHSHQSSSRSSRSSHKCLMARGNKSIPSSSDESSSDDEGEGKPSLDELAEAVEFFQDVCTKQKAQLKTLKNKLVSSQNDYKGLLEKFETFANLNNELSTKIELLESSAPSTATDDGLIKKNEKLKAKLASSQEAIENLLEKMEILSIHNNELTTKLENIGSTPAASLVEIPEIIKKDASTSCFDLIDDSNPCNQVVVENIVVETCSDEVAKENEQLKQEVARLGKALLCHMEGHKSFQCKAMTGDKQRQKLKQKPSSKISNTYIKKVNKKDATPYLIKKKKNGKVIAIKANKQTNKGKGAKRIWVPKEIISTMKSTKKVWIPKGK

SEQ ID NO: 10651 - protein, 1638 aa, Zea mays
  unsure (1)..(1638): unsure at all Xaa locations
  Clone ID: TF_ZmC951_374.pep
MSEDHAKKEMVTGEKPATSHGKAPSRESGNKKKEGSPSRNRTHKSGEKKKKMKKVVYYETDSSSPSTSGSDAASITSKRQEPKKYSKIPLRYPRIPKHTPILSVPLDKPPTFDGEDYSRWSDMVRYHLTSLHKSIWDVVEFGVQVPSVGDEDYDEDEVAQIEHFNSQATTILLTSLSREEYIKVQGLKSVKEIWDVLKTAHEEDEVTKITKRETIEGELGRFMLNQGEDPQAMYNRLKTLVNQVRNLGSSKWDDHEMVNVILRSLVFLNPTQVQLIRGDPRYKLMSPEEVIGKFVSFELMIKGSKKIIEQGASSTPDVQPVAFKATEEKKEDSTPSRVPIDASKLDNEEMALIIKSIRQILKQRRGKDYKSRSKKVCYKYGKPGHFIAKCPLSSDSDRDNDKKGKRREKKRYYKKKGGDAHVCREWDSDESSTDSSSDDDAANIAVTKGLLFPNVGHKCLMAKDDKRKKVKSRASTKYATSSDEASSSDDEDDLLTLFANLNMQQKEKLNELISAIHEKDEFLDSQEDFLVKENKKHVKVKNAYALEVEKCEKLSSELSTCHDVISNLRNENAKLIAKVEKSNICDDSIDNLRNDNASSIAKIEKLNASLASLRNENEKLIAKAKELDVCNVSIFNLRDENDILHAKIVELNSCRPSTSTVEHVTICTRCRDVNIDAIHDHIAMIKQKNDHIAKLDAKIAEHELENEKFKFARSILYSGRRPGIKDDIGFQKGGNVKLNAPPKRLSNFVKGKAPMPQDNEGYILYPTGYPEHKIRRIHSRKSHSGSNHAFMYKSEASSSRQSTRAKLPKKKTHIASNEHNISFKTFDASYVLTNKSGKVVAKYVGAKHKGSKTCIWVPKVYASGGSSWIIDSGCTNHMTREKKIFSSYEXNHDPQRAITFGDGNQGKXSQTQETLKGFLRWAQNEFGLRIKKIRSNNGTEFKNSQIESFLEEEGIKHEFSSPYMPQQNGVVERKNRTLLDMARTMLDEYKTSNRFWAEAVNTACYAINRLYLHRILKKTSYELLTGKKPNVSYFRVFGSKCFILVKRGRKSKFAPKAIEGFLLGYDSNTRTYRVFNKSSGLIEVSCDIVFDETNGSQVEQVDLDELDDEEAPCVALRNMSIGDVCPKESEEPPHAQDQPSSSMQASPPTQDEDQAQDDDDEDQEEPPQEEDNDQGGNDNDQDKEDDEGPRPPHPRVHQAIQRDHPVNTILGDIHKGXALQDSDWVLATQXELNNFTRNEVWHLVPRPNQNVVGTKWVFRNKQDEHGVVTRNKARLVAKGYSQVKGLDFGETYAPVARLESIRILLAYAIYHGFKLYQMDVKSAFLNGPIKEEVYVEQPPGFEDSEYPNHVYKLSKALYGLKQAPRAWYECLRDFLITNGFKVGKADPTLFTKTLANDLFICQIYVDDIIFGSTNESTCEEFSRIMTQKFKMSMMGELKYFLGFQVKQLQEGTFISQTKYIQDILTKFGMKDAKPIKTPMGTNGHLDLDTGGCKINRKSTLGTFQFLGRSLVSWASKKQNSVALSTAEAEYIAAGHCCAQLLWMRQTLRDYGYKLTKVHLLCDNESAIRMADNPVEHSRTKHIAIRYHFLRDHQQKGDIEISYINTKEQLADIFTKPLDEQTFTKLRHELNILDSRNFD

SEQ ID NO: 10652 - protein, 1161 aa, Zea mays
  Clone ID: TF_ZM4351.C4.o2.fg.pep
MTLIIKSFRQILKQRRGKDYKSRSKKVCYKYGKPGHFIAKCPLSSDSDRGDDKRKEKKRYYKKKGGDAHFNYLSIDVCVTFRNMNVSHTQFLFVHTAAIMGDRRDWMYEGFKKGYKVWYLHGESRLERVAEVEVDDGEDDVDRMDQMLEDLQPELAPDHHDSPTPEVQKFFDLLKASEEPLHGHTNSKFAFSINCYKELVDLISEVLPTGHKMPKDMYQSKKLLEGLGMEYEKIDVCQDNCMLFWKEHGREQKCLKCGKSRYVELVNEDGEKVVTKVAHKQLRYMPLTPRVKHLFLSRKTAMHMRWHKDCTNRQDGLMVHPSDGDAWKALNKFDPDFASDARNVRISLATDGFMSFNMTAASYSCWPVIAIPYNLPSALCMKYEFMFLCLVIPGPEHPGVRLNVMLQPLIEELKKLWQGVEAYDCFKKQKFNLRVAYLFSVHDFMAYGIFSGWSVHGRLTCPYCAKDTYCFRLSAGGKICYFDCHRCFLPFNHPFRRQRKEFRKGTIVTKGPPKRRSGIEITEEHMKLVLDESGKRYQGFGEEHNWTHICGLWELPYAKSLILMHNIDVMHQESNFCQDLINTCMDFPDKTKDNDKARMDLAVICDRPTQVLRENGGKPKADYCLKSKQRKEVMKWMKDINFPDGYAAGFRRSVNLKTMKMNGLKSHDFHIIMERLMPVMFRGYISEAVWKTLAEVSYFYRQLCAKGIRRDVMEQLEEEAPVLLCKLEKIFPPGFFNPMQHLFIHLPYEAKVGGPVQYRWMFHIERALKKLRAMMGNKARVEGCIAEQFKLKEVAHFTSCYFAEEHNVFARKKRYHDDEREMPPCSDLSIFQTNGKAVGPPKAYHLSMEERKSALLYMFTNMPEVEKYFVEFDEQNMRCLGRPTARDIDKLRRDGMHGRPNFIMWLWDRVMVPWMAPVPDAYYAWCRYWASEGFQKVLAHHRQCRGTNPNHKFGGDDMIRKAKRMEATSGQKPSDIEVYQEGHKGPDPNNPDQLCSQTATDRLAAYGEEMVRRHGPDFDWRHEPVDPLVVYTLFDGFIDSSSDLEIMRMREEMRQQHEFMEACNAHNQAMYQLMQQQGMATNFPPPPQWSQFANTLVPPPQFNTPPTHIPAPGDRVTPEAGGSGSDPAVGTGFVDSLFAFPPPGGGGDSGQSSNHPSGGYL

SEQ ID NO: 10653 - protein, 784 aa, Zea mays
  Clone ID: TF_ZM4904.C4.o1.fg.pep
MSGDHAKKEMVTSEKPTTSHGKAPSGESDNKVKGSPSHDKSRRSGEKKKKMKKVVYYETDSSSPSTSGSDTPSVTSKRHERKKFSKPPMFDGEDYNMWSDKMRHHLTSLHTSIWDVVEIGVQVQGLKSAKEIWDVVKTAHEGDEVTKITKRETIEGELGRFMLHQGEEPQAMYNRLKTLVNQVRNLGSTKWDDHEMVKVILRSLIFLNPTQVHLIRDDPRYKLMYPDEVIGKFVSFELMIKGSKKIIEQGASSTPDVQPVAFKATEEKKEDSTPSRVPIDASKLDNEEMTLIIKSFRQILKQRRGKDYKSCSKKVCYKYGKPGHFIAKCPLSSDSYRDNDKRGKKKEKKRYYKKKGGDAHVCREWDSGESSTDSSSNEDAANIAVNKGLLFPNVGHKFLMAKDGKKKKVKSRSSTKYAISSDEDNSSDDEDNLLTLFANLNMQQKEKLNELISAIHEKDELLDSQEDFLIKENKKHVKVKNAYALEVEKSNVCDDSIVNLRNENTSLIAKIDKSNASLSSLRNENEKLIAKAKDLDVCNVSITNLRDENAILHAKIVELNDCKPSTSTIDHASICTRCRDVNIDAIHDHFAMIKQQNDHIAKLDAKIAEHELENEKFKFARSMLYSGRCPGIKDGIGFQQGDNVKLNAPPKRLSNFVKGKAPMPQDNEGYILYPTGYPEDKIRRIHAKKTHSHHAFIYKNEASSSRRSTHVKMPKKKTPIASNEPNVSFKTFDASYVLTNKSGKVVAKYVGGKHKGSKTCVWVPKVLVSNVKGPKTVWVLKNKA

SEQ ID NO: 10654 - protein, 105 aa, Zea mays
  Clone ID: TF_ZM4636.C4.o12.fg.pep
MLSPAKAPPRRPRHPFCLPPAPSRCFRCLAADHQVRDCRDPVRCRGCSRFGHRHKSCPMLIARVLTPHPRRCSSSPAPAPCVPVSAAPSLRSPRCRRARPPPPHR

SEQ ID NO: 10655 - protein, 518 aa, Zea mays
  Clone ID: TF_ZM4269.C2.o4.fg.pep
MAALIVGSLDTLSRTVPIQSKINQILNRLLGTRLKAREMWPTLQRAKIQGKLGESTTTSEGEPVMMGNPRDVFPEDLLGLPPERDVEFVIELKLARVFSKIDLRSGYHLIRIRPENIPKTAFTTRFIPDFSKIVKPITKLLKNDVKFDWSPKCKEAFEQLKILLTTAPVLAQPDIEKPFDVYCDALGIGLGLKYIFTQSELNMRQRRWLDLIKDYDLEIHYHPRKANVVADALSCKVFCHCLTMGFPDTTLCQEMEILNLGIVQQGTLMHLKLGSIILQKIIDAQRIDKGMKYIHEKVEAGKANCFRKDDKGIIWFKDRIVVHKDAELRQQILDEAHLSRRVKAIHMKTAGPLQSLSIPTWKWEDLSMDFVVGLPKTSKGYDSIWVIVDWHTKTAHFLQVKTDHPVAIYAQLYLARILILHGVPKTIVSDRGPQFVSMFWEELHKSLGTKLLHDSAYHPQTSGQTERVNQILEDMLHAYVLEFLQKWDDCLSLAEFSYNNSYQESIKMAPFEALYGRR

SEQ ID NO: 10656 - protein, 530 aa, Zea mays
  Clone ID: TF_ZM4443.C1.o3.fg.pep
MAALIVGSLDTLSRTVPIQSKINQILNRLLGTRLKAREMWPTLQRAKIQGKLGESTTTSEGEPVMMGNPRDVFPEDLLGLPPERDVEFVIELKLGHVLSAKGITVDPSKVKDILEWKSPTSVHQVRSFLGLYGYYRRFIPDFSKIVKPITKLLKNDVKFDWSPKCKEAFEQLKILLTTAPVLAQPDIEKPFDVYCDALGIGLGLKYIFTQSELNMRQRRWLDLIKDYDLEIHYHPRKANVVADALSCKVFCHCLTMGFPDTTLCQEMEILNLGIVQQGTLMHLKLGSIILQKIIDAQRIDKGMKYIHEKVEAGKANCFRKDDKGIIWFKDRIVVHKDAELRQQILDEAHLSRRVKAIHMKTAGPLQSLSIPTWKWEDLSMDFVVGLPKTSKGYDSIWVIVDWHTKTAHFLQVKTDHPVAIYAQLYLARILILHGVPKTIVSDRGPQFVSMFWEELHKSLGTKLLHDSAYHPQTSGQTERVNQILEDMLHAYVLEFLQKWDDCLSLAEFSYNNSYQESIKMAPFEALYGRR

SEQ ID NO: 10657 - protein, 561 aa, Zea mays
  Clone ID: TF_ZmC158438_1.pep
AIVREQVNHPVWGAYAQRLLNPEARLWRNPSNGGHDDKAHPPIHPTKFSEGERNWSPDHTRLYEFVVRHFLACCSQPAVGAETTVEIDIAGEQFNASGRVILAKNYLDVYRFDSWGGTLLPTYNIGQQFVPTTLTLDSGVTRPPPLLAEADLLSCMDKAGIGTDATMHDHIKKLLDRCYATKDENTRFSPTNLGEALVMGYDEMGYELWKPYLRSMMEADMKSVSVGTKSKSEVLESCLQQMKACFLDARVKKAKLLDAMGTFFARSNRPINETQNPVEVVRPCGACNGSEMLLKRRASGEFMVGCRSYPQCRNVVWLPGSLSEAAVTNQVCPICAPGPVYKIQFKFRRRDIPPNFDVDHLGCVGGCDDILKDLMEISRFGSRSQAATPARGPTPNGVGQGTPRQDLHTIFRPASQLNNDNPSVMHSQGFRSTHTQNPSNASDAGQVLCTSCGALCISRIANTEANRGRRFYKCQDPGCGFFKWEDEVDNGTGRGRRGRGSSRQASASASASAGRRGGGRRGRGRNADGGMFVSATGDTVLGCCFNCGDPSHFANACPNRR

SEQ ID NO: 10658 - protein, 1437 aa, Zea mays
  unsure (1)..(1437): unsure at all Xaa locations
  Clone ID: TF_ZmC951_281.pep
MSGDHTKKEMVTGNKPTTSHGKASSEESHNKGKGKEKKSSSHKSHRSGDKKKKMRKVVYYETDTSSPSTSGSDAPSITSKCHERKKFSKPPTFDGEDYARWSDLMRFHLTSLHKSIWDVVEFGVQEYNKVQGLKNAKEIWDILKTAHEGDEVTKITKRETIEGELGRFRLRPGEEPQDMYNRLKTLVNQVRNLGSKKWDDHEMVKVILRSLVFLNPTQVQLIRGNPRYTLMTREEVIGNFVSFELMIKGSKKINELDGPSTSEAQPVAFKAMEEKEESTPSRTPIDASKLDNEEMTLIIKSFRQILKQRRGEDYKPRSKKVCYKCGKPGHFIAKYPIYSDSDRGDDKKGRRKEKKKYYKKKGGDAHVCREWDSEESSTDSSSDEDAVNIAVTKGLLFPNVGHKCLMATDGKRKKVKSRSSTKYETSSDEENASNEEDNLRILFANLNMQQKEKLNELISAIHEKDDLLDTQEDFLIKENKKHVKVKNAYALEVEKCEKLSSELSTCHETIDNLRNKNANLLAKVDSNVCDVSIPNLRNDNVDLLAKIEELNISLASLRNENEKLLAKAKELDVCNASISDLRSKNDILHAKVVELKSCKPSTSTVEHTTICTRCRDVNIDAIHDHMALIKQQNDHIAKLDAKIAEHDLENEKFKFARSMLYRGRRPGIKDGIGFQQGGNVKLNAPPKKLSNFVKGKAPMPQDNEGYILYPVGYPESKIRRIHSRKSHSGPNHAFMYKGEASSSRQPTRAKLPKKKTPNASNEHSISFKTFDATYVLTNKSGKVYASGGSSWIIDSGCTNHMTGEKKMFSSYEKNQDPQRAITFGDGNQDSLDYNLLSVSQLCQMGYNCLFTNEKSHTQETLKGFLRRAQNEFGLRIKKIRSDNGTEFKNCQIEGFLEEEGIKHEFFSPYTPQQNGVVERKNRTLLDMARTMLDEYKTSDRFWAEAVNTACYTINRLYLHRILKKTSYELLTGKKPNISYFRVFGSKCFILVKRGRKSKFAPKTVEGFLLGYDSNTRAYRVFNKSSGQVEVSCDVVFDETNDSQVEQVDLDEIGDEEAPCIALRNMSIGDVCPKESEEPPNAQDQPSSSTQASPPTQNEDEAQVDEVEDQRDEPPQDDDNDQGXDANDQDKEDEEQRPPHPRVHQAIQRDHPVDTILGDIHKGXVEEALQDSDWVVAMQEELNNFTRNELYQMDVKSAFLNGPIKEEVYVEQPPDFEDKFSRIMTQKFEMSMMGELKYFLGFQVKQLQEGTFLSQTKYTQDILSKFGMKDAKPIKTPMGTNGHLDLDTEGCKINRKSTSGTCQFLGRSLVSWASKKQNSVALSTAEAEYIASGHCCAQLLWMRQTLRDYGYKLTKVPLLCDNESAIRMADNPVEYSRTKHIAIRYHFLRDHQQKGDIEIAYINTKDQLADIFTKPLDEQTFNKLRHELNILDSRNFFC

SEQ ID NO: 10659 - protein, 1770 aa, Zea mays
  Clone ID: TF_ZM4508.C2.o1.fg.pep
MASNNNVHIGKPPHFDGNNYDYWKIRMSMHLRAMGGKNWPIVKDGFVVLKEDEPSVSDNENILTNDQAMNVLYDALDINEFNRIKNLTTAHEIWIKLMEIHEGTTIVKSAKLYVCKGKFEQFIMEEDASVSDMFNRLNEIVNELKGLGFNVPDVGFTHKFLRSLPEKYETIVTMLVRSDLSTTSPTEVLGEILTQDIFKKSQADAISLAKKVKNESIALKDKASKAIEKEDSDDEENESESDGDMALFLKKFNKFIKMKRGQLRRGQTSRRNAFNDRKCFECGEPSHIAMNCPNKKKKGKDGDDKKKKKFYNKKKDGKAYLVEWDSDDSSDDDDDDTSSKLNAGIAIKEAPSLFSSPHCLMEKGDANADDYMHKEKEKFKTLKESYKNVQVSFEELKTSNNNLKENCEKLVEAQNSSIVHEVVVVTEDVGVTCDLLDSPTSEPLPTNSICDKCKISLMNDNIALDESQIIVENEVLVDRVNALTHDLEKAYGGKAKLDFILGSQRCSLNREGLGYVPKKGKNAFIKQKTLFVKECGKVCHKKGHIKKICPKLKNVSYTCFEHCYVLSHNAKGVHAKFVSTSIVGNKKAIWVPKTLVTNIQGPKQVWVNYKAGGNHWVLDSGCTQHMTRDMKMFTQMSEEDCSNYDSITFGDNRKGKVKGLGKIAILNDHSISNVLLVESLNFNLLFVAQLRDLGFSCNFTVDDVIISIVDGSNLKFKGFRYENLYLVDFSSSEPKLTTCLFSKASLGWLWHRRLGHVGMKQLNRSTKHDLVRGLKDVKFEKNKLCSSCQAGKQVANTHPNKSQMSTHRPLELLHMDLFGPTSFVSIGGNSYYLVIVDDYYRFTWVYFLRDKSNVFETFKSFAILAQNQFDFDIKKVRSDNGSEFKNTRIDEYCDDKGIKHELSSKYTPEQNGIVERKNRTLIDMARSMLAEYNVSDSYWAKAINTACHSSNRLYCHKLLKKTPYELLIGRKPNISYFRVFGCKCYILRKGSRLSKFEKKCDEGFLLGYSSNSKAYRVFNKTHGIIEEAYHVEFDETNGSQDESYNLDDVSGTQLKNAMKTMAISEIKPKKDDDENSVVVIPSSSTLNEENHQSQNNDEIMDTHDQDTSSHSVPPHASTSNYQTVSRIHHSIVKDHPVDQIVVDINEALLDVDWVNAMHEELNNFTRNEVWELVERPKNHNVIGTKWVFRNKHNEDGLVVRNKARLVAQGYTRIEGLDFGERFAPVARLEAIRILLAYACAHNIKLYQMDVKSAFLNGKISELVYVEQPPDFEDPKRPIHVFKLSKALYGLKQAPRAWYERLRDFLLSKDFRIGKVDTTLFTKIIGKDLFVCQIYVDDIIFGSTNELFCEEFGKMMSKEFEMSMIGELSFFLGLQIKQLKDGIFISQSKYLKDMLKKFGLENAKPIKTPMATNGHLDLDEGASPREIHLKAAKRILRYLKYTPNIGLCGLGGLRKKLAGRFKSKRPRVDDADYNPTTDSEAQSLAGGSVSMDTEDVPHAHPDYPIEITGWPYPKRRTDFSEMAVKQLLATAEIDIDEESITWMTSFKRYYATFAEFATPNSLDYDTISAGIDLYTEDNFEEFVQFYEPARLGIPRRFGETVELRHHPAVINKISRVTILPKSGDKSKIRDKFWNIIHHVMNGEVMNVVLFMMRQLNDLKMDKNQNLAYAPYIMVLIKAKTKFEGHCEIVHTPFRPLKNEIGFLTRPLTPFPDDEEEAGDDAGEAPEADAEQMPPPLPPPQPQQYWQPGPGYFDPYFQNMQQGLQTHMDGRF

SEQ ID NO: 10660 - protein, 968 aa, Zea mays
  unsure (1)..(968): unsure at all Xaa locations
  Clone ID: TF_ZM4550.C1.o1.fg.pep
MPTLLVDTPQLRMVLVFKGKPRTQQAKRLPFSPRRKGRPLWLVVLKETMLLFMIGKVLVTIRVIFMLLIMIPMLCLPLALLLCMVEVGLGEVILYLMCLGECAMNLLPFTMLAILHLRSYVYASGGSSWIIDSGCTNHMTGEKKMFTSYVKNKDSXDSIIFGDGNQGXDVSVFIRSDGSLAFKGVLDGKFYLVDFSKEETDLDACLIAKTSMGWLWHRRLAHVGMKNLHKLLKGEHVLGLTNVCFEKDRPCAACQAGKQVGSTHHSKNVMTTSRPLELLHMDLFGPVAYLSIGGSKYGLVIVDDFSRFTWVFFLQDKSETQGTLKRFLKRAQNEFELKVKKIRSDNGSEFKKFQVEEYLEEEGVKHEFSAPYTPQQNGVVERKNRTLIDMVRTMLGESKMPERFWSEAVNAACHAINRLYLHRLLKKTSYELLIGNKPNVSYFRVFGSKCYILVKKVSSDVVFDETNGSPREQVDLDDIDEDDVLTAAMRTMAIGEVRPQEQQEQDQPSSSTMVHPPTRDDGQVPQEEARDQRGAQEEQVMEEEAPLAPPTQVRAMIQINHPVDQILGDISKGVTTRSRLANFCEHYSFVSTIEPFRVEEALQDPDWVLAMQEELNNFKRNEVWSLVPRPKQNVVGTKWVFRNKQDEHGVVIRNKARLVAKGYAQVAGLDFEETFAPVARLESIRILLAYAAHHSFRLFQMDVKSAFLNGPIKEEVYVEQPPGFEDDRYPDHVFKLSKALYGLKQAPRAWYECLRDFLIANAFKVGKADPTLFTKTCDGDLFVCQIYVDDIIFGSTNQKSCEEFSRVMTQKFEMSMMGKLNYFLGFQVKQLKDGTFISQTKYTQDLLKRFGMKDAKPVKTPMGTDGHVDLNKGGKSVDQKTYRSMIGSLLYLCASRPDIMLSVCMCARYQSDPRECHLVAVKRILRYLVYTPCFGIWYPKGSTFDLIGYSDSDYAGCKVDRKSTSGTC

SEQ ID NO: 10661 - protein, 784 aa, Zea mays
  Clone ID: TF_ZM4646.C1.o1.fg.pep
MSGDHAKKEMETGEKPTTSHGSTSFEESRTKRKEKKNSSKGKEKKTSSHQKEKKEKTFSHKTRRSGDKKKRMRKVVYYETDSSSPSTSGSDAASVTSKRQERKKYSKIPLRYPRISKHTPLLSVPLGKPPTFDGEDYARWSDLMRFHLTSLHKSIWDVVEFGAQVPSVGDEDYDEDEVAQIEHFNSQATTILLASLSREEYNKVQGLKSAKEVWDVLKTAHEGDELTKITKRETIEGELGRFRLRKGEEPQNMYNRLKTLVNQVRNLGSKKWDDHEVDKVILRSLIFLNPTQVQLIRGNPRYTLMTPEEVIGNFVSFECMIEGSRKINELDDPSTSEAQPVAFKATEEKKEESTPSRQPIDASKLDNEEMALVIKSFRQILKQRRGKDYKSRSRKVCYKCGKPGHFIAKYPLSSDSDRGDDKKGRRKEKKRYYKKKGGDAHVCREWDSDESSSDSSDDEDAANIAVTKGLLFPNIGHKCLMAKDGKKKVKSKSPTRYESSSDDNASDEEDNLCTLFANLNMQQKEKLNELISAIHEKDDLLDTQEDFLIKENKKHVKVKNAYALEIEKCEKLSSELSTCHETIDNLRNENANLLAKVDSHVCNGSTSNPRDVNDDLLARIEELNLYLASLRNENEKLLAKAKDVDVCNATISDLRSKNEILHAKVVELKSCKSSTSTVEHTSICTRCRDVNIDAIHDHMALIKQQNDHIAKLDAKIAEHNLENEKFKFARSMLYNGRRPGIKDGIGFQRGDNVKLSAPPKRLSNFVKGKAPMPQDNEGYILYPA

SEQ ID NO: 10662 - protein, 1332 aa, Zea mays
  Clone ID: TF_ZM5007.C4.o1.fg.pep
MVVNDKEKESLFNEPRDDKPTDSGSSHKKRDGKKKRRINKIIYYDSDASSSSPRDDNDDDDSSSKKKMVNQNYSFDYSRIPYNSNVLLHSIPLGKPPHFDGEDYSFWSHKMCSHLFSLHPSICEIVENGMHFDSTDNPVIINEQIHKNAQATTVLLASLCRDEYNKVSGLDNAKQIWDTLKISHEGNDATMITKMELVEGELGKFTMIKGEEPTQTYNRLKTLVNKIRSYRSTRWTDHDVIRLMLRSFTIIDPYLVNLIRENPRYTKMTSEEILRNFESGRMMVKEARYMDDALNGPLPVYEPQPVSLKATSSRKALPSKVTQVEAAGLNEDEMALIIKHFKTALKGRKEYSNKNKTRGKRSYFKCGKTGHFIAQCPDNDNEQGQEKSGKKERKKNYRKTKGEAHFGNEWDSDCSSSDSDDEGLAASAFDKYSLFPNERHTCLMAKEKKVRIRYSPKYSSSSDEESSDDEVDYSSLFKGLDKAKVEKINELIDALNEKDRLLEKQEDILYEEHDKFVSVQKSLALETKRNEMLSFELSACHESISSLKNVNDELNAKLEEVSKTSSCVEHVSICNRCKDFDVDVCDEHLISITKLNDEVASLNAQLKTCKIDFDKLKFARDAYTIGRHPSIKDGLGFRKETKNLTSQRIPVLNKEKGKAPLASSPQRNHAFIYDRKIASCSHYNKSYVHTAYNDSHAMFASRSTFVHGRGKCAMNPLLFFMLATLLLYFHVYASGGSSWIIDSGCTNHMMGENKMFTSYVKNKDSQDSIIFGDGNQGKVKGLGKIAISSKHSISNVFLVESLGYNLLSLWHRRLAHVGMKNLHKLLKGDHVLGLTDVCFEKDRPCAACQAGKQVGSTHHGKNVMTTSRPLELLHMDLFGPVAYLSIGGSKYGLVIVDDFSHFTWVFFLQDKSETQGTLKRFLRRAQNEFELKVKKIRSDNGSEFKNLQVEEFLEEEGIKHEFSAPYTPQQNGVVERKNRTLIDMARTMLGEFKMPERFWSEALNTACHAINRLYLHRLLKKTSYELLTGNKPNVSYFRVFGSKCYILVKKGRHSKFAPKAVEGFLLGYDSNTKLYSVFSKSSGLVEISSDVVFDETNGSPREQVDLDDIDEDEVPTAAMRTMAIDDGQIPQEEGKDQGGAQEDQVVEEEAPRARPTQVRASIQKHHPVDQILGDIIKGVTTRSRLANFCENYSFVSSIEPFRVEEALQDPNLALAMQEELNNFKRIEVWSLVPRPKQNIVGTKWVFRNKQDEHGVVTRNKARLVAKGYAQVAGLDFEETFARVARLESIRILLAYAAHHSFRLFQMDMKSAFLNGPIKEEVYVEQPPGFEDD

SEQ ID NO: 10663 - protein, 323 aa, Zea mays
  Clone ID: TF_ZmC4916_455.pep
NSRDVSLRVKKKEMHLNVRAENCLYGSLNMKVFNQVFTLKTANEIWLKLHELHDDTSNVHEQKHCLALNDYNSFAMKENELVRDLYSRLNLTINEFNSIGINKLGDADIVRKIISLLPQQRYGSIITILHNMEDLSNMTPTIVIGKIAAFEMSRKMSRGEEPTSSRPYAFACDERKGKKKAPTPSSSSEEEEEEESDDDEDNQPCTSSSEDEETIRRVRKVKDLLFNIDRKKQRKRGCFACGEKGHFRDSCPTMAEPKKERSKGKALTSVRTWDDSSSEDEPPRTRSHRSSSRSSHKCLMARGNTNTPSSSDESSSDDEGEGK

SEQ ID NO: 10664 - protein, 268 aa, Zea mays
  unsure (1)..(268): unsure at all Xaa locations
  Clone ID: TF_ZM4623.C4.o7.fg.pep
MTREAGQESGSSERMGGGFAVVLKPDPFNGKNFLIRKAKMKLWLTAMSCFHAVEGKPANLPPEDEAKFKAKDNLFRGAVISALDTKFQKSYIILPTGKELWDALVGKFGVTDAELIGTLDVEERARTKDNGKGVETSTANVVQKRNFRKFNKKKNQNKQENTNKPVQTTQFKKKNNNNNKGKGGCFVCGSDQHWARECPHRKFTQDKKSANVVTTETGDGTSGYGXRSGALLMGNGSCAYVLGVGTVILKFTSGKTVSVGTLKLGYPL

SEQ ID NO: 10665 - protein, 425 aa, Zea mays
  unsure (1)..(425): unsure at all Xaa locations
  Clone ID: TF_UC-ZMFLMO17035D05_FLI.pep
MTRVNGATDALSIGPSAGHFSAGGFAAALKPSEPFDGTFYKRWRSKMILWLTAMNCYHAAQGKPEQFTPEEERMFDVADNLFRGAVIGALANKYVDSYLTCTSAKELWDALDEKFGVSDAGSELYIMEQLFDYKMVENRPVVEQAHEIQALAKELEQFPCVLPDKFVAGGIIAKLPPSWTDFATTLKHKRQEFSVAELIGSLDVEERARAKDTRGKGVETSSANMVQKKNSNASHNNKKKNKQQNATKPKQAASFKKKNKGAGCFVCGSTDHWASACPDRKFKQEKKPAQEKKTVNMVVSETAEGTSXCKGTGALLMGNGSHARVLGVGTVILKFTSGKTVLLKNVQHVPSIKKNLVSGSQLCRDGYKIVFESNKCILSKYGTFVGKGYDSGGLFRLSLHDACNKSVNNVVSNESYIWHSRLCHI

SEQ ID NO: 10666 - protein, 197 aa, Zea mays
  unsure (1)..(197): unsure at all Xaa locations
  Clone ID: TF_ZmC119_896.pep
PNKNKSRGKHSCFKCSKTGHFIAQCPDNENDQAQEKHGKXEKKNYRKAKGEAHLGKEWDSDCYSSNSDDEGLAALAFDKSSFFPNERHTCLMAKKKKVCIRDTPKYTSSSXEESSDDEVDYTNLFKGLDRTKVDKINELIDALNEKDRLLEKQEDIFYEEHDKFISVQKSLALXIKRNEMLCFELSTYHESISSLKN

SEQ ID NO: 10667 - protein, 409 aa, Zea mays
  Clone ID: TF_ZmC3792_76.pep
MSENRRRGGRRAQQERAAQQEEAPQQQQLPPPPPMSIEQMFLMQTQAVQAIGQTLAAIQQQQQQQQQAPPQPQMPQMPRDKRAEFMRGHPPTFAHSSDPMDAEDWLRTVERELHTAQCDDREKVLYGPRLLRGAAQSWWESYLATHANPDTITWEEFRGSFRQYHVPAGLMTVKNEEFLALKQGPLSVSEYRDKFLQLSRYAPEDVNTDAKRQYRFLRGLVDPLQYQLMNHTFPTFQHLIDRAIMTERKRKEMEDRKRKISGPQPGSSSRPRFSGNQPHQFRQNQRPPQQHQQFQRQYPQNQYQNRQSNQSGGQFQKQNQQAPRLPAPANQQNSQAAPAQVGNKACFHCGEQGHWVMQCPKKAAQQQSGPNAPAKQNVPQPGAGNRPQQRYNHGRLNHLEAEAVQETPA

SEQ ID NO: 10668 - protein, 1491 aa, Zea mays
  Clone ID: TF_ZM3641.C4.o2.fg.pep
MSIEQMFLMQTQAVQAIGQTLAAIQQQQQQQQAPPQPQMPQMPRDKRAEFMRGHPPTFAHSSDPMDAEDWLRTVERELHTAQCDDREKVLYGPRLLRGAAQSWWESYLATHANPDTITWEEFRGSFRQYHVPAGLMTVKKEEFLALKQGSSSVSEYRDRFLQLSRYAPEDVNTDAKRQYRFLRGLVDPLQYQLMNHTFPTFQHLIDRAIMTERKRKEMEDRKRKISGPQPGSSSRPRFSGNQPQQFRQNQRPPQQHQQRQQYQQFQRQYPQNQYQNRQSNQSGGQFQKQNQQAPRLPAPANQQNSQAAPAQVGNKACFHCGEQGHWVMQCPKKAAQQQSGPNAPAKQNVSQPGAGNRSQQRYNHGRLNHLEAEAVQETPDMTVGMFPVDSHIAEVLFDTGATHSFITASWVEAHNLPTTTMSTPIQIDSAGGRIRADSICLNVSVEIRGIAFPANLIVMGTQGIDVILGMNWLDKYQAVISCDKRTIKLVSPLGEEVVTELVPPGPKKGSCYQMAVDSSEADPIESIKVVSEFPDVFPKDLPGMPPERKVEFAIELLPGTAPISKRAYRISGPELVELKKQIDELSEKGYIRPSTSPWAAPVLFVEKKDGSKRMCIDYRALNEVTIKNKYPLPRIEDLFDQLRGASVFSKIDLRSGYHQLRIRPSDIPKTAFITKHGLYEFTVMSFGLTNAPAFFMNLMNSVFMDYLDKFVVVFIDDILVYSQSEEEHADHLRMVLQRLREHQLYAKLSKCEFWISEVLFLGHIIDKEGLAVDPKKVADILNWKAPTDARGIKSFIGMAGYYRRFIEGFSKIAKPMTALLGNKVEFKWTQKCQEAFEALKEKLTTAPVLVLPDVHKPFSVYCDACYTGLGCVLMQEGRVVAYSSRQLKVHEKNYPIHDLELAAVVHALKTWRHYLYGQKCDVYTDHKSLRYIFTQSELNMRQRRWLELIKDYELEIHYHPGKANVVADALSRKSQVNLMVARPMPYELAKEFDRLSLGFLNNSRGVTVELEPTLEREIKEAQKNDEKISEIRRLILDGRGKDFREDAEGVVWFKDRLCVPNVQSIRELILKEAHETAYSIHPGSEKMYQDLKKKFWWYGMKREIAEHVAMCDSCRRIKAEHQRPAGLLQPLQIPQWKWDEIGMDFIVGLPRTRAGYDSIWVVVDRLTKSAHFIPVKTNYNSAVLAELYMSRIVCLHGVPKKIVSDRGTQFTSHFWQQLHEALGTHLNFSSAYHPQTDGQTERTNQILEDMLRACALQDQSGWDKRLPYAEFSYNNSYQASLKMSPFQALYGRSCRTPLQWDQPGEKQVFGPDILLEAEENIKMVRENLKIAQSRQRSYADTRRRELSFEVGDFVYLKVSPIRGVRRFGVKGKLAPRYIGPYQILARRGEVAYQLSLPENLSAVHDVFHVSQLKKCLRVPEEQLPVEGLEVQEDLTYVEKPAQILEIADRVTRRKTVRMCKVRWSHHSEEEATWEREDDLMAKYPELFASQP

SEQ ID NO: 10669 - protein, 767 aa, Zea mays
  unsure (1)..(767): unsure at all Xaa locations
  Clone ID: TF_ZM4598.C1.o4.fg.pep
MDPKGKGNMINDKEKETLYVDEPKGDKPTNSGSNKKRKDGKKKRHIKKIIYYDSDASSSSPRDDDDEDSSTNKKTQIHKNAQATTMLLASLCRDEYNKVSDLDNAKQIWDTPKISHEGNDTTMITKMELVEGELGRFAMKRGEEPTETYNMHKTLVNMIRSYGSTRWTDHDVIRLMLRSFTVIDPHLVNLIRENPRYIKMTPEEILGKFVRGRMMVKEVRCVDDIANRPLPLNEPKPTALKATSSKDTLPNKVAQVEAAGLNEDEMTLVIKRFKTALKGHKEYPNKNKSRGKRSCFKCGKSGHFIAQCPCPDNDNDQPQEKKEKERKKNYRKAKGEAHIGKCKDFDIDAYNTHPFTILKLNNDVANLNAQLKTCKSENDKIKFARDAYTIGRHPSIKDGLGFQKSIKNLTSQRTSNLVKEKGKVPMASITHSSHDRKNHAYLCAHVKNASNIAHHDNCYNHVVLPEHHDAIFDSHAMFAYSNSFYVHGLCIRGTSWIIDSRCTKHMTGEKKMFTSYIKNKDSQDTIIFGDGNHGKVKVLGKIAITTEHSISNVFLVESLGYNLLSDKSETQVEEYLEEEGIKHEFSAPYTPQQNGVVERKNMTLIDMARTMLGEYKMLVRFWSEVVNTVCHAINRLYLHRLLKKTSYELLTGNKSNVSYFRVFGSKCYILVKKGYNSNTKAYRVFNKSSGLVEVSSDVVFDETNGSPREQVDLDGVDEDEVSTIAMRTMAIGDVQPQEQQDKDQPSSSTLVQPXTQDEEQVPQDGGM

SEQ ID NO: 10670 - protein, 945 aa, Zea mays
  unsure (1)..(945): unsure at all Xaa locations
  Clone ID: TF_ZM4328.C2.o7.fg.pep
MTRRNMRMIARMSLHHHKTGDVEEEEIRRFYTHLNKEDKVFLVKLLRRNKEQGETLLRLEETLIKTNNSLEKMTKEHEELKCSHDNLVQQYESVLFEQRNNHDVLSDVAQLKTEISMLKSQVEMINLEKKIALSEKYDMLSYSHNELVDDHIMLDVAHEVVIANLNSCEPHSCTRAHLDNISPCANLCCSKESQFLNEHQAAGSKEKLLINKERNKKAKQLRRRRIAQPPQDIHGRVVKKLETGETAASVHKKDVPKAINEEINMNKEKGKNSITHVVCIDHLSMSSKSKKGRGKRRCFKCKELGHFIASCPHKDKDEGMRRCFGCNDKDHMFTSCPLMKNQRCAPSKMTLTKKKDKQQVSCQVERCFCYMCGEHGHLPKVKGKETTDQANDGGKKSFKVPSAREKVKETRNPKPGVKKKTCKVKVDQVKKSYGTNVSQIQKSKGSPAERPVEYLLRVHRPIVSSHDIVVTDINIVEGSICHTDISEQTEEGVEIDSKPRRHPDPVPGHRELSSSPYTPQQNGVVERKNRTLLDMARTMLDEYKTPDRVFGSKCFILVKRGRKSKFAPKAIEGFLFGYDSNTRAYRVFNKSTRLVEVSCDIVFDETNGSQVEQVDLDELDDEEAPCVALRNMSIGDVCPKESEEPTHAQDQPSSSNQASPPTQDEDQAQNNEDEDQEDEPPQEEDNNQGGDEVDQDKEDDQEIQGQRPPHPRVHQAIQRDHPVNSILCDIHKGVTTPSRVAHFCEYYSFVFSIEPYRVEDALRDSDWVLAMQEELNNFTRNEWVFRNKQVEHGVVTRNKARLVAKGYSQVEGLDFGETYAPIARLESIRILLAYATHHGFKLYQMDVKSAFLNGPIKEEVYVEQPPGFEDKFSRIMIQKFEMSMMGELKYFLGFQVKQLQEGTFISQTKYIQDILNKFGMKDVKPIKTPXGTNGHLDLDTGGKSV

SEQ ID NO: 10671 - protein, 1347 aa, Zea mays
  unsure (1)..(1347): unsure at all Xaa locations
  Clone ID: TF_ZM4993.C10.o4.fg.pep
MFGGDGPPPVFYGDNFPYWKIRMEAYLESIDIGVYKAATQGFSSPRDPTNPVGDEFNYEKWNAKAKNTLFRGLCKDVFNRVRNHKNAHDLWMDICALHEGTRSEREERYHIAMRKLNSFEMLANENANAMYSRLNILVEEVNGLGLTQISQPDVVRKILSVLPIDKYGHIVTVLHQMDLSVTTPTQILGKINAHEMYMHINDKDESSSKRKDLALKANQERKGKAKVQIEEESSSDDDLDANISLMVRNTTKMLKKLNREGIKFDSRKKKFFSSKRKPISEMDCYNCGELGHLAHQRNKPKKNKFKGKKEDYSDDEKKEKRFFKKKDGKHKRFHKKKXGKAYIVGDWLTDIESSSGSSSSEEENDEKVVAIAGDFSSPPPSPSSTSHLCLMARGEXSDSDTDEEFASPSYDKLADLLKEYTQIIRKSKAKCDKLKNENESLNAKYDIVMKASDEMKEENKTMSSTVNELTSSLKDAKDKCDKLNEADRELKDRLVKIKEDYTKIKFDHDNLLIENELLSCNTHEAINPVVKIDVATSCDDLSQGEQTSLHDELTEKVEVLTLDNQKLKRYLTDATTRGKVAIENNDFNNELAMDNERLKNESGIGYNAFVQKKATTQYKPKQTHKPIKCFECGKEGHFAHNCKAKPPTPLPKHSRIFAFNAHYVLRKVANGKVNYKTGGSHWVIDSGCTQHMTGNPWMFTSLDENVDGQDKITFGDNSKGKVQGLGKVAISNDLSISNFLLVAPLSFNLLSVGQLCDLGLQCLFTPIEVIISKMDDESMVFKGFRYNNLYLVDFTSEDVDLRTCLFTKASLGWLWHRRLAHVGMSTLKKVLKKDMVRGLKDVVFEKEKPCSACQAGKQVANTHPTKAFMSTSRPLELLHMDLFGPTNYVSVGGNLYCLVIVDDFSRYTWVFFLHDKSEVTSIFKKFAKKAQTEFDCKIKKIRSDNGKEFDNTNIHEYCDEIGIKHEVSATYTPQQNGVVERKNRTLITLARTMIDEYNTPERFWSKAYRVFNHATVMVEETYDVEFDETNGSQGALENLDDVGDEPLREAMKNMPIGAIKPKEDEEEPTCIDEALQDPDLVNAMHEELNNFTRNQVWTLEKPPQGTRIIGTKWVFRNKQDHHGVIVRNKARLVAKGFSQVEGLYFGETFASVVRLEAICILLAYASCYDIKLYQMDVKSSILNGFINELVYVEQPPGFEDPRYPNHAYRLSKALYGLKQAPRAWYERLRDFLIEKGFKIGTVNTTLFTKKHNSDIFICQVYVDDIIFGSTNDYHCKEFGELMSKEFEMSMIGELTYFLGFQVKQMKDGNFLSQEKYTKDLLKRFNVEKCKPIKTPMPTNGHLDLDEG

SEQ ID NO: 10672 - protein, 3573 aa, Zea mays
  Clone ID: TF_ZM4450.C3.o13.fg.pep
MSGGDGPPPVFDGDDFPYWKIRMEAYLEAIDIGVYKAATQGFPEPRDPTNLVGDEFNYEKWNAKAKNTLFRGLCKDVFNRVRNHKNAHDLWMDICALHEGTRSEREERYHIAMRKLNSFEMLTNENANAMYSRLNILVEEVNGLGLTQISQPDVVRKILSVLPIDKYGHIVTVLHQMDLSVTTPTQILGKINAHEMYMHINDKEESSSKRKDLALKANHERKGKAKIQVEEESSSNDDLDANIALMVRKTTKLLKKLNREGIKFDSRKKKFFSNKRKPISEMDCYNCGELGHLAHQCNKPKKNKFKGKKEDDNDDEKKEKKFFKRKDGKQKRFHKKKNGKAYIVGDWLTDIESSSGSSSSEEENDEKVAAIAGDFSSPPPSPSSTSHLCLMARGERKVQNDINIDDDSDSDSDEEFASPSYDELADLLKEYTQIIRKSKAKCDRLKNENESLNAKYDIVIKASDEIKEENKTMSSTVNELTNSLKDAKEKYVKLNEANRELQSRLVKIKEDYTQIKFDHDNLLVENELLSCKTHEAINPVVKLDVATSCDDLIQEEQTSLHAELTEKVEVLTLDNQKLKNYLTDATTRGKVAIENNDFNNELAVDNQRLKNEVKKLKSENEHLATSVQKFNKGQYLQNELLMNTVMKNNKSGIGYNAFVQKKAITQYKPKQTHKPIKCFECGNEGHFAHNCKAKPPTPLPKHSRPFAFNAHYVLRKVANGKIKVNYKTGGSHWVIDSGCTQHMTGNPRMFTSLDENVDGQDKITFGDNSKGKVQGLGKVAISNDLSISNVLLVAPLSFNLLSVGQLCDLGLQCLFTPSEVIVTKMDDESMVFKGFRYNNLYLVDFTSEDADLRTCLFTKASLGWLWHRRLAHVGMSTLKKALKKDMVRGLKDVVFEKDKPCSACQAGKQVANTHPTKAFMSTSRPLELLHMDLFGPTNYVSAGGNLYCLVIVDDFSRYTWVFFLHDKSEVASIFKKFAKKAQNEFDCKIKKIRSDNGKEFDNTNIHEYCDEIGIKHEVSATYTPQQNGVVERKNRTLITLARTMIDEYNTPEMFWAEAVNTACYASNRLFPHRLLAKTPYELLNGKKPDVSFFRVFGCKCYIYKKRHHLGKFQRRCDIGFLLGYSLKSKAYRVFNHATGMVEETYDVEFDETNGSQGALENLDDVGDEPLREAMKNMPIGAIKPKEDEEEVQIIDRPSSSNVPQNDEKDERHANEDTFVSHEQARVQAEDVDAPGSSSQVVDRRNSSLLQAHPQNQIIGSPSQGVITRSHRHANFIEHHSFVSCVEPTCIDEALQDPDWVNAMHEELNNFTRNEVWTLEKPPQDARIIGTKWVFRNKQDDQGVIVRNKARLVAKGFSQVEGLDFGETFAPVARLEAIRILLAYASCYDIKLYQMDVKSAFLNGFINELVYVEQPPGFEDPRYPNHAYRLSKALYGLKQAPRAWYERLRDFLIEKGFKIGTVDTTLFTKKHNGDIFICQVYVDDIIFGSTNDYHCKEFGELMSKEFEMSMIGELTYFLGFQVKQMKDGNFLSQEKYTKDLLKRFNMEKCKPIKTPMPSNGHLDLDEGGNPVNQTLYHSMIGSLLYLTASRPDIMFSVCMCARFQSNPKKAHLRAVKRILRYLRHTTSVGLWYPKGATFDLIGYSDSDYAGCKIDRKSTSGGCHLLGRSLVSWTSKKQNSVALSTAEAEYIAAGACCTQILYMKQTLLDYGVVLEKVPLLCDNESAVKIANNPVQHSRTKHIDIRHHFLRDHVAKGDIILEGVSHQIRMPRTKNASAPGGGDDEEPRRPFRQVKGKTVYLEQQEGRKKWRMDREARAAAAAAAAAAQAALGDQPQTPSDQIAFRARRLTSRPRSSSHTSASTPPPTLPAPVTPIAPSTSTAIPTTSTTPASTASPAPAPASAPPVPPPRFRERDETEVRPLVSDPRLFDLQRATAAWVRRFRYVPVESWLPAQRDPAAGVLFSTWIQESFFRAQMSAQIALRVHRLLDLPAFLLAAGADSEAHLTYLPGLLTLLTISGRYVEEWVRVFYASVWIDLDHHWMRFRFEREDVTITASQIRQLFGFPESMTRLHSLCYGSSDPPRRPHGGVAPGTAHVAALFRPPFTDGSRRSPADFTTAAKYLYELIRRTLLPRMGYREATTHIQLWLLGALVSHSEFDVVDFLICEIEDTVLDGIRARRQLPYAHYLPRMQLFDSLTLRVQQLMMMMMMMMILGFLLRLRLLCLHAHMIMRLGVLVLPLLILRLWTLLLLRFSRLSPSSRLTWQPSRPVYPTGCSRCFRTCRTGRMRFSSSYFRIGLRLPVPPASAVTTTAVAVSMTASVLRQMTAWWRWELGDHREDLVGDPTQVLVYYETDSSSPSTSGSESASTTSKRNERKKYSKPPMFEDEDYSMWSDKMRHHLTSLHKSIWDIVEYGVQVPKKGDKDYDSEEVEQIQHFNSQATTILLASLSREEYNKVQGLKSAKEIWDMLKTAHEGDDVTKITKRETIEGELGRFRLRQGEEPQDMYNRLKTLVNQVRNLGSKKWDDHEMVKVILRSLVFLNPTQVQLIRGNLRYTLMTPEEVIGNFVSFELMIKGSKKIVELDGPSMFEAQLVAFKAMEEKKEESTSSRTPIDASKLDNEEMALIIKSFRQILKQRRGEDYKPRSKKVCYKCGEPGHFIAKCPLSSDSDMGDDKKGRRKDKKRYYKKKGGDAHVCQEWDSDESSTDSSSYEDAANIAVTKGLLFPNIGHKCLMAKDNKRKKVKSRSSTKYETSSDEDNCSDEEDNLRTLFANLNMQQKEKLNELISAIHENDELLDTQEDFLIKENKKHVKVKNAYALEVEKYEKLSSELSTCHDTIANLRNENAKLIAKVDSNVCDDSISNLRNDNANLLAKIEKLNNSLASLRNENENLIAKAQDFDVCNVTICNLRSENDILHAKVVELKSCKPSTSIVEHTSICTRCRDINVDVIHDHLALIKKQNDHIAQLNAKINEHDLENEKFKFARSMLYNGRRPGIKDGIGFQKGDNVKLNAPPKRLSNFVKGKAPMPQDNEGYILYHVGYPESKIRRIHSRKSHSGPNHAFMYKSETSSSRQLTHAKLPRKKTHIASNDHNISFKTFDASYVLTNKSGKVYASGGSSWIIDSECTNHMTGEKKMFSSYEKNQDPQRAVRFGDGNQGVTVFRRCDDSIAFKGVLEGKLYLVDFDRAGLDTCLIAKTNMGWLWHRRLAHVGMKNLHKLLKGEHILGLTNVHFEKDRICSACQAGKQVGVHHPHKNIMATDRPLELLHMDLFGPIAYISIGGSKYCLVIVDDYSRFTWVFFLQEKSHTQETLKGFLRRAQNEFGLRIKKIRSDNGTEFKNSQIEGFLEEEGIKHEFSSPYTPQQNGVVERKNRTLLDMARTMLDKYKTSDRFWAEAVNAACYAINRLYLHRILKKTSYELLTGKKPNVSFLESLAVEGFLLGYDSNTRAYRVFNKSSGQVEVFCDIVFDETNGSQVEQVDLDEIGDEEALCVALRNMSIGDVCLKESEEPPHAQDQPSSSMQASPPTQDEDKSQNDEGEDQEVEPPQEESNDQGGDAHDQDEEDEQVPRPPHPRVHQAIQ

SEQ ID NO: 10673 - protein, 183 aa, Zea mays
  Clone ID: TF_ZmC441998_1.pep
MEYQAPAPAAGAGGRGCYNCGDASHRAAECPTKGTPTCYNCGEKGHVSRECSSPQAEKTCYRCGGTGHISRECTKDGGAPMGGRGGGSQECYKCGQVGHIARNCSQGGGYGNGGFGGGRGGYCGGAGGYGGARQTTCYSCGGFGHMSRDCTQGQECYNCGEVGHLSRDCPQETSSERGCYRFK

SEQ ID NO: 10674 - protein, 254 aa, Zea mays
  Clone ID: TF_ZmC31167_1.pep
MTSSRSKSKSRSRSRSRSRSRSRSPRRRDRLRSERAPHRSRSRSRSPYRRRERRGHRDFACKNCRRPGHFAKECPSAPMCNNCNLPGHFAAECTLQTVCWNCKESGHIASECKNEALCHACNKTGHLARDCPTSGANVKLCNKCFKSGHIAVDCTNERACNNCRQPGHIARECKNDPVCNLCNVSGHVARVCPKTTLASVIQGGPFRDILCRICGQPGHISRNCMATIICDTCGGRGHMSYECPSARIFGLRRL

SEQ ID NO: 10675 - protein, 2535 aa, Zea mays
  Clone ID: TF_ZmC36592_121.pep
MRLQLDGLAKDIHITNVHLFPLETTQIEVVRRSRNMTPQATTNTTLDTIMTRLEELSQHLSEIHGDTDYGGDTEYDGQPRRHRYGPRRVVRNQNNFSSKIELTIPEFNATYNPDTSRRRPPPPVLVARVTPTTSNTDPHTDVTVATSRTSLTTPPEPYCRRFELNKKTTQNSILEGKIGILFDQDCNLADGEYILVPEQGAAQEVAPDPAPEPAPEDLPATALEGKPRNSASAFGNQTPQPNSCMSRGRGVDSSHQMTSHGSSNDGNALTHTDGLAREGFPRILWEVLQGAGYTTPPQYAVQQFEKHRVPRCRVRMTLEPHPLQPGWRSLDSESFGYRAEDTIEAIALHGLTTFCGFHPLELATHPIGLFPAEREDDPMWKDRVEHAKDIWAIYPGQTAHLTIRCMNALYRLQVMRGEAMSHLMALLEATKITLDNREELVVDLSQEMVEKDLQVEQLSTDIQELEELVGTRENTIEVLEDQLINTQQQLAEANEHLDMHHQEIQDQEANEDVDIEGGDEPASSVDTAGSGRPPSPESSMAGRQRRGQNEHVPPPPPPPPTLQELMAQQNEILRQLAQRQPPPQHYGGGDHQRHPAAATYQEFLSTQPPLFTRAEDPLDADVWLRVVESKFPLLHGVCSEVTKVRFATQQLRGPARTWWDHFLAMQPEDREVEWREFKAAFRVHHIPAGIMDRKLNEFLALTQGNRTVLQYAQAFNDLCQYAGYHADTDEKKRDRFRRGLSTKLRDRLNTVRANSYNELVNMAISQEDCITARQAEKKRKTPVAGPSAQPQRFRIVSDTQGRGPQQQQGRWVIRPQQQQQPAPNRTQFPAQRGNQQQQQYRQANDNRCFTCGNTGHYAKNCPRNQQRQGQNANQNQGKSFISAKFSAKCQLPFHHTNGGITISTPGGRVATYQINRHVPIKFGSLIIKTTLLILGLDSVDIILGTDWLTRHRAVIDIAARAIEVHSPTCGETTLYLPDQGCTRSCAFVMIDSPVEKIPVVCDYPDVFPDELPGMPPDRDIEFAIELQPGTAPISKRPYRMPPAELAELKKQLQELLDKGFIRPSTSPWGCPALFVKKKDESLRMCVDYRPLNAVTIKNKYPLPRIDVLFDQLVGAKVFSKIDLRSGYHQIKIHASDISKTAFSTRYGLYEFLVMSFGLTNAPAYFMYLMNSVFMPELDKFVVVFIDDILVYSKNEAEHTKHLHTVLQRLRDHQLYAKLSKCEFWLKEIKFLGHTISQDGISVDPEKVQKVMDWKPPTTVKQIRSFLGLAGYYRRFIPDFSRIAKPMTELLKKGVKFEWSQKCDDAFHTLRQHLTTAPVLAQPDNTKPFEVYCDASGTGLGCVLMQENRVIAYASRALRPHEQNYPTHDLELAAVVHALKIWRHYLMGAHCNIYTDHKSLKYIFTQADLNMRQRRWLELIKDYDLEVHYHPGKANVVADALSRKAQCNCMNMDVGVTTLCDELCRLNLEVVSAGDLSYISVEPTLQEQIVRAQVEDKGVQVIKDMIKQKAEKYKCFRQDSKGILWFGDRLVVPKDPELRKQILDEAHLSKFSMHPGSNKMYHDLRSLYWWTRMKREIAKYISECDTCQRIKASHLKAAGPLQPLPIPSWKWEDICMDFIVGLPNTSRHHDSIWVIMDRLTKTAHFLPVHTTHKTEKYAEIYVDQIVRLHGIPKTIISDRGALFVARFWEKLQESLGTQVIRSSAYHPQTDGQTERVNQILEDMLRACALHYGKDWDKCLSLAEFSYNNSYQSSLKMAPFEALYGRRCRTPLNWSQAGEREIFGSDLVLEAEAKVRVITKNLEAAQARQRSYHDKRRKPLQFEVGDHVYLKVSPTKGVQRFGIKGKLAPRYIGPYEIKASCGPVAYQLELPPRMSTVHNVFHVSQLRKCVRLPTEVIPEPDIEIEPDLSYQEYPVKVLDQKERSTRARSIRMYKVQWSHHSAEEATWETEDFLCSRFPDFLPKGVDCNLADGEYILVPEQGAAQEVAPDPAPKPAPEDLPATALEGKPRNSASAFGNQTPQPNSCMSRGRGVDSSHRGRHARTQANSSTGRTTSFHSKPVAVAPPAATSPSTSTPRDKIVAKSLAPPPSTKGSSFAGRTKDIQCYRCKGFGHVIRDRPNKHTLIIHNNGEYSSASDSEETIYAMLATDVAGTQEEHVDATDTNKYESLVVQCVLSTQVAQPEQHQRHTLFHTKGVVQERSIHIIIDGGSCNNLARMQLMEKLSLPTRPHPHPYHIQWLNRGGKLKVTRSIHVHFSMGSYHDYADCDVVPMEACSLLLGRPWKYDTDSLHHGRTNNYSLMFKGKKIILHPMTPEQIVKSDIARAKQQYQQPPIPNEIKLKAPILLATKSNFDDGYIRESLSPISIPILLIPKKDGTWHMCVDCRAINNITIHYGYPIPRLDDMLDELSGAAIFSKDSTDGLCVISAPSPLCCMNSPRRASLSPRSFPYIIKHKNTKDNTIADALSRGYTMLSQLDFKIFGLQTVKEQYANDSDFKDNLMHCKDGRPWGKFHEPHGGRLMGHFGVYKTHEILAAHLFWP

SEQ ID NO: 10676 - protein, 270 aa, Zea mays
  Clone ID: TF_ZmC1373_8.pep
RTLSPRPPYLQAGRARSRSVRPRVLRRRRPPAPEEMPRYDDRYGNARLYVGRLSSRTRSRDLEYLFSKYGRIREVELKRDYAFIEYSDPRDADEARYNLDGRDVDGSRIIVEFAKGVPRGSGGSREREYVGRGPPPGTGRCFNCGIDGHWARDCKAGDWKNKCYRCGERGHIERNCQNSPRSLRRERSYSRSPSPRRGRARSRSYSRSRSYSRSRSRSYSESPRGRRTERDERRSRSISYSRSPRRSLSPEAKDMDRSPTPDRSRSPRRS

SEQ ID NO: 10677 - protein, 2273 aa, Zea mays
  Clone ID: TF_ZM5008.C2.o12.fg.pep
MARTMLDEYKTSDRVFGSKCFILVKRGRKSKFAPKAVEGFLLGYDSNTWAYRVFNKSTGLVEVSCDIVFDETNGSQVEQVDLDELDDEEAPCVALRNMTIGDVCPKESKEPPQAQYQPSSSNQASPPTQDEDQAQDNEEEDQEDEPPQEEDNDQGGDDNNQDKEDDQEEQGQRQPHPRVHQVIQRDHHMNSILGDIHKGVTTRSRVAHFCEHYSCVSSIEPYKVEDALRDSDWVLAMQEELNNFTRNELYQMDVKSAFLNGPIKEEVYVEQPPGFEDSEYPNHVYKLSKALYGLKQAPRAWYECLRDFLITNGFKVGKADHTLFTKTIANDLFVCQIYVDDIIFGSTNKSTCEEFSRIMIQKFKMSMMGELKYFLGFQVKQLQEGTFICQTKYIQDILTKFGMKDAKPIKTPMGTNGHLDLDTGGAKGSTQTNKKIQVGVQNKGAKETEENPGLPHRTVRCTTGQCPFSPIHPPSRRLLVCYKCGKPGHFIAKCSMSSDSDRGDDKRGNKKEKKRYYKKKGGDAHMCREWDSNESSTDSSSDEDAANIVVNKSLLFPNVGHKCFMAKDDKRKKVQSRTSPKYTTSSDEGSSSDDEDDLLTLFANINMQQKEKLNELIGAIHEKDELLDNQDSIKAKINEHEKENKKFKFARSMLYNGRCPGIKDGIGFQHGSNVKINAPKRLSNFVKGKAPMIQNNEGYILYPANYPEHKIRRIHARKSHTISHHAFMYNNEASSSRQSTHVKLPKNKTPTASNEPNISFKTFDASYDLTNKSGKIVAKYVGGKHKWGRKSKFAPKAVEGFLLGYDSNTRAYRVFNKSTGLVEVSCDIVFDETNGSQVEQVDLDELDDEEAPCVALRNMSIGDVCPKKSEGLHKHKINRHLPSKHLHQLKMRIRLKTMKMKTKRMSHLKRRTMIKGEMKLIKTRKMIKKYRVKDHHTQESIKQFNEITPSTPSLPYKVEDALRDSDWVLAMQEELNNFTRNEVWHLVPRPNQNVVGTKWVFRNKQDKHGVVTRNKARLVAKGYSQVEGLDFGETYAPVARLESIRILLAYATYHGFKLYQMDVKSAFLNGPIKEEVYVEQPLGFENSENPNHVYKLSKALNGLKQAPRAWIMIQKFEMSMMGELKYFLGFQVKQIQDGTFISQTKYIQDILNKFGMKDAKPIKTPMRTKGHLDLDTGDGHLSMYHHKFRNYHIPAGLMKIKKKEFLSLKQGNMSVSEYRDKFIQLSRYVPDEVADDKRKQEHFTEGLNRPLQYALVAHTFPSFQKLLDKALAIEHKRVQLGDLKRKAITQGQGYTNSSRRRTTPSSVDSTGVSTTPPTRQATPTGTPTRPTGQKIGPTCFKCSQVGHYANACPAGNSSASAQNKQQTPGKGFSIARVNQVSAEATADGADITIDREVEFVIDLLPGTAPISKRPYRMSVEELKELKKQLTELQEAGYIRPSSSPWGAPVLFVQKKDGSQRMCVDYRSLNNVTVKNKYLLPRIEDLFDQMRGARVFLKIDLRSGYHQMKIRPSDIPKTTFSTRYGLYEFTFMSFRLTNAPAYFMNLMNKVFMEYLDRFVIVFIDDILIYSKSDSDHEEHLRLVLQKLRNNQLYAKYSKCEFWIDEVPFLGHIVSNGGISVDPAKVREIVAWSIPSIVIEVRSFLGLAGYYRRFIEGFSKIAKPMTSLLEKGREFKWDSKCQDKLAVVVHALKIWRHYIMGTKCQVYTDHKSLKYIFTQKDLNLRQRRWLELIKDYDLEIHYHPSKANLVADALSRKEHVHSAIVAQLPDEIVEDFRRLNLGIVAHTEGVTIELEPTLEHEIHRGQVGDAKIQEIKDLITEGRGPEFTEDEQGTVWFKERICVPEIDSLRETILKEAHDSDYSIHPGSTKMYQDLKQKYWWYGLKRDVAADVAKCDVCQRVKAEHQRPAGLLHPLKIPEWKWEEIGMDFIVGLPCTPAGYDSIWVIVDRLKKVAHFIPVRTNYTGAKLAELYMTRIVCLHGVPKKIVSDRGSQFTSQFWKKLHESLVTQLNFSSAYHPQTNGQTERTNQVLEDMLRACALKHGGSWDKSLQYTEFSYNNSYQASLKMSPFEALYDRKCMTPLYWDQTGERQFFGPELIQETEEQVRMIKENLRIAQSRQKSYSDTRRRLLKFKEGDHVYLKVSPIRGMRRFKVKGKLSPRFIGPFLILKRVGVVAYQLELPDHLADVHDVFHVSQLKKCLRVPEKQLPLEDLSVQDDLTYAEYPIKILDTLTRVTRSKVIKMCKVQWSHHGEDEATWEREEELRIDFPHLFPSST

SEQ ID NO: 10678 - protein, 146 aa, Zea mays
  Clone ID: TF_LIB4729-106-A1-K1-A4.pep
MTSSRSNSRSHSRSRSRSRSRSPQRRDRLRSERAPRRSRSHSRSRSPYRRRERRGCKDLVCKNCRRPGHFAKECPSAPTCNNCNLPGHFAAECTSKTVCWNCKEPGHIASECKNEALCHTCNKTGHLARDCPTSGGYVKLCNKCFK

SEQ ID NO: 10679 - protein, 680 aa, Zea mays
  unsure (1)..(680): unsure at all Xaa locations
  Clone ID: TF_ZmC4916_404.pep
MDTHRPPHFDGTNFPYYSARMACYLEAVDLGVWRVTRDGMKPLKNPEKPTTSEEKEIHLNARAKNCLFESLSMDIFNQVFTLKTANEIWLKLHELHDGTSNVREQKHCLVLNEYNSFAMKDDELVRDMYSRLNQIINELNSIGINKLGDADIVRKIISLLPQQKYGSIITILHNMEDLSNMTPTIVIGKIAAFEMSRKMSRGEEPTSSKPYAFAXEESDDDEDNQPCTSSSEDEETIRRVGKVMRMIRKINLMGVPLQVEDLLFNIDRKKQRKRGCFACGEKGHFRDNCPNMAKPKKERSKGKALTSVRTWDDSSSEDESPRTRSHRSSSRSSRTSHKCLMARGNKSIPSSSDESSSDDEGEGKASLDELAEAVEFFQDVCTKQKAQLKNLKNKLVSSQNDYKGLLEKFETFANLNSELSTKIELLESSAPSTATDDSLIKKNEKLKAKLASSQEAIENLLEKMEILSIHNNELTTKLESIGSTPAASLVEISEIIKKDASTSCFDLIDDSNTCNQVAVENIVIETCTDEVAKENEQLKQEVARLGKALYDKKGKAKQIQPPQDNTTAGVNKPMEGETVICRICHKEGHKSFQCKAMTGDKQRQKLKQKPSSKISSTYIKKVNKKDATPYLIKKKKNGKVIAIKANKQANKGKGAKRIWVPKEIISTMKSTKKVWIPKGK

SEQ ID NO: 10680 - protein, 475 aa, Zea mays
  Clone ID: TF_ZM4448.C1.o2.fg.pep
MESPSDFGLSKDSTQKHYKMIKLGLRNLKRSLPEETLSKLSTMPYSLSYPHSARSFVMDPLDLLPDFLMLDLGMSTTSDVTKCKECGVLTSQNNTINETADEQTFKTQKDAQPNQQTSDLGTCCCCEYYGIPCRQISTNESKTTKQKNQILFYGINRQMSPQEQLIADSLIPNALSVDELQSIPKRKHHKDAQPQEETQECYIDGWTITCTQFQPHRRIRSKKQKGKHGKSQEITSRKACYQCGREGHYFRNCPEKSSLSDTPEMKQPQSPDMEYEQKCTETSTNNVKTTPPCNLSSRTCFGCGDIDHLVNGCPKKDVEINKVQKKRQRPQTHASTKNKQRKESTGRISYAVTGTIPYDDAVIFGTLVIHTTIATVLYDPRTTHSLISAQFATKYGIFKCPLRSRKTISTPERKVLANYICPKVSIKINGIVLGPCFVAPKVLREEAASAEIVPRKWPKVPFYRASALQTDIKIE

SEQ ID NO: 10681 - protein, 624 aa, Zea mays
  Clone ID: TF_ZmC71_26.pep
MARRRSQKNKKTQENPTRKEVTLEILCDDCSNYDSWSTSVINAFRTIHPQLEQIIDKSIFPSSFNGKINSEEDQRCYRLNYLAFDILNNSLSKEDYHAFISNYNESIPDAHDIWTRIKIKFDESKHNSSFDASTSFSFCDTNPCKEEGENERWRPNDESTSPKGLSSHFDSHMCCVANENDSGSTNEDEEEERSFVHLYARLSQEDKAVMLKLLERAREQSEARQRLEDILSIKMQHFDELTKEHKELKCSHVDLVQRYETISIEQNNASHCIAQLVNRNTLLKDQVEKLKIENLAFQEKYDMLLCSYENLRDDHIILNIAHEVVIENLKSQQPHSCTCVQINTILPCANACCPSTSKSSFELEFAGTNDDSYQKLKEENERLKKSLTQLKGKCIAQPSQDNCDHMVKKLETGTTVACTTSLEENVKDLRIAMRREQNMKFNTSSKSLNHASTKGNIQGNDQVTLHIKRCSECFEEGHLIRSCPYIKKGLIINKDDRLCFKCSKKGHMLRSCPHLKQKGIGLEKKVFTNHVAGNKQGKKKSSKLGKRLCYTCRKKGHQCKDCPIGKIPTPNLSLDSYITRQPKIATCARKVTSLPSASTKDTWVPRSLFTNLNGPIKRWVPKCA

SEQ ID NO: 10682 - protein, 3229 aa, Zea mays
  Clone ID: TF_ZmC36592_151.pep
MTSHGSSDDGNALTHTDGLAREGFPRILWEVLQGAGYTTPPQYAVQQFEKHRVPRCRVRMTLEPHPLQPGWRSLDSESFGYRAEDTIEAIALHGLTTFCGFHPLELATHPIGLFPAEKEDDPMWKDRVEHAKDIWAIYPGQTAHLTVRCMNALYRLQVMRGEAMSHLMALLEATKITLDNREELVVDLSQEMVEKDLQVEQLSTDIQELEELVGTRENTIEVLEDQLINTQQQLAEANEHLDMHHQEIQDQEANEDVDIEGGDEPASSVDTAGSGRPPSPESSMAGRQHRGQNERVPPPPPPPPTLQELMAQQNEILRQLAQRQPPPQHYGGGDHQRHPAAATYQEFLSTQPPLFTRAEDPLDADVWLRVVESKFPLLHGVCSEVTKVRFATQQLRGPARTWWDHFLAMQPEDREVEWREFKAAFRGHHIPAGIMDRKLNELLALTQGNRTVLQYAQAFNDLCQYAGYHADTDEKKRDRFRRGLSTKLRDRLNTVRANSYNELGRGPQQQQGRWVIRPQQQQAPNRNQFPAQRNNQQQQYRQANDNRCFTCGNTGHYAKNCPRNQQRQGQNANQNQGKRQKVQGCTRSCAFVMLESPVEKIPVVCDYLDVFPDELPGMPPDRDIEFAIELQPGTAPISKRPYRMPPAELAELKKQLQELLDKGFIRPSTSPWGCPALFVKKKDESLRMCVNYRPLNAVTIKNKYPLPRIDVLFDQLVGAKVFSRIDLRSGYHQIKIRASDIPKTAFSTRYGLYEFLVMSFGLTNAPAYFMYLMNSVFMPELDKFVVVFIDDILVYSKNEDGHTEHLHIVLQRLRDHHLYAKLSKCEFWLKEIKFLGHTISQDGISVDPEKVQEVMDWKPPTTVKQIRSFLGLAGYYRRFIPDFSRIAKPMTELLKKGVKFEWSQKCEDAFHTLRQHLTTAPVLAQPDNTKPFEVYCDASGTGLGCVLMQENRVIAYASWALRPHEQNYPTHDLELAAVVHALKIWRHYLMGAHCNIYIDHKSLKYIFTQADLNMRQRRWLELIKDYDLEVHYHPGKANVVADALSRKAQCNCVSMDVGVTTMCDELCRLNLEVVSSGDLSYISVEPTLQEQIVRAQVEDKGVQIVRLHGIPKTIISDRGALFVARFWEKLQESLGTHVIRSSAYHPQTDGQTERVNQILEDMLRACALHYGKDWDKCLSLAEFSYNNSYQSSLKMAPFEALYGRRCRTPLNWSQAGEREIFGPDLVLEAEAKVRVITKNLEAAQARQKSYHDKRRKPLQFEVGDHVYLKVSPTKGVQRFGIKGKLAPRYIGPYEIKEACGPVAYQVELPPHMSSVHNVFHVSQLRKCVRLPTEVLPEPDIEIEPDLSYQEYRVKVLDQKERSTRARSVRMYKVQWSHHSAEEATWETEDFLRSRFPDFLPKGVDCNLADGEYILMPEQGAAQEVAQIQHPSLHQRTCLPLLWKASPGSLEEMVARITWPSTLPPDDFTHPRQWRRHSFQFRFPFSRGFPFHLVGGAQLHRLPYAPLYTVQLYEDHRVPRCRVWLTLEAHPLQPSWRSLDSEAIGFRTDDTTEAVATKTLTTFCGYHPLEMCMSALYRLQALQSDAMAHLANLAQTTKLTLDSREDFVVDLSSELVEKDLQENQLHNVQQELEDANEHLDMHHQEIQDQEANEDVDIEGGDEPASSVDTAGSGRPPSPESISMWIFQMAGRQRRGQNEHVPPPPPPPTLQELMAQQNEILRQLAQRQPPPQHYGGGDHQRHPAAATYQEFLSTQPPLFTRAEDPLDADVWLRVVESKFPLLHGVCSEVTKVRFATQQLRGPARTWWDHFLAMQPEDREVEWREFKAAFRGHHIPAGIMDRKLNEFLALTQGNRTVLQYAQAFNDLCQYAGYHADTDEKKRDRFRRGLSTKLRDRLNTVRANSYNELVNMAISQEDCITARQAEKKRKTPVAGPSAQPQRFRIVSDTQGRGPQQQQGRWVIRPQQQQQQAPNRNQFPAQRNNQQQYRQANDNRCFTCGNTGHYAKNCPRNQQRQGQNVNQNQGKRQKVQVRQGRLNFTTMVDIPEGAPVMTGIFTVLNYPAIILFDSGASHSFISTKFSAKCQLPFHHTDGGITISTPGGRVATYQINRQVPIKFGSLVIRTTLHILGLDSVDIILGADWLTRHQAVLDIAARAIEIHSPAYGETVLYLPNQGCTRSCAFVLIESPVEKIPVVCDYPDVFPDELPGMPPDRDIEFAIELQPGTAPISKRPYRMPPAELAELKKQLQELLDKGFIRPSTSPWGCPALFVKKKDESLRMCVDYRPLNAVTIKNKYPLPRIDVLFDQLVGAKVFSKIDLRSGYHQIKIRASDIPKTAFSTRYGLYEFLVMSFGLTNAPAYFMYLMNSVFMPELDKFVVVFIDDILVYSKNEDEHTEHLHVVLQRLRDHHLYAKLSKCEFWLKEIKFLGHTISQDGISVDPEKVQEVMDWKPPTTVKQIRSFLGLAGYYRRFIPDFSRIAKPMTELLKKGVKFEWSQKCEDAFHTLRQHLTTAPVLAQPDNTKPFEVYCDASGTGLGCVLMQENRVIAYASRALRPHEQNYPTHDLELAVVVHALKIWRHYLMGAHCNIYTDHKSLKYIFTQADLNMRQRRWLELIKDYDLEVHYHPRKANVVADALSRKAQCNCMSMDVGVTTLCDELCKLNLEVVSSGNLSYISVEPTLQEQIIRAQVEDKGVQVIRDMIKQKAEKYKCFRQDSKGILWFGDRLVVPKDPELRRKILDEAHLSKFSMHPGSNKMYHDLRSLYWWTRMKREIAKYISECDTCQRIKASHLKAAGPLQPLPIPSWKWEDICMDFIVGLPNTSRHHDSIWVIVDRLTKTAHFLPVHTTHRAEKYAELYVDQIVRLHGIPKTIISDRGASFVARFWEQLQESLGTHVIRSSAYHPQTDGQTERVNQILEDMLRACALHYGKDWDKCLSLVEFSYNNSYQSSLKMAPFEALYGRRCRTPLNWSQAGEREIFGPDLVLEAEAKVRVITKNLEAAQARQRSYHDKRRKPLQFEVGDHVYLKVSPTKGVQRFGIKGKLAPRYIGPYKIKEACGTVAYQVELPPHMSAVHNVFHVSQLRKCVRLPTEVLPEPDIEIEPDLSYQEYPVKVLDQKERSTRARSVRMYKVQWSHHSAEEATWETEDFLRSRFPDFLPKGVDCNLADGEYILVPEQGAAQEVAPDPAPEPAPEDLPATALEGSLEEMVAGITWPSTLPPGWTVEWDPASAGEEHEE

SEQ ID NO: 10683 - protein, 253 aa, Zea mays
  unsure (1)..(253): unsure at all Xaa locations
  Clone ID: TF_ZmC1373_10.pep
YGNTRLYVGRLSPRTRSRDLEYLFSKYGRXFRCFYTTMEVWWKGALDGIGGHSSNVCGGLWXRAPLVIREVELKRDYAFIEFSDPRDADDAQYNLYGRDVDGSRIIVEFAKGVPRGSGGSRDYNGRGPSPGTGRCFNCGVDGHWARDCQAGDWKNKCYRCGERGHIERNCQNSPRNLRRERSYSRSLSPRRGRGRSRSYSRSRSYSRSRSPSGSPRGGRRDRDERRSRSLIYSRSASPRRSVSPVKEKERNRT

SEQ ID NO: 10684 - protein, 348 aa, Zea mays
  Clone ID: TF_ZmC1373_11.pep
FSSAPPQPGAPLDRDPGDMPRYDDRHGNTRLYVGRLAPRTRSRDLEYLFSKYGRFSVFYPTMEMMKLQVNVFEYFDSRQLIVCGNHFRRIREVELKRDYAFIEFSDPRDADDAQYNLDGREVDGSRIIVEFAKGVPRGSGGSRDYNGRGPPPGTGRCFNCGVDGHWARDCQAGDWKNKCYRCGERGHIERNCQNSPRNLRRERSYSRSPSGSPRGERRDRDERRSRSLSYSRSASPRRSVSPAKEKERSRTPDGSRSPSPRDKVSPPPKDNGAHNGSDREDSPGGREMSKRSRSPSDGYRSPVGNGRSPSPRDDRSPSPKVNNGDDPSPKGNNGDDEHRGSPRGSQSP

SEQ ID NO: 10685 - protein, 339 aa, Zea mays
  unsure (1)..(339): unsure at all Xaa locations
  Clone ID: TF_ZmC1373_12.pep
HPASSEPSKSKPSPRRIAAAGSASLDPDPGDMPRNDDRYGNTRLYVGRLSPRTRSRDLEYLFSKYGXGFSVFYTTMEMMKLQVNVFEYFDSRQLIVCGNHFRRIREVELKRDYAFIEFSDPRDADDAQYNLDGRDVDGSRIIVEFAKGVPRGSGGSRDYNGRGPPPGTGRCFNCGVDGHWARDCQAGDWKNKCYRCGERGHIERNCQNSPRNLRRERSYSRSPSRSLSYSRSASPRRSVSPVKEKERSRTPDGSRSPSPRDKVSPPPKDNGAHNGSDREDSPGGREMSKRSRSSSDGYRSPVGNGRSPSRSPSPKVNNGDDPSPRXNGDDPSPKGNNGD

SEQ ID NO: 10686 - protein, 355 aa, Zea mays
  Clone ID: TF_ZmC1373_18.pep
PHYRTPSKSKPSPRRIAAAGSASLDPDPGDMPRYDDRSGNTRLYVGRLSPRTRSRDLEYLFSKYGRIREVELKRDYAFIEFSDPRDADDAQYNLDGREVDGSRIIVEFAKGVPRGSGGSREYNGRGPPPGTGRCFNCGVDGHWARDCQAGDWKNKCYRCGERGHIERNCQNSPRNLRRERSYSRSPSPRRGRGRSRSYSRSRSYSRSRSPTGSPRGGRRDRDERRSRSLSYSRSASPRRSVSPAKEKERSRTPDGSRSPSPRDKVSPPPKDNGAHNGSDREDSPGGREMSKRSRSPSDGYRSPVGNGRSPSRSPSPKVNNGDDPSPKGNNGDDPSPKGNNGDDEHRGSPRGSQSP

SEQ ID NO: 10687 - protein, 315 aa, Zea mays
  Clone ID: TF_ZmC1373_25.pep
MMKLQVNVFEYFDSRQLIVCGNHFRRIREVELKRDYAFIEFSDPRDADDAQYNLDGRDVDGSRIIVEFAKGVPRGSGGSRDYNGRGPPPGTGRCFNCGVDGHWARDCQAGDWKNKCYRCGERGHIERNCQNSPRNLRRERSYSRSPSPRRGRGRSRSYSRSRSYSRSRSPSGSPRGGRRDRDERRSRSLSYSRSASPRRSVSPVKEKERSRTPDGSRSPSPRDKVSPPPKDNGAHNGSDREDSPGGREMSKRSRSPSDGYRSPVGNGRSPSRSPSPKVNNGDDPSPKGNNGDDPSPKGNNGDDEHRGSPRGSQSP

SEQ ID NO: 10688 - protein, 377 aa, Zea mays
  Clone ID: TF_ZmC1373_26.pep
VHTYFPDSFPLLNQRQACPSPRIVGHPPKSKPSPRRIAAAGSASLDPDPGDMPRNDDRYGNTRLYVGRLSPRTRSRDLEYLFSKYGRIREVELKRDYAFIEFSDPRDADDAQYNLDGRDVDGSRIIVEFAKGVPRGSGGSRDYNGRGPPPGTGRCFNCGVDGHWARDCQAGDWKNKCYRCGERGHIERNCQNSPRNLRRERSYSRSPSPRRGRGRSRSYSRSRSYSRSRSPSGSPRGGRRDRDERRSRSLSYSRSASPRRSVSPVKEKERSRTPDGSRSPSPRDKVSPPPKDNGAHNGSDREDSPGGREMSKRSRSSSDGYRSPVGNGRSPSRSPSPKVNNGDDPSPKGNNGDDPSPKGNNGDDDEHRGSPRGSQSP

SEQ ID NO: 10689 - protein, 2007 aa, Zea mays
  unsure (1)..(2007): unsure at all Xaa locations
  Clone ID: TF_ZmC24260_1.pep
MASNNNVHIGKPPHFDGNNYDYWKITMSMHLRAMVVKVWPIIRVGFLLLKEDQPSISDNVNIHTSNLGMNVFYYALDINXCNCILNLTTAPYIWVKLLEIHEGTSFLQIAKLYVXKGGFEHFIMKEEESVSDMFNRLYEIVKELKGLGFYVPDVDFSGKFLRSFPEKYETIVTMLVRSDLSTTSPTEVLGEILTQDIFKKSQADALSLAKKVKNESIALKAKASKAIEKEDSNDEENESESDGDMALFVRKFNKFMKMKRGQPRRGQTSRRNAFNDRKCFECGEPGHIAMNCPSKKKKGKDESDKKKKKYYNKKKDGKAYLVEWDSDDSSDDDDDDTSSKLNAGIAIKEAPSLFSSPPWPLAKGGAXVKIITDLNDIKDDDDIDDVDDDGYSYDDLVRMLGEADDYMHKEKEKFKTLKELYKNLQVSFEELKTSHNDLKENCEKLADAQKSSIVHEVEVVTKDVGVTCDLLDSLTSEPLPTNSICDKCKISLNDNIALDESKIIVENEVLVDRINTLTHDLEKAYGGKTKLDFILGSQRCSLNREGLGYVPKKGKNAFVKQKTLFVKECDKVCHKCHKKGHVKKNCPKFKHVSSTCFEHCYVLSHNAKGVHAKFVGTSIVGNKKKAIWVPKTLVTNIQGPKQVWVNYKAGGNHWVLDSGCTQHMTGDMKMFTQMSEEDCSNYDSITFGDNRKGKVKGLGKIAISNDHSISNVLLVEYLNFNLLSVAQLCDLGFCCNFTVEDVIISSVDGSNLKFKGFRHENLYLVDFSSNEAKLTTCLFSKASLGWLWHRRLGHVGMKQLNRLTKHDLVRGLKDVKFEKNKLCSSCQADKSNVFETFKSFAILAQNQFDFDIKKVRSDNGSEFKNARIDQYCDDKGIKHEFSSKYTPEQNGIVERKNRTLIDMARSMLAEYSISDSYWAEAINTACHSSNRLYCHKLLKKTPYELLIGRKPNISYFRVFGCKCYILRKGSRLSKFEKKCDEGFLLGYSSNSKAYRVFNKTHGIIEEAYDVEFDETNGSQDESENLDDVGGTQLIDAMKTMAIGEIKPKEDDDENSVVVIPSSSTINEEDHQGQQLNETMDTHDQGTSRPSVPPNASTSNYQTVSRIHHSIVKDHPVDQIVGDISKGVQTRSRIASFCEHFSFVSCMEPNRVDEALLDVDWVNAMHEELNNFARNEVWELVERPKNHNVIGTKWVFRNKHNEDGVVVRNKARLVAQGYTQIEGLDFGETFAPVARLEAIRILLAYACAHNIKLYQMDVKSAFLNGKISELVYVEQPPGFEDPKRPNHVFKLSKALYGLKQAPRAWYERLRDFLLSKDFKIGKVDTTLFTKRIGKDLFVCQIYVDDIIFGSTNELFCEEFGKIMSKEFEMSMIGELSFFLGLQIKQLKDGIFISQSKYLKDMLKKFGLENAKPIKTPMATNGHLDLDEGGTMVDQKLYRSIIGSLLYITASRPDVMFSVCMCARFQASPREIHLKAAKRILRYLKYTPNIGLCGFGGLRKKLAGRFKSKRPRGNDDDYTPTTDSEAQSSAGGTESMDAEDFPHVHPDYPIDIQGWTYPKRRFSMAEYCSRRTVNQYTLPSDTNIQFFHTQLQFDVFWGTLVDTNFHKHQVIDWSFLLSQSVMEGLIPKFETCGLYQFMGQRTDFNEMAVKQFLATSEIDIEEESITWMTGFKRYSASFADFAAANSLDYGTISAGMDLYTEDNFEDFVQFYELARLGIPRRFGETAGLRHHPAVINKIARVTILPKSGDKSKIRDKFWNIIQHIMNGEVMNIVLFMMRQLNDLKMDKNQNLAYAPYIMALIKSKTRFEGPCEIVHTPFRPFKNEIGFLTRPLTPFPDDEEDPGYEGGAAPNVEGQQMPPPPPPPQPQHYWEPAPGYFDPYFHNMQQELETHIDTRFDGLMSHVDHRLDDMQSRFDSNWDALNSEFSEFRDQIHTNVTDPIMSRLNNMQQSFQDNMGALSSQFDNLSTNDNMHDISQRQQQLQQDFGQFSSLFDTFSTHYYNMHPPPSDQ

SEQ ID NO: 10690 - protein, 1419 aa, Zea mays
  Clone ID: TF_ZM4840.C3.o3.fg.pep
MASNNNVHIGKPPHFDGNNYDYWKIRMSMHLRAMGGTIWPIVRDGFVVLKEDEPSVSDNENILTNDQAMNVFYDALDINEFNRIKNLTTAHEIWVKLMEIREGTTIVKSAKLYVCKGKFEQFIMKEDESVSDMFDRLNEIVNELKGLGFNVPDVDFTHKFLRSLPEKYETIVTMLVRSDLSTTSPTEVLGEILTQDIFKKSQADALSLAKKVKNESIALKAKASKAIEKEDSNDEENESESDGDMALFVRKFNKFMKMKRGQPRRGQTSRRNAFNDRKCFECGEPGHIAMNCPSKKKKGKDESDKKKKKYYNKKKDGKAYLVEWDSDDSSDDDDDDTSSKLNAGIAIKEAPSLFSSPHCLMAKGDAKVKIITDLNDINDDDDIDDVDDDGYSYDDLVRMLSEADDYMHKEKEKFKALKELYKNLQVSFEELKTSHNDLKENCEKLADAQKSSIVHEVEVVTKDVGVTCDLLDSLTSEPLPTNSICDKCKISLNDNIALDESKIIVENEVLVDRINTLTHDLEKAYGGKKKLDFILGSQRCSLNREGLGYVPKKGKNAFVKQKTLFVKECDKVCHKCHKKGHVKKNCPKFKHVSSTCFEHCYVLSHNAKGVHAKFVGTSIVGNKKKAIWVPKTLVTNIQGPKQVWVNYKAGGNHWVLDSGCTQHMTGDMKMFTQMSEEDCSNYDSITFGDNRKGKVKVEDVIISSVDGSNLKFKGFRHENLYLVDFSSNEAKLTTCLFSKASLGWLWHRRLGHVGMKQLNRLTKHDLVRGLKDVKFEKNKLCSSCQADKSNVFETFKSFAILAQNQFDFDIKKVRSDNGSEFKNARIDQYCDDKGIKHEFSSKYTPEQNGIVERKNRTLIDMARSMLAEYNISDSYWAEAINTACHSSNRLYCHKLLKKTPYELLIGRKPNISYFRVFGCKCYILRKGSRLSKFEKKCDEGFLLGYSSNSKAYRVFNKTHGIIEEAYDVEFDETNGSQDENDNLDDVGGTQLINAMKIMAIGEIKPKEEDDEDSVVVIPSSSTINEKDHQSQQLDETMDTHDQGTSRPTVPSNASTSNYQTVSRIHHSIVKDHPVDQIVGDISKGVQTRSRIASFCEHFSFVSCMEPNRVDEALLDVDWVNAMHEELNNFARNEVWELVERPKNHNVIGTKWVFRNKHNEDGVVVRNKARLVAQGYTQIEGLDFGETFAPVARLEAIRILLAYACAHNIKLYQMDVKSAFLNGKISELVYVEQPPGFEDPKRPNHVFKLSKALYGLKQAPRAWYERLRDFLLSKDFKIGKVDTTLFTKRIGKDLFVCQIYVDDIIFGSTNELFCEEFGKMMSKEFEMSMIGELSFFLGLQIKQLKDGIFISQSKYLKDMLKKFGLENAKPIKTPMATNGHLDLDEGGTIVDQKLYRSIIGSLLYITASRPDVMFSVCMCA

SEQ ID NO: 10691 - protein, 591 aa, Zea mays
  Clone ID: TF_ZM4351.C1.o2.fg.pep
MSSQEVTVELLLGDGSNYKSWSVSIYNAFMSVDSDLRQIFSRSIFPSDISKNPSNDELRCFSLNHRACSILVDSLSRGAYFAIMSSDNDLIVDAHDLWNRIKVKYCVANCTTSTPYIACDTNLSKGEDQERWAPNDESTSSTGLVSTNNKCFIANNDGGDKSHDEEEYEDDSEDESSSPQGTFSRLASTDINDRENETDDVEEEEIRRFYNHLNKADKALLVKLLRRNKEQGETLLRLEETLIKTNNSLEKMTKEHEELKYSHGNLVQRYEYVLIEQRNSHDALSNIAQLKTENSMLKSQVETMDLEKRALESQSLIEQQVLGSQKKFCGNKKQRQLRRRHFAQLSQDIHGRVVKKLEKGKTAASVKLNKKSVPKDGEINMSLEKGKDSINHVVCTDHLSMSFKHKKGRGKRRCFKCKEIGHLIASCPYKNKDEGTISCFGCNNKDHTITSCPVMKNQGCASSKVTLTKESDTQQASCQVERRFCYKCGEQGHISKSLGGKEKMCKKWSNQDLGTSHHGLILDTMHSKIAKGVARRQLIKPRTEARRASRYQVHGRRSRWLRNPKPKVKKKACKVKGDRVENSFGSSRITT

SEQ ID NO: 10692 - protein, 296 aa, Zea mays
  Clone ID: TF_ZmC18109_7.pep
MKLSQSSDMEYEQKCTETSTNNVKTTPPYKPSGRACFGCGDTGHLVNGCPKKDVEINKVQKKRQHPQTHASTKNKQQKETTRKISYAVTRTIPYDDAVIFGTLVIHTTIATVLYDPRTTHSFISAQFATKYGIFKCPLRSRKTINAPEGKMLVNYIRPTMMNPNGNEVNDANKNIPTLMTMNEKNESPRYSMNGTKNNKRNRKMFGYMISSSQPQAKAPKHLDTQTEESSQTQLYEIQTPSQPSPPVGQAKLTRKELKARGACYYCKNEGHLIRECPKKRLDRIEKKSAKHDLSNN

SEQ ID NO: 10693 - protein, 2498 aa, Zea mays
  Clone ID: TF_ZM3646.C1.o1.fg.pep
MDPKGKGIVINDKEKESFVNEPKDDKPTDSGSGHRRKEGKKKKTRRIKEIVYYDDSDGSSSSQKDDDNDYRKTIHKNAQATTVLLASLCRDEYNKLVEGELGRFAMIRGEEPTQTYNRLKTLINKIRSYGSTRWTDHDVVRLLLRSFTILDPHLVNNIRENPRYTKMSPEEVLGKFVSGRMMIKEARYVDDALNGPIHEPQPIALKATRSKEALPSKVAQVEAAGLNNEEMALIIKRFKTALKGRKGQPSKTKTKEKRSCFKCGKIGHFIANCPDNESDQEKGDKREKKKHYKKAKGEAHIGKEWDSDCSSSDSDNEGLAATAFNKSTLFPNERHTCLMAREKKVSTRDTTYVSSSDDESSDEEIDYSSLFKGLDRNKIDKINELIDALNEKDRLLEKQEDLLYEEHDKFIEAQKSYALEVKRNEMLSFELSTCHETISTLKGVNNDLNAKLEVANKSNSCVEHVVICTRCKDFDIDACSEHLVSISKLNDELASLNAQLKTSKNDLDKLKFARDAYTIGRHPSIKDGLGFKREAKNLTSHKAPIPAKEKGKAPMASSVQKNHAFMYHDKRQTRNAYRSYNAYDDFDSHDMFVSSSSHMHGRNMSRRNAIHHCDTPVSPRVSLKQPNQKPSFYVNQNCNLADGEYVLIPEQGPVQEEDQEQAPEAAIEDLPAAPAIEGKPRYGGYKCGHCTAAAGVSGALYAKPMNSPTPASGGDSRFSSDFLSRDGFPSILWEVLNSAGYPTPPLYTVQLYEEHRVPRCQVWLTLEAHPLQPGWRSLDSETIGLMTDDTVEAAAMKTLTTFCGYHPLEMVMHPLGLFPAEKKDDPMWCNRVSHVKDVWAMYPDLVGRVTVQCMSALYRLQALQSDAMTLLANTAQAAKLTLDNREDFVVDLSTELVEKDLQVERLSQRITTLEQQVEIRDNTIDVLENQLHDVQRELEEANDHLDMHHQEMEANEAGSEGEEAPEELGPAPGANGTTSVIPPSPEFLSTQPPLFTKAEDPLDADVWLRVVESKFPLLTGDCPDEAKARFAAQQLRGPARTWWDHFRAMLPADHEVSWEEFKTAFRGHHIPASILDRKLNEFLALNQGTRTVLQYAQAFNDLCQYAGYHADSDEKKRDRFRRGLNTKLRERLNTVRADSFNELVNMAISQEDCIVAHRAEKKRKAPMAAPSAQAQRFRIVSHNQSRGFQQQAGRWVIRPPQQQQQPTPNRYPAPAPRNNQPPQQQQFRQGNGNKCFTCGNMGHYAKNCPRNQQRQMPAPNQDKGRKQKVQVRQGKLNFTALEEVPEGAPIMTGTFSVYNQPALILFDSGASHSFISQKFSANCKLPFSHSKGSFMIVTPGGKIATNQLNQSVPIRLGSHIIKTTLLVLGLENVDIILGANWMTLHQVVLDVASRTVEVNSPFCGNFTLILPSQGSSQSCAFSMTELPLKKIPVVCEYADVFPDELPGMPPDRDIEFAIELQPGTAPISKRPYRMPPAELAELKKQLLDKGFIRPSTSPWCCPALFVKKKDESLRLCIDYRPLNAVTIKNKYPLPRIDVLFDQLVGAKVFSKIDLRSGYHQIKIRASDIPKTAFSTRYGLYEFLVMSFGLTNAPAYFMYLMNSVFMPELDKFVVVFIDDILVYSKNEEEHAGHLHVVLQRLREHHLYAKLSKCDFWLKEIKFLGHTISQDGIAVDPDKVQEVMNWRPPTTVRQIQSFLGLAGYYRRFIPDFSRIAKPITELLKKEVKFVWSQKCEDAFHALRQHLTTAPVLAQPDSSKPFDVYCDASGTGLGCVLMQDNRVIAYASRALRPHEQNYPTHDLELAAVVHALKMWRHYLMGTHCNIFTDHKSLKYIFTQADLNMRQRRWLELIKDYDLEVHYHPGKANVVADALSRKLQCNCILMDSRVNTLCDELSKMQIEVIPSGSLSHISVEPTLQDQIIMAQLSDKGVQIIKKNLHQKVEKYNCFRQDEKGVLWFKNRLVIPKDQDLKKKILDEAHLSKFSMHPGSTKMYHDLKLLYWWTRMKREIAQYVSECDTCQRIKASHLKSAGALQPLSVPSWKWDDISMDFIVGLPNTSRHHDSIWVIVDRLTKVAHFLPVHTTDKAQKYAELYIDRIVCLHGLPRTIVSDRGAQFVARFWEQLQESLGTKLIRSSAYHPQTDGQTERVNQILEDMLRACAIDCGKNWDKHLSLAEFAYNNSYQSSLKMAPFEALYGRRCRTPLNWSQPGEREVFGPGLVTEAERKVKLIRKNLEAAQARQKSYHDRRRKPLQFEVGSFVYLKVSPTKGVQRFGIKGKLAPRYIGPYEIIEACGPVAYKLKLPSRMSAIHNVFHVSQLKKCVRLPTEIIAEPELEIEPDLSYQEYPSKILDCKERSTRAKSIKMFKVQWSNHSEEEATWETEEFLRSNFPDCLPKEAVAKRMTFEEQFCPNNNNPHPFPISLTLRFTPKGLWPESRDEIPLRGEGCDTPVSPRVSLKQPNQKPSFYVNQSKHEHQNNLSEKEFTKYILKSVMIKTIETFER

SEQ ID NO: 10694 - protein, 156 aa, Zea mays
  unsure (1)..(156): unsure at all Xaa locations
  Clone ID: TF_LIB4826-025-R2-N1-C6.pep
MTSSRSKSKSRSRSRSRSRSRSRSPRRRDRLRSERAPHRSRSRSRSPYRRRERRGHRDFACKNCRRPGHFAKECPSAPMCNNCNLPGHFAAECTLQTVCWNCKESGHIASECKNEALCHACNKTGHLARDCPTSGANVKLCNKCFKSGHIAXDCTN

SEQ ID NO: 10695 - protein, 628 aa, Zea mays
  Clone ID: TF_ZmC26852_1.pep
WLGEDPKRTRRLLQQNATQKEVTLEILFDDCSNYDSWSTSVLNAFRTIHPQLEQIIDKSIFPSSFNGEIVSEEDQRCFRLNYLAFDILSNSLSKEDYRAFISNYDESVHDAHDIWTRIRSKFDESKHDSSFCVSASFGICDTNPCKEEEENERWRPNDESTSPKGLSSHFDSHMCCVANENDSGSTNEDEEEESSFVHLYARLSQEDKAVMLKLLERAREQSEARQRLEDILSMKMLHFDELTKEHEELKCSHVDLVQRYETISIEQDNASHCIAQLVNRNTLLKDQVEKLKVENLAFQDKYDMLLCSHENLRDDHIMLNIAHEVVIEYLKSQQPHSCTCVHIDTILPCANACCPSTSKSSFELEFAGTNDDTYQKLEEENERLKMSLTQLKGKCIAQPSQDNRDHMVKELETGTTVACTTSLEENVKDLRIAKRKKQKMKFNTSSKSLNHASIQGNIQGNDQATLHTKKSKKCSECFEEGHLIRSCPYIKNGLIINKDDRHCFKCSKKGHLVKSCPHLKQKGIGLEKKIFTNHVASKKQGKKKSSKLEDRLCYICRKKGHQCKDCPIGNYPTPSLSIDSYVTRQPKIATCARKVMSLPSASTKDIWVPRSLLTNLDGPIKRWVPKYA

SEQ ID NO: 10696 - protein, 1084 aa, Zea mays
  Clone ID: TF_ZmC1236750_1.pep
MPVPAELSPPSPHGAPRTRAGEQDDSTLPPTAAATATATRGGTGRKRRRGARDPRASWAWETEWDRAYLLACAAGLLVDPLFLYAVAVSAPLMCVFLDAWFAAAVTALRCAVDAMHASNLLLRLRGACSPRREDTDEEEAQPGRDGGVPGRGTRSKEGVFLDVLVILPVMQVVVWVATPAMIRAGSTTDVMIVLLTAFLLEYLPKIYHAVRVLRRMQGVSGYLFGTIWWGIALNLMAYFVAAHAVGACWYLLGAQRATKCLREQCAQAGSGCAPWALACAEPLYYGATASSVGAARLAWAGNATARGTCLDSADNYQYGAYQWTVMLVANPSRVERVLLPIFWGLMTLSTFGNLESTTEWLEIVFNIVTITGGLILVTMLIGNIKVFLNATTSKKQAMHTRLRSVELWMKRKDLPRSYRHRVRQYERQRWAATRGVDECRIVRDLPEGLRRDIKYHLCLGLVRQVPLFQHMDDLVLENICDRVKSLIFPKGEVIVREGDPVKRMLFIVRGHLQSSQVLRNGAESCCMLGPGNFSGDELLSWCLRRPFLERLPGSSSTLATLESTEAFGLDAADVKYVTQHFRYTFTNDKSPRDMYIYVYCISCNREGSRDFKTLPQHDIRAKARRRATVAATTYAEQAWPTASFRLCRTRVERSAVLKEGGGEGGAASAARSRRGRQISGTAWSLEAPPAWTQLPSPALASTRRRRRPALALEEGYRRRGPARPGSCCHQLALLQLQEDCCRLWVLTHRNTREWERIKGLSKFLGVKNYLAWSRRALRLLKAKRLEGYVDGTVVEPKDKPSAEWKDWDAINSLVAAWMLSSMIPAIASTVDTIISAAEMWKALEEMYSGAGNVMLMVETEDRLHNIKQGERTVAEYVQELQCLWADVDHYDPIELPHSECVVWAKKWVEIRRVLQFLRGLNPEFEGRRASMFHQSTLPSLQEAIAAISQEESRLKVMRESPPVSSHPVFSAMRTKDARECYNCGDVGHIARNCTKPFKFNRGRGRGAARGGRGRGGRSWARANATTTKEDLEIFMENEAETKSTEQHKIPGNKNQESYTRDFVNFAYTDEGEENREKTWDSYQA

SEQ ID NO: 10697 - protein, 680 aa, Zea mays
  unsure (1)..(680): unsure at all Xaa locations
  Clone ID: TF_ZmC4916_437.pep
MDTHRPPHFDGTNFPYYSARMACYLEVVDLGVWRVTRDGMKPLKNPEKPTTSEEKEIHLNARAKNCLYESLSMDIFNQVFTLKTANEIWLKLHELHDGTSNVREQKHCLVLNEYNSFAMKDDELVRDMYSRLNLIINELNSIGINKLGDADIVRKIISLLPQQRYGSIITILHNMEDLSNMTPTIVIGKIAAFEMSRKMSRGEEPTSSRPYAFAXEESDDDEDNQPCTSSSEDEETIRRVGKVMGMIRKINLMGVPLQVEDLLFNIDRKKQRKRGCFACGEKGHFRDNCPNMAKPKKERSKGKALTSVRTWDDSSSEDEPPRTRSHRSSSRSSRSSHKCLMARGNKSTPSSSDESSSDDEGEGKASLDELAEAVEFFQDVCTKQKAQLKTLKNKLVSSQNDYKGLLEKFETFANLNSELSTKIELLESSAPSTATDDSLIKKNEKLKAKLASSQEAIENLLEKMEILSIHNNELTTKLENIGSTPAASLVEIPEIIKKDASTSCFDLIDDSNPCNQVVVENIVVETCTDKVAKENEQLKQEVARLGKALYDKKGKAKQIQPPQDNTTAGVNKPMEGETVICRLCHKEGHKSFQCKAMTGDKQRQKLKQKPSSKISNTYIKKVNKKDATPYLIKKKKNGKVIAIKTNKQANKGKGAKRIWVPKEIISTMKSTKKVWIPKGK

SEQ ID NO: 10698 - protein, 877 aa, Zea mays
  Clone ID: TF_ZmC4916_467.pep
MDTHRPPHFDGTNFPYYSARMACYLEAVDLGVWRVTRDGMKPLKNPEKPTTSEEKEIHLNARAKNCLYESLSMDIFNQVFTLKTANEIWLKLHELHDGTSNVREQKHCLVLNEYNSFAMKDDELVRNMYSRLNLIINELNSIGMNKLGDADIVRKIISLLPQQRYGSIITILHNMEDLSNMTPTIVIGKIAAFEMSRKISRGEEPTSSRQYAFACDERKGKKKAPTPSSSSEEEEEEESDDDEDNQPCTSSSEDEETIRRVGKVMGMIRKINLMGVPLQVEDLLFNIDRKKQRKRGCFACGEKGHFRDNCPNMAKPKKERSKGKALTSVRTWDGSSSEDEPPRTRNHRSSSRSSRSSHKCLMARGNKSIPSSSDDSSSDDEGEGKPSLDELAEAVEFFQDVCTKQKAQLKTLKNKLVSSQNDYKGLLEKFETFANLNSELSTKIELLESSAPSTATDDSLIKKNEKLKAKLASSQEAIKNLLEKMEILSIHNNELTTKLENIGSTPAASLVEMPEIIKKDASTSCFDLIDDSNPCNQVVVENIVVETCSDEVAKENEQLKQEVARLGKALYDKKGKAKQIRPPQDNTTAGVNKPMEGETVICRLCHKEGHKSFQCKAMTGDKQRQKLKQKPSSKISNTYIKKVNKKDATPYLIKKKKNGKVIAIKANKQANKGKGAKRIWVPKEIISTMKSTKKVWIPKGNLAKVLEVLIHPPLRRHPFPTEALWAHRISKHRATKVSPFELVYGQEAVLPMEISLNTIRFARQNDLTATDYYDSMMDNIDEVTDKRMIALGAIEKDKIMVARAYNKKVKAKSFQVGDLVWKTILPLRNKDRKFGKWSPSWEGPYKVKQVMSGNAYLLQTLQGKDLPKALNERFLKQ

SEQ ID NO: 10699 - protein, 621 aa, Zea mays
  Clone ID: TF_ZmC4916_482.pep
MKVAHNAYSMTNYEQNLDGDVCGQSNYASSKHMFGTVNNTRRSRRDGRSTDMFGSMPRTPQPNIRTCCKLRAPGDPCLLLLKFTGCVEDWTKEMRMQHLKRSHKKMHRSPRLKNKRSPKKSAKKPEKRAVSQRLVTHRTVHSTCPVEDLLFNIDRKKQRKRGCFACGEKGHFRDNCPNMAEPKKGRSKGKALTSVRTWDDSSSEDEPPRTRSHRSSSRSSRSSHKCLMAKGLLEKFETFANLNGELSTKIELLESSAPSIATDDGLIKKNEKLKAKLASSQEAIENLLEKMEILSIHNDELTTKLENIGSTLGASLVEIPEIIKKDASTSCFDLIDDSNPCNQVLVENIVVETCSDEVAKENEQLRQEAARLGKALYDKKGKAKQIRPPKDNTTTGVNKPMEVETVICRLCHKEGHKSFQCKAMTGDRQKQKLKQKPTSKISNTYIKKVDKKTATPYLIKKKKNGKVIAIKANKQANKEKGGKRIWVPKEIISTMKSTKKFTGCVEDWTKEMRMQHLKRSHKKMHRIPRLKNKRSPKKSAKKPEKRAVSQRLVTHRTVHSTCVPPPCIGGNEARGVSAGSSIVETAGSVREEPEAEHHLRVEKARGSLRSYSTVVLGPRVG

SEQ ID NO: 10700 - protein, 680 aa, Zea mays
  unsure (1)..(680): unsure at all Xaa locations
  Clone ID: TF_ZM4291.C1.o10.fg.pep
MDTHRPPHFDGTNFPYYSARMACYLEAVDLGVWRVTRDGMKPPKNPEKPTTSEEKEIHLNARAKNCLYESLSMDIFNQVFTLKTANEIWLKLHELHDGTSNVREQKHCLVLNEYNSFAMKDNELVRDMYSRLNLIINELNSIGINKLGDADIVRKIISLLPQQRYGSIITILHNMEDLSNMTPTIVIGKIAAFEMSRKMSRGEEPTSSKPYAFAXEESDDDEDNQPCTSSSEDEETIRRVGKVMRMIRKINLMGVPLQVEDLLFNIDRKKQRKRGCFACGEKGHFRDNCPNMAKPKKERSKGKALTSVRTWDDSSSEDEPPRTRSHRSSSRSSRSSHKCLMARGNKSIPSSSDESSSDDEGEGKASLEELAEAVNFFQDVCTKQKAQLKTLKNKLVSSQNDYKGLLEKFETFANLNSELSTKIELLESSAPSTATDDSLIKKNEKLKAKLASSQEAIENLLEKMEILSIHNNELTTKLENIGSTPAASLVEIPEIIKKDASTSCFDLIDDSNPCNQVVVENIVVETCSNEVAKENEQLKQEVARLGKALYDKKGKAKQIRPPQDNTTAGVNKPVEGETVICRLCHKEGHKSFQCKAMTGDKQRQKLKQKPSSKISNTYIKKVNKKDATPYLIKKKKNGKVIAIKANKQANKGKGAKRIWVPKEIISTMKSTKKVWIPKGK

SEQ ID NO: 10701 - protein, 679 aa, Zea mays
  unsure (1)..(679): unsure at all Xaa locations
  Clone ID: TF_ZM4323.C2.o1.fg.pep
MDTHRPPHFDGTNFPYYSARMACYLEAVDLGVWRVTRDGMKPPKNPEKPTTSEEKEIHLNARAKNCLYESLSMDIFNQVFTLKTANEIWLKLHELHDGTSNVREQKHCLVLNEYNSFAMKDDELVRDMYSRLNLIINELNSIGINKLGDADIVRKIISLLPQQKYGSIITILHNMEDLSNMTPTIVIGKIAAFEMSRKMSRGEEPTTSRPYAFAXEESDDDEDNQPCTSSSEDEETIRRVGKVMRMIRKINLMGVPLQVEDLLFNIDRKKQRKRGCFACGEKGHFRDNCPNMAKPKKERSKGKALTSVRTWDDSSSEDEPPRTRSHRSSSRSSRSSHKCLMARGNKSIPSSSDESSSDDEGEGKASLEELAEAVNFFQDVCTKQKAQLKTLKNKLVSSQNDYKGLLEKFETFANLNSELSTKIELLESSAPSTATNDSLIKKNEKLKAKLASSQEAIENLLEKMEILSIHNNELTTKLENIGSTPAASLVEIPEIIKKDASTSCFDLIDDSNPCNQVVENIIVETCSDEVAKENEQLKQEVARLGKALYDKKGKAKQIRPPQDNTTAGVNKPVEGETVICRLCHKEGHKSFQCKAMTGDKQRQKLKQKPTSKISNTYIKKVNKKDATPYLIKKKKNGKVIAIKANKQANKGKGAKRIWVPKEIISTMKSTKKVWIPKGK

SEQ ID NO: 10702 - protein, 680 aa, Zea mays
  unsure (1)..(680): unsure at all Xaa locations
  Clone ID: TF_ZM4789.C1.o5.fg.pep
MDTHRPPHFDGTNFPYYSARMACYLEAIDLGVWRVTRDGMKPIKNPEKPTTSEEKEIHLNARAKNCLYESLSMDIFNQVFTLKTANEIWLKLHELHDDTSNVREQKHCLVLNEYNSFAMKDDELVRDMYSRLNLIINELNSIGINKLGDADIVRKIISLLPQQRYGSIITILHNMEDLSNMTPTIVIGKIAAFEMSRKMSRGEEPTSSRPYAFAXEESDDDEDNQPCTSSSEDEETIRRVGKVMRMIRKINLMGVPLQVEDLLFNIDRKKQRKRGCFACGEKGHFRDNCPNMTKPKKERSKGKALTSVRTWDDSSSEDEPPRTRSHRSSSRSSRSSHKCLMARGNKSIPSSSDESSSDDEGEGKPSLDELAEAVEFFQDVCTKQKAQLKTLKNKLVSSQNDYKGLLEKFETFANLNSELSTKIELLESSAPSTATDDSLIKNNEKLKAKLASSQEAIENLLEKMEILSIHNNELTTKLENIGSTPAASLVEIPEIIKKDASTSCFDLIDDSNPCNQVVVENIVVETCTNEVAKENEQLKQEVARLGKALYDKKGKAKQIQPPQDNTTAGVNKPMEGETVICRLCHKEGHKSFQCKAMTGDKQRQKLKQKPSSKISNTYIKKVDKKTATPYLIKKKKNGKVIAIKANKQANKGKGAKRIWVPKEIISTMKSTKKVWIPKGK

SEQ ID NO: 10703 - protein, 677 aa, Zea mays
  unsure (1)..(677): unsure at all Xaa locations
  Clone ID: TF_ZM5010.C3.o2.fg.pep
MDTHRPPHFDGTNFPYYSARMACYLEAVDLGVWRVTRDGMKPLKNPEKPTTSEEKEIHLNARAKNCLYESLSMDIFNQVFTLKTANEIWLKLHELHDGTSNVREQKHCLVLNEYNSFAMKDDELVRDMYSRLNLIINELNSIGINKLGDADIVRKIISLLPQQKYGSIITILHNMEDLSNMTPTIVIGKIAAFEMSRKMSRGEEPTSSKPYAFAXEESDDDEDNQPCTSSSEDEETIRRVGKVMRMIRKINLMGVPLQVEDLLFNIDRKKQRKRGCFACGEKGHFRDNCPNMAKPKKERSKGKALTSVRTWDDSSSEDESPRTRSHRSLSRSSRSSHKCLMARGNKSIPSSSDESSSDDEGEGKASLEELAEAVNFFQDVCTKQKAQLKTLKNKLISSQNDYKGLLEKFETFANLNIELSTKIELLESSAPSTATDDSLIKKNEKLKAKLASSQEAIENLLEKMEILSIHNNELTTKLENIGSTPAASLVEIPEIIKKDASTSCFDLIDDSNPCNQVVENIVVETCSDEVAKENEQLKQEVARLGKALYDKKGKAKQIRPPQDNTTAGVNKPVEGETVICRLCHKEGHKSFQCKAMTGDKQRQKLKQKPTSKISNIKKVNKKDATPYLIKKKKNGKVIAIKANKQANKGKGTKRIWVPKEIISTMKSTKKVWIPKGK

SEQ ID NO: 10704 - protein, 1942 aa, Zea mays
  Clone ID: TF_ZM4874.C2.o9.fg.pep
MASNNNVHIGKPPHFDGNNYDYWKIRMSMHLRAMGGKIWPIVRDGFVVLKEDEPSVSDNENILTNDQAMNVFYDALDINEFNRIKNLTTAHEIWIKLMEIHEGTTIVKSAKLYVCKGKFEQFIMKEDESVSDMFNQLNEKVNELKGLGFNVPDVDFTHKFLRSLPEKYETIVTMLFGKEGENESIALKAKASKAIEKEDSNDEENESESDGDMALFVRKFNKFMKMKRGQPRRGQTSRRNAFNDRKCFECGEPGHIAMNCPSKKKKGKDESDKKKKKYYNKKKDGKAYLVEWDSDDSSDDDDDDTSSKLNAGIAIKEAPSLFSSPHCLMAKGDAKVKIITDLNDIKDDDDIDDVDDDGYSYDDLVRMLGEVDDYMHKEKEKFKTLKELYKNLQVSFEELKTSHNDLKENCEKLVDAQKSSIVHEVEVVTKDVGVTCDLLDSLTSEPLPTNSICDKYKISLNDNIALDESKTIVENEVLVDRVNTLTHDLEKAYGGKAKLDFILGSQRCSLNREGLGYVPKKGKNAFVKQKTLFVKECDTVCHKCHKKGHVKKNCPKFKNVSSTCFEHCYVLSHNAKGVHAKFVGKLQGGRNHWVLDSGCTQHMTEDMKMFTQMSEEDCSNYDSITFGDNRKGKVKGLGKIAISNDHSISNVLLVESLNFNLLSVAQLCDLGFYCNFTVEDVIISSVDGSNLKFKGFRHENLYLVDFSSNEAKLTTCLFSKASLGWLWHRRLGHVGMKQLNRLTKHDSVRGLKDVKFEKNKLCSSCQADKSNVFETFKSFAILAQNQYDFDIKKVRSDNGSEFKNARIDEYCDDKGIKHEFSSKYTPKQNGIVERKNRTLIDMARSMLAEYNISDSYWAEAINTACHSSNRLYCHKLLKKTPYELLIGRKPNISYFRVFGCKCYILRKGSRLSKFEKKCDERFLLGYSSNSKAYRVFNKTHGIIEEAYDVEFDETNGSQDESDNLDDVGGTQLINAMKTMAIGEIKPKEDDDENSVVVIPSSSTLNEEDHQSQQHDETMDTHDQGTSRHSVPPNASTSNYQTVSRIHHSIVKDHPVDQIVGDISKGVQTRSRIASFCEHFSFVSCMEPNRVDEALLDVDWVNAMHEELNNFARNEVWELVERLKNHNVIGTKWVFRNKHNEDGVVVRNKARLVAQGYTQIEGLDFGEIFAPVARLEAIRILLAYACAHNIKLYQMDVKSAFLNGKISELVYVEQPPGFEDPKRPNHVFKLSKALYGLKQAPRAWYERLRDFLLSKDFKIGKVDTTLFTKRIGKDLFVCQIYVDDIIFGSTNELFCEEFRKMMSKEFEMSMIGELSFFLGLQIKQLKDGIFISQSKYLKDMLKKFGLENAKPIKTPMATNGHLDLDEGVLLTVNAVQNFELVWMGILCKVINSTFVAARVLWSRPWSVADRPPGGHGPSGPLARTVRPPSADRLDPGREMQFYSFLLCGFGGLRKKLAGHFKSKRPRGDDDDYTPTTDSEAQSSARGTESMDAEDFPHVHPDYPIDTSRWTYPKRRFSMAEYCSRRTMNQYTLPSDTNIQIFHTQLQFDVFWGTLVDTNFHKHQVIDWSFMLGQSVMEGLIPKFETCGLYQFMGQRTDFSEMAVKQFLATSEIDIEEESVTWMTGFKRYSASFADFATTNSLDYGTISAGLDLYTEDNFEDIVQFYEPARLGIPRRIGETTGLRHHPAVINKIARVTILPKSGDKSKIRDKFWNIIHHIMNGEMDKNQNLAYAPYIMALIKAKTRFEGPCEIVHTPFRPFKNEIGFLTRPLTPFPDDEEDPGYNAGAAPDVEAEQMPPPQPQQYWQPGPGYFDPYFHNMQQGLETHIDTRFEGMMTHVDHRLDDMQSHFDSNWDALNSEFSEFRDHIHTNVTDPIMTRLNNVQQSFQDNMGALSSQFDHLSTNDSMHDISQRQQQLQRDFGQFSSLFDTFSTHYYNMHPPPSDQ

SEQ ID NO: 10705 - protein, 276 aa, Zea mays
  Clone ID: TF_ZmC19722_1.pep
MANKRQRDARKRFREANPDLFPPQTAPSADGTKNKSKKKKNKSMFKKANKGGTGRFKHPLRVPGMRPGERCFICKSTDHVAKACPEKALWDKKKICLLCRERGHSLKNCPDKSEGNLMKFCYNCGESGHSLSKCPKPIENGGTNFASCFICNQQGHLSKNCPENKHGIYPKGGCCKVCGEVTHLARHCPNKGRQDLISSRDDDVNMEEHSQECPAVHHGGDDLEDDFVNEEEPKPAKSKKAKQSGSRPATGTGNDVKSASAKTKAKQAPKVVKFFG

SEQ ID NO: 10706 - protein, 69 aa, Zea mays
  Clone ID: TF_701161114H1.pep
CTSDYRYGMNAWRCQIWSQWRLEVRSRWRRRLRRRKLLQLWRVWAFCQRLPIKCSLNLLLGLFMFCGLF

SEQ ID NO: 10707 - protein, 644 aa, Zea mays
  unsure (1)..(644): unsure at all Xaa locations
  Clone ID: TF_ZmC951_447.pep
MTMSSQEVTAELLLGDGSNYKSWSVSIYNAFMSVDPDLRQIFRRSIFPSDLSKNPSNDELRCFSLNHRACSILVDSLSRGAYFAILSNGNDLIVDAHDLWNRIKEKYFVANCTTSTPYIACDANHSKGEDQERWTPNDESTSSTGLVSTNNKCFIANNDGGDKSHDEEEYEDDSEDESSSSQGTFSYIASTDINDRENETDDVEEEEIRRFYTHLNKEDKALLIKLLRRNKEQSEMLLRLEETLIKTNNSLEKMTKEHEELKCSHDVLVQRYDSILIEQNSNDDAISCVAQLKMENVMLEREVKXLSHDNLALGEEYDVLSYSHNKMIDDHIMLNVAHEVIIANLNSCEPHSRTSAHLNCISPCANPCCSKESQFLNKHQDAGSQKKLCGNKKQRQLRRRRIAQLSQDIHGRVVKKLEKGKTAASAELHKKIVPKDEEINMSLEKGKDLFNHVVCTDLFSMSSKSKKRRGKRRCFKCKKLGHLIASCPYKDKDEGTRSCFGCNNKDHMITSCPLLMNQARAPSKMTPTKENNKQQVSCQVERRFCYKCGEQGHLSKSIFHLTFKLVSLCDESDRVCLDQVSRWKREDEHEIEQSGLGYLCKSKTTDQAKDGGKKSFEVPSAREKAKEAEEPKAKGEEEGLQSQG

SEQ ID NO: 10708 - protein, 577 aa, Zea mays
  Clone ID: TF_ZmC18109_3.pep
MALTDHRRRNRAAPRLDHTSPRRARTAHGTRRTVRIRTPFATATETALIDLSLSLMILMFQMSDSGLSEDSTQKHYKMIKLGLRNLKQSLPEETLSKLLSSPYSLSYPYSTRSFVMDSLDLLPFFLVKISTNESETTKQKNQILFSGIKRQMSPQEQLITDSLIPNALSVDELQSIPKRKHHKDAQPQEETHECYIDGWTITCTQFQPHGRIRSKKQKGKRAKSQEITSRKACYQCGREGHYFRNCLEKCSLQITSEMKLPQSPDMEYEQKCRETSANNVKTTPPCNLSSRACFGCGDTGHLVNGCPKKDVEINKVQKKRQHPQTHASTKNKQRKETTGRISYAVTGTIPYDKAAIFGTLVIHTTIATVLYDPRTTHSLISAQFATKYGIFKCPLRSRKTISAPEGKMLVNYICPKMMNPNGNEVNGANDNIPTLTTTSEKNESQRYSMNGMKNNKRNRKMFGYMIRPPQPQAKVTKHTDSQTEESSQAQLYEIQTPNQPSSPVGQAKLTRKELKARGACYYCKNEGHLIRECPKKRLDRIKKKAAKHDLSNNSEDPPFYKYDDEGRLISIHFGAKK

SEQ ID NO: 10709 - protein, 251 aa, Zea mays
  unsure (1)..(251): unsure at all Xaa locations
  Clone ID: TF_LIB4977-008-R1-K1-B11.pep
LLSLSLRRLCGVPPPPPQALTPRRRRPRRLRQVPRDGPFIFVSLFAGRRAPARFRNDLCNNCKRPGHFARECPSVAVCHTCGLPGHIAAECSSKGVCWNCKEPGHMANSCPNEGICRNCGKSGHIARDCTAPPVPPGEVILCSNCYKPGHFREECTNEKACNNCRQSGHLARNCTNDPVCNLCNVAGHLARQCPKSDTLXERGGPPXFRGVGAPFHDVGAPFRGGFSDVVCRACNQIGHTSRDCMAGXFMI

SEQ ID NO: 10710 - protein, 181 aa, Zea mays
  unsure (1)..(181): unsure at all Xaa locations
  Clone ID: TF_ZmC519073_1.pep
MSSRSPPXDRRMRTERTLYRDAPYRRDRDGRRGPNRSASDLCNNCKRPGHFARDCPNVSVCHACGLPGHIAAECSSKDLCWNCKEPGHMANACPNEGICRNCGKSGHIAKDCTAPPMLPGEVKLCNNCYKPGHIAVECTNEKACNNCRKSGHLARNCTNEPVCNLCHVAGHLARQCPKSDE

SEQ ID NO: 10711 - protein, 208 aa, Zea mays
  unsure (1)..(208): unsure at all Xaa locations
  Clone ID: TF_ZmC6609_12.pep
MSSRSLPPKDRRMRTERTSYRDAPYRRDSRHGPSRFRNDLCNNCKRPGHFARECPSVAVCHTCGLPGHIAAECSSKGVCWNCKEPGHMANSCPNEGICRNCGKSGHIARDCTAPPVPPGEVILCSNCYKPGHFREECTNEKACNNCRQSGHLARNCTNDPVCNLCNVAGHLARQCPKSDTLGERXGGPPSXRGVGAPFHDVGAPFRGG

SEQ ID NO: 10712 - protein, 1715 aa, Zea mays
  unsure (1)..(1715): unsure at all Xaa locations
  Clone ID: TF_ZmC951_444.pep
MSGELAKKEMETGDKPATSHGKASSGESHNKEKMKEKKEKKTSSHKSHQSGDKIKKMRKVVYYETDTSSPSTSGSDAPSITSKRHERKKFSKIPLHYPRTSRHTPLLSVPLGKPPTFDGEDYARWSDLMKFHLTSLHKSIWNVVEFGAQVPSVGDEDYDEDEVAQIEHFNSQATTILLASLSREEYNMVQGLKSAKEVWDVLKTTHEGDELTKITKRETIEGKLGRFRLRQGEEPQDMYNRLKTLVNQXVRNLGSKKWDDHEVVXRYTLMTPEEVIGNFVSFEFMIKGSRKNNELDGPSTSEAQPVAFKATEEKKEESTPSRQPIDASKLDNEEMALVIKSFRQILKQRRGKDYKPRSKKVCYKCGKPGHFIAKCPISSDSDRGDDKKGRRKEKKRYYKKRGGDAHVCREWDFDESSSDSSDDEDAANIAVTKGLLFPNVGHKCLMAKDGKKKKVKSKSSTRYESSSDENASDEEDNLCTLFANLNMQQKEKLNELISAIHEKDDLLDTQEDFLIKENKKHVKVKNAYALEVEKCEKLSSELSTCHETIDKLRNENSNLLAKVDSIACNVSIPNLRNDNDDLLARIEELNISLASLRIENEKLLAKAKDFDVCNATISDLRTKNDILHAKVVELKSCKPSTSTVEHTSICTRXMLYSGRRPGIKDGIGFQQGGNVKLXAPPKKLSNFVKGKAPMPQDNEGYILYPAGYPEDKIRRIHSRKSHSGPNHAFMYKGETSSSRQPTHAKLPKKKTPSASNEHSFSFKTFDASYVLTNKSGKVYASGGSSWIIDSGCTNHMTGEKKMFSSYEKNQDPQRAITFGDGNQGVTVFRRSDDSIAFKGVLEGQLYLVNFDRAELDTFLIAKTNMGWLWHRRLAHVGMKNLHKLLKGEHILGLTNVHFEKDRVCSACQAGKQVGAHHPHKNIMTTDMPLELLHMDLFGPITYISIGGMERKNRTLLDMARTMLDEYKTSDRFWAEAVNTACYAINRLYLHRILKKTSYELLTEQVDLDEIGIEEAPCIALRNMSIGDVCPKESEEPPNAQDQPSFSTQASPPTQNEDEAQVDEIEDQANEPPQDDGNDQRGDANDQDEEDEEQRSPHPRVHQAIQRDHPIDTILGDIQKGVTTRSRVAHFCEHYSFVSSIEPHRIEEALQDSDWVVAMQEELNNFTRNEEEVYVEQPLGFEDSEYPNHVYKLSKALYGLKQAPRAWYECLRDFLITNGFKVGKADPTLFTKTLENDLFVCQIYVDDIIFGSTNESTCEEFSRIMTQKFEMSMMGELKYFLGFQVKQLQEGTFLSQTKYTQDILSKFGMKDAKPIKTPMGTNGHLDLDEGGGESISKGSNDSVFGDSCQRGRKCQRFIYNYTKSTVRNTVDYSGQEKLFGKIGQARTVRALAADRPQHQDDPRTEPMQKSKSTLQTVRRKKQGPSKTSRGPSGLRRGPSGPDVGGGIGFLGQNLVFAELVVTLAVPEAASDNADDAAKAAALAEKAKWDEADEACLSRLVNVLSNRLFDVYSSFTSAKGLWTELENEFSEVDNGNESFTTENYLNYKMVEGRSVMEQLQEIQLLVRDLVQYGCVLPDSFQVNAILAKLPPSWRDFVTSRRHMKKQMTLTELSATINVEERARSSNKPSQQLQAHVVEKGGDRKFQKKKKNSPQKNMNQPKSKKMKKKKEDFICYVCGVSEHTARRCKLRKGKGPPPQRKEGNVVVNSTLGYAPVTP

SEQ ID NO: 10713 - protein, 378 aa, Zea mays
  Clone ID: TF_ZmC1373_13.pep
LEAGRGGLEFGSLPAHPSPSLPSCPAGSPARRLCPDPGDMPRYDDRYGGTRLYVGRLAPRTRSRDLEYLFGKYGRLTVCGNPFRRIREVELKRDYAFIEFSEHRDADEARYQLDGRDVDGSRIVVEFAKGVPRGPGGSREYMGRGPPPGTGRCFNCGMDGHWARDCKAGDWKNKCYRCGERGHIERNCQNSPRSVRRERSYSRSPSPRRGRGRSPSYSRSRSRSRSYSRSRSLSGSPRGGRRDRDDRRSRSLSYSRSPVRSPPAKEKERSPTPGGSRSPRSRSPQDQVMSPPPKDNGDRNGSDRGDSPRGREDSRSRSRSPSGGNRSPAANGRSPSPRGDRGPSPMADRSPSPKGNGNNDGGDDDTGRGGSPTGSKSP

SEQ ID NO: 10714 - protein, 378 aa, Zea mays
  unsure (1)..(378): unsure at all Xaa locations
  Clone ID: TF_ZmC1373_24.pep
NSDPSHGPTTSIPFPSLPSCPAGSPARRLCPDPGDMPRYDDRYGGTRLYVGRLAPRTRSRDLEYLFGKYGRIREVELKRDYAFIEFSEHRDADEARYQLDGRDVDGSRIVVEFAKGVPRGPGGSREYMGRGPPPGTGRCFNCGMDGHWARDCKAGDWKNKCYRCGERGHIERNCQNSPRSVRRERSYSRSPSPRRGRGRSPSYSRSRSRSRSRSYSRSRSLSGSPRGGRRDRDDRRSRSLSYSRSPVRSPPAKEKERSPTPGGSRSPRSRSPQDQVMSPPPKDNGDRNGSDRGDSPRGREDSRSRSRSPSGGNRSPAANGRSPSPEGAXRGDRTPSPMADRGPSPMADRSPSPKGNGNNDGGDDDTGRGGSPTGSKSP

SEQ ID NO: 10715 - protein, 385 aa, Zea mays
  Clone ID: TF_ZmC1373_28.pep
LGTSRPAGTASGFSSPRLRIRIPPTTSIPFPSLPSCPAGSPARRLCPDPGDMPRYDDRYGGTRLYVGRLAPRTRSRDLEYLFGKYGRIREVELKRDYAFIEFSEHRDADEARYQLDGRDVDGSRIVVEFAKGVPRGPGGSREYMGRGPPPGTGRCFNCGMDGHWARDCKAGDWKNKCYRCGERGHIERNCQNSPRSVRRERSYSRSPSPRRGRGRSPSYSRSRSRSRSRSYSRSRSLSGSPRGGRRDRDDRRSRSLSYSRSPMRSPPAKEKERSPTPGGSRSPRSRSPQDQVMSPPPKDNGDRNGSDRGDSPRGRENSRSRSRSRSPSGGNRSPAANGRSPRSPRGDRTPSPMADRSPSPKGNGNNDGGDDDTGRGGSPTGSKSP

SEQ ID NO: 10716 - protein, 225 aa, Zea mays
  unsure (1)..(225): unsure at all Xaa locations
  Clone ID: TF_ZmC31167_2.pep
MTSSRSKSRSHSRSRSRSRSRSPQRRDRLRSERAPRRSRSHSRSRSPYRRRERRGYKDLVCKNCRRPGHFAKECPSAPTCNNCNLPGHFAAECTSKTVCWNCKEPGHIASECKNEALCHTCNKTGHLARDCPTSGANVKLCNKCFKSGHVAVDCTNERACNNCRQPGHIARECKNDPVCNLCNVSGHVARVCSKXDSGFNTRNTYRVAPFRGGEARGGRKRRVDQ

SEQ ID NO: 10717 - protein, 1752 aa, Zea mays
  Clone ID: TF_ZmC951_428.pep
MSGELTKKEMETGDKPATSHGKASSGESHNKEKKKKEKKTSSHKSHRSGDKIKKMRKVVYYETDTSSPSTSGSDAPSITSKRHERKKFSKPPTFDGEDYARWSDLMKFHLTSLHKSIWNVVEFGAQVPSVGDEDYDEDEVAQIEHFNSQATTILLASLSREEYNKITKRETIEGELGRFRLRQGEEPQDMYNRLKTLVNQVRNLGSKKWDDHEVVKVILRSLIFLNPTQVQLIRGNPRYTLMTPEEVIGNFVSFEFMIKGSRKINELDGPSTSEAQPVAFKATEEKKEESTPSRQPIDASKLDNEEMTLVIKSFRQILKQRREKDYKPRSKKVCYKCGKPGHFIAKCPISSDSDRGDDKKGRRKEKKRYYKKKGGDAHVCREWDSDESSSDSSDDEDAANIAVTKGLLFPNVGHKCLMAKDGKKKKVKSKSSTRYESSSDDNSSDEEDNLRTLFANLNMQQKEKLNELISAIHEKDDLLDSQEDFLIKENKKHVKVKHAYALEVEKYEKLSSELSTCHETIDNLRNENANLLAKVDSNVCNASISNLRNDNDDLLTKIEELNISLASLRIENEKLLAKAKDFDVCNATISDLRTKNDILHAKVVELKSCKPSTSTIEHTSICTRCRDVDVNAIHDHMALIKQQNDHIAKLDAKIAEHDLEDEKFKFARSMLYRGRRPGIKDGIGFQQGGNVKINAPPKRLSNFVKGKALMPQDNEGYILYPAGYPESKIRRIHSRKSHSGPNHAFMYKGETSSSRQPTRAKLPKKKTPSASNDHDISFKTFDASYVLTNKSGKVYASGGSSWIIDSGCINHMTGEKKMFSSYEKNQDPQRAITFGDGNQGVTVFRRSDDSIAFKGVLEGQLYLVDFERAELDTCLIAKTNMGWLWHRRLAHVGMKNLHKLIKGEHILGLTNVHFEKDREKSHTQETLKGFLRRAQNEFGLRIKKIRSDNGTEFKNSQIEGFLEEEGIKHEFSSPYTPQQNGVVERKNRTLLDMARTMLDEYKTSDRFWAEAVNTACYAINRLYLHQILKKTSYELLTGKKPNISYFRVFGSKCFILIKRGRKSKFAPKTVEDFLLGYDSNTRAYRVFNKSTGQVEVSCDVVFDETNGSQVEQVDLDEIGIEEAPCIALRNMSIGDVCPKEFEEPPNAQDQPSSSTQASPPTQNEDEAQVDEIEDQANEPPQNDDNDQGGDTNDQDKEDEEQRPPHPRVHQAIQRDHPVDTILGDIHKGSASQTGKQVARAVRGAGSTAPPWGGSTGLGQLDQSADVDPRAIDLAMRIAERMFLKMKEDEAKNIIEEEENDRWRPNDESTSSQGSSFKSTSHMCFVANESDSESESEDEEEHESDSEDEDDLQKFFAQLSKKNRMSLLKLMKRAEEQKEMLHKQEDILIEKIKDLEKLTKEHEKLKCSHDDLVQRYEDISIEQIKAINHSSYIAQLENKNAMLKNTVEKLNIENLALQEKHDMLVCSHNKFMDSHIMLEMAHEVVLTNFKSYKPHTCTCTQVETTLSCANNCCYQASQSSIELEISGISDISITQENKELKEEVGMLRRSLTRLKGKCHAQPSQDNRDNMVKKLEKGTTVACTKPLQKNTKLSKKGMSKIHGEKINAHMICSNNVPMCFNKERSKRSDRRCYGCKEKGHEIDSCPHMKNQDLARSRKMTIKKDESKRQKHCKDKHHICYNCREKGHLFKVCPKGKTPKPNLSIHSNMLRRPKFDSCARKVMSSPHSRTKAIWVPKSLLANLDGPIMRWVPKCT

SEQ ID NO: 10718 - protein, 660 aa, Zea mays
  unsure (1)..(660): unsure at all Xaa locations
  Clone ID: TF_ZM4989.C10.o4.fg.pep
MACYLEAVDLGVWRVTRDGMKPPKNPEKPTTSEEKEIHLNARAKNCLYESLSMDIFNQVFTLKTANEIWLKLHELHDGTSNVREQKHCLVLNEYNTFAMRDDELVRDMYSRLNLIINELNSIGINKLGDADIVRKIISLLPQQRYGSIITILHNMEDLSNMTPTIVIGKIAAFEMSRKMCRGEEPTSSRPYAFAXEESDDDEDNQPCTSSSEDEQTIRRVGKVMRMIRKINLMGVPLQVEDLLFNIDRKKQRKRGCFACGEKGHFRDNCPTMAEPKKERSKGKALTSVRTWDDSSSEDEPPRTRSHRSSSRSSRSSHKCLMARGNKSIPSSGDESSSDDEGEGKASLDELAEAVEFFQDVCTKQKAQLKTLKNKLVSSQNDYKGLLEKFETFANLNSELSTKIELLESCAPSTATDDSLIKKNEKLKAKLASSQEAIENLLEKMEILSIHNNELTTKLENIGSTPGASLVKIPEIIKKDASTSCFDLIDDSNPCNQVLVENIVVETCSDEVAKENEQLRQEVARLGKALYDKKGKAKQIQPPQDNTTAGVNKPMEGETVICRLCHKEGHKSFQCKAMTGDKQRQKLKQKPSIKISNTYIKKVDKKDATPYLIKKKKNGKVIAIKANKQANKGKGAKRIWVPKEIISTMKSTKKVWIPKGK

SEQ ID NO: 10719 - protein, 210 aa, Zea mays
  Clone ID: TF_ZmC65805_1.pep
SSGKALRKDKPSQDVEGTSVKESKPSAGEDDSSKICYKCKKAGHLSRDCPESTSEVDRNDGSISRSRDDTGTNTAPAGGNSPMDEDDVQEIGDEEKEKLIDLDYLTGNPLPNDILLYAVPVCAPYNALQTYKYRVKITPGTAKKGKAAKTAMSLFLHTPDATNREKELMKACTDPELVAAIVGNAKITAPGLTQLKQKQKQKGKKSAKQN

SEQ ID NO: 10720 - protein, 514 aa, Zea mays
  Clone ID: TF_ZmC12531_2.pep
MAQRWRSRARWDSDLDEDGSPPFRKPRRGGSDEEDDEVGNEDLSLEIIARAQRKRRWASCGGVTGFANLLSVSSGDDEDAVVELAEADEPRRKQKKRQHWKQRKRQRKEATAAAGAAVDEEEKAVCSTQEEPIGTAESVLTENGADAPASDNMVLRKLLRIPRYFDPGETLLETCFNCSEEGHVAANCPLEKRKKPCFVCGLFGHNAKQCTQGQDCFICKKGGHMAKDCPDKHRRNDHQSTLCLKCGEIGHDMFGCTNDYPPDDIEKIRCYVCNQKGHLCCSDFSDDCPKQISCYNCAQSGHSGLGCAKRRETSAVTTPTLCFKCGEEGHFARGCTKNAKSDRSKGKSSSHIQRKEKWKKASSSARSAPYDARKTSKRKSPHLEERVGTPRHKPKSRGGWTGGDDLPLKKYKSNGWGSPSTPKKSYANHQFLSGCDYLTPQPSRRHNYHGTMSSPNHQFLSGCDYFTPESSRGHSHGTMSPNWNYSPSARKHGFSSSRFAAAAASNTHVRFGRN

SEQ ID NO: 10721 - protein, 220 aa, Zea mays
  Clone ID: TF_ZmC12531_3.pep
MAERWRSRARRDPDLDEDASPPSRQPRHSGGDEEDDELGNEDLSLEIVARAQRKRRGESAGGVPVFADLLSVSSADEEGAVVELDEADEPRRKQKKKQRRKQRKKHRKETTEAAAGAAVEVDENAVCSTEEGPIGTAESVLTENGADAPASDNMVLRKLLRIPRYFDPGETLLETCFNCSEEGHVAANCPLEKRKKPCFVCGLFGHNAKQCTQGQDCFIW

SEQ ID NO: 10722 - protein, 261 aa, Zea mays
  Clone ID: TF_ZmC6609_1.pep
MSSRSPPPKDRRMRTERTSYRGAPYRRDSRHGPSRFRNDLCNNCKRPGHFARECPSVAVCHTCGLPGHIAAECSSKGTCWNCKEPGHMANSCPNEGICRNCGKSGHIARDCTAPPVPPGEVILCSNCYKPGHFREECTNEKACNNCRQSGHIARNCTNDPVCNLCNVAGHLARQCPKSDTLGERGGPPPFHGVGAPFRGVGVPFRGGLSDVICRACNQIGHASRDCMAGAFMICHNCGGRGHTAYECPSVSLIERFPPRRF

SEQ ID NO: 10723 - protein, 261 aa, Zea mays; identical to SEQ ID NO: 10722
  Clone ID: TF_ZmC6609_10.pep

SEQ ID NO: 10724 - protein, 300 aa, Zea mays
  Clone ID: TF_ZmC6609_2.pep
SARGPRTGLLPSAASPVLHSCIRSRFTPSGRPPRSFSPPSLSLRRLGRLPPPPYARSRGPRHSYSSVSSPGDARFRNDLCNNCKRPGHFARECPSVAVCHTCGLPGHIAAECSSKGTCWNCKEPGHMANSCPNEGICRNCGKSGHIARDCTAPPVPPGEVILCSNCYKPGHFREECTNEKACNNCRQSGHIARNCTNDPVCNLCNVAGHLARQCPKSDTLGERGGPPPFHGVGAPFRGVGVPFRGGLSDVICRACNQIGHASRDCMAGAFMICHNCGGRGHTAYECPSVSLIERFPPRRF

SEQ ID NO: 10725 - protein, 261 aa, Zea mays; identical to SEQ ID NO: 10722
  Clone ID: TF_ZmC6609_5.pep

SEQ ID NO: 10726 - protein, 877 aa, Zea mays
  unsure (1)..(877): unsure at all Xaa locations
  Clone ID: TF_ZmC11384_1.pep
MEPQLTPGAVAAVSAHADGNGTLQPVLQVVDVRMVNNAKNPSAERFRMVLSDGEHTMQSMLATAENARVRDGSIQKGSIVHLLECTCSTIQSRRIIIVIKLDVLQSECAIIGNPRPYEMRNQPNEQGTNIPANAAQANTGTYSSGPGPXDHLLLLNEHKLLIMYHTVVFIRCLMVMASLRPCVQDANHPLLCLCVKLELCISTSXMFSSYKSSLLCQKKKNSHQNQRFAVPSMAGGSGAPGNTYGQPAQSFYQQPPPGHMNRTPVSKNDAYRLVPLAQLNPYLDKWTIKVRVTAKTDLRFYNNARGAGKVFSFDLLDEQRGEIRATCFNTQADQFFNLIEVDKVYLISKGSLKPAQKKFNSLNHEYEISLDSRTSIEVCADDDSNIPRQQYNFRKISEIENIEKDAILDLIGIVTSVGPSVTFIRKDGVETQRRTLELKDMSGRSVQLTLWGKLCVAEGNQLQSLCDSGLNPVLALKGARVTDYSGRSVSSAGSTQLKIDPEIPEAESLRRWYATGGKTAACVSLSVVSMGGTCVRKSIAQIKDENLGQLEKPDFITVKAAISHLIADNFCYPACTIDVNGRMCNKKVTDNGDGTWRCDKCDQSLPNCEYRYVLNGQIQDHSGVTNFTAFEDAAKVMIGHSGHELNNISVEDSERFAEILQAARWQQFLFTLKVKEEIYNDAPQVKCNITKAEKLDPAIESSYLLGVINGLLQDDTGSSSGAQGAMAYNAGISNTGAGRSVPTTNSAYTTNLSGPRYGESANQLAQQESTYTGVTTPVSAARNVQQTCVSCGSSGHNVQNCPAGTYRQQAAASAASSYGSSQPRNGLCFKCNQPGHFANSCPLLAPAPQQQQQQYRSGGAPSGGYGRQQPYVGATNY

SEQ ID NO: 10727 - protein, 1031 aa, Zea mays
  Clone ID: TF_ZM3971.C7.o8.fg.pep
MDCYNFGELGHLAHQCNKPKKNKFKGKKEDDNDDEKKEKRFFKRKDGKHKRFHKKKNGKAYIVGDWLTDIESSSGSSSSEEENDEKVVAIIGDFSRPPPSPSSTSHLCLMARGERKVQNDNDIDDSDSDSDDEFASPSYDELTDLLKEYTQIIRKSKSKYAKDKCEKLNEANRELKDILVKIKEDYTKIKFDHDNLLVENELLSCNTHEAINHVVKIDVATSCDDLSQGDQTSLHDELTEKVEVLTLDNQKLKRYLTDATTRGKVAIENNDFNNELAVDNERLKNEVKKLKSENEHLATSVQKFNKGQYLQNELFMNTVIKNNKSGIGYNSFVQKKAATQYKPKQTHKPIKCFECGKEGHFAHNCKAKPPTPLPKHLRPFAFNAHYVLRKVANGKVNYKTGGSHWVIDSGCTQHMTCNPRMFTSLDENVDGQDKITFGDNSKGKVQGLGKVAISNDLSISNILLVAPLSFNLLSVDVIVSKMDDESMVFKGFRYNNLYLVDFTPEDVDLRTCLFTKASLGWLSHRRLAHVGMSTLKKVLKKDMVRGLKDVVFEKDKPCSALIVDDFSRYTWVFFLHDKSEVASIFKKFAKKAQNEFYCKIKKIRSDNGKEFDNTNIHEYCDEIGIKHEVSATYTPQQNGVVERKNRTLITLARTMIDEYNTPERFWAEAVNTACYASNRLFPHRLLAKTPYELLNGKKPDVSFFRVFGCKCYIYKKRHHLGKFQRRCDIGFLLGYSSKSKAYRVFNHATGVLEETYDVEFDETNGSQGALENLDGVGDEPLREAMKNMPIGAIKPKEDEEEVQNIDMPSSSSVPQDDEKDERHANEDTFVSHEQARDPDWVNAMHEELNNFTRNQVWTLEKPPQDARIIGTKWVFRNKQDDEGVIVRNKARLVAKGFSQVEGLDFGETFAPQPPGFEDPRYPNHAYRLSKALYGLKQAPRAWYERLRDFLIEKGFKIGTIDTTLFTKKHNSDIFICQVYVDDIIFGSTNDYHYKEFGELMSKGFEMSMIGELTYLFGFQVKQMKDGNFLSQ

SEQ ID NO: 10728 - protein, 179 aa, Zea mays
  Clone ID: TF_jC-zmshLIB3587P037h11b1.pep
AACAEARHHGRPQEADGELVRARRVQLLRRVLRAGARRPLPAHRGLRGPQPRRPRRDAPRGAGHIAAECSSKGTCWNCKEPGHMANSCPNEGICRNCGKSGHIARDCTAPPVPPGEVILCSNCYKPGHFREECTNEKACNNCRQSGHIARNCTNDPVCNLCNVAGHLARQCPKSDTLGE

SEQ ID NO: 10729 - protein, 255 aa, Zea mays
  Clone ID: TF_ZmC515769_1.pep
MPRYDERDRYGGNTRLYVGRLPSRTRTRDLEDLFGRYGRVRHVDMKHEFAFVEFSDPRDADEARYNLDGRDFDGSRMIVEFAKGVPRGQGGGGDRDRGRGGDREYMGRGPPPGSGRCFNCGIDGHWARDCKAGDWKNRCYRCGDSGHIERDCQNSPKNLKRGKSYSRSPSPRRGRVRDRSYSRSRSRSYSRSVSPRRDERRSRSPRDSRSPRRSPRDSRSPRRSPRDSRSPMKSPRGSRSPMRSPRDSRSPMRSA

SEQ ID NO: 10730 - protein, 1571 aa, Zea mays
  Clone ID: TF_ZmC951_402.pep
MKQWRDDVDQLLSMVHSTSTRLKTRSSRRQHEAPASVRSPSVRGAQTNDLRAELNRRRAGEDAWVSLERARERRKNIDGRDLNQDFAAIAPQTPMGTRSQTGVPLAVYSWEELFARFVANFASAYQKHGVEAHLHAVRQEPGETLRKFISRFTKVRGTIPRISDASIITAFRQGRQMPNDYLSELAVGVDRWRAVGAPSNDVRWGWTSSRFYGDDFPYWKIRMEAYLEAIDIGVYKAATQGFPAPRDPTNLAYIVGDWLTDIESSSGSSSSEEENDKKVAAIAGDFSSPPSSPSSTSHLCLMARGERKVQNDIDIIDDSDSDSDEEFASPSYDELADLLKEYTQIIRKSKAKCDKKVANGKVNYKTGGSHWVIDSGCTQHMTGNSRIFTSLDENVDGQDKITFGDNSKGKVQRLGKWVNSVILEFNAYSLQQRRLAHVGMSTLKKVLKKDMVRSLKDVVFEKDKPCSACQAGKQVANTHPTKAFMSTSRPLELLHMDLFGPTNYIKKIRSDNGKEFDNTNIHEYCDEIGIKHEVSATYTPQQNGVVERKNRTLITLARTMIDEYNTPERFWAEAVNTACYASNRLFPHRLLAKTPYELLNAKKPDVSFFRVFGCKCYIYKKRHHLGKFQRRCDIGFLLGYSLKSKAYRVFNHATGVTNGSQGALENLDDVGDEPLREAMKNMPIGAIKPKEDEEEVQNIDRPSSSNVPQDDEKDERHANEDTFVSHEQARIQAEDVDAPGSSSQVVDRRNSSLLQAHPQNQIIGSPSQGVITRSHRHASFIEHHSFVSCVEPTCIDEALQDPDWVNVMHEELNNFTRNQVWTLEKPPQDARIIGTKWVFRNKQDDQGVIVRNKARLVAKGFSQVEGLDFGETFAPVARLEAIRILLAYASCYDIKLYQMDVKSAFLNGFINELVYVEQPPGFEDPRYPNHAYRLSKALYGLKQAPRAWYERLRDFLIKKGFKIGTIDTTLFTKKHNGDIFICQEFEMSMIGELTYFLGFQVKQMKDGNFLSQEKYTKDLLKRFNMEKCKPIKTPMPTNGHLDLDEGVTLPAREPSPVLPGFSPLVRQVRMPRTKNVSAPGGGDDEDPRRPFRQVKGKTMYLEQQEGRRKRRMDRAARAAAATATEQAELGDQPQTPSDQIAYRVRRLASRPRSSTPITASTPPPTLPAPVTLLRHPPPPLHHLPLLLLLLPLLLLLSHLLASGSAMRLSGTGTSVQTRTHGDLATGSEGHCCRRSLQHQDSGVLLQGPDVCTDCSACAPAFGPSRFSASPGADSEVHLSYLPGLLTLLTTSGRYVEEWVRVFYATVWIDPDHHWMRFRFEREDVTIHASQIRQLFGFHESSTRLHNLCYGTSDPPRHPHGGVAPDGSRRSPADFTTAAKFLYQLMRRTLLPRMGYREAATHIQLWLLGALVSHSEFDVVDFLICEIEDTVLDGLRARRQLPYAHYLCHIFAQLIRPPQFQGTLEASHLLFGSYRPAPEDPVPAPAPVFDTQAEDTALHQFEAQDTTVDDDDDNDDDDFGIPPPPPMLPRSHDHEAGSSNGAAPAAPPAIDPALAEILQTLTQQQAHLAAVQ

SEQ ID NO: 10731 - protein, 344 aa, Zea mays
  Clone ID: TF_ZmC12531_1.pep
HCVTSTCDQRIPRYFDPGETLLETCFNCSEEGHVAANCPMEKRKKPCFVCGLFGHNAKQCTQGQDCFICKKGGHMAKDCPDKHKRNDHQSTLCIRCGETGHDMFGCANDYPPDDIEKIRCYVCNQKGHLCCSDFFDNSLEQVSCYNCAQSGHSGLGCAKQRREASAVTTPTLCFKCGEEGHFARGCTKNAKSDGPKGWSSPHSQRKGRWKNDGKSPSHIRRKEKWKKDSSARSAPHDACTTSKSNSPSFEERMGASNHKSKWRGGWTGDDDLPSKKYKPNGWGSPATPKRSYTNHQYLSGGGDYFTPQSSRRHNHGTASPGARKHRFSSSIFAASNTHVRFKRS

SEQ ID NO: 10732 - protein, 118 aa, Zea mays
  Clone ID: TF_ZmC83001_1.pep
LDDAAMVKKLLDTVPDRLFPVVAGIEQFCDVETMPFEEALGRLKAFDERSRRRTHAGGERRDDQLLLTEAEWKARKKKKSTIGKCFNCGNRGHFARDCPKPKKEEALFANAEEEATLL

SEQ ID NO: 10733 - protein, 261 aa, Zea mays
  Clone ID: TF_ZmC6609_3.pep
MSSRSLPPKDRRMRTERTSYRDAPYRRDSRHGPSRFRNDLCNNCKRPGHFARECPSVAVCHTCGLPGHIAAECSSKGVCWNCKEPGHMANSCPNEGICRNCGKSGHIARDCTAPPVPPGEVILCSNCYKPGHFREECTNEKACNNCRQSGHLARNCTNDPVCNLCNVAGHLARQCPKSDTLGERGGPPPFRGVGAPFHDVGAPFRGGFSDVVCRACNQIGHTSRDCMAGAFMICHNCGGRGHMAYECPSASLMDRFPPRRF

SEQ ID NO: 10734 - protein, 94 aa, Zea mays
  Clone ID: TF_ZmC218_59.pep
DAWGGGGGGGGGCFKCGEPGHMARDCSSGGGGYGGGGGGGGGGCYNCGQAGHMARDCPSGGGGGGGRFGGGGGGGDRSCYNCGEAGHIARDCPT

SEQ ID NO: 10735 - protein, 508 aa, Zea mays
  Clone ID: TF_ZmC71_35.pep
MARRRSQKNKKTPPTNATQKEVTLEILLDDCSNYDSWSTSVINAFRTIHPQLEQIIDKSIFPSSFNGKINSEEDQRCYRLNYLAFDILNNSLSKEDYRAFISNYDESIPDAHDIWTRIKIKFDESKHNSSFNASTSFSFCDTNPCKEEGENERWRPNDESTSPKMCCVANENDSGSTNEDEEEERSFVQLYARLSQEDKAVMLKLLERAREQSEARQRLEDILSMKMQHFDELTKEHEELKCSHVDLVQSKSSFEQEFAGTNDDTYQKLKEENERLKKSLTQLKGKCIARPSQDNRDHMVKELETGTTVACTTSLEENVKDLRIAKRRKQKRKFNTSSKSLNLASTKGNIQGNDQATLHTKINKKYNECFEEGHLIRSCPYIKNGLIINKDDRLCFKCSKKGHLVKSCPYLKQKCMMLEKKVFTNHVASNKQRKKKSSKLGKRLCYTCRKKGHQCKDCPIGKNPTPNLSFDSYITRQPKIVTCARKELKNHHVRKIKAYNMEDCQRMI

SEQ ID NO: 10736 - protein, 262 aa, Zea mays
  Clone ID: TF_ZmC17063_1.pep
QSVPNTGGGGQIGGGGDGGGGGGGGYVNAGVEVEDKACPCGVGSCLVLTSNTPKNPGRKFYKCPMRDGGCNFFEWCDAPSPAPANARNNMVVHSETSATDMLCPCSAGTCLILTTKTGKNSISGARRGQITQGGGGGSCGFFKWCDELQPRVGAPLQASAQYQADSMPSIQNPSQRSSSSCFKCGQENHWARDCPNQPSDPYPDKGGRPVAPAGSPGACYNCGRSGHWSRDCPTSNSGGGGGTGTSRARSSSALSSWNSQRY

SEQ ID NO: 10737 - protein, 248 aa, Zea mays
  Clone ID: TF_ZmC17063_2.pep
SQNGGSGDGSSSGSGGYVIAGVEVESKACPCGVGSCLVLTSNTPKNPGRKFYKCPMRDGGCNFFEWCDAPSPAPANARNNMVIRSETSATDMLCPCSAGTCLILTTKTGKNVGRQFFCCPLNQGGGGGSCGFFKWCDELQPRVGAPLQASAQYQADSMPSIQNPSQRSSSSCFKCGQENHWARDCPNQPSDPYPDKGGRPVAPAGSPGACYNCGRSGHWSRDCPTSNSGGGGTGTSRARSSSALSSVE

SEQ ID NO: 10738 - protein, 101 aa, Zea mays
  Clone ID: TF_21626426.pep
TRPDGGHLPFTIDPGYHDLVCYNCGEPGHFVGICSKPKICFICGIPGHHMNECPAWKVLTPFRSAKYSRRCNTHFVRKKNLKGNYIKKKKKKKKKKKKKKK

SEQ ID NO: 10739 - protein, 139 aa, Zea mays
  unsure (1)..(139): unsure at all Xaa locations
  Clone ID: TF_LIB4719-018-Q1-K1-B4.pep
FCRDFACKNCRRPGHFAKECPSSPMCNNCNLPGHFAAECTLQTVCWNCKESGHIASECKNEALCHACNKTGHLARDCPTSGANVKLCNKCXKSGHIAVDCTNERPCNNCRQPGHIARECKNDPXCNLCNVFGHVARVCP

SEQ ID NO: 10740 - protein, 71 aa, Zea mays
  Clone ID: TF_jC-zmXLIB3526P093be10b1.pep
PPNLLLPPLASAWAVPAHVAGLPSVVAPATTTTASTALAAAAAGAVSGHVARLAALEAATIAAASSAPRVR

SEQ ID NO: 10741 - protein, 312 aa, Zea mays
  Clone ID: TF_ZmC1068_2.pep
MAAPPPTGCFKCGRPGHWSRDCPSSASTNPPAAADAPTNPSHLSGAASRFNAKPRPPAAAVDGEDGKGKKKKERATRPKLTPDLLLSDGGIGFVLRYFPKAFKPRARPGHEVDDLANLIKLYADWHSRLIPYYSFEQFVRKLEKLGAGNRVRRCVSELRDRVARGGDPTLLHEPPVHEDMPLPGGGEHGTEDPVLGTDAPLSDNHGTGPVVQEDADPPMESNDVVDPMEEDLLNEIYENTADIPAGEGASKESPEQSAPKEANSLAQEPQDGDVPKPAKVELTEAQKARMEANRLKALERAAARARASQQPT

SEQ ID NO: 10742 - protein, 238 aa, Zea mays
  Clone ID: TF_ZmC4152_2.pep
PTRPPTRPGFSQPPSSRSLISCEQGWVTLQLTREPGYGRGFFSPRSVTGFLSDVCSAAADEVGKIYITADENVQGAVFDLPEEIAKDLLTMEVPPGNTLTSGFQLPALQDDSPATDSYGRFSNDRGSRNRRSRGGGASRGRGGWDTDSEDRYRRGGRSLRSDNDSWSDDDWSGGGRKSNRSSSSFGGRSSSYGSRGSPSPSFGVRSSSLGGRESSRSFSGACFNCGESGHRASDCPNK

SEQ ID NO: 10743 - protein, 146 aa, Zea mays
  unsure (1)..(146): unsure at all Xaa locations
  Clone ID: TF_ZmC4152_4.pep
LFHYEIAKXIAETFVHRXGRTXGGAGKAGTAILMFTSSQKRTVMSLERDVGCKFEFISPPSIEEVLESSAEHVIATLRGVHPESTQYFLGAAEKLTEELGPHALASALAHLSGFSQPPSSRSLISYEQVRSDTTKLHMHCSILYLA

SEQ ID NO: 10744 - protein, 327 aa, Zea mays
  Clone ID: TF_ZM4871.C1.o2.fg.pep
METWKSQEITARNACYLCGREDHYLRNCPKKSSLPNIPEIKLSQSSDIEYEQKCTETSINVMKATQPSNLSSRACFGCGDTGHLINGCPKKDVEINKVQKKRQHPQTHASTKNKQRKETNGKISYVVTGTIQSDNAVIFGTLCPLRSRKTISAPEGKMLVNYICPKMMNPNGNEVNGANDNIPTLTTMNEKNESQRYSMNGMKNNKRNRKMFGYMISPPQPQAKATKHMDTQTEESSQAQLYEIQTPSQPSPPVGQTKLTRKELKARGACYYCKNEGHLIRECPKKRLDRIKKKAAKHDLSNNSEDPPFYKYDDEGRLISIHYGAKK

SEQ ID NO: 10745 - protein, 98 aa, Zea mays
  Clone ID: TF_ZmC3007_2.pep
GGGDRGYGGGGDRVYGGGGDRGYGRGGGGGYGGGGGGGRGCFKCGEEGHMARDCSQGGGGGGYGGGGGGGYGGGGGGRECYNCHQEGHISRDCPEKMR

SEQ ID NO: 10746 - protein, 66 aa, Zea mays
  Clone ID: TF_LIB3969-006-Q1-M6-F9.pep
MPKHYRPAGKKKEGNAAKYITRTKAVNYLQVSLAIFRFVTISQLILYIAGEPSSRRRIMLNKLVGC

SEQ ID NO: 10747 - protein, 109 aa, Zea mays
  unsure (1)..(109): unsure at all Xaa locations
  Clone ID: TF_LIB4729-111-A1-K1-F3.pep
MTSSRSKSRSHSRSRSRSRSPQRRDRLRSERAPRHSRSRSRSRSPYRRRERRGYKDLVCKNCRRPXHFAKECPSAPTCNNCNLPGHFAAECTSKNXCWKLQEPGHIASE

SEQ ID NO: 10748 - protein, 267 aa, Zea mays
  unsure (1)..(267): unsure at all Xaa locations
  Clone ID: TF_ZmC172453_1.pep
FFFFFSWRSIFGSGVKVQATSSFRLDVSTLSMEDITGRLKAAEHADDASPPSTGGKLYLTEEQWEARWKEKHRNDAGASKSGNHRRRLRRGATSXGERTGAGKGRDQCRSCGKTGHWARDCPSKSNKGKAYVAQAEEEEGTLLLARVSSVQLRPLCGGDRIVGRIPGAGGFSGSDPPTGDPGRGIGGAAGTTVAASGPVPGGGGADRSSPEAGGLAPAGEGGAGSTTSNPSPSAGGVAQCCGGASDPAASAGEATRRDGAAARTSGG

SEQ ID NO: 10749 - protein, 201 aa, Zea mays
  Clone ID: TF_ZmC18109_12.pep
ASQNNTLNKIVDEQTFKTQKDAQPNQQTSDLGTCCCCEYYGIPCRQISINESETNALSVDESQGIPKRKHHKDAQPQEETQECYIDGWTITCTQFQPRVRIRSKKQKRKHGKSQEITSRKACYQCGREGHYFRNCPEKSSLQITSEMKLSQSSDMEYEQKCRETSTNNVKTTPPCNLSSRACFGCGDINHLVNSCLREPCV

SEQ ID NO: 10750 - protein, 762 aa, Zea mays
  Clone ID: TF_ZmC4152_1.pep
NSAPGHFLSPLLRSSPLPPMASLTLPALALALSNPGAVRLRAAAFRCWALRRRGWAAAGALASPNSVLSEHAFKRLQLGSDDEDGEGPYGSDADEGFEAGEGDNEELAIARLGLPDELVATLEKRGITHLFPIQRAVLIPALEGRDLIARAKTGTGKTLAFGIPMIKQLIEQDDGRITRRGRTPRVLVLAPTRELAKQVEKEIKESAPKLGTVCVYGGVSYNVQQNALSRGVDVVVGTPGRIIDLINGGSLQLGEVQYLVLDEADQMLAVGFEEDVETILQQLPAGRQSMLFSATMPSWVKKLSRRYLNNPLTIDLVGDQDEKLAEGIKLHAIPLTATSKRTILSDLITVYAKGGKTIVFTRTKKDADEVSLALTNSIASEALHGDISQHQRERTLNGFRQGKFTVLVATDVAARGLDIPNVDLIIHYELPNDPETFVHRSGRTGRAGKAGTAILMFTSSQKRTVKSLERDVGCNFEFISPPSIEEVLESSAEHVIATLRGVHPESTKYFLGAAEKLTEELGPHALASALAHLSGFSQPPSSRSLISHEQGWVTLQLTREQGFGRGFFSPRSVTGFLSDVCSAAADEVGKIYLTADENVQGAVFDLPEEIAKDLLTMELPPGNTLTKISKLPALQDDGPATDSYGRFSNDRGSRNNRRSRGGGASRGRGGWDTDGEDRFRRGGRSLRSDNDSWSDDDWSGGGRKSNRSSSFGSRSSSYSSRGSPSFGGRSSSFGGRESNRSFSGACFNCGESGHRATDCPNK

SEQ ID NO: 10751 - protein, 256 aa, Zea mays
  Clone ID: TF_LIB4740-106-A1-K1-D8.pep
FPCPPRSLSRCDDCVEYRPRPLTPRRRRPRRLRQVPRDGPFIFVSLFAGRRAPARHIAAECSSKGVCWNCKEPGHMANSCPNEGICRNCGKSGHIARDCTAPPVPPGEVILCFFCYKPGHFREECTNEKACNNCRQSGHLARNCTNDPVCNLCNVAGHLARQCPKSDTLGERGGPPPFRGVGAPFHDVGAPFRGGFSDVVCRACNQIGHTSRDCMAGAFMICHNCGGRGHMAYECPSASLMDRFTPSPVSEGRTIQ

SEQ ID NO: 10752 - protein, 320 aa, Zea mays
  unsure (1)..(320): unsure at all Xaa locations
  Clone ID: TF_ZmC31167_4.pep
MAYTVTRSYTDQVRPFCQYAATQRFLPTLTPSGQRPRTPSVPPRSPPVTNAHRASSLVAATGRPSLPPYARSKSKSRSRSRSRSRSRSRSPRRRDRLRSERAPHRSRSRSRSPYRRRERRGHRDFACKNCRRPGHFAKECPSAPMCNNCNLPGHFAAECTLQTVCWNCKESGHIASECKNEALCHACNKTGHLARDCPTSGANVKLCNKCFKSGHIAVDCTNERACNNCRQPGHIARECKNDPVCNLCNVSGHVARVCPKTTLASVYXGGPFRDILCRICGQPGHISRNCMATIICDTCGGRGHMSYECPSARIFGLRRL

SEQ ID NO: 10753 - protein, 1372 aa, Zea mays
  unsure (1)..(1372): unsure at all Xaa locations
  Clone ID: TF_ZmC14816_1.pep
MSLRSTTSSAQRQQEAEVAAAQERERAAAAAAATAARAARLAAAELTAARAEVEAAEATDAARAAAAELEVLRGSRAGSYASVDDNTDEELRLAREAAREQAAQWAAAHPHGGARGGSPDRRRHADSAPREGARGGSPDGRRRAGGAPGGGDRVDGDRGLYRRRDSPSPDRYHGRRMAQAFVRDIGPGGGWPTLTKTNYIEWAAVMRVRLQVRQMWEAVRYGDVDYHEDRRALDALIAAVPLEMQFSLSQKRTAKEAWDAIAATRIGSDRARKTTLQTLRKEWENLAFKPGEDVDDFALRLNTLLQKMVQFGDETYDEERAVEKLFCCIPEKYKQIARSIESLLDLSTMTIEEAIGRLKVVDGDEPQAPSGPITIGGKLHLTREQWEACQGDKKKESSSTRGRKRGKQRKARGGTQAGARGHVEGGARGGAQGGVVGNKKPARDDGCHNCGKLGHWARDCRQPRRGQANVAQAEAEEALLLAHASIEPSPAAPAAAALLHLDESKARAFLGDGSNKDMIEGWCLDTGATHHMTGRREFFTELDSSVRGSVKFGDASGVEIKGVGSVVFTVTSGEHRLLTGVYYIPALRNSIISLGQLDENAREVAAEAVCGRKLRVLRTDNGSEFTAAEFASYCADEGVQRHYSASYNLQQNGVVERRNQTVVGMARALLKQRGMSAAFWGEAVVTAVYILNRSPTKALNGMTPYEAWHGRKPAVSHLRVFGCLAFTKELGHIGKLDDRSTPGVFIGYAEGSKAYRILDPRTQRVRTARDVVFDEGRGWAWDKAVDDGATPTYDFTIEYVHFEGAGGVGNSSPSRSTPALKSPPTPAPHSPALATTSSSPPRTPATTPATASSSPPPRVEHDPVELVTPLSRDEERVDACYDGESLRYRRVEGLLIDSSMPGPASRILAGELHLACDDGEPRSFAEAEKHAAWRAAMQSKMDAQEGIDFDDAFAPVARMESVRLLALSAQQGWHVHHMDVKSAFLNGDLKEEEGKVLRLRKALYSLRQAPRAWNAKLDSTLKGMGFTPSPHEATIYRRGNGGSALLVGVYVDDLVITGAKDAEVATFKEEMKATFQMSDLGHLSFYLGIEVHQGDSGITLRQTAYAKRIVELAGLTDCNPALTPMEERLKLSRDSTTEEVDATQYRRLVGSLRYLVHTRPDLAYSVGYVSRFLQRPTTEHEQAVKRIIRYVAGTLDHGLYYPRCPGEAHLVGYSDSDHAGDIDTSKSTSGILFFLGKCLISWQSVKQQVVAMSSCEAEYIXASTASTQALLLARLLGDLLGRDTGAVELRVDSQSALALAKNPVFHERSKHIRLRYHFIRDCLAEGSIKARYINTKDQLADLLTKPLGKIKFVELCSRSGMTQLSHKTTPKT

SEQ ID NO: 10754 - protein, 556 aa, Zea mays
  unsure (1)..(556): unsure at all Xaa locations
  Clone ID: TF_ZmC5443_1.pep
MWEAVWYGDVDYHEDRRALDALIAAVPPEMQFSLSQKWTAKEAWDAIAATRIGSDRARKTTLQALPKEWENLAFKPGEDVDDFALRLNTLLQKMVQFGDDNYDEERAVEKLSRCIPEKYKQIARSIESLLDLSTMTIEEAIGRLKVVDGDEPQAPSGPITIGGKLHLTREQWEACQGDKKKGESSTRGRRRGKPRKARGGAQAGVRGHAEVGAHGGAQGGAVGNKKPARDDGCHNCGKLGHWARDCRQPRRGQVNVAQAEAEEETLLLAHANIEPSPAASAAAALLHLDESKARTFLGDGSSKDMIEGWCLDTGATHHMTGRREFFTELDSSVRGSVKFGDTSGVEIKGAGSVVFTAASDEHRLLTGVYYIPASRNSIISLGQLNENGSRVEVEHGVMRIWDPSRRLLAKVRRGPNRLYILNVKVAQPXARRDDVAWQWHERFGHLNFEALKRLSAKEMVRGLPCLDHVEQFCDVCMLTKQRRLPFPQQSSFRAKERLELVHGNLCGPVTPATPGGRRYFLLLVDDLSRYMWVMILGSKGEAANAIRRVQVAAEAE

SEQ ID NO: 10755 - protein, 549 aa, Zea mays
  unsure (1)..(549): unsure at all Xaa locations
  Clone ID: TF_ZM3738.C8.o2.fg.pep
MGARVAAAQIGADTLTALRARAHAAAAQTGVDAPAVLPAAATGSTEIAASTGGATLPPRIGTMVAAWPRPLSGTSVPAKMVQFGDETYDEERAVEKLFCCIPEKYKQIARSIESLLDLSTMTIEEAIGRLKVPQGGVVGNKKPARDDGCHNCGKLGHWARDCRQPRRGQANVAQAEAEEALLLAHASIEPSPAAPAAAALLHLDESKARAFLSDGSNKDMIEGWCLDTGATHHMTGRREFFTELDSSVRGSVKFGDASGVEIKGVGSVVFTVTSAREVAAEAVCGRKLRVLRTDNGGEFTAAEFASYCADEGVQRHYSAPYSPQQNGVVERRNQTVVGMARALLKQRGIPAVFWGEAVVTAVYILNRSPTKALNGMTPYEAWHGRKPAVSHLRVFGCLAFTKELGHISKLDDRSTPGVFIGYAEGSKAYRILDPRTQRVRTARDVVFDEGRGWAWDKAVDDGATPTYDFTIEYVHFEGAGGVGNSSPSSSCXMSSSPPRTPATTPATASSSPPRTPAPTXHVEHDPVELVTPLSRDEERVDACYDGESL

SEQ ID NO: 10756 - protein, 382 aa, Zea mays
  unsure (1)..(382): unsure at all Xaa locations
  Clone ID: TF_ZmC1373_16.pep
PLARRLHADPGDMPRYDDRYGGTRLYVGRLATRTRSRDLEHLFGRYGRFFGFYRRSLVEGCPWWTXDHLWKFQVGDAFEYLTHDXRLTVCGNPLRRIREVELKRDYAFIEFSDHRDADEARYQLDGRDVDGSRIVVEFAKGVPRGSGGSREYMGRGPPPGTGRCFNCGVDGHWARDCKAGDWKNKCYRCGERGHIERNCQNSPRSLRRERSYSRSPSPRRRRDRDDRRSRSPSYSRSPMRSASPPVKEKERSPAPDGSRSPRSRSPQDQVMSPPPKDNGEGNGSDRGGSPRGRENSRSCSRSRSPSGSNRSPAANGRSRSPGGERSPSPGGERSPSPRGERSPSPRADRSPSPNGNGNNDAAADVDADAAARSGSPTGSKSP

SEQ ID NO: 10757 - protein, 383 aa, Zea mays
  Clone ID: TF_ZmC1373_20.pep
IGSLEAGREFLSSRIEIPPTTSVPLPFPPLARRLHADPGDMPRYDDRYGGTRLYVGRLATRTRSRDLEHLFGRYGRIREVELKRDYAFIEFSDHRDADEARYQLDGRDVDGSRIVVEFAKGVPRGSGGSREYMGRGPPPGTGRCFNCGVDGHWARDCKAGDWKNKCYRCGERGHIERNCQNSPRSLRRERSYSRSPSPRRGRGRSRSYSRSRSRSRSYSRSRSLSRSPRGGRRDRDDRRSRSPSYSRSPMRSASPPVKEKERSPAPDGSRSPRSRSPQDQVMSPPPKDNGEGNGSDRGGSPRGRENSRSRSRSPSGSNRSPAANGRSRSPGGERSPSPGGERSPSPGGDRSPSPNGNGNNDAAADVDADAAARGGSPTGSKSP

SEQ ID NO: 10758 - protein, 349 aa, Zea mays
  Clone ID: TF_ZmC1373_23.pep
DPRGRPGLLSPLPFPPLARRLHADPGDMPRYDDRYGGTRLYVGRLATRTRSRDLEHLFGRYGRIREVELKRDYAFIEFSDHRDADEARYQLDGRDVDGSRIVVEFAKGVPRGSGGSREYMGRGPPPGTGRCFNCGVDGHWARDCKAGDWKNKCYRCGERGHIERNCQNSPRSLRRERSYSRSPSPRRRRDRDDRRSRSPSYSRSPMRSASPPVKEKERSPAPDGSRSPRSRSPQDQVMSPPPKDNGEGNGSDRGGSPRGRENSRSCSRSRSPSGSNRSPAANGRSRSPGGERSPSPGGERSPSPRGERSPSPRADRSPSPNGNGNNDAAADVDADAAARSGSPTGSKSP

SEQ ID NO: 10759 - protein, 1850 aa, Zea mays
  Clone ID: TF_ZmC27331_11.pep
MAHRTVRCTPDMSGAPATSSVPLEYDRWSSDLWATPDVRWRTGQLLFIVRCASMGKPDVCARCGAFNASAGGDGPPPVFDGDDFPYWKIRMEAYLEAIDIGVYKAATQGFPEPRDLTNLVGDEFNYEKWNAKAKNTLFRGLCKDVFNRVRNHKNAHDLWMDICALHEGTRSEREERYHIAMRKLNSIEMLTNENANAMYSRLNILVEEVNGLGLTQISQPDVVRKILSVLPIDKYGHIVTVLHQMDLSVTTPTQILGKINAHEMYMHINDKEESSSKRKDLALKANHERKGKAKIQVEEESSSDDDLDANIALMVRKTTKMLKKLNREGIKFDSRKKKFFSNKRKPISEMDCYNCGELGHLAHQCNKPKKNKFKGKKEDDSDDEKKEKKFFKRKDGKQNRFHKKKNGKAYIVGDWLTDIESSSGSSSSEEENDEKVAAIAGDFSSPPPSPSSTAHLCLMARGERKVQNDINIDDDSDSDSDEEFASPSYDELADLLKEYTQIIRKSKAKCDRLKNENESLNAKYDIVIKASDEIKEENKTMSSTVNELTNSLKDAKEKYDKLNEANRELQNRLVKIKEDYTQIKFDHDNLLVENELLSCKTHEAINPVVKLDVATSCDDLIQEEQTSLHAELTEKVEVLTLDNQKLKNYLTDATTRGKVAIENNDFNNELAVDNQRLKNEVKKLKSENEHLATSVQKFNKGQYLQNELLMNTVMKNNKSGIGYNAFVQKKAITQYKPKQTHKPIKCFECGNEGHFAHNCKAKPPTPLPKHSRPFAFNAHYVLRKVVNGKIKVNYKTGGSHWVIDSGCTQHMTGNPRMFTSLDENVDGQDKITFGDNSKGKVQGLGKVAISNDLSISNVLLVAPLSFNLLSVGQLCDLGLKCLFTPSEGFRYNNLYLVDFTSEDADLRTCLFTKASLGWLWHRRLAHVGMSTLKKVLKKDMVRGLKDVVFEKDKPCSACQAGKQVANTHPTKAFMSTSRPLELLHMDLFGPTNYVSAGGNLYCLVIVDDFSRYTWVFFLHDKSEVASIFKKFAKKAQNEFDCKIKKIRSDNGKEFDNTNIHEYCDEIGIKHEVSATYTPQQNGVVERKNRTLITLARTMIDEYNTPERFWAEAVNTACYASNRLFPHRLLAKTPYELLNGKKPDVSFFRVFGCKCYIYKKRHHLGKFQRRCDIGFLLGYSLKSKAYRVFNHATGVVEETYDVEFDETNGSQGALENLDDVGDEPLREAMKNMPIGAIKPKEDEEEVQIIDRPSSSNVPQDDEKDERHANEDTFVSHEQARVQAEDVDAPGSSSQVVDRRNSSLLQAHPQNQIIGSPSQGVITRSHKHANFIEHHSFVSCVEPTCIDDALQDPDWVNAMHEELNNFTRNEVWTLEKPPQDARIIGTKWVFRNKQDDQGVIVRNKARLVAKGFSQVEGLDFGETFAPVARLEAIRILLAYASCYDIKLYQMDVKSAFLNGFINELVYVEQPPGFEDPRYPNHAYRLSKALYGLKQAPRAWYERLRDFLIEKGFKIGTVDTTLFTKKHNGDIFICQVYVDDIIFGSTNDYHCKEFGELMSKEFEMSMIGELTYFLGFQVKQMKDGNFLSQEKYTKDLLKRFNMEKCKPIKTPMPTNGHLDLDEGGNPVNQTLYRSMIGSLLYLTASRPDIMFSVCMCARFQSNPKKAHLRAVKRILRYLRHTTSVGLWYPKGATFDLIGYSDSDYAGCKIDRKSTSRGCHLLGTSLVSWTSKKQNSVALSTAEAEYIAAGACCTQILYMKQTLLDYGVVLEKVPLLCDNESAVKIANNPVQHSRTKHIDIRHHFLRDHVAKGDIILEGVRSEDQFADIFTKPLDKTRFCMLRNELNILDLRNFM

SEQ ID NO: 10760 - protein, 2511 aa, Zea mays
  Clone ID: TF_ZmC951_441.pep
MSGGDGPPPVFDGDDFPYWKIRMEAYLEAIDIGVYKAATQGFPEPRDATNLVGDEFNYEKWNAKAKNTLFRGLCKDVFNRVRNHKNAHDLWMDICALHEGTRSEREERYHIAMRKLNSFEMLTNENANAMYSRLNILVEEVNGLGLTQISQPDVVRKILSVLPIDKYGHIVTVLHQMDLSVTTPTQILGKINAHEMYMHINKEESSSKRKDLALKANHEKKGKAKIQVEEESSSDDDLDANIALMVRKTTKMLKKLNREGIKFDSRKKKFFSNKRKPISEMDCYNCGELGHLAHQCNKPKKNKFKGKKEDDSDDEKKEKKFFKRKDGKQKRFHKKKNGKAYIVGDWLTDVESSSGSSSSEEEDDEKVAAIAADFSSPPPSPSSTSHLCLMAKGERKVQNDINIDDDSDSDSDEEFASPSYDELADLLKEYTQIIRKSKAKCDRLKNENESLNAKYDIVIKASDEIKEENKTMSSTVNELTNSLKDAKEKYDKLNEANRELQNRLVKIKEDYTQIKFDHDNLLVENELLSCKTHEAINPVVKLDVATSCDDLIQEEQTSLHAELTEKVEVLTLDNQKLKNYLTDATTRGKVAIENNDFNNELAVDNQRLKNEVKKLKSENEHLATSVQKFNKGQYLQNELLMNTVMKNNKSGIGYNAFVQKKAITQYKPMQTHKPIKCFECGNEGHFAHNCKAKPPTPLPKHSRPFAFNAHYVLRKVANGKIKVNYKTGGSHWVIDSGCTQHMTSNPRMFTSLDENVDGQDKITFGDNSKGEVQGLGKVAISNDLSISNVLLVAPLSFNLLSVGQLCDLGLQCLFTPTEVIVSKMDDESMVFKGFRYNNLYLVDFTSEDADLRTCLFTKASLGWLWHRRLAHVGMSTLKEVLKKDMVIGLKDVVFEKDKPCSACQAGKQVANTHPTKAFMSTSRPLELLHMDLFGPTNYVSAGGNLYCLVIVDDFSRYTWVFFFHDKSEVASIFKKFAKKAQNEFDCKIKKIRSDNGKEFDNTNIHEYCDEIGIKHEVSATYTPQQNGVVERKNRTLITLARTMIDEYNTPESYWAEAVNTACYASNRLFPHRLLAKTPYELLNGKKPDVSFFRVFGCKCYIYKKRHHLGKFQRRCDIGFLLGYSLNSKAYRVFNHATGVVEETYDVEFDETNGSQGALENLDDVGDEPLREAMKNMPIGAIKPKEDEEEVQNIDRPSLSNVPQDDEKDERHANEDTFVSHEQARVQAKDVDAPGSSSQVVDRRNSSLLQAHPQNQIIGSPSQGVITRSHRHASFIEHHSFVSCVEPTCIDEALQDPDWVNAMHEELNNFTHNQVWTLEKPPQDARIIGTKWVFRNKQDDQGVIVRNKARLVAKGFSQVEGLDFGETFAPVARLEAIHILLAYASCYDIKLYQMDVKSAFLNGFINELVYVEQPPGFEDPRYPNHAYRLSKALYGLKQAPRAWYERLRDFLIEKGFKIGTVDTTLFTKKHNGDIFICQVYVDDIIFGSTNDYHYKEFGELMSKEFKMSMIGELTYFLGFQVKQMKDGNFLSQEKYTKDLLKRFNMEKCKPIKTPMPTNGHLDLDEGGNPVNQTLYRSMIGSLLYLTASRPDIMFSVCMCARFQSNPKKAHLRAVKRILRYLRHSTSVGLWYPKGATFDLIGYSDSDYAGCKIDRKSTSGGCHLLGRSLVLWTSKKENSVALSTAEAEYIAAGACCTQILYMKQTLLDYGVVLEKVPLLCDNESVVKIANNPVQHSRTKHIDIRHYFLRDHVAKGDIILEGVRSEDQLADIFTKPLDKTRFCMLRNELNILDLRNFIRQVKMPRTKNASASGGGDDEDPRRPFRQVKGKTVYLEQQEGRKKRRSDREARAAAAAAAAAAQAALGDQPDVPSDQIAFRARRLASRSRSSTHTSASTPPPTLPAPVTPIAPSTSTAIPTTSTTPASTASPAPAPASAPPVPPPRFRERDETEVRPLASDPRLFDLQRATAARVRRFRYIPVESWLPAQRDPAAGVLFSTRIQESFFRAQMSAQIALRVHRLLDLPAFLLAAGAESEAHLTYLPGLLSFLTISGRYVEEWVRVFYASVWIDPDHHWMRFRFEREDVTITADQIRQLFGFLESTTRLHSLCYGTSDPPRRPHGGIAPGTAHVAALFRPPFSDGSRRSPADFTTAAKYLYELIRRTLLPRMGYREATTHIQLWLLGALVSHSEFDVVDFLICEIEDTVLDGIRARRQLPYAHYLCHIFAQLIQPPRFQSTLEASRLVFGSYRPAPEIPVPAYAPVFDTQAEDAALRQFDTQGAAADDDDDDDFGIPPPPPPPMPPRSHDHEAGSSSAAPATPQAMDPALASILQTLTQQQAQLAAEQARMSERMLSMFQTMQDRQDSLQQQLIQDRAENRAFMALMLQHSGISAPPVQSAPPSSLYAPVVPSILSAPPAVTSPLRPVTLAFTSPVLSSVCPQPLVPPASAVTTTAVAVSVTASVPVAPAALPASESVPAPASTADPGSETDSDPPSAFALLPRPRPDAPPPPPPTSGV

SEQ ID NO: 10761 - protein, 1706 aa, Zea mays
  unsure (1)..(1706): unsure at all Xaa locations
  Clone ID: TF_ZmC951_461.pep
MSGGDGPPPVFDGDDFPYWKIRMEAYLEAIDIGVYKAATQGFPEPRDPTNLVGDEFNYEKWNAKAKNTLFRGLCKDVFNRVRNHKNAHDLWMDICALHEGTRSEREERYHIAMRKLNSFEMLTNENANAMYSRLNILVEEVNGLGLTQISQPDVVRKILSVLPIDKYGHIITVLHQMDLSVTTPTQILGKINAHEMYMHINDKEESSSKRKDLALKANHERKGKAKIQVEEESSSDDDLDANIALMVRKTTKMLKKLNREGIKFDSRKKKFFSNKRKPISEMDCYNCGELGHLAHQCNKPKKNKFKGKKEDDSDDEKKEKKFFKRKDGKQKRFHKKKNGKAYIVGDWLTGIESSSGSSSSEEENDEKVAAIAGDFSSPPPSPSSTSHLCLMARGERKVENENESLNAKYDIVIKASDEIKEENKTMSSTVNELTNSLKDVKEKYDKLNEANRELQTRLVKIKEDYTQIKFDHDNLLVENELLSCKTHEAINPVVKLDVATSCDDLIQEEQTSLHAELTEKVEVLTLDNQKLKNYLTDATTRGKVAIENNDFNNELAVDNQRLKNEVKKLKSENEHLATSVQKFNKGQYLQNELLMNTVMKNNKSGIGYNAFVQKKAITQYKPKQTHKPIKCFECGNEGHFAHNCKAKPPTPLPKHSRPFAFNAHYVLRKVANGKIKVNYKTGGSHWVIDSGCTQHMTGNPRMFTSLDENVDGQDKITFGDNSKGKVQGLGKVAISNDLSISNVLLVAPLSFNLLSVGQLCDLGLQCLFTPSEVIVTKIDDESMVFKGFRYNNLYLVDFTSEDADLRTCLFTKASLGWLWHRRLAHVGMSTLKKVLKKDMVRGLKDVVFEKDKPCSACQAGKQVANTHPTKAFMSTSRPLELLHMDLFGPTNYVSAGGNLYCLVIVDDFSRYTWVFFLHDKSEVASIFKKFAKKAQNEFDCKIKKIRSDNGKEFDNTNIHEYCDEIGIKHEVSATYTPQQNGVVERKNRTLITLARTMIDEYNTPERFWAEAVNTACYASNRLFPHRLLAKTPYELLNGKKPDVSFFRVFGCKCYIYKKRHHLGKFQRRCDIGFLLGDEPLREAMKNMPIGAIKPKEDEEEVQIIDRPSSSNVPQDDEKDERHANEDTFVSHEQARVQAEDVDAPGSSSQVVDRRNSSLLQAHPQNQIIGSPSQGVITRSHRHASFIEHHSFVSCVEPTCIDEALQDPDWVNAMHEELNNFTRNEVWTLEKPPQDARIIGTKWVFRNKQDDQGVIVRNKARLVAKGFSQVEGLDFGETFAPVARLEAIRILLAYASCYDIKLYQMDVKSAFLNGFINELVYVEQPPGFEDPRYPNHAYRLSKALYGLKQAPRAWYERLRDFLIEKGFKIGTVDTTLFTKKHNGDIFICQVYVDDIIFGSTNDYHCKEFGELMLKEFEMSMIGELTYFLGFQVKQMKDGNFLSQEEYTKDLWKRFTXEKCKPIKTPMPTNGHLDLDEGGNPVNQTLYRSMIGSLLYLTASRPDIMFSVCMCARFQSNPKKAYLRAVKKILRYLRHTTSVGLWYPKGATFDLIGYSDSDYAGCKIDRKSTSRGCHLLGRSLVSWTSKKQNSVALSTAEAEYIAAGACCTQILYMKQTLLDYGVVLEKVPLLCDNESAVKIANNPVQHSHTKHIDIRHHFLRDHVAKGGIILEGVRSEDQLADIFTKPLDKTRFCMLRNELNILDLRNLM

SEQ ID NO: 10762 - protein, 2493 aa, Zea mays
  Clone ID: TF_ZmC951_462.pep
MSGGDGPPPVFYGDDFPYWKIRMEAYLEAIDIGVYKAATQGFPQPRDPTNLVGDEFNYEKWNAKAKNTLFRGLCKDVFNRVRNHKNAHDLWMDICALHEGTRSEREERYHIAMRKLNSFEMLANENANAMYSRLNILVEEVNGLGLTQISQPDVVRKILSVLPIDKYGHIVTVLHQMDLSVTTPTQILGKINAHEMYMHINDKEESSSKRKDLALKANHERKGKAKMQVEEESSSDDDLDANIALMVRKTTKMLKKLNREGIKFDSRKKKFFSNKRKPISEMDCYNCGELGHLAHQCNKPKKNKFKGKKEDDSDDEKKEKKFFKRKDGKQKRFHKKKNGKAYIVGDWLTDIESSSGSSSSEEENDEKVAAIAGDFSSPPPSPSSTSHLCLIARGERKVQNDINIDDDSDSDSDEEFASPSYDELADLLKEYTQIIRKSKAKCDRLKNENESLNAKYDIVIKASDEIKEENKTMSSTINELTNSLKDAKEKYDKLNEANRELQNGLVKIKEDYTQIKFDHDNLLVENELLSCKTHEAINPVVKLDVATSCDDLIQEEQTSLHAELTEKVEVLTLDNQKLKNYLTDATTRGKVVIENNDFNNELAVDNQRLKNEVKKLKSENEHLATSVQKFNKGQYLQNELLMNTVMKNNKSGIGYNAFVQKKAITQYKPKQTHKPIKCFECGNEGHFAHNCKAKPPTPLPKHSRPFAFNAHYVLRKVANGKIKVNYKTGGSHWVIDSGCTQHMTGNPRMFTSLDENVDGQDKITFGDNSKGKVQGLGKVAISNDLSISNVLLVAPLSFNLLSVGQLCDLGLQCLFTPSEVIVTKMDDESMVFKGFRYNNLYLVDFTSEDADLRTCLFTKASLGWLWHRRLAHVGMSTLKKVLKKDMVRGLKDVVFEKDKPCSACQAGKQVANTHPTKAFMSTSRPLELLHMDLFGPTNYVSAGGNLYCLVIVDDFSRYTWVFFLHDKSEVASIFKKFAKKAQNEFDCKIKKIRSDNGKEFDNTNIHEYCDEIGIKHEVSATYTPQQNGVVERKNRTLITLARTMIDEYNTPERFWAEAVNTACYASNRLFPHRLLAKTPYELLNGKKPDVSFFRVFGCKCYIYKKRHHLGKFQRRCDIGFLLGYSLKSKAYRVFNHATGVVEETYDVEFDETNGSQGALENLDDVGDEPLREAMKNMPIGAIKPKEDEEEVQIIDKPSSSNVPQDDEKDERHANEDTFVSHEQARVQAEDVDAPGSSSQVVDRRNSSLLQAHPQNQIIGSPSQGVITRSHKHANFIEHHSFVSCVEPTCIDEALQDPDWVNAMHEELNNFTRNEVWTLEKPPQDARIIGTKWVFRNKQDDQGVIVRNKARLVAKGFSQVEGLDFGETFAPVARLEAIRILLAYASCYDIKLYQMDVKSAFLNGFINELVYVEQPPGFEDPRYPNHAYRLSKALYGLKQAPRAWYERLRDFLIEKGFKIGTVDTTLFTKKHNGDIFICQVYVDDIIFGSTNDCHCKEFGELMSKEFEMSMIGELTYFLGFQVKQLKDGNFLSQEKYTKDLLKRFNMEKCKPIKTPMPTNGHLDLDEGGNPVNQTLYRSMIGSLLYLTASRPDIMFSVCMCARFQSNPKKAHLRAVKRILRYLKHTTSVGLWYPKGATFDLIGYSDSDYAGCKIDRKSTSGGCHLLGRSLVSWTSKKQNSVALSTAEAEYIAAGACCTQILYMKQTLLDYGVVLEKVPLLCDNESAVKIANNPVQHSRTKHIDIRHHFLRDHVAKGDIILEGVRLQFRMPRTKNASASGGGDDEDPRRPFRQVKGKTVFLEQQEGRKKRRSDREARAAAAAAAAAAQAALGDQPDIPSDQIAFRARRLASRSRSSTHTSASTPPPTLPAPVTPIAPSTSTAIPTTSSTPASTATPAPAPASAPPVPPPRFRERDETEVRPLVSDPRLFDLQRATAARVRRFRYVPVESWLPAQRDPAAGVLFSTRIQESFFRAQMSAQIALRVHRLLDLPAFLLAAGAESEAHLTYLPGLLSFLTISGRYVEEWVRVFYASVWIDPDHHWMRFRFEREDVTITADQIRQLFGFPESTTRLHSLCYGTSDPPRRPHGGVAPGTAHVAALFRPPFTDGSRRSPADFTTAAKYLYELVRRTLLPRMGYREATTHIQLWLLGALVSHSEFDVVDFLICEIEDTVLDGIRARRQLPYAHYLCHIFAQLIQPPRFQSTLEASRLVFGSYRPAPEIPVPASASVFDSQAEDAALHQFDTQGTAADDDDDDDDFGVPLPPPPPMPPRSHDHEAGSSRAAPAPPPALDPALASILQTLTQQQQTLTQQQQTLTQQQALLAAEQARLSDRMLSMFQSMQDRQDALQQQLIQDRAESRAFMALMLQHSGISAPPVQSAPPSSLYAPVVPSILSAPPAVTSPLRPVTLAFTSPVLSSVCPQPLVPPASAVTTTVVAVSVTASVPVAPAALPASESVPAPASTTDPGSETDSDPPSAFALLPRPRPDAPPPPPPASGV

SEQ ID NO: 10763 - protein, 1602 aa, Zea mays
  Clone ID: TF_ZM4588.C2.o2.fg.pep
MDWGLLKSQPDVVRKILSVLPIDKYGHIVTVLHQMDLSVTTPTQILGKINAHEMYMHINKEESSSKRKDLALKANHERKGKAKIQVEEESSSDDDLDANIALMVRKTTKMLKKLNREGIKFDSRKKKFFSNKRKPISEMDCYNCGELGHLAHQCNKPKKNKFKGKKEDDSDDEKKENKFFKRKDGKQKRFHKKKNGKAYIVGDWLTDIESSSGSSSSEEENDEKVAAIAGDFSSPPPSPSSTSHLCLMARGERKLADLLKEYTQIIRKSKAKCDRLKNENESLNAKYDIVIKASDEIKEENKTMSSTVNELTNSLKDAKEKYDKLNEANRELQNRLVKIKEDYTQIKFDHDNLLVENELLSCKTHEAINPVVKLDVATSCDDLIQEEQTSLHAELTEKVEVLTLDNQKLKNYLTDATTRGKVAIENNDFKNELAVDNQRLKNEVKKLKSENEHLATSVQKFNKGQYLQNELLMNTVMKNNKSGIGYNAFAQKKAITQYKPKQTHKPIKCFECGNEGHFAHNCKAKPPTPLPKHSRPFAFNAHYVLRKVANGKIKVNYKTGGSHWVIDSGCTQHMTGNPRMFTSLDENVDGQDKITFGDNSKGKVQGLGKVAISNDLSKSNVLLVAPLSFNLLSVGQLCDLGLQCLFTPSEVIVTKMDDESMVFKGFRYNNLYLVDFTSEDADLRTCLFTKASLGWLWHRRLAHVGMSTLKKVLKKDMVRGLKDVVFEKDKPCSACQAGKQVANTHPTKAFMSTSRPLELLHMDLFGPTNYVSVGGNLYCLVIVDDFSRYTWVFFLHDKSEVASIFKKFAKKAQNEFDCKIKKIRSDNGKEFDNTNIHEYCDEIGIKHEVSATYTPQQNGVVERKNRTLITLARTMIDEYNTPERFWAEAVNTACYASNRLFPHRLLAKTPYELLNGKKPDVSFFWVFGCKCYIYKKRHHLGKFQRRCDIGFLLGYSLKSKAYRVFNYATGVVEETYDVEFDETNGSQGALENLDDVGDEPLREAMKNMPIGAIKPKEDEEEVQIIDRPSSSNVPQDDEKDERHANEDTFVSHEQARVQAKDVDALGSSSQVVDRRNSSLLQAHPQNQIIGSPSQGVITRSHRHANFIEHHSFVSCVEPTCIDEALQDPNWVNAMHEELNNFTRNEVWTLEKPPQDARIIGTKWVFRNKQDDQGVIVRNKARLVAKGFSQVEGLDFGETFAPVARLEAIRILLAYASCYDIKLYQMDVKSAFLNGFINELVYVEQPPGFEDPRYPNHAYRLSKALYGLKQAPRAWYERLRDFLIEKGFKIGTVDTTLFTKKHNGDIFICQVYVDDIIFGSTNDYHCKEFGELMSKEFEMSMIGELTYFLGFQVKQMKDGNFLSQEKYTKDLLKRFNMEKCKPIKTPMPTNGHLDLDEGGNSVNQTLYRSMIGSLLYLTASRPDIMFSVCMCARFQSNPKKAHLRAVKRILRYLRHTTSVGLWYPKGATFDLIGYSDSDYAGCKIDRKSTSGGCHLLGRSLVSWTSKRQNSVALSTAEAEYIAAGACCTQILYMKQTLLDYGVVLEKVPLLCDNESAVKIANNPVQHSRTKHIDIRHHFLRDHVAKGDIILEGGLSNLVEITAN

SEQ ID NO: 10764 - protein, 678 aa, Zea mays
  Clone ID: TF_ZM4694.C3.o20.fg.pep
MSGGDGPPPVFDGDDFPYWKIRMEAYLEAIDIGVYKAATQGFPQPRDPTNLVGDEFNYEKWNAKAKNTLFRGLCKDVFNRVRNHKNAHDLWMDICALHEGTRSEREERYHIAMRKLNSFEMLANENANAMYSRLNILVEEVNGLGLTQISQPDVVRKILSVLPIDKYGHIVTVLHQMDLSVTTPTQILGKINAHEMYMHINKEESSSKRKDLALKANHERKGKAKIQVEEESSSDDDLDANIALMVRKTTKMLKKLNREGIKFDSRKKKFFSNKRKPISEMDCYNCGELGHLAHQCNKPKKNKFKGKKEDDSDDEKKEKNFFKRKDGKQKRFHKKKNGKAYIVGDWLTDIESSSGSSSSEEEDDEKVAAIAGDFSSPPPSPSSTSHLCLMARGERKVQNDINIDDDSDSDSDEEFASPSYDELADLLKEYTQIIRKSKAKCDRLKNENESLNAKELQNRLVKIKEDYTQIKFDHDNLLVENELLSCKTHEAINPVVKLDVATSCDDLIQEEQTSLHAELTEKVEVLTLDNQKLKNYLTDATTRGKVAIENNDFNNELAVDNQRLKNEVKKLKSENEHLATSVQKFNKGQYLQNELLMNTVMKNNKSGIGYNAFVQKKSITQYKPKQTHKPIKCFECGNEGHFAHNCKAKPPTPLPKHSRPFAFNAHYVLRKVANGKIK

SEQ ID NO: 10765 - protein, 2229 aa, Zea mays
  Clone ID: TF_ZM4875.C1.o2.fg.pep
MDLLPFLMVTIFLIGKFVCDEFNYEKWNAKAKNTLFRGLCIDVFNRILGKINAHEMYMHINDKEESSSKRKDLALKANHERKGKAKIQVEEESSSDDDLDANIALMVRKTTKMLKKLNREGIKFDSRKKKFFSNKRKPISEMDCYNCGELGHLAHQCNKPKKNKFKGKKEDDSDDEKKEKKFFKRKDGKQKRFHKKKNGKAYIVGDWLTDIESSSGSSSSEEENDEKVAAIAGDFSSPPPSPSSTSHLCLMARGERKVQNDINIADDSDSDSDEEFASPSYDELADLLKEYTQIIRKSKAKCDRLKNENESLNAKYDIVIKASDEIKEENKTMSSTVNELTNSLKDAKEKCDRVNEVNRELQNRLVKIKEDYTQIKFDHDNLLVENELLSCKTHEAINPVVKIDVATSCDDLRQEEQTSLHTELTEKVEVLTLDNQKLKNYLTDATTRGKVAIENNDFNNELAVDNQRLKNEVKKLKSENEHLATSVQKFNKGQYLQNELLMNTVMKNNKSGIGYNAFVQKKATTQYKPKQTHKPIKCFECGNEGHFAHNCKAKPPTHLPKHSRPFAFNAHYVLRKVANGKIKVNYKTGGSHWVIDSGCTQHMTGNPRMFTSLDENVDGQDKITFGDNSKGKVQGLGKVAISNDLSISNVLLVAPLSFNLLSVGQLCDLGLQCLFTPTEVIVTKMDDESMVFKGFRYNNLYLVDFTSEDVDLRTCLFTKASLGWLWHRRLAHVGMSTLKKVLKKDMVRGLKDVVFEKDKPCSACQAGKQVANTHPTKAFMSTSRPLELLHMDLFGPTNYVSVGGNLYCLVIVDDFSRYTWVFFLHDKSEVASIFKKFAKKAQNEFDCKIKKIRSDNGKEFDNTNIHEYCDEIGIKHEVSATYTPQQNGVVERKNRTLITLARTMIDEYNTPERLFPHRLLAKTPYELLNGKKPDVSFFRVFGCKCYIYKKRHHLGKFQRRCDIGFLLGYSLKSKAYRVFNHATGMVEETYDVEFDETNGTQGALENLDDVGDEPPREAMKNMPIGAIKPKEDEEEVQIIDRPSSSNVPQDDEKDERHANEQARVQAEDVDAPGSSSQVVDRRNSSLLQAHPQNQIIGSPSQGVITRSHRHASFIEHHSFVSCVEPTCIDEVLQDPDWVNAMHEELNNFTRNEVWTLEKPPQDARIIGTKWVFRNKQDDQGVIVRNKARLVAKGFSQVEGLDFGETFAPVARLEAICILLAYASCYDIKLYQMDVKSAFLNGFINELVYVEQPPGFEDPRYPNHAYRLSKALYGLKQAPRAWYERLRDFLIEKGFKIGTVDTTLFTKKHNGDIFICQVYVDDIIFGSTNDYHCKEFGELMSKEFEMSMIGELTYFLGFQVKQMKDGNFLSQEKYTKDLLKRFNMEKCKPIKTPMPTNGHLDLDEGGNPVNQTLYRSMIGILLYLTASRPDIMFSVCMCARFQSNPKKAHLRAVKRILRYLRHTTSVGLWYPKGATFDLIGYSDSDYAGCKIDRKSTSGGCHLLGRSLVSWTSKKQTSVALSTAEAEYIARRHQFRMSRTKNVSAPGGGDDEDPRRPFRQVKGKTVYLEQQEGRKKQRTDRAARAAAAAAAAAAQAELGDQPQTPSDQIAYRVRRLASRPRSSTHTSASTPPPTLPAPVTPVAPSTTTAIPATSTTPASTAPPPAPATAPPIPPPHFRERDETEVQPLAADPRLFDLQRATAARVRRFRYVPVESWLPAKRDPVAGDLFSTRIQESFFRAQMSAQIALRVHRLLDLLAFLLTVGADSEAHLTYLPGLLTLLTTSGRYVEEWVRVFYASVWIDPDHHWMRFCFEREDVTITASQIRQLFGFPESTTRLHSLCYGTSDPPRRPHGGVAPGTAHVAALFRPPFSDGSRRSPADFTTAAKYLYELIRRTLLPRMGYREATTHIQLWLLGALVSHSEFDVVDFLICEIEDTVLDRIRARRQLPYAHYLCHIFAQLIQPPRFQGTLEASRLVFGFYRPAPETPVPASAPVFDSQAEDAALHQFDTQATAVDDDDDDDFGVPPPPPMPPHSHDHEAGSSSAAPAAPSAMDPALASILQSITQQQAHLAVEQARLSERMLSMFQNMQDRQDALQQQLLQDRAESRAFMALMLQQSGVSVPPVQSPPPPPLHAPVVPSILSGPPVGPSPLRPVTLAFTSPVLSSVCPQPPVPPASAVTTTVVAVSVTSSVPVAPAARPQSESVLALASTTDPGSETDSDPPPAFALLPRP

SEQ ID NO: 10766 - protein, 195 aa, Zea mays
  unsure (1)..(195): unsure at all Xaa locations
  Clone ID: TF_LIB5074-003-R1-XP1-D9.pep
MDSYQAPAAGAGGRGCYNCGDSSHRAAECPTKGTPTCYNCGEKGHVSRECTSPQAEKTCYRCGGTGHISRECTKDGGAQMGGRGGGSQECYKCGQVGHIARNCSQGGGYGGAAGGYGGGRGGYGGGAGGYGGARQTTCYSCGGFGHMSRDCTQGQKCYNCGEVGHLSRDCPQETSXERVCYRCKQPGHVQSACPN

SEQ ID NO: 10767 - protein, 238 aa, Zea mays
  Clone ID: TF_LIB4759-029-Q1-K1-E9.pep
FDGPLPIPGEHPYRPWCSTRRRTRVPLRAQAVALESVAWGINLIASLDVEKKARAKDTGSKGGEGHSSANMVQKDHNKGKGKPKSNKPNKTTNFKKKKNKAELTCFACGEAGHFAKDCPDRADRRGKKGNVNTVIASNEEDKGYGNLPFIFSVFQSPSWWLDTGANVHVPSHINLFSSYQGARDSSVLMGNGSHASVHGTGTVDLKFTSGKIVQLKNVHHVPSIHKNLVNGTLLCREG

SEQ ID NO: 10768 - protein, 1278 aa, Zea mays
  unsure (1)..(1278): unsure at all Xaa locations
  Clone ID: TF_ZmC13579_1.pep
MAAFADALKPEKFNGMHFKRWQVKATLWLTAMNVFHVSKGRPEGPLTPEQEKEYDHANTMFTGAVLSALVDRLVDANMQYTDGKQLWDALTTKYGASDAGSDLYIMESFHDYKMVDNRSIVEQAHEIQCIAKELDHLKIVLPDRFVAGCIIAKLPSTWRNFATALKHKRQEISVENLIASLDVEEKARAKDTGSKGGEGHSSANMVQKNHNKGKGKPKSNKPNKTTNFKKKKNKAELTCFACGEAGHFAKDCPDRADRRGKKGNVNTVVASNEEDKGYGNLPFIFSVFQSPRWWLEEYRDVRMGAVHVHDAAMAHILVFESPAASGRHICAQSISHWSDFAAKVAELYPEYKVPKFPKDTQPGLVRQGAEEGSKKLVALGLHFSXSGEDHQGRCGGPQEQRLHFVASRPTAAIXWSSMPVEFRFPSGKFCKTTDFLLQGSKCHSCVQSKQPRKPHKAAEERHLAPLELIHSDLCEMNGVLTKGGKRYFMTLIDDASRFCYVYLLKTKDEALDYFKIYKAEVENQLERKIKRLRSDRGGEFFPKVFDDFCAEHGIIHERTPPYSPESNGIAERKNRTLTDLVNAMLDTCGLSKAWWGEAVLTSCHVLNRIPMGKEEKTPYEKWVGRKPSLSYLRTWGCMAKVNVPINKKRKLGPRTVDCVFLGYASCSIAYRFLVVKSEVPDVYVDTIMESRDATFFEHIFPMKDIHSNSRYSSEIIPEHNTPIESFEQPHEIVLEEDDNDAPKRSKRQRVEKSFGNDFIVYLVDDTPTTIAEAFASPDADDWKEAVHNEMDSILSNGTWEVTDRPYGCKPVGCKWVFKKKLKPDGTIEKYKARLVAKGYTQKEGEDFFDTYSPVARMTTIRVLLSLAASYGLLVHQMDVKTAFLNGELDEEIYMEQPDGFVVKGQESKVCKLLKSLYGLKQAPKQWHEKFDTTLTSAGFAINEADRCVYYRCGGGEGVILCLYVDDILIFGTNIDVINEVKSFLSKSFDMKDLGEADVILNIKLIKADGGITLSQSHYVEKVLKRFGFSECKPSPTPYDPSVTLRKNKRIGLDQLRYSQIVGSLMYLAGATRPDISFAVSKLSRFMSNPGTDHWHALERVMRYLQGTMSYGIHYSGQHAVLEGYSDSNWISDADELYATSGYVFTIGGGAVSWRSCKQTILTRSTMEAELAALDTATVEAEWLRELLMDLPVVEKPIPAILMNCDNQTVIAKVTSSKDNGKSSRHVKRRLKSVRKLRNSGVISVTYISTDKNLADPFTKGLPRNVIEIASREMGMRPE

SEQ ID NO: 10769 - protein, 80 aa, Zea mays
  Clone ID: TF_ZmC13579_19.pep
MVQKNHNKGKGKPKSNKPNKTTNFKKKKNKAELTCFACGEAGHFAKDCPDRADRRGKKGNVNTVIASNEEDKGAPGILPC

SEQ ID NO: 10770 - protein, 1188 aa, Zea mays
  Clone ID: TF_ZmC13579_2.pep
MAAFADALKPEKFNGMHFKRWQVKATLWLTAMNVFHVSKGRPEGPLTPEQEKEYDHANTMFTGAVLSALVDRLVDANMQYTDGKELWDALTTKYGASDAGSDLYIMESFHDYKMVDNRSIVEQAHEIQCIAKELDHLKIVLPDRFVAGCIIAKLPSTWRNFATALKHKRQEISVENMIASLDVEEKARAKDTGSKGGEGHSSANMVQKNHNKGKGKPKSNKPNKTTNFKNKKNKAELTCFACGEAGHFAKDCPDRADRRGKKGNVNTVVASNEEDKGYDNLPFIFSVFQSPSWWLDTGANVHGARDSSVLMGNGSHASVHGTGTVDLKFTSGKIVQLKNVHHVPSIHKNLVSGTLLCRDGFKSKQPRKPHKAAEERHLAPLELIHSDLCEMNGVLTKGGKRYFMTLIDDASRFCYVYLLKTKDEALDYFKIYKAEVENQLERKIKRLRSDRGGEFFPKVFDDFCAEHGIIHERTPPYSPESNGIAERKNRTLTDLVNAMLDTCGLSKAWWGEAVLTSCHVLNRIPMGKEEKTPYEKWVGRKPSLSYLRTWGCMAKVNVPINKKRKLGPRTVDCVFLGYASCSIAYRFLVVKSEVPDVYVDTIMESRDATFFEHIFPMKDIHSNSRYSSEIIPEHNTPIESFEQPHEIVLEEDDNDAPKRSKRQRVEKSFGNDFIVYLVDDTPTTIAEAFASPDADDWKEAVHNEMDSILSNGTWEVTDRPYGCKPVGCKWVFKKKLKSDGTIEKYKARLVAKGYTQKEGEDFFDTYSPVARMTTIRVLLSLAASYGLLVHQMDVKTAFLNGELDEEIYMEQPDGFVVKGQESKVCKLLKSLYGLKQAPKQWHEKFDTTLTSAGFAINEADRCVYYRCGGGEGVILCLYVDDILMFGTNIDVINEVKSFLSKSFDMKDLGEADVILNIKLIKADGGITLSQSHYVEKVLKRFGFSECKPSPTPYDPKNKRIGLDQLIYSQIVGSLMYLAGATRPDISFAVSKLSRFMSNPGTDHWHALERVMRYLQGTMSYGIHYSGQHAVLEGYSDSNWISDADELYATSGYVFTIGGGAVSWRSCKQTILTRSTMEAELAALDTATVEAEWLRELLMDLPVVEKPIPAILMNCDNQTVIAKVTSSKDNGKSSRHVKRRLKSVRKLRNSGVISVTYISTDKNLADPFTKGLPRNVIEIASREMGMRPE

SEQ ID NO: 10771 - protein, 327 aa, Zea mays
  unsure (1)..(327): unsure at all Xaa locations
  Clone ID: TF_ZmC13579_4.pep
RVADDDSVGVLRRHRYTDGKQLWDALTTKYGASDAGSDLYIMESFHDYKMVDNRSIVEQAHEIQCIAKELDHLKIVLPDRFVAGCIIAKLPSTWRNFATALKHKRQEISVENLIASLDVEEKARAKDTGSKGGEGHSSANMVQKNHNKGKGKPKSNKPNKTTNFKKKKNKAELTCFACGEAGHFAKDCPDRADRRGKKGNVNTVVASNEEDKGXARDSSVLMGNGSHASVHGTGTVDLKFTSGKIVQLKNVHHVPSIHKNLVSGTLLCRDGFKVVLESNKLVVSKSGQFIGKGYDCGGLFRFSLLDFNNKSVNHICAKKKNLAGIWH

SEQ ID NO: 10772 - protein, 400 aa, Zea mays
  unsure (1)..(400): unsure at all Xaa locations
  Clone ID: TF_ZmC13579_7.pep
MAAFADALKPEKFNGMHFKRWQVKAMLWLTAMNVFHVSKGRPEGPLTPEQEKEYDHANTMFTGVVLSALVDRLVDANMQYTDGKELWDALTTKYGASDAGSDLYIMESFHDYKMVDNRSIVEQAHEIQCIAKELDHLKIVLPDXFVAGCIIAKLPSTWRNFATALKHKRQEISVENLIASLDVEEKARAKDTGSKGGEDNSSANMVQRNHNKGKGKPKSNKPNKTTNFKKKKNKAELTCFACGEAGHFAKDCPDRADRRGKKGNVNTVVASNEEDKGXARDSSVLMGNGSHASVHGTGTVDLKFTSGKIVQLKNVHHVPSIHKNLISGTLLCRDGFKVVLESNKLVVSKSGQFIGKGYDCGGLFRFSLLDFNNKSVNHICAKKKKKRGPWHSRLCHINFG

SEQ ID NO: 10773 - protein, 698 aa, Zea mays
  unsure (1)..(698): unsure at all Xaa locations
  Clone ID: TF_ZM4584.C2.o5.fg.pep
MESFHDYKMADNHSIVEQAHEIQCIAKELDHLKIVLPDRFVAGCIIAKLPSTWRNFATSLKHKRQEISVENMIVSLDVEEKARAKDTGSKGGEGHSSANMVQRNHNNGKRKPKSNKPNKTTIFKKKKNKAELTCFACGEAGHFAKDCPDRADRRGKKGNVNTVVASNEEDKGYGNLPFIFSVFQLHSWWLDTGANVHVCSDINLFSSYQGARDSSVLMGNGLHASVHGTSTVDLKFTSRKIVQLKNVHHVPSIHKNLVSGTLLCRDGFXEHGIIHERTPPYSPESNGIAERKNRXCMAKVNVPINKKRKLGPRTMDCVFLGYASCSIAYRFLVVKSEVPDVYVDTIMESCDATFFEHIFPMKDIHSNSRYSSEITPEHSTSVESSEQPHEIVLEKDDNDAPKRSKIQRVEKSFGDDFIVYLVDDTPTTIVEAFASLDADDWKEAVHNEMDSILSNGFAINEADRCVYYRCGGGEGVILCLYVDDILIFGTNVDVINEVKSFLSKSFDMKDLGEADVILNIKLIKADVSKLSRFMSNPRTDHWHALERVMRYLQDELYATSGYVFTIGGGAVSWRSCKQTILTRSTMQVELAALDTATVEAEWLRELLMDLSVVEKPIPAILMNCDNQTVIVKVTSSKDNGKSSRHVKRRSKSVRKLRNSRVISVTYISTDKNLADPFTKGLPRNVIEIASRDMSMRPI

SEQ ID NO: 10774 - protein, 748 aa, Zea mays
  Clone ID: TF_ZM5107.C1.o13.fg.pep
MAAFADALKPEKFNGMHFKRWQVKATLWLTAMNVFHVSKGRPEGPLTPEQEKEYDHANTMFTGAVLSALVDRLVDANMQYTDGKQLWDALTTKYGASDAGSDLYIMESFHDYKMVDNRSIVEQAHEIQCIAKELDHLKIVLPARFVAGCIIAKLPSTWRNFATALKHKRQEISVENLIASLDVEEKARAKDTGSKGGEGHSSANMVQKNHNKGKGKPKSNKPNKTTNFKKKKNKAELTCFACGEAGHFAKDCPDRADRRDKKGNVNTVVASNEEDKGYGNLPFIFSVFQSPSWWLDTGANVHVCSDINLFSSHQGARDSSVLMGNGSHASVHGTGTVDLKFTSGKIVQLKNVHHVPSIHKNLVSGTLLCRDGFKVVLESNKLVVSKSGQFIGKGYDCGGLFRFSLLDFNNKSVNHICANVDDLASIWHSRLCHINFGSMSRLATMSLIPNITIVKGSKCHSCVQSKQPRKPHKAAEERHLAPLELIHYDLCEMNGVLTKGGKRYFMTLIDDASRFCYVYLLKTKDEALDYFKIYKAEVENQLERKIKRLRSDRGGEFFPKVFDDFCAEHGIIHERTPPYSPESNGIAERKNRTLTDLVNAMLDTCGLSKAWWGEAVLTSCHVLNRIPMGKEEKTPYEKWVGRKPSLSYLRTWGCMAKVNVPINKKRKLGPRTVDCVFLGYASCSIAYRFLVVKSEVPDVYVDTIMESRDATFFEHIFPMKDIHSNCWGPSASEGPQKHDLTMFLEYNV

SEQ ID NO: 10775 - protein, 456 aa, Zea mays
  Clone ID: TF_ZM4454.C3.o3.fg.pep
MARRRSQKNKKTKENKEEEEENERWRPNDESTSPKGLSSHFDSHICSVANENDSGSTNEDDEDERSFMQLYAHLSLEDKAVMLKLLKRAREQSEARQMLEDVLSMKMLHFDELTKEHEELKCSHVDLVQRNALLKDQVEKVKDDNLAFQEKYDMLLYSHENLMDDHIILNIAHEVVIENLKSQQPHSCTCIQIETILPCANACCPSTSKSSFELEFAGTKDDTYQKLKEENERLKISLTQLKGKCIAQPSQDNHDHMVKKLETGTTAACTKSLEENVKDLRIVKRKEQKKKINASDKSVNHASMQGNIQGNNQVTLHTKRSKKCSECFEKGHSIRSCPYIKNDLITNKDDKLCFKCSKKGHLIKSCPYLKQKGIVLEKKILTNHVASKKQEKKKSSKLEERLCYICRKKGHQCKDCPIGNYPISSLSIISHVTRQPKIATCARKVMRLPNANTKDS

SEQ ID NO: 10776 - protein, 131 aa, Zea mays
  Clone ID: TF_ZmC2309_4.pep
LIKLSHKDLVETVMVTVIMTASVDLVMNVVVTMVVGVHREVVVVVVVVVTASSVGNLVILLESAHLGMVGEGTDMVGEMTGMVAVAVAVAVVMVLTVVVTDTLAVAEMAAAMGVAIATAVTDQVLTDGLSS

SEQ ID NO: 10777 - protein, 115 aa, Zea mays
  unsure (1)..(115): unsure at all Xaa locations
  Clone ID: TF_ZmC218_17.pep
VGLATPIGGGGYGSRGGGGSGGGGRSYGGSWGGGRRSGGGGGPGACYKCGEPGHMARDCPSADGGGYGGGGYGGGGYGGGGGGGGGGRFGGGXXGGDRSCYNCGEAGHIARDCPT

SEQ ID NO: 10778 - protein, 247 aa, Zea mays
  unsure (1)..(247): unsure at all Xaa locations
  Clone ID: TF_LIB4765-074-R1-K2-E9.pep
VPRGRPGPPGSSEPSKSKPSPRRIAAAGSASLDPDPGDMPRNDDRYGNTRLYVGRLSPRTRSRDLEYLFSKYGRFXSVFYTTMEVWWKGALDGIGGHSSXIREVELKRDYAFIEFSDPRDADDAQYNLDGRDVDGSRIIVEFAKGVPRGSGGSRDYNGRGPPPGTGRCFNCGVDGHWARDCQAGDWKNKCYRCGERXHIERNCQNSPRNLRRERSYSRSPSPRRGRGRSRSYSRSRSYSRSRSPSIS

SEQ ID NO: 10779 - protein, 574 aa, Zea mays
  Clone ID: TF_ZmC18109_2.pep
MESPSDFGLSKDSTQKHYKMIKLGLRNLKRSLPEETLSKLSTMPYSLSYPHSARSFVMDPLDLLPDFLMLDLGMSTTSDVTKCKECGVLTSQNNTINETADEQTFKTQKDAQPNQQTSDLGTCCCCEYYGIPCRQISTNESKTTKQKNQILFYGINRQMSPQEQLIADSLIPNALSVDELQSIPKRKHHKDAQPQEETQECYIDGWTITCTQFQPHRRIRSKKQKGKHGKSQEITSRKACYQCGREGHYFRNCPEKSSLSDTPEMKQPQSPDMEYEQKCTETSTNNVKTTPPCNLSSRTCFGCGDIGHLVNGCPKKDVEINKVQKKRQRPQTHASTKNKQRKESTGRISYAVTGTIPYDDAVIFGTLVIHTTIATVLYDPRTTHSLISAQFATKYGIFKCPLRSRKTISTPERKVLANYICPKMMNPNGNEVNGDNDNIPTLTTMNEKNESPRYPMNGMKNNKRNRKMFRYMISSPQPQAKATKHMDTQTEGSSQAQLHEIQTPNQPSPPIGQAKLTRKELKARGACYYCKNEGHLIRKCPKKRLDRLEKKAAKQDPNNNPEDQPVISTTMKIA

SEQ ID NO: 10780 - protein, 1568 aa, Zea mays
  unsure (1)..(1568): unsure at all Xaa locations
  Clone ID: TF_ZM4931.C2.o5.fg.pep
MSDGDGPPPVFYGDDFPYWKIRMEAYLEAIDIGVYKAATQGFPEPRDPTNLVGEEFNYEKWNAKAKNTLFRGICKDVFNRVRNHKNVQDLWMDICALHEGTRSEREDRYHIDMRKLNSFEMLANENVNAMYSCLNILVEEVNGLGLTQISQPDVVRKILSVLPIDKYGHIVTMLHQMDLSVTTPTPILGKINAHEIYMHINDKDESSSKRKDLALKANQERKGKAKVQIEEESSSDDDLDANIALMVRKTTKMLKKLNREGIKFDSRKKKFFSSKRKPISEMDCYNCGELGHLAHQCNKPKKNKLKGKKEDDSDDEKKEKRFFKSKDGKHKRFHKKKNGKAYIVGDWLTDIESSSGSSSSKEENDEKVASIARDFSSPPPSPSSTSHLCLMARGERKVQNENDLTDDSDSDDEFASPSYDELADLLKEYTQIVRKSKAKCDKLKIENESLNAKYDIVMKANAKDKCDKLNEANRELKDRLVKIKEDYTKIKFDHDNHLVENELLSCNTHEAINPVVNIDVATSCDDLSQGDQTSLHDELTEKVEVLTLDNQKLKRYLTDATTRGTVAIENNDFNNELAVDNERLKNEVKKLKTENAHLATSVQKFNKGQYLQNELLMNTVMKNNKSDIGYNSLVQKKATTQYKPKQTYKPIKCFECGKEGHFAHNCKAKPPTPLPKHSRPFAFNAHYVLRKVANGKVKVTFRGNPRMFTSLDENVDGQDKITFGDNSKGKVQGLGKVAISNDLSISNVLLVAPLSFNLLSVGHLCDLRLQCLFTPTEVIVSKMDDESMVFKGFRYNNLYLVDFTSEDAYLRICLFTKASLGWLWHRRLAHVGMSTLKKVLKKDMVRGLKDVVFEKDKPCSACQDGKQVANIHPTKAFMSTSRPLELLHMDLFGPTNYVSACGNLYCLVIVDDFSRYTWVFFLHNKSEVASIFKKFAKKAQNEFDCKIKKIRSDNGKEFDNTNIHEYCDEIGIKHEVSATYTPQQNGVVERKNRTFITLARTMIDEYNTPERFWAEAVNTAYVSFWVFGCKCYIYKKRHHLGKFQRCCDIGFLLCYSSKSKAYQVFNHATGVVEETYDVEFNETNGSQGALENLDDVGDEPLREAMKNMPIVAIKPKEDEEEVQNIDRPSSSSVPQDDEKDERHANEDTFVSHEQARVQAKDVDAPGSSSQVVDRRNSSLLHANPKDQIIGSPSQGDPDSVNAMHKELNNFTHNQVWTLEKPPQDARIIGAKWVFRNKQDDQGVMVRNKARLVAKGFSQVEGLDFGETFAPVARLEDICILLAYASCYDIKLYQMDVKSAFLNGFKNELVYVEQPPGFEDPRYPNHAYRLSKALYGLKQAPRAWYERLCDFLIEKGFKIGTVDTTLFTKKHNGDIFICQVYVDDIIFGSTNDYHCKEFGELMSKEFEMSMIGELTYFLGFQVKQMKDGNFLSQEKYTKDVFKRFNMEKCKPIKTPMPTNGHLDLDEGGNPVNQTLYRSMIGSLLYLTVSRPDIMFSVCMCARFQSNPKKAHLRAVKRIIRYLKHTPSIGLWYPKGATFDLIGYSDSDYTGCKIDRKSTSGXCHLLGRSL

SEQ ID NO: 10781 - protein, 335 aa, Zea mays
  Clone ID: TF_ZmC1373_17.pep
GRAPKSFSSAPPQPGAPLDRDPGDMPRYDDRHGNTRLYVGRLAPRTRSRDLEYLFSKYGRIREVELKRDYAFIEFSDPRDADDAQYNLDGREVDGSRIIVEFAKGVPRGSGGSREYMGRGPPPGTGRCFNCGMDGHWARDCKAGDWKNKCYRCGESGHIERNCQNSPRNLRREKSYSRSPSPRGGRGRSRSYSRSRSYSRSRSPSGSPRGGRRERDERRSRSLSYSRSASPRRSVSPAKEKERSRTPNGSRSPSPRAEVSPPLKDNGARNGSDHEGSPGGGENSKRSRSPSDGYRSPVANGRSPSPRDDRSPSPKGNNEDDERPGSPRGSQSPLN

SEQ ID NO: 10782 - protein, 372 aa, Zea mays
  unsure (1)..(372): unsure at all Xaa locations
  Clone ID: TF_ZmC1373_27.pep
SRPAGASWIQSQSNPISSPLRSSLTLSPNPSPPRRHSRARLPDRDPGDMPRYDDRHGNTRLYVGRLAPRTRSRDLEYLFSKYGRIREVELKRDYAFIEFSDPRDADDAQYNLDGREVDGSRIIVEFAKGVPRGSGGSREYMGRGPPPGTGRCFNCGMDGHWARDCKAGDWKNKCYRCGESGHIERNCQNSPRNLRREKSYSRSPSPRGGRGRSRSYSRSRSYSRSRSPSGSPRGGRRERDERRSRSLSYSRSASPRRSVSPAKEKERSRTPNGSRRXPRSPSPRAEVSPPLKDNGARNGSDHEGSPGGGENSKRSRSPSDGYRSPVANGRSPSPRDDRSPSPKGNDRSPSPKGTNEDDERRGSPRGSQSPLN

SEQ ID NO: 10783 - protein, 213 aa, Zea mays
  Clone ID: TF_ZmC1373_9.pep
LGTSRPAGTKSFSSAPPQPGAPLDRDPGDMPRYDDRHGNTRLYVGRLAPRTRSRDLEYLFSKYGRIREVELKRDYAFIQEFSDPRDADDAQYNLDGREVDGSRIIVEFAKGVPRGSGGSREYMGRGPPPGTGRCFNCGMDGHWARDCKAGDWKNKCYRCGESGHIERNCQNSPRNLRREKSYSRSPSPRGGRGRSRSYSRSRSYSRSRSPSGS

SEQ ID NO: 10784 - protein, 1079 aa, Zea mays
  Clone ID: TF_ZM4884.C5.o1.fg.pep
MGRSFSSTAAPVRPAALAAPPLLLFLLLGLLGAAAANVGDSCSTSADCGAGQWCFDCEPQLSGSHCVRSAATNPFQLINNSLPFNKYAYLTTHNAYAIVGEPSHTGIPRVTFDNQEDTNGVRALMLDTYDFKGDVWLCHSSGGKCNDFTAFEPALDTFKEIEAFLAANPSEIVTLILEDYVHAPNGLTNVFNASGLLKYWFPVSRMPPSGQDWPLVSDMVATNQRLLVFTSVSSKQSAEGIAYQWNFMVENNYGDDGMDAGKCSNRAESAPLNDNTKSLVLMNYFPSLPVKFTACLQHSQSLVDMVSTCYGAAGNRWANFVAVDYYKRSDGGGAFQATDLLNGRLLCGCQDIRACSQAFPKSTYNGIEYVVPEQPHKQQLNKKNPTWTLIKEKRGIRLSFREETTSARALMSRDVKTVYSPPLANVLDPTSGIGAEDSIVCGLIIPEWNKMASNNNVHIGKPPHFDRNNYNYWKIRMSMHLRAMGGKIWPIVKDRFVVLKEDEPSISDNENILTNDQAMNVFYDALDINEFNRIKNLTTAHEIWIKLMEIHEGTTIVKSAKLYVCKGKFEQFIMKEDESVSDMFNRLNEIVNELKGLGFNVLDVDFTHKFLRSLPEKYETIVTMLVRSDLSTTSPTEVLGEILTQDIFKKSQADAISLAKKVNNESIALKAKASKAIEKEDSDDEKNESESDGDMALFVKKFNKFMKMKRGQSRRSQTSRRNAFNDRKCFECGEPGHIAMNCPNKKKKGKDEDDKKKKKFYNKKKDGKAYLVEWDSDDSSDDDDDDTSSKLNAGIAIKEAPSLFSSPHCLMANGDAKVKIFTDLNGINDDDDVDDDGYSYDDLVRMLGEVNDYMHKEKEKFKTLKELYINLQVSFEELKTSHNDLKENCEKLAEAQNSSIVHEVVVVTEDVGVTCDLLDSPTSEPLPTNSICDKCKISLINDNIALDESQIIIENEVLVDRVNALTYDLEKAYGGKAKLDFILGSQRCSLNREGLGYVPKKGKNAFVKQKTLFVKECDKVCHKCHKKGHIKKNCPKLKNVSSTCFEHCYVLSHNAKGVHAKFVGTSIVGNKKKAIWVPM

SEQ ID NO: 10785 - protein, 124 aa, Zea mays
  unsure (1)..(124): unsure at all Xaa locations
  Clone ID: TF_jC-zmX700430855a1.pep
LELGLETEQKPEAGYWNVVSARAXDTCTSAPARLHCHTDGSSLCPGCYARAHSAGXRHARIXIHEGCEHSHGCGTWHADXAALCAACDVDIHXVNPLARRHERLPVAPLFCALADTPQPFPSPD

SEQ ID NO: 10786 - protein, 174 aa, Zea mays
  Clone ID: TF_ZmC17423_4.pep
PGVELHKYWGVGGRRCGSCEGAPAAVHCRTCVGGSFLCTTCDARPAHARLGHERVWMCEVCELAPAAVTCKADAAVVPEAFGGSGSGGGSFELDFTRPKPQAYMPYTGTPQSHSVPSADVEVVPERGDLAAVRPVPLMGESREARLMRYREKRKNRRFEKTIRYASRKAYAETR

SEQ ID NO: 10787 - protein, 113 aa, Zea mays
  Clone ID: TF_LIB143-024-Q1-E1-F4.pep
HAQNNWNKVQPKRFSTVPGWNQPRRLSSRSIGGLIGTYWGLGGPLCWACSGSPAAAHCRTCPGGAYLCPGCDTGHARAVHERVWVCEVCECAPAAVTCRADAAALCAACDADI

SEQ ID NO: 10788 - protein, 98 aa, Zea mays
  Clone ID: TF_uC-zmflteosinte79f03b1.pep
MGEGDDDRRDELLGAGRDHEPERADAEEAKKPAPGEAEACAGAGTEAATCDYCGTAAAAVYCRADSARLCLPCDRLVHGANGVCSRHARAPLCAGCCA

SEQ ID NO: 10789 - protein, 320 aa, Zea mays
  Clone ID: TF_ZmC11847_1.pep
MEGDEKSAGGAPAYWGLGARPCDACGAEAARLYCRADAAFLCAGCDARAHGAGSRHARVWLCEVCEHAPAAVTCRADAAALCASCDADIHSANPLARRHERLHVAPFFGALADAPKPFASAAPPKATDDDGSNEDEAASWLLPEPDHGQKEGATTEVFFADSDPYLDLDFARSMDDIKTIGVQQSGSPELDLAGTKLFYSDHSVNHSVSSSEAAVVPDAASGMAPMVAVVSRGLEREARLMRYREKRKSRRFEKTIRYASRKAYAETRPRIKGRFAKRTPGAGEDTLEEHEEMYSSAAAAVAALMAPGGADADYGVVPTY

SEQ ID NO: 10790 - protein, 116 aa, Zea mays
  Clone ID: TF_ZmC153_1.pep
MGHEGSCRCELCGAPAAVHCAADEAFLCAACDAKVHGANFLASRHRRTRLRLAAAADPPPDDEAGYGSAASSCVSTADSAPRPRRGARAPARSVRPEGVLEGWGQRMGLGAGGRPR

SEQ ID NO: 10791 - protein, 212 aa, Zea mays
  Clone ID: TF_jC-zmshLIB3587P024c06b1.pep
LQPVHECDAYFFCLEDRALLCRSCDVAVHTANSFVSAHRRFLLTGVQVGQELEPDDLSLEQREAEASSPPPAKSEPTPPLYSESDFGWAAGAGAGATGSLTDWLAVEEEFDSPAPRLAEVAPRATPKRTPRAPAFGAGQGRIAGGVMDWPLGEFFRGVSDFNGGFSFGESGNSKADSGKLGDSAGGSPYYRSSEEERDANELFGQVPEIQWS

SEQ ID NO: 10792 - protein, 399 aa, Zea mays
  Clone ID: TF_ZmC8680_1.pep
MSSSKHAAGAVGGKAARACDSCLRRRARWYCAADDAFLCQGCDASVHSANPLARRHERLRLRPTDPHSTTLEAGVATATWKKRQQQVAPAWSKRKARTRRPHVKSVGELLSRKLVVVPEVSPIESSEERKAEEEEEEEEGQLLYCVPTFDRALAELCSPPPPVDDPTASSCCRDDVDGAVENNTKAPPVVVAESPVQQLPDSFAGFGPTDAELREFAADMEALLGQGLDDGNELDRSFYMESLGLMAQQAEDVGRIKMEPNGIVSSRSRGEGAPGFGPTEMKPEASSAAAEVLDTDFNCCSPTVMMDNEDEDSFEQKASASNAAAAAAGTQFLKRSLDLSLNYEAIIESWGSSPWTDGQRPSVQLDDFWPHAHLTVRLFPNSRCSSSSTDRLRALSTRA

SEQ ID NO: 10793 - protein, 134 aa, Zea mays
  Clone ID: TF_LIB4756-131-A1-K1-D8.pep
MELHKYWGVGGRRCGSCEGAPAAVHCRTCVGGSFLCTTCDARPAHARLGHERVWMCEVCELAPAAVTCKADAAVLCAACDSDIHDANPLARRHARVPVAPIGSEAAAAAVEAMLFGGWRGARGLRRQRQRRREL

SEQ ID NO: 10794 - protein, 364 aa, Zea mays
  Clone ID: TF_ZmC17423_1.pep
MELHKYWGVGGRRCGSCEGAPAAVHCRTCVGGSFLCTTCDARPAHARLGHERVWMCEVCELAPAAVTCKADAAVLCAACDSDIHDANPLARRHARVPVAPIGSEAAAAAVEAMLFGTGEAAASEADEQHAAAEHAHAHAHALNLNVEAKDMKLDYLFSELDPYLSVEIPRFQHADSVVPNGAGAAVELDFTCGIGVKHSSYSSYTATSLAHSGSSSEVGVVPEAFGGSGSGGGSFELDFTRPKPQAYMPYTGTPQSHSVPSADVEVVPERGDLAAVRPVPLMGESREARLMRYREKRKNRRFEKTIRYASRKAYAETRPRIKGRFAKRADHDGDADADDAEAEAEAAVPMSYVLDFGYGVVPSF

SEQ ID NO: 10795 - protein, 267 aa, Zea mays
  Clone ID: TF_ZmC460_11.pep
PIGGINGSSRTRLNYYRGAVISREKLLRLEAALCARCDVEGDAANKLASKHQRLPLEALSAKLPRCDVCQEKAAFIFCVEDRALFCRDCDEPIHVPGTLSGNHQRYLATGIRVGLASASACSDACDAHDSDHHAPPKATIEPPHAAVSAAVQQVPSPPQFLPQGWAVDELLQFSDYESSDKLHKEPTLGFKELEWFADIDLFHEQAPKASRTLAEVPELFGYQAANDAAYYRPAKAAGGGGAGVRQSKKARIEVTDDEDYLIVPDLG

SEQ ID NO: 10796 - protein, 242 aa, Zea mays
  unsure (1)..(242): unsure at all Xaa locations
  Clone ID: TF_LIB4767-072-A1-K1-F10.pep
MIATTGGSSAKAAAVGGKAARACDGCLRRRARWYCAADDAFLCQGCDTSVHSANPLARRHERLRLCPASPLQTPPARSAAAATATNKRERHDEVAVPAWFGRKARTPRGGHAKSVGQVALSRRLVVPHAAGGDSDSPDERNGGEEEQLLYRVPILDPALAEFCSPPPLEDPAKPDPAAPLAQFCPVGGHFNFGPTDAELREFAADMEALLGHXLDDGNEEESSFYMETLGLLDQWKWATMPR

SEQ ID NO: 10797 - protein, 269 aa, Zea mays
  Clone ID: TF_ZmC26880_1.pep
MDTAAELELGLELEQKPAAGYWSVVGARPCDACAAEPARLHCRADGAFLCPGCDARAHGAGSRHARVWLCEVCEHAPAAVTCRADAAALCAACDADIHSANPLARRHERLPVAPLFGALADAPQPFPSPAPAQGEAVAEDYGSSEAEAASWLLPEPDNSHEDSAADTFFADSDAYLGADLDFARCMDGVKAIGVPVAPPELDIGAGSFCYPEHSMNHILSSSSEVAVVPDAQAAGLPVVVVVSRGEEREARLMRYREKRKNRRFDKTIR

SEQ ID NO: 10798 - protein, 147 aa, Zea mays
  Clone ID: TF_ZmC3809_1.pep
TSPDGYPAWCSAREGRPAGLEWGCIDDKRGLLRCEAHRAILCRECHVSVHTASDLTMRHARFLLTGVRLSAEPAAACPAPEDEEEEDDENSSGSFCCSAGDAAAHPPPLPSSAPATSHGSDSSSISEYLTKTLPGWHVEDFLVDEAA

SEQ ID NO: 10799 - protein, 348 aa, Zea mays
  unsure (1)..(348): unsure at all Xaa locations
  Clone ID: TF_ZmC460_16.pep
MPGASVTMSPSRAFTETRGRLEAAMAAVAAIWAARRWCERIRATRGWISVDRGSKATLPLTMPRRVLSRLQRIQHAARGKGASRRPAAARRPGGLSQWHGPSGANDLTPGRPRGASLPRCDVCQERPAFIFCVEDRALLCRDCDEPIHVPGTLSGNHQRYLATGIRVGFSSVCGASAEGLPPAPPKGSSKPAAVVSAPAAGTTTKTRTVKDALPQEVPSSPFLPPSGWAVEDLLELSDYESSDKXGPNHPKPLFFYSSLGLKELEWFEDIDLLLAWLPAITAMAGVLRKAGRRLVTLPSLFGTEAANGAAYYRPAKATATAGTGVRQSKKARTEVTDDEDHLIVPDLG

SEQ ID NO: 10800 - protein, 413 aa, Zea mays
  Clone ID: TF_ZmC9091_1.pep
MTSAGAATGAALGARTARSCDGCMRRRARWHCPADDAFLCQTCDVSVHSANPLARRHHRVRLPSASCSSPPRDPDAPTWLHGLKRRPRTPRSKPGGSKSNKHEATPSFIAAAASSAAVPDLEAEESGSGILGGNDDHHGFLQDDDEDLLYRVPVFDPMLAEFYNPVADEGEQKPACSLLMPSLAETSPEFASGGSAEADGLSVSFHVPDMELASFAADMESLLMGVDDDGFDCLGFLDEEKPQVNADLDAIVAPAPEPEDKKRKRPEMILKLNYEGVIASWVRDGGSPWFHGERPHLDCHELWSDDFTTGSRELLGGAVTPVTGGEREARVSRYREKRRTRLFAKKIRYEVRKLNAEKRPRMKGRFVKRATLPPLPRPPPPQQQQQQKQLPRAPPHVGMVLPPPPVSNGRLWF

SEQ ID NO: 10801 - protein, 224 aa, Zea mays
  unsure (1)..(224): unsure at all Xaa locations
  Clone ID: TF_ZmC323340_1.pep
SLRFRPPSITSKDRERLARQALHRAVGAGAKSYIYRRTGGRPADGSPPRRLPLRALRRARGRALRGGRGLPLRRLRRQGARRQLPRVAPPPHAPPPRGAGRVRVRVRGELLRVHGGRLGGAGAPGPRPRPRLRARRHGRRAVAGGGGARRDRRRRPRSRRGAAAAGGVRARAGGARGGGGQVHGARARAXGRGRHGRRGGGLGRVRLGRSQVQPATSLIFSRAR

SEQ ID NO: 10802 - protein, 282 aa, Zea mays
  Clone ID: TF_ZmC460_15.pep
RSSATRARARLPRWCAAPTRPRCARAATSRSTPPTSSRASTSASRSRRSPPSSRAAKSTTPALDFFPPLRVVSLCSPAGAHGRSVLVPWPSALSATSSLASAAFFSTAPWLSSASSSTTAPSPSLRGAPVFQARRGALSLQSSRSGVLVVLASALWPSPSRVLVSLLCPAPSSCAWLPARVSGHLQLAGRDPPEVFPMAGSLLNPSRGRVRSSKPQILPRRVRRLDLQPCVIDLCSPDVSPNIDLRAWIRRRVSLSGGRAHPARLLSSTMDGSHLGLFINSA

SEQ ID NO: 10803 - protein, 358 aa, Zea mays
  unsure (1)..(358): unsure at all Xaa locations
  Clone ID: TF_ZmC460_7.pep
MKIQCDACEGAAATVVCCADEAALCARCDVEIHAANKLASKHQRLPLEALSASLPRCDVCQVRTSPAHCACATRGTRQAGTSXNEATTPPRARSQEKAAFIFCVEDRALFCRDCDEPIHVPGTLSGNHQRYLATDIRVGFASASSACSDACDAHDDSDHHAPPKAAVSSAAQQVPSPPQFLPQGWAVDELLQFSDCESSDKARRXRKLRSMTNNLPACTHRLMHGLVCVCVLQLHKESPLGFKELEWFTDIDLFHEQTPKAGRRLAEEPELSGTQAANDAAYYRPAKATATAGAGVRQRSFLRWRRCRFFSDFSRLIFSAYYSSAIIFFFGGIRVRQGKISRIRGSKATEPLTTPEWG

SEQ ID NO: 10804 - protein, 498 aa, Zea mays
  Clone ID: TF_UC-ZMFLB73069A02_FLI.pep
MKSCGGGGADGQQCPCDYCGEAAAALHCRADAARLCVACDRHVHAANALSRKHVRAPLCAGCAARPAAARVSLGADPAFLCADCCEGCAAASAARVSVEGFSGCPSAAELAASWGLDLRRAAVAVGDDGDGGDDDDPFLSVLDYSVLGVGVADTDLRDLYVPCDPPRVPVPDAGARPLRGEALCDQLAEMARRDEADTSHAHPHSDLSPRTPRRTSAASSGRLPSGKMAPPAALPVPAHPPPAAPQEVPLPYTSLLMMASANCSDLIGGGDRVGDTDEQLLWDCAAPSVPPTQIWDFNLGRSRHHDEKSALEVGYGSNHGGFMIKSYSDMLKDISSGTTKDLEDIYDSRYCSTAEDIMSSNICQLSSKNVSTGSNKRKVRSCAASTMDGPTTSGNHNHVPASASGPGAALTREISFGDQTVSAPAAETERPAAVRIDSETLAQNRDSAMQRYREKKKNRRYEKHIRYESRKLRADTRKRVKGRFVKSTEALNAARYNG

SEQ ID NO: 10805 - protein, 503 aa, Zea mays
  Clone ID: TF_ZmC13160_1.pep
MKSCGGGGADGQQCPCDYCGEAAAALHCRADAARLCVACDRHVHAANALSRKHVRAPLCAGCAARPAAARVSPTPSPGGADPAFLCADCCEGCAAASAARVPVEGFSGCPSAAELAASWGLDLRRAAVAVGDDGDGGDDDDPFLSVLDYSVLGVGKADTDLCDLYVPCDPPRVPAPYAGARPLRGEALCDQLAEMARRDEADTSHAHPHSDLSPRTPRRTSAVSSGRLPSGKMAPPAALPVPAHPPPAAPQEVPLPYTSLLMMASANCSDLIGGADRVGDTDEQLLWDCAAPSVPPTQIWDFNLGRSRHHDEKSALEVGYGSNHGGFMIKSYSDMLKEISSGTTKDLEDIYESRYCSTAEDIMSSNICQLSSKNVSTGSNKRKVRSCAASTMDGPTTSGNHNHVPASASGPGAALTREISFGDQTVSAPAAETERPAAVRIDSETLAQNRDSAMQRYREKKKNRRYEKHIRYESRKLRADTRKRVKGRFVKSTEALNAARYNG

SEQ ID NO: 10806 - protein, 168 aa, Zea mays
  Clone ID: TF_ZmC460_17.pep
MHHSPPGLPSLAVHFFLHHSHLISGVILFVLASLVVVGWVLASWEYRPRGGAAMKIQCDACEGAAATVVCCADEAALCARCDVEIHAANKLASKHQRLPLEALSAKLPRCDVCQEKAAFIFCVEDRALFCRDCDEPIHVPGTLSGNQQRYLATGIRVAFAIASGCSDA

SEQ ID NO: 10807 - protein, 176 aa, Zea mays
  Clone ID: TF_LIB3591-076-Q6-K6-E12.pep
SSGKGAARDSAAAGQKHGTGTRCELCGGAAAVHCAADSAFLCLRCDAKVHGANFLASRHVRRRLVPRRAADPEASSAASSGSSCVSTADSAESAATAPAPCPSRTAGRRAPARARRPRAEAVLEGWAKRMGFAAGPARRRARAGAAGADRRVVDGAPAGRPAGGPLGGMGRVLLSS

SEQ ID NO: 10808 - protein, 226 aa, Zea mays
  Clone ID: TF_ZmC101_1.pep
MGAARDSTAAGQKRGTGTRCELCGGAAAVHCAADSAFLCLRCDAKVHGANFLASRHVRRRLVPRRAADPEASSAASSGSSCVSTADSAESAATAPAPCPSRTAGRRAPARARRPRAEAVLEGWAKRMGFAAGPARRRAAAAAAALRALGRGVAAARVPLRVGMAGALWSEVAAGCRGNGGEEASLLQRLEAAAHVPARLVLTAASWMARRPDARQEDHEEGWAECS

SEQ ID NO: 10809 - protein, 255 aa, Zea mays
  unsure (1)..(255): unsure at all Xaa locations
  Clone ID: TF_ZmC460_5.pep
MKIQCDACEGAAATVVCCADEAALCARCDVEIHAANKLASKHQRLPLEALSASLPRCDVCQEKAAFIFCVEDRALFCRDCDEPIHVPGTLSGNHQRYLATGIRVGFASASSACSDACDAHDDSDHHAPPXGRRRHRTAQQVPSPPQFLPQGWAVDELLQFSDCESSDKLHKESPLGFKELEWFTDIDLFHGQTPKAGRRLAEVPELSGTQAANGAAYYRPAKATATAGTGVRXXSKKARTEVTDDEDHLIVPDLG

SEQ ID NO: 10810 - protein, 407 aa, Zea mays
  Clone ID: TF_ZmC1299_1.pep
MGALCDFCGEHRSMVYCRSDAASLCLSCDRNVHSANALSRRHTRTLLCDRCASQPAMVRCLAENASLCQNCDWNGHIAGSSSAGHKRQTINCYSGCPSSAELSRIWSFVSDIPNVAPEPNCEQGISMMSISDSGVSNQDNAAGDSILLDIASATLVSDIGTCDKLLVGSSSGAGVNLLPLATGQTETAGSVDSTPDKVPYTPDKDMFSKDSIYEDFCVDDADLAFENYEELFGTSHIQTEQLFDDAGIDIYFEMKEAPAGNSTESKLKQPANSNAVSADSGMSNPGVKGDSSVCTPLRQARSSLSLSFAGLTGESSAGDHQDCVVSSLLLMGEPPWQPPGPEGSIAGGSRDSALTRYKEKKMRRKFDKKIRYASRKARADVRKRVKGRFVKAGEAYDYDPLCQTRSY

SEQ ID NO: 10811 - protein, 210 aa, Zea mays
  Clone ID: TF_ZmC3762_2.pep
MQVLCDVCGGAPAAVLCCTDEAALCSACDRRVYRADKRRRIPLVQPCGDDSAAAAAAPLCDVCKERRGLVFCVEDRAILCPDCDDPIHSANDLTAKHTRFLLVGAKLSAALVDQAPPSPDDDDDDVAEPDAVPAACAAKASSLESGGGSSISDYLTNICPGWRVDDLLLDDSSFSAPSKTGYSDGHDQVPSVDADLFHVVASGRPGKRVG

SEQ ID NO: 10812 - protein, 330 aa, Zea mays
  Clone ID: TF_ZmC3_3.pep
MCVLHPTVSCACLLTEVHEKTRALEASGYFFCLEDRALLCRDCDVAIHTVNSFVSVHQRFLLTGVQVGLDPADPVPPIAEKHVNAAGGSVNQPVRHQPKRSPTVQFSVEGSASVPTKNVTNGDCSRQNFVPTARGEVVDWTMNNSTIRSVESPPKYMSEESPTLLQSSQTTTVFSNQINGNSDGTYHLSFSSGNVTDSLPDWPVDEFFSNSEYVPNLGFSEHGSSKGDNAKLESAGGSLQCRLAEGSIAEELLGQVPGLITDDYMSRVPENSWTVPEVPSPPTASGLNWHGNLCFPAYDSTMFVPEITSLQNSQNQFTVPSSFKRRRREY

SEQ ID NO: 10813 - protein, 322 aa, Zea mays
  Clone ID: TF_ZmC22615_1.pep
MKVLCSACEAAEASVLCCADDAALCARCDREVHAANRLAGKHQRLPLLAPGGQGAAAVSPPKCDICQECDAYFFCLEDRALLCRSCDVAVHTANSFVSAHRRFLLTGVQVGQELEPDDLSLEQREASSPPPAKSEPTPPLYSESDFGWAAGAGATGSLTDWSAVQEEFGSPAPRLAEAAPRATPKRTPRAPAFGAGQGRIAGGVMDWPLGEFFRGVSDFNGGFSFGESGNSKADSGKLGDSAGGSPYYRSSEEERDANELFGQVPEIQWSVPALPSPPTASGLHWQHGGPDSGAFVPDICTPDGAGRCFPTASGAAKRQRNR

SEQ ID NO: 10814 - protein, 280 aa, Zea mays
  unsure (1)..(280): unsure at all Xaa locations
  Clone ID: TF_ZmC18754_1.pep
MSAADAAGGKEAAPACDSCTGMPAVVYCRADSARLCLPCDRHVHGANTVSTRHARAPLCAGCRAAAAAAARHAXGFLCASCRLGEEKDERDGGGAADSSSDDGGAVEGYAGCPSVADLATILGAGSAWEEPQTLRLESRSSGGELADEVIRQLVELARSEAAARAEMEQLTPWPSPELAAITGQYADFGALDADTAWHDDAAAIAAAVVPSTEEEQQAWIAAGCDVGACRTEEKARENDAALAEPCLSSFVEMSEICPASVVVTLSHGGDEGVDSSGKTA

SEQ ID NO: 10815 - protein, 397 aa, Zea mays
  Clone ID: TF_ZmC300_43.pep
MGEGDDDRRDELLGAGRDHEPEPADAEEAKKPAPGEAEAGNGAGAEAATCDYCGTAAAAVYCRADSARLCLPCDRLVHGANGVCSRHARAPLCAGCCAAGAVFRRASTSAFLCSNCDFGRHRDGGDPPLHDRCAVQPYSGCPPASDLAALLAVPLFDKPAAEDGAWWNIWEEPQVLSLEDLIVPTTPCHGFEPLLTPPSPKNRSISPDRKVNEEILRQLGELAESDGGMQASAGREEAEQAGGDQFPSWASPQYATGHGNFGTEDNHENGRWNNSEYHDLNDACKLEVTYDQAPVNSAEPCLSSFAPLSEICPSMSNGSSKEDNHQANPGIGMPMQGLPKRSGFDVVPCPDRDSVISRYKAKRKTRRFDRQVRYESRKVRADGRLRIKGRFAKANQT

SEQ ID NO: 10816 - protein, 201 aa, Zea mays
  Clone ID: TF_ZmC2446_2.pep
PTRPVAAHCRTCPGGAYLCGGCDAGHARAGHERVWVCEVCECAPAAVTCRADAAALCAACDADIHDANPLARRHERVPVQPIGAAADPAAEKAALLFGLAAEGKDGGDAAKVVVDASKLDLLFADDVVDPFLAQDFARFPHADSVVPNDGSNCGAAVDFDFGGGVAVAAKQPSYSSYTAASLGHSGSSSEVGLVPDVMCGR

SEQ ID NO: 10817 - protein, 211 aa, Zea mays
  Clone ID: TF_ZmC2446_1.pep
MEALVGRYWGLGGRRCGACGGSPAAAHCRTCPGGAYLCAGCDAGHARAGHERVWVCEVCECAPAAVTCRADAAALCAACDADIHDANPLARRHERVPVQPIGAAADPAAEKAALLFGLAAEGKDGGDDDAAKVVVDASKLDLLFADDVVDPFLAQDFARFPHADSVVPNDGSSCGAAVDFDFGGGVAVAAKQPSYSSYTAASLGHSVSVPF

SEQ ID NO: 10818 - protein, 269 aa, Zea mays
  unsure (1)..(269): unsure at all Xaa locations
  Clone ID: TF_ZmC1611_3.pep
MGGEGSTSPAPGGAACAVCGGAAVVYCVADAAALCSPCDAAVHAANLLASRHERVPLSMAAVPSASGAYDDLFAPDDVDAAAPAQAQGLGSPRNGSSSASFTTSGDSGAEGSSLFDFDLLSGVDLAACVTDGVAPLHHDDAAPLWAQPGLAVAWATAWSPADSAAAVVAAAAEREARVQRYREKRKNRRFHKTIRYASRKAYAEARPRIKGRFVKRAAXTSSSLSSAAGTXDDGNDATGAAAKFWLSFSDDARDGFYVDAGAYGVVPSF

SEQ ID NO: 10819 - protein, 276 aa, Zea mays
  Clone ID: TF_ZmC13160_3.pep
MARRDEADTSHAHPHSDLSPRTPRRTSAASSGRLPSGKMAPPAALPVPAHPPPAAPQEVPLPYTSLLMMASANCSDLIGGGDRVGDTDEQLLWDCAAPSVPPTQSSGFNLGRSRHHDEKSALEVGYGSNHGGFMIKSYSDMLKDISSGTTKDLEDIYDSRYCSTAEDIMSSNICQLSSKNVSTGSNKRKVRSCAASTMDGPTTSGNHNHVPASASGPGAALTREISFGDQTVSAPAAETERPAAVRIDSETLAQNRDSAMQRYREKKKNRRHGSMS

SEQ ID NO: 10820 - protein, 258 aa, Zea mays
  Clone ID: TF_ZmC460_4.pep
MKIQCDACEGAAATVVCCADEAALCARCDVEIHAANKLASKHQRLPLEALSAKLPRCDVCQEKAAFIFCVEDRALFCQDCDEPIHVPGTLSGNHQRYLATGIRVGLASASACSDACDAHDSDHHAPPKATIEPPHAAVSAAVQQVPSPPQFLPQGWAVDELLQFSDYESSDKLHKEPTLGFKELEWFADIDLFHEQAPKASRTLAEVPELFGYQAANDAAYYRPAKAAAGGGAGVRQSKKARIEVTDDEDYLIVPDLG

SEQ ID NO: 10821 - protein, 100 aa, Zea mays
  Clone ID: TF_LIB4732-095-Q1-K1-B12.pep
MGAAGDAAAAGTRCELCGGAAAVHCAADSAFLCPRCDAKVHGANFLASRHVRRRLPRGADSGASASSGSCLVTDSAQSRGGAAARDREKGGRAPPRAEAV

SEQ ID NO: 10822 - protein, 196 aa, Zea mays
  Clone ID: TF_ZmC101_2.pep
MGAAGDAAAAGTRCELCGGAAAVHCAADSAFLCPRCDAKVHGANFLASRHVRRRLPRGGADSGASASSGSCLSTADSVQSRAAPPPGRGRGRRAPPRAEAVLEGWARRKGVAAGPACRRRVPLRVAMAAARWSEVSAGGGAEAAVLAVAAWWMTRAARARPPAAGAPDLEEGWAECSPEFVVRQGPHPSATTCGRR

SEQ ID NO: 10823 - protein, 235 aa, Zea mays
  unsure (1)..(235): unsure at all Xaa locations
  Clone ID: TF_ZmC613005_1.pep
MSSWRLPRPVVGLGAKRIRRGSSVRLELEAQKTSRTQQNSSLTSLPLPLPLPLCGPNNLSLSLSLSLFFLSALQTISPSPSLLSKTNETKQETEKSPSPVAVAVAVAARIMSAAAAAEVGKEKGAATPGPGPGPGGACELCGAAARVYCGADEATLCWGCDAQVHGANFLVARHARSLLCRGCARPTPWXAAGPRLGPTVSLCVRCVRRGPRAVARRGHEDMRGAADRDADDAPH

SEQ ID NO: 10824 - protein, 245 aa, Zea mays
  unsure (1)..(245): unsure at all Xaa locations
  Clone ID: TF_ZmC519810_1.pep
MDQDERQHPEPPAMEKELSADALACDYCSGPQAVVYCRADSARLCLPCDRLVHAANAVCSRHLRALLCAACRATGAVFRHAGTEFLCSNCDFGRSRDAELPLHDRCTVQGYTGRPSAHDLAALLGVPDFDKPSAGKADDGWWAIWEEPQVFRLEDLIVPTTSCHGFQPLVTPSSPKIHNSPDGKTNDEVIRQLRELAEVDMGSGQITPREEAEQAAHQLPSWTESQHTTGXGDFRIDNSHGVATM

SEQ ID NO: 10825 - protein, 151 aa, Zea mays
  Clone ID: TF_LIB4829-058-R1-N1-D7.pep
GRESLRCHISPRPKTPSSCAACVLLPPLVHISPPPPRRLPTPLALGRITGDRREAGDLRFLSPGWRRSDDTGVGSGAALGCGRSAMCAGAHRRCSSVRPTRQRFAGPATRRLIPLPTPSDPRRSSSLSQIGRGCCFDWGGGRARWSLLPPS

SEQ ID NO: 10826 - protein, 328 aa, Zea mays
  unsure (1)..(328): unsure at all Xaa locations
  Clone ID: TF_ZmC3_2.pep
HSLFCSVSNPPARPFSCLSLLQEASGYFFCLEDRALLCRDCDVAIHTVNSFVSVHQRFLLTGVQVGLDPADPVPPIAEKHVNAAGGSVNQPVRHQPKRSPTVQFSVEGSASVPTKNVPNGDCSRQNFVPTARAEVVDWTMNNSTIRSVESPPKYISEESPTLLQSSQTTTVFSNQINGNSDGAYHLSFSGGNVTDSLPDWPVDEFFSNSEYGPNFGFSENGSSKGDNAKLGGAGGSPQCRLAEGSVAEELLGQVPGLITDEYMSRVPENSWTVPEVPSPPTASGLNWHGNLCFPAYDSTMXVPEITSLQNSESHFTVPSSFKRRRREY

SEQ ID NO: 10827 - protein, 261 aa, Zea mays
  unsure (1)..(261): unsure at all Xaa locations
  Clone ID: TF_ZmC460_6.pep
MKIQCDACEGAAATVVCCADEAALCARCDVEIHAANKLASKHQRLPLEALSAKLPRCDVCQEKAAFIFCVEDRALFCQDCDEPIHVPGTLSGNHQRYLATGIRVGLASASACSDACDAHDSDHHAPPKATIEPPHAAVSAAVQQVPSPPQFLPQGWAVDELLQFSDYESSDKARRXQAPPTLGFKELEWFADIDLFHEQAPKASRTLAEVPELFGYQAANDAAYYRPAKAAGGGGAGVRQSKKARIEVTDDEDYLIVPDLG

SEQ ID NO: 10828 - protein, 106 aa, Zea mays
  unsure (1)..(106): unsure at all Xaa locations
  Clone ID: TF_LIB4756-104-R1-K1-D9.pep
MSAAWEGGKEKGAATPAPGGACELCGAMARVYCGADEATLCWGCDAQVHGANFLVARHARALLCRGCARPTSWRAAGPRLGPSASLCDRCVRRXSGAVGTGGDVEM

SEQ ID NO: 10829 - protein, 164 aa, Zea mays
  unsure (1)..(164): unsure at all Xaa locations
  Clone ID: TF_ZmC460_13.pep
MKIQCDACEGAAATVVCCADEAALCARCDVEIHAANKLATSXSKHQRLPLEALSASLPRCDVCQEKAAFIFCVEDRALFCRDCDEPIHVPGTLSGNHQRYLATGIRVGGASASSACSFPCDAHDPSEYFARPREDPFSPPIGLRAWLKSQWREAPVCRIMIEPL

SEQ ID NO: 10830 - protein, 143 aa, Zea mays
  Clone ID: TF_ZmC3_4.pep
MRIQCNACGAAEARVLCCADEAALCVACDEEVHAANKLAGKHQRVHLLTDSATAAASPAPAVPKCDICQEASGYFFCLEDRALLCRDCDVAIHTVNSFVSVHQRFLLTGVQVGLDPADPVPPIAEKHVNASGGSVKQSVRHSA

SEQ ID NO: 10831 - protein, 199 aa, Zea mays
  Clone ID: TF_ZM3541.C1.o2.fg.pep
MEIVKTDLRNKMGSDWLNHRMVCGLIRLLMQKQEAKWNKYNNSSSISSATGPKGTLFPMCGMNLAFDRDLIGPAMYFGLMGDGQPIGRYDDMWAGWCVKVICDHLGLGVKTGLPYIWHSKASNPFVNLKKEYKGIFWQEDTIPFFQAVVLPKDCDIALSQQVKEKLGKVDPYFTKLADAMVTWIKAWDSLNAANGKPKK

SEQ ID NO: 10832 - protein, 140 aa, Zea mays
  Clone ID: TF_LIB4730-019-R1-K1-B3.pep
SRHAAGGVVVGGGGGGGCPLLSDFGWSLPEAEPHAANQFMVDWWWASDRCGAQAGGKITGDRGVDGDGAELRLCSHVRCGRRETRRHEFRRCSVCGAANYCSRACQALDWKRAHKVQCVPVDRWLLAAVGDAQEEQQQPQ

SEQ ID NO: 10833 - protein, 146 aa, Zea mays
  Clone ID: TF_ZmC1511_5.pep
MPKYLLPAHVCHWCGTWKGDKICSSCKKARYCSEKHQALHWGTGHKNDCLQIISSSAASNSVLPTVGKVPANTSWPEFEIKIDYEGIFDSDSGDENNSKLLVMQRHGKPDAMMQSWMDQFEADSDNKCWTSFQERVSRAPNQVLRY

SEQ ID NO: 10834 - protein, 290 aa, Zea mays
  unsure (1)..(290): unsure at all Xaa locations
  Clone ID: TF_ZmC312728_1.pep
MLGGGAGGGGAGAGLGLDLSAVIQAAVVGLVLFSAAVVAVRRAASRYFVVDAAGFAASYDDHHHSSPASPMSSKGNRSEQGAAAADLTGPCAACGVVTSKKCSGCKRVRYCSQECQTKHWQIDHKFKCKQMKSLDLADKLSCGGEANSKKTSGFGRISLVPACKKISKGQVLFPYDEFLKLYNWKDLDVVPCGLMNCGNSCFANVVLQCLSCTRPLVAYLLGKDHSRECSVRHEDWCFXLCELQCHIQRASXSLHPFAPTNILSHLPNIGGNLXGVGRQEDAHEFMRFAI

SEQ ID NO: 10835 - protein, 482 aa, Zea mays
  Clone ID: TF_ZmC2175_1.pep
MASWLEQLQRELAARGLTVASIPGKGRGLIATCTFFPGDVILNQEPYASTPNKILVGSSCDHCFTSGNLRKCSMCRVMWYCSSNCQKEEWKLHQLECRAMAALTEDRKKMLTPTIRLMVRLALKRKLQNEKVIPSSSIDNYNLVDGLESHISKVDENQLVLYAQMANLVSLILPFIELDLKEIAQTFSKFACNAHTICDPELRPLGTGLYPVISIINHSCVPNAVLIFDGRTAYVRALQPINKDEEVSISYIETAAVTKKRNNDLKQYFFTCTCPRCVKGFDEDALLEGFRCKNQACDGFLLPNSGKKAYTCQKCGASRDVEEIKNMRSEILQLSDKASSFLSSGNKAEAGSIYKIIEQLERNLYHAFSTTLLHTCETLLKIYLELQDWWTALTYCRLTIPVYERVYPPFHPMIGLQFYTCGKLEWLLEFTEDALKSLTRAADILKVTHGVKSQFMKELFGKLEEARAEVSFRLSSRHGHDE

SEQ ID NO: 10836 - protein, 155 aa, Zea mays
  Clone ID: TF_ZmC56_1.pep
VAYAHVVGNPGCLTSELGCFTTVPASLRGWAHPANRFLCDWFSANPLPFPPRRLLLMCSMPTCGRPETRGLEYRRCPVCGIARYCSRSCQSLHWRMGHTRECVPTHQWLMEAIANHAVVNADDGANAAAMPAVNNNSATHHNNLGGAAADAPAPK

SEQ ID NO: 10837 - protein, 197 aa, Zea mays
  Clone ID: TF_ZmC1168988_1.pep
MECAAKGLAAEPCAGGVADRRCGGCGAVAYCSRVHQIIHWRVHKEECERFAEQMRHIDALSQFPFTFLEPPALNHEFPSARCLFLQSIKLHQKGLWKSECICGRDVAPLKGLSVEAEWNLQSSLCPCAEPKNPVSSALASWEAYYQWRSLPLHSPVAVLLHWPLTLYHCVQLCRTQTPRYDGQDTLCIHYLRPEKEL

SEQ ID NO: 10838 - protein, 165 aa, Zea mays
  unsure (1)..(165): unsure at all Xaa locations
  Clone ID: TF_LIB4756-044-Q1-K1-D6.pep
IGYLDAGRGTRSIGGPCAARFLLLPRVPGAGLEARAQGAVRSPWTAGSSPALPLAAASRRSSTSSERGNGSAADMTYQHRVPYRPTAPLRGPGVAESGARRGRRFGCFLFLFASFSPADELNEVYLAGAACRSDAHFLLSSTREAKSQRAVEIXDXARLSFSLMF

SEQ ID NO: 10839 - protein, 216 aa, Zea mays
  Clone ID: TF_ZmC1511_10.pep
CLVHNTEYISIFTSALLQRPLSVVSSSTYYNSSTLVLTMWLAMACLLRDQHEQWKHKYENPCRSVKIFRCQLPQNNAFYSAQPPKHDGSDKPLCPGAPVCHWCGTWKGDKICSSCKKARYCYEKHHALHWRTGHKNDCLQIISSSASNSVLPAVGIGFVRWFAKASNVHRLHVLDPSCLYSVLFYDQLTIHYLRLMALINNKMELRVSMEMHVAEL

SEQ ID NO: 10840 - protein, 257 aa, Zea mays
  Clone ID: TF_ZmC1511_9.pep
METSTKKLSSLRITSLDDDDEETEIPHQPPQAGLSPAGADYEDDDDEEEEAEVTLGVLSKPKHPGFLLRHLFPSKAGGIPAWLDPVNLPSGKSSYCGFCGEPLQFVLQIYAPIEDNVAAFHRTLFMFMCPSMACLLRDQHEQWKHKYGNPCRSVKIFRCQLPRNNAFYSAQPPKHDGSDKPLCPGAPVCHWCGTWKGDKICSSCKKARYCYEKHQALHWRTGHKNDCLQIISSVASNSVLPAVGIGICLASKWFCYP

SEQ ID NO: 10841 - protein, 68 aa, Zea mays
  unsure (1)..(68): unsure at all Xaa locations
  Clone ID: TF_LIB4073-003-Q1-K1-E9.pep
LCSHVRCXRREXRRHEFXRCSVCGAANYCSRACQALDWKRAHKAQCVPMDRWLLAGVGGGGEVPQPQQ

SEQ ID NO: 10842 - protein, 201 aa, Zea mays
  unsure (1)..(201): unsure at all Xaa locations
  Clone ID: TF_ZmC18797_1.pep
GHVYALRELGHCLQDGYGVRRXDPAEGRRLLVAANARELTLALSAATASRHAVTALPFAAAAAAGVVVGGGGGGGCPLLSDFGWSLPEAEPHAANQFMVDWWASRCAAQAGGKKRGDGSGVDGDGDGAELRLCSHVRCGRRETRRHEFRRCSVCGAANYCSRACQALDWKRAHKAQCVPMDRWLLAGVAVGGGVEAQHHQQ

SEQ ID NO: 10843 - protein, 126 aa, Zea mays
  Clone ID: TF_LIB3596-053-Q6-K6-D7.pep
APECHWCGTWKGDKICSSSKKARYCSEKHQALHWRTGHKNDCLQIISSAASNLVLPAVGIGFVRWFAKASNVHRLLVLDPSEMKLRVSMEMHVAELSQVSSIVCVHAYLASCSSFYGEYKSYGELC

SEQ ID NO: 10844 - protein, 413 aa, Zea mays
  Clone ID: TF_ZmC1511_2.pep
SSAKKLISLRITSLDDETEETEDPHQPPPAGPSAAAADSDDDDEEEEVEVTLGVLSKPKHPGLLLRHLFPSKAGGIPAWLDPVNLPSEKSSCCGFCGEPLQFVLQIYAAVEDNVAAFHRTLFMFMCPSMACLLRDQHEQWKHKHGNPCRSVKVFRCQLPRTNAFYSVQPPKHDRSDKPLCPGAHVCHWCGTWKGDKICSSCKKARYCSEKHQALHWRTGHKNDCLQIISSSAASNSVLPTVGKVPANTSWPEFEIKIDYEGRFDCDSGDENNSKLLVMQRHGKPDAMMQSWMDQFEADSDNKCWASFQERVSRAPNQVLRYCREPNAKPLWALSSGCPSNADIPSCSYCKGPLCYEFQVMPQLLYFFGVGNQPDSLDWATIAVYTCQGACDQSVSYKEEFAWVQLYPTTTTRQ

SEQ ID NO: 10845 - protein, 415 aa, Zea mays
  Clone ID: TF_ZmC1511_3.pep
METSTKKLSSLRITSLDDDDEETEIPHQPPQAGLSPAGADYEDDDDEEEEAEVTLGVLSKPKHPGFLLRHLFPSKAGGIPAWLDPVNLPSGKSSYCGFCGEPLQFVLQIYAPIEDNVAAFHRTLFMFMCPSMACLLRDQHEQWKHKYGNPCRSVKIFRCQLPRNNAFYSAQPPKHDGSDKPLCPGAPVCHWCGTWKGDKICSSCKKARYCSEKHQALHWRTGHKNDCLQIISSAASNSVLPAVGIVPASISWPEFEIKIDYEGTFDSDSGDENNSKSLVMQRHGKPDAMMQSWMDHFQADADNKCWASFQERVSRAPNQVLRYCREPNAKPLWALSFGCPSDADIPSCSYCRGPLCYEFQVMPQLLYFSWCWNQPDSLDWATIVVYTCQGSCDQTVSYKEEFAWVQLYPTTTTRQ

SEQ ID NO: 10846 - protein, 292 aa, Zea mays
  Clone ID: TF_ZmC25699_1.pep
LLCGNHYCTKSCHVLEVPLNHPEGDRTTSISKVNALAMPCEQCNLPCQRVREPPCSHPCPLPCHLNDCPSCKVLVKRPCHCGAMVHAFECVFYNILNAKDQIKIRSCGGPCHRKLPNCPHLCSEVCHPGVCPSVDQCMKKVNTRCACSTLKQEWRCQDVLKEYRKSGRDPKEVPKSQFGVGLLACGEDCKKKLKAPDSELHLRKSQENKIPAVEVVNAPKRRKRRDRGQEVKISKFQEVKTFVLRALLIILLSIIVAAGLYLLWKGIFWLSDWMNEMEEQRASQRYPRGAML

SEQ ID NO: 10847 - protein, 260 aa, Zea mays
  unsure (1)..(260): unsure at all Xaa locations
  Clone ID: TF_ZmC521910_1.pep
MPSSYAAAAAGSSSRKPNRTSSAAAPTLRPPAPSPSPAPAPLAVNPSVISDSDPSSYSSSSADEADFAASDSATASVVSAYLSVAGEGADLSKVGIFLSSAARRRSPPCLICFDPIRPSDPVWSCSSSCFAILHLPCIQSWAHQSASGPAVPCPTWGCPKCRFAYPKSEIPSSYVCFCSKTIDPAPDPWILPHSCGDVCGRRLDANLDSGCEHTCLLLCHPGPCPPCPXVVPKATCFCGAHRXPRRCAHQRYSLXXKCTN

SEQ ID NO: 10848 - protein, 264 aa, Zea mays
  unsure (1)..(264): unsure at all Xaa locations
  Clone ID: TF_LIB4757-062-Q1-K1-H6.pep
GRVCSERIFQCKRECGGMLDCGKHKCERGCHGGKCGECPLRGRRTCPCGKKNYPRLECDAEAATCGSTCEKVLGCGRHRCPERCHRGPCDGTCRLVVTKACRCGGLKKEVPCYQELTCERKCQRLRNCGRHACKRRCCAGDCPPCSETCDKKLRCGNHKCLSPCHRGACSPCPLMKTISCACGKTCFEVPCGTEKNQKPPKCSKKCNIPRLCRHKLECRPHKCHYGACPPCKLICXERFPCXHTCKERCHGPISPPTPXXTLKP

SEQ ID NO: 10849 - protein, 843 aa, Zea mays
  unsure (1)..(843): unsure at all Xaa locations
  Clone ID: TF_ZmC9977_1.pep
TGPRTPGAFAXDRPCPCGXXXIGRRCADRSTPVTCGRPCEQLLPCKRHRCEKVSHASAGSCGDCAVLISVCCFCRNKNETLLCGDLMVKGELSEEDGVFSCNEVCGRTLACGNHACKDMCHPGPCGECELMPRKVSTCHCGKTRLQERRASCLDAIPTCDKICDKKLPCGVHKCKVNCHEGECPPCLVLVEQKCRCGSSGQMVECHKFSMEEFRCKKPCGLKKNCGRHRCSEICCPLSRKVAHLEGGNWDPHLCQISCGKKLRCGQHACQLLCHSGHCPPCLETIFTDLTCACGRTSLLPPLPCGTPTPSCPHQCSVPQPCGHLASHSCHFGDCSPCIVPVMRECIGGHVMLRNIPCGSKDIRCTQPCGKNRQCGIHACNRPCHPPPCDQTPANGDASSSSGGKASCGQVCGAVRRECKHTCTASCHPSSPCPDLRCEFSVPITCSCGRITATVPCGAGGSSMGDNMFEVSIIQKLPMPLQSVESNGRVPLGQRKLSCDEECAKMEKKRVLAEAFDITPPNLDALHFGENSSSSDLVSDLFRREPKWVLAIEERCKFLVLGKVRGSSSSNLKLHVFCPMMKDKRDAISLIAGRWKLSVQSACREPRCFVTIHVTSKSKPPARILGSKAGVPVTAAHPYFDPLVDMDPRLVVAMLDLPRDADVNALVLRFGGECELVWLNDKNAIAVFNDPARAATALRRLDYGSAYQGAAMFMPSSAQASSSGNVWIGEQKDGGFAARNNPWKKPASAAEPDPPSGDWTGVAGHAPAPGRRGVNTASQVMGTTNRWNVLESDAAASSGPGDERKPAQRMDTAYSAIPNVGNAGPSMTKLQPDAEVDHWEEACE

SEQ ID NO: 10850 - protein, 296 aa, Zea mays
  unsure (1)..(296): unsure at all Xaa locations
  Clone ID: TF_LIB4746-096-R1-K1-A6.pep
HWVPRGRPGSLVTPLPPHTCFDTSMDNSKLRLREDRQHQTSASDQDRVSNWLRDASLQEHDDVSEIGDSAPREPATPPPGRSLLVQYCEEVSPTNTNFTSDWASVFDEPDTQCDAWIEDPFGNDVPDASPTHEELHNSQTKVMRSSARSDLTVLNTGRSVAASYDSTEVAETLGEEGANILAEAATAPIDPNKPRITQINSCTQCTVADLKCSRSVPSCSRCNRKGQGSLCLLQRARYRGELDSDLPCSSTVLLXLKDDDESIWQQKVNLSKELEDLWRAQEDRKDWVLASLDVPR

SEQ ID NO: 10851 - protein, 222 aa, Zea mays
  Clone ID: TF_LIB4757-011-Q1-K1-G6.pep
MEDDDMDESPDRGMSKRACDSCRTRKIRCDRAVPCSNCKASKLACKTTAPQQKAQRQRVHISEQYERKIDRIEDRLAGIENVLANLSSKLGNMDLAKDSPETGSQSRSSRVGRSPGSGLQEAPTPAPFEGESSISIQSVYAREMLAQVIDSTPSIGQNEEVKMALTALSEMVSQPSQTMAPSNRLINRSLAEVDPTRLEQPPGGGLQCVGHSYEVFNNDICP

SEQ ID NO: 10852 - protein, 202 aa, Zea mays
  Clone ID: TF_LIB4829-017-R1-N1-F9.pep
RPGDSYLRYPTFAISNHHSSFQLFNFSLFQSLKRETVTVMSLTARERRNPPTRRKSCAACTKAKRRCDFAIPACLRCSQRRIHCQYPSRVMREQFSSSEASVAVSPDYLTTDDSSPQLAESLPSDTPIIEDFNAVISGLDACSEDLGVLEFPLEDNTLKFVEQPWTLTAPSTQDFSHVPQRILNRLQWATDEIKRAPEKMVL

SEQ ID NO: 10853 - protein, 871 aa, Zea mays
  unsure (1)..(871): unsure at all Xaa locations
  Clone ID: TF_ZmC9324_1.pep
MEPKPSSAAHADAPAVEAPRRRGGGGKRKSAGSSFTPSKRQAKERNASFHVPPHLLHSGPPTRAARQSPHKLSGTPSESVPASSAAATGDGVSGGQAVVDAIRPETEETPAPELPLVDEMFEAVRSRGAGVHVVPTFAGWFSWKEIHPVEKQTLPSFFNGKSEKRTPEVYLAVRNSIMMKFHANPQLHLESKDLAELSIGETDARQEILEFLDHWGLINFHPFPPDGHEESKPEETQDNSNDEKASLIEQLFKFESVQSYMTPLPMKEDVRAPPPLPSLIPESVLIQDVVAAAEPSVEYHCNSCSVDCSRKRYHCRTQADFDLCCDCYNEGKFDPGMAKTDFILMDSAGVSGASGTSWTDEETLLXINEKEGKSLSVEKKNNSSMSQHDHQESGIKSVSSDDCSLVEPKTNNAKESGDSTAIGDKKGNCEETKTENASVVVNKDTQNSDGRDSGASPSTEEPKQSSDEQPVVKENSADVDTSGEKLSNVAIDILKCAFEAAGHSPEYEGSFADAGNPVMALAAYLAGLVEDDNTTTSFRSSLKSVSDVSPALQLSSRHCFILEDPPDELKDICASVSKKNRDADQKQDEDMIQNSIDTEKKEINEKEGKSLSVEKKNNSSMSQHDHQESGIKSVSSDDCSLVEPKTNNAKESGDSTAIGDKSATETTKGNTEQVNDLPSVEVEAPDDSSSKGKDELNKTKDAVATPATVQEQKHSQTLGNGDREEPNNIESVVVDEEKGSVVTANRPDSIARLKRAAATAVSAAAVKARFLGDQEEYQIRRLTALVIEKLFQKIEVKMSLFSEIEQVVFRTREYTEKTRKKLLKERNAIIAARMGALPSRPNQPGVAGNRLPPGYGNPPVRPPNAMPRPTS

SEQ ID NO: 10854 - protein, 101 aa, Zea mays
  Clone ID: TF_ZmC50613_4.pep
MFGDPDWGFGILSTLVKLEESDHIRHGSHTCSICRYPIIGSRFKETKHSFSLCNRCYSEGKVPSAFKLEEYRFKEYGNESEALIDKCMCFNLHSKKLETDA

SEQ ID NO: 10855 - protein, 840 aa, Zea mays
  Clone ID: TF_ZmC50613_1.pep
MALSASAASAGRGSRAEKVRRIFERFDTNGDGGLDRNEMAALVVAVNPRVKFSEDQISAILDEVFHTYGEFILPDGRGLSLLGLLRTYDDGAGDVDRDFLALSLPAVDSDASSPDIAAGDAAAHSSPPSGAAAAASLLDDHAKPLGAGGAAPSVSSRAAVAAPAWATSPNHGIAFDSSWGLLDDLEILVKRLRSKQLRKGSIDGAGNNNFDSFSEAGWSREISGAADSASTAAPWDETSRDYLTFVKELAVLRTRADASRSREEAFDNHMIIGRALSEHRLFRDALASFRRACELQPTDVRPHFRAGNCLYGLGRYAEAKEEYLLALEAAEAGGSQSADILPQIHVNLGIAMEAEGMVLGACEHYREAAILCPSHARALKLLGSALFGVGEYRAAEKALEEAIFLKEDYADAHCDLGSALHAVGEDDRAIQEFQTAIDLKPGHVDALYNLGGLNMDAGRFVRAAEMYTRVLSIRPNHWRAQLNKAVALLGQGESEEAKKALKDAFKMTQRVEVYDAISHLKTLQKKKPKPSKGKDDGQGEQAYVVVEASKFKRVGRKTTLRQDLANALDIRAFERMTKLGHCDVELLRKEMNETDVPVSYSGTGIPEKSIRKAALEVILRRLLSFLKPDTFQGAIKAINERILSVLDASGSGRVDLGMFFATIAPICSGPVDMRKRIVFDALLWRPASEGSNGQIRRSDALTYIKLLRAVYIPTHGASDMLEMHGESDPTMVSYTEFLEMFNDPDWGFGILSTLVKLEESDHIRHGRHTCSICLYPIIGSRFKETKHSFSLCNRCYSEGKVPSAFKLEEYRFKEYGNESEALIDKCMCFNLHSKKLEADA

SEQ ID NO: 10856 - protein, 842 aa, Zea mays
  Clone ID: TF_ZmC1346_1.pep
MSDWSSPAAPTFFPFGPQAEGWDVTFKVKYGDTLKRFYGCANGSHFDMNLSALRARIDTAFKFGPDVDFVLTYTDEDGDIVMLDDDDDLRDAALRQRLNPLRITVQLKKNQPTEKKDTSAPVKSAAQDPLSQLMSAIEGLKPVQEDSLAHIKSAIGEAIKSIPEPIPDALAKLSHEILDAAPPPLAELMKPFAQLMAPNNNGNGPSDVHAEGSSSSSSAQVPAEAKNEPKVRPSLGLKTVLKEAAGPVPNAGASQVQQPLMYPSVEEMLFPCNSVDKSVCKGKIDAQSKGKSVTSSGIQPAPHSLRTHAPPPPHPCISEWSRAQRSQHRQLKFEDNAKTTNDSRWRIPMYKMPYAPPPPAVPPPGYVPSPHFPYPGRLLSSGHPYGDLAGNMENSAPHSLHRWIQCDGCGAQPIVGPRYKSNVKEDYDLCDSCFQRMGNEMEYTKIDKPILPHRFLRDPHVYRKVHHPRVLMKSRREKLESRFILDVTVLDGTLMTPSTPFTKIWRMHNNGSVVWPRGTQLVWVGGDQFALQTSVPLEIPVDGFPVDKEIDVPVDFVAPTRPGRYISYWRLASPSGQKFGQRVWVHIQVEDPSFVNDNNRNAAINLNLPPESYSSNTTNLIDVNIEPADSALSAHAKRTKEFHFCSTDFPEPSKSVPFTLATTSLSAAAPTNQTGDVPMSSTPAAACLPSVNVPMHEVVTTHTPSPITPVLPTTIHFSAPVSAPAIAPELASGAVGVPPPVSAVVPELSELDVHNEEKLLRELEEMGFRQVDLNKEILRQNNYNLEQSVDDLCGVNEWDPLLAELEEMGFDDTEMNKELLAKNEGSIKRAVMELIAREKKDK

SEQ ID NO: 10857 - protein, 215 aa, Zea mays
  unsure (1)..(215): unsure at all Xaa locations
  Clone ID: TF_LIB5117-021-A1-PF1-B6.pep
ICWASDGNLGNNSERSPRISHRWIQCDGCGVQPIVGPRYKSNVKEDYDLCDTCFRRMGSEVEYTRIDKPILPHKLSRDPNLCRKIHSRASMKSKREKLESRFILDVTVLDGTLMSPSSPFTKIWRMHNNGSIMWPLGTQLIWVGGDQFALQTSVPLEIPLNGFPVDQEMDVAVDFVAPARPGRYISYWRLASPSGXXFGQRVWVHIPGGRSIFCQ

SEQ ID NO: 10858 - protein, 491 aa, Zea mays
  unsure (1)..(491): unsure at all Xaa locations
  Clone ID: TF_ZmC326_17.pep
PRVRGRVGFKRLKQEKQDRAAAXGKNIDEIPGAEGLVVRVVSSVDKKLEVKPRFLEIFQEDNYPTEFPYKSKAVLLFQKIEGVEVCLFGMYVQEFGAECSFPNQRRVYLSYLDSVKYFRPEIKTVSGEALRTFVYHEILIGYLEYCKLRGFTSCYIWACPPLKGEDYILYCHPEIQKTPKSDKLREWYLSMLRKASKEEIVVELTNLYDHFFLTMGECKAKVTASRLPYFDGDYWPGAAEDMINQLRQEEDDRKLQKKSKTKKIITKRALKAAGHTDLSGNASKDAMLMQKLGETIYPMKEDFIMVHLQYSCSHCCTLMVSGRRWVCHQCRSFYICDKCYDAEQQLEDRERHPCNSRDTHMLHPVDIVGVPKDTKDRDDILESEFFDTRQAFLSLCQGNHYQYDTLRRAKHSSMMVLYHLHNPTAPAFVTTCNVCSHDIETGQGWRCEICPDFDVCNSCFQKGVVTHPHKLTNHPSAADRDAQNAEARQMR

SEQ ID NO: 10859 - DNA, 328 bp, Oryza sativa
  Clone ID: TFbOSC11543j.C1.o1.fg
gaagggtgactactaccgttacttggctgaatttagcactggaactgaaaagaaggctgctactgatcagtcccttatggcctatcaggcttggccttgcgctcaacttttcagtcttcttgagataatgaactctcctgagagagctagccaagtggcaaaacaagcacttgatgaggctactgctgagattaactctgctggtgtggagggttacaaggacagcatgcttatgatgcagctcctgaaggagaacctggcattgtggacatcagaactaactggaggtgaaacatctaaggacgatgatgttgttatggagggctaa

SEQ ID NO: 10860 - DNA, 837 bp, Oryza sativa
  Clone ID: TFbOSC401367j.C1.o84.fg
atggtggaggcaatgaatagtgtggcaaagttagacgaggggctgacaaaggaggagaggaacctcctctcagttggctacaagaatttgattggtgcaaagcgtgcggcaatgcgtatcattggatccattgagctaaaggaggagacaaagggcaaggagagtcatgtaaggcagactgctgagtatcgtcgcaaggtggaggctgagatggataaaatctgctgtgatgtcataaacattattgacaagaagggagattactaccggtaccttgcagagttcaagactgggactgagaagattgaagtgtctgaactgtcactcaatgcttatgaggcatgtgatccttttttcattttcaacttgtttctgttttctcaagtcacttgtttcattgagttcaccatttatcaagtcttggttgtatatactgcttccaaaactgcgcagacagatctcactccaactgaccctatcagacttggtttagctctgaatatatctgtcttctactgtgagatcatgaactcacctgacaaagcttgccaacttgctaagaacgcctttgatgaagctgttgcggagcttccctccctcagtgaggagaattacaaagatagtacactgatcatgcaacttctgagggataatctagcactgtggaattctgatatggctgatgatgcagacgatattagggaacgaacagatacaactggtgctaaaggtgaccctgcagcgtgccaggtgcgcattgatacgtgttgccatctaacttatgagagctcaccagcgcggtatgtatgtgaccatgttggttttctagccctgtga

SEQ ID NO: 10861 - DNA, 405 bp, Oryza sativa
  Clone ID: TFbOSC11544j.C1.o1.fg
atgaaggagagggagaaggtggtgcgactggccaagctcgccgagcaggcggagagatacgacgatatggtggaatttatgaagacacttgctaggatggatgtggatatgagtgctgaagagaggcttttattttcagttggttttaagaaaactattggtgccaggagagcatcatggagaatccttgaatcacttgagcagaaggtgacagctggtgaccaaccaggtgtaacaataaatggctacaaaaagaaagtagaggatgaactaagggcagtttgcaatgaagtattatcaattattgctattcattgccttccattggccaattcgggtgaaaatgtcgtgttcttttataagatgtatgtgcaggttttaccaaatgatgctaaggtttcatag

SEQ ID NO: 10862 - DNA, 187 bp, Oryza sativa
  Clone ID: TFbOSC412316j.C1.o1.gp
ccgccgtcaccaccttctccatgaactccaccatctcctcgtacctctccgcctgctccgccagcttcgccatgtacaccatctcctccctcgtccctcctcccgccgccgccgccatcgtctctctctctctctcttgcggattcgggtggagttgagttgagcctgtgagtgggtgggggcgacc

SEQ ID NO: 10863 - DNA, 927 bp, Oryza sativa
  Clone ID: TFbOSC410930j.C1.o5.fg
atgtcgcagcctgctgagctttcccgtgaggagaatgtgtacatggctaagcttgcagagcaggccgagaggtatgaggagatggttgagttcatggagaaggttgctaagacagttgactctgaggagctcactgttgaggagcgcaaccttctatcagttgcttacaagaatgttattggtgctcgccgtgcgtcatggcgcatcatatcatccattgaacagaaggaagagagccgtggtaatgaggatcgttgcacgctcatcaaggaatacaggggaaagattgaaactgagctctccaagatctgtgatggcatcctcaagcttcttgactcccaccttgtgccttcatccactgctccagagtccaaggtcttctacctcaagatgaaaggcgactactacaggtacctcgcagagtttaagactggagctgagaggaaggatgctgctgagaacaccatggtggcatacaaagccgctcaggatattgccctggcagagttgcccccaactcatcctatcagacttgggctggccctcaacttctcggtgttttattacgagatcctcaactctcctgaccgtgcttgcaatcttgcaaagcaggctttcgatgaggctatctcagagctggacactctgagtgaggaatcctacaaggacagcactttgatcatgcagcttctgcgtgataacctgacgctgtggacttccgatatctcggaggcgctccccatttatgttgtgctaggaaaccttgcagctgactcgctgcttggctggtggattctcgagctgcactttctttggggggagcctcagggtggaaccttcatgtcacttattggatcgattgttttcggtatgtcagttgtgagccttatctccagagtccacagtcctgccaagtgccctgcttga

SEQ ID NO: 10864 - DNA, 4692 bp, Oryza sativa
  Clone ID: TFbOSC900048j.C1.o23.gm
atggtggtttcccccaccgtttgcaatgtgaagttggggcgtgtcctcatagacgggggtgcagccctcaacatcctttcccccgcggcctttgacgccatcaaggccccggggatggtgctccggccgtcccagccgattatcggtgtgacgccggggcacacttggccgctaggtcatatcgacctcccagtcaccttcggtggttccgccaacttccgcacggagcgggtgaacttcgatgtggcggacctcagtctgccctacaacgcggtcctggggaggcccgcgttggtgaagttcatggcggcggtccactacgcctatctccagatgacgatgccgggccccggtggccccatcaccatccatggcgacctcaaagtcgcgcttgcttgtatggagcagcgcgcggaccacctcgccgcggcgtccaagcccgcgggtggtgacgagaggctcagcacctccgtccctgccgccccgagggcaggggatgatcacgaagacgcgctcgtctccttcctgcgggcaaacgccgacgtcttcgcctggagaccggcagacatgcccggggtccccagggaggtgattgagcaccgtctcgccgtgcggccgggcgcaaggccggtccagcagaaagtgcggcggcaggccccggaacgtcaagccttcatccgcgaggaggtggcgcgacttctggaggccggattcatccgtgaggacatccatccggagtggctggcgaacccggtcatcgttcccaaggcgaacggcaagcttcggatgtgcatcgactacaccgaccttaataaggcatgtcctaaggacccttaccccctgcctcgcatagatcagattgtcgactccaccgcggggtgcgaccttttgtgttttctagatgcatactctggtcctacttttcaacgtactactcgaatttctttgggtagccaaataggacgtaatgttgaggcctatgttgacgacttggttgtgaagacgcgcaaccaagagaccttactctcggatctagcggaaactttcgaaagtctccgctccgcccgcataaagctgaaccccgacaagtgcgtgttcggcgtgcctgcgggcaagcttcttgggttcttggtctctgcccgaggcatcgaggccaaccccgagaagatacgagctatagagcggatgcgcccccccagcaagcttagggatgcgcaatgcgtcaccggctgcatggccgccctaagtcggttcatatcgaggctgggagagaaggcgctacccctatttaagctcctcaaacgctccgggccgtttacctggacggaggaggctgagcgggccttcactcagttgaaggcgtacctcagttctcccccagtcctggtcgccccagagccagatgagccgttgctactctacctggcggcaaccccgcaggtggtcagcgcggcgttggtcgtggagcgcgacgaggacaaccctcactccgcgcatccccaccctgtgtcgactcgacccgggagagagcagggaggagaggcccccgagccgaacggcggcccgaggcccccgacggtcagagctggccctctgcccgcttgtccgacggtgccaggcgcccccgacccccaggatggccccggggccactgcgggaaggccgcgcctgtcgccctctgaccccgaggtcgtcggcacagaagtcgagtgcgcccctggtggcctctcggacgaagagcgccctggagatgcggcccctggcgaagaggatcggccccgccgaaaggtgcagcggcccgtctacttcgttagtgaggccctccgggacgccaagacccgataccctcaggcccagaagatgctttacgctattctgatggcttcgaggaagttgcgccattatttcctggcgcatcgggtctcggtggttacgtcttaccccctcggccaaatcttgcataaccgagagggtactggacaggtggtgaaatgggcaatcaaactctctgagttcgatttgcactttgaaccacgccacgcgatcaagagccaggccctcgccgactttgtggcagagtggaccccagctcccgagcccgtctccgtcctcgaggccagctcgggcccctcgcagctgcctcacaccgcctactgggtgatgcagttcgacggctccctatctcttcagggcgccggtgcgggggtcacgttgacctcgctgaacggagacgtcctcagatacctggttcgcctcgactttcgggcgaccaataatatggcggagtacgagggactccttgcgggactcagggtggcagctggactggggatccgccgcctgctggtgttaggcgactcccagctggtcgttaaccaggtctgtaaggagtaccgacccccaccgggcgcctttgaagaaaggcttgcccagccgtcggcgcgacccgaccccctaggggagacggacgcgcctgaacggcccccgaggcccgtcggagtccaggcctcgggacccgatgggagcgttcccagctcccttagattgattgcttggatcgctgagatccaggcgtacctcgcagataagactctacccgaggaccgcgaagggagtgaacgcgtccagcgcatctccaagcgctacgtgctggccttgcagaccatacctctttcgtggctgtttgctgtctgggggctcgatatcctgggtccgtttaggcgggccccgggcgggttcgagtatctgtatgtcgctgtcgacaagttcactaagtggcccgaggcttatccggtcatcaagatcgataagcactccgcgcttaaattcatcaggggcatcactgctcggtttggggtgcctaaccgtatcattacggataacggcacccagttcactagtgagctcttcggtgactactgcgaagacatgggcatcaagctctgcttcacctcccccgcccaccccagaagcaatggccaagtggagcgcgccaacgcggaaatcctcaagggcctcaaaaccaagaccttcaacatcctcaagaagcacggcgactcatggatcgaggagctgccagcggtgctctgggcgaaccgaaccacgccaagccgagcaaccggggaaacgcctttcttcctcgtctacggcgcggaggcggttctcccatctgagctcaccctgaggtcccctcgggccaccatgtattgcgaggctgatcaagatcagcttcgcagagacgacctcgactacttggaagagcgaaggcggcgcgcggccctccgagccgcgcgctaccagcagagcctgcggcgctaccatcagcgccacgtccgggcccgatcactctgcgtcgacgacctcgtcctacgccgcgtccaaacgcgtgctggactgagcaagctctcaccaatgtgggagggtccgtatcgagtgatcggtgtcccccggccgggctccgttcggctggccatgggcgacggcacagagctgcctaacccgtggaacatcgaacaccttcgtcgcttctacccctatggaaccatgaatagagtacccaccagttggggttttgtttattctagggtgaacaaggttaccactttggctccggcgtttatgttgtgggtcttgtgcgggtaccgtgtgcccacgggatccgtgtgggcccagggttccccaagaggggaaggctctcggtcgctttttggagcgcaaagggccggcacgcggttgcattggcggaacggcccggttgccgtggaccgccaacgggtccgggcgagtggacatgcggggcaccaaccggtccagcaacggcgcttcgtcgtcgtcgtcaaaagattccccacgttccccgtccccaccaaagccgcgttcgcatccgccaccacaaccgcaacccgccgccgccgacgccgacgaggagaggaggagagggaaggcgagagggaggcggagcggtacgaggagatggtggagtacatggagcgcgtggcgcgcgcggcggggggcgcctccggcggggaggagctcacggtggaggagcggaacctgctgtccgtggcgtacaagaacgtcatcggcgcccgccgcgcgtcgtggcggatcatctcgtcgatcgagcagaaggaggagggccgcgggaacgacgcccacgccgccaccatccgctcctacaggggcaagatcgaggccgagctcgcccgcatctgcgacggcatcctggccctgctcgactcccacctcgtcccctccgccggcgccgccgagtccaaggtcttctacctcaagatgaagggcgactaccacaggtaccttgcggagtttaagtctggcgacgagaggaagcaggctgcggagagcaccatgaatgcatacaaggctgctcaggacattgctctcgcagatttggctccgacccaccccataaggcttgggcttgcactcaacttttcagtgttctactatgagatcttgaactcccctgaccgtgcctgcaacctcgcgaagcaggcgtttgatgaggccatatcagaactggacagccttggtgaagaatcctacaaggacagcactttgatcatgcagctcctgcgtgacaacttgactctgtggacttcagatgccaatgatgatggtggtgacgaaatcaaggaagccgcagctccaaaagagcctggggatcagtga

SEQ ID NO: 10865 - DNA, 184 bp, Oryza sativa
  Clone ID: TFbOSC34756j.C1.o1.fg
agctagccaagtggcaaaacaagcacttgatgaggctactgctgagattaactctgctggtgtggagggttacaaggacagcatgcttatgatgcagctcctgaaggagaacctggcattgtggacatcagaactaactggaggtgaaacatctaaggacgatgatgttgttatggagggctaa

SEQ ID NO: 10866 - DNA, 768 bp, Oryza sativa
  Clone ID: TFbOSC401803j.C1.o29.fg
atgaacatggaaacacgccgctacacttctctctctcacaggaaggcgagaagcatggaatgcttcccctctacgcagtgccccgttaaaaggggcaaagccatcgcaacgctcctgaacatatcagaaccaccactggagctcaccaggacattgctggaagcagatgcagactcagcattccagccggacagaagagggtccttcccaatccacatcgcggcctcggctgcaggtcggctctcggcggtcatcgccttgctcaccatattccccggttccgccggattgcgcgactccgatgggaggaccttcgttcatgtcgcggccaggaagaagaggtacagtgttgttgcacacgcttgccagacgccggcattgtcagggatcttgaacaagcaagacaacgaagggaacactgctctgcacctagctgtagaagctggggattggtggattttcgcctgcctgttcgtcaacaagcaggtggacttgaacttaccaaacagtagtggacataccccgctggaactctctattaacactatcccgacaggactctactgtctcctgaactcgcggattttgatacaggaaacactgatagccgccaatgctacccgcggcatttctcggatggatgctgctggtacggaagaacacggaccccaatctgaagccgagaatgaggaaaaagggtcagaaatagtactacctctatattatattttaatgtatgacgccattgactttttgttcaacgtttga

SEQ ID NO: 10867 - DNA, 777 bp, Oryza sativa
  Clone ID: TFbOSC401247j.C1.o12.fg
atgacagtccaggctggtgctgatgtgaattatgcttatccaaacactcccttggtggtgtccacgacagctggcttaactgactgtatcaagtacttgcttgaggttcatgcagatcctaacattccagataaacagagcggacttacacctatagaaattgctgcaagtgttggaagaagagatcatgtggagattctatttcctttcacttcccctgtcagagcagtaacaaactggacagttgaaggaattattgctcatgggaaatcgagacgcttgattcccaagttccaaattctgaagataaaacggtcacttgatagctctggtcatgatcatttgaatccccattatttcttgcagggtgagtcatgtagcaaggtcagtgacagaaaggctgagctaaaatcacagggagaaaaagccgttaagagaaaggactaccttgctgcatcaaagatctacactaaggcgcttgagctagactattttgatgcaaccctgtattcaaacagaagcctttgttacctacaaattggaaaagcacaaaaggctttgcttgacgcaaaaaaatgtgtaaaactgcggcctaagtggatgaaaggtcactaccgggaaggagctgctttgatgttgctaaaggagcacaagaaagcattcgaggcattcttgaacgcgctgaaactggatcctgctaatgccgagattgagaaagtgatgtgggaggcagttgaggcgatgaaaaaggatgatgccgctgaagataaaacttaa

SEQ ID NO: 10868 - DNA, 825 bp, Oryza sativa
  Clone ID: TFbOSC406054j.C1.o2.gm
atgcatgatgcagcactgcaggctctgcctatggttttggaatggctcaagaataagaaactgaagacggccaacgtcgacatgcagcagctcactagccagagagacaatgacaacgggagcacccctcttcacttggcggcatcaatggctgggctgccgtccctagggtcgatgctgctgctggatgccaacgtgtccacggcgtaccagccggacaaccaagggcagtaccccatacacgctgctgcgtcggcggacagcctggaggctgtgaaggccctgctcgagaaatgcccggactgtgctaccctccgagatgcgagaggaagaacttttctccatgctgccgttgagaagaagagttttgatgacgacaacggggtacgattggatatgcggaataaggagggcatgatgcccgccgatgtttcatggagcatgatgcctttaaagacttattatgcatggaattcaagcatacgcatacgaaaattactcttgaaactgggagctccacttggtgaaagtagaggtgacctcttcgatgaaaagcacaatagaatcatcggagaaaaatctaaatgggacatggaaaagatgtcggagaatgtaacagctgcagcacaagtcttggcccttttctccgtccttattacaacagtgacatttgcgtcggctttcacgctgcccggtggctaccgatcagccggcgacgatggtggtgctgctgggacgccgaggcaggcccaaggccttcccacttttcacaagagcaaatcgatgaggatgagtgcgcgccgtgtcaggacggagaatggttag

SEQ ID NO: 10869 - DNA, 1239 bp, Oryza sativa
  Clone ID: TFbOSC408633j.C1.o3.fg
atgtcggaatcgattccagacaagcaaatagtggtgagatttcccaatcatgtactgccagcaagtttgcgcgaaaatatgggcaaagaaggagcaaccgtagataacatggatccttcctgtccttttctagttcttgagaaatatgatagaaaaaagtcctatgagtggctgaatctaagagctgcttgggtcgccaagtccatgccaaatgatataattatcccagaccctactcctgagagggtgcgagatgccttctctgaaatatctcgcagcttgagcaatgtcatggcagaggacagcgtccagtgcttcctaaacatgttcttggaatctccttcaaccttcgcatacaggttcaccatcacctcagaaaccttaaccttcatgatcaggtacaatgccttgcgatgcatgaaagccgtgttggagggcaaggcacctggcctcggctcgatgcacgccaatccaaactgcatgagcccgtatggatgcttccctctccatgaggctgcagaacggtgttcgcctcggatgatcaggttgctcttcaggcacggagcttcagcaaactatcgtgaggattgcgtctacaggctcgttcatctgctgtgcctacctgatatgatagtttccttggaggtgattagactgcttgcccaaaaaacagataatgtagtcgatgagctctggaattacatgaagaacggcaagcttgcacaggccacagttttattcctggcagcccaaaaacattttcgcaagggcaaacctaatgggttttctatcatcgcgcaacgcatatttggagactatgattccctaacgtctgacaaaggtaatggagaggcacataagcagttggaggaaagaaaagcacttttgaattgccaatgtctgctttataatataatttcgcaagctggcgaggctctttatgattacgttcagacacattcagaggtgtcccacgtggaggtccttgcgcatgtctcatctattctcaaggaatttgggttttgccccaaggaagagtacattgacaccatgaacctgtctccttataacctggataatttttacagcgtcgtatttcaggaaggtcaaaccaagccagttgaacaaacgtcttctccgaatgctgcagagaaaaagggctttgcagccccatttctcttactagaaatgagcatcatcttacagagttttgttcagataacaacagcaaaagactag

SEQ ID NO: 10870 - DNA, 285 bp, Oryza sativa
  Clone ID: TFbOSC28352j.C1.o1.fg
atggggaagcaggagcaggagaagatgctcctccaggccgcctacgatgacaacctccgcctcctcaggaagatggcgcgagggctggacaccgggcagggcgaggctgccgtcgtggcggcggtggcgggcagggccgacgggaaccgcgctctccacctggcggccgcccgaggaagcatggatgtcctcaggtacctcgtggaggacctccacctcagcgtcaaccagttcaatgccaaaggtcttgcattgcctctcttccgttctattttttcagtttga

SEQ ID NO: 10871 - DNA, 1389 bp, Oryza sativa
  Clone ID: TFbOSC900150j.C1.o15.fg
atgtccagggcaaacagtcgacagacaaaggcacaaagctgtgaagggctgaatgctgaagggatcgccggcggcccagcgtggggtgaacttgcagaggcgccgtggagggcgcagggcgatggaggcggattggcggagactgccgccgcactgtctgtactgttagagaagtgcaagaatgtcgaggtcaatgtacagcaagaagaccaacaaaggagtattcctcttctcttgtacctcactagtcaaagtgacaaaaatgggagcactcctcttcactttgctgcatcgttgaaaactagtattgaaggtttcacatcgagattatgtgaacattttcgcccgaaacaaagcccaacaacattgcttcttggactcaatgaatctgctatatatcagccagacaacagaggatcatatcctatacttgttgctgcctccaatgggatactcaaggttgtcataaccttgctcaaaaggtatccagattgtgccactttgcgtgacatccaaggaagaactttcttccatgttgccgtggagaagaagcggcgtaatatcgttgcatatgtgtgtgaaaggccaggattttctcctatcttgaatatgcaggacagccatggggatactgctctacaccttgctgtcaaagccggctaccacatgttaatctttcagaacccacgatatatgataagtcaactattagcactttctggaggtactgttggttacagtcgccaggaccacttcttcgaaaaatacagcaagaaaagagacgaagtaatcgattcaaacgatatgacaagtgcggcacaggttctcggcatttcttcagcgcttatagcaaccgtgacatttgcagctgcattcacgttgcctggaggttacagagcagatgaccacactgatggtggtacaccaacacttgctgggagctacccttttgacgcgttcattatctcgaacagcctagcattcatttgctctttgctagctaccgtgagtctgctctactctgggatacaatcgagggacatctccatccggcgcaggtactacgcgttctctatgctcttgatgcagagttcaactacgagcttcactgttgccttcgccatgggaatgtacctggtgctagctcctgttactcttaatgcagcagtgtctgtctgcatcatagcatttgtttctctgctacctggaaatatggaaatcggggtatccctagctatcgcaaacacattgaggattagattgggaatttgggcagcgatgtcccaagcaaggccagttctcctgttcacgtggaaaagagtttggtcctgcataattatctttggattgcctggattgatgaagattcatagaaccaaaatggcttga

SEQ ID NO: 10872 - DNA, 1902 bp, Oryza sativa
  Clone ID: TFbOSC400095j.C1.o16.fg
atggaggacgcgtccaagtacgcgcacagcccggcccacctcgccgtggtgcggcgggaccacgcctcgctccgccgcctggtcgcggggctcccgcgcctcccgcgcgccggggaggtggccaccgaggaggagtccatcgccggcgaggccgtggccgacgcggtctccgccgccatcgaccgccgcgacgtgccgcggagggagaccccgctccacctcgccgtgcggctccgcgaccccgtcgccgccgacatcctcatgtccgccggcgccgactggtcgctccagaacgccgacgggtggtccgcgctccaggaggccgtctgcacgcgggaggacgccatcgccaccatcatcgcgcgccactaccagcccctcgcctgggccaagtggtgccgccgcctcccgcgcgtcctcgcctccatcaaccgcatccgagacttctacatggagatctccttccacttcgagtcctccgtcatacccttcatcggccgcatcgccccctccgacacttaccgcatttggaagcgtggagctgcgctgcgtgccgacatgacgcttgccggcttcgacggcttccgcatccagcgttcggaccagaccttcttgtttctcggggatggtgctcgtcctgaggatgctgggggcaaagagttgcacccaggttctctcatagtgctggctcataaggacaaggagatcacagatgcattggagggagcaggggtgcaaccaacggaggccgaggtcgcacatgaggtggcgttgatgtcaaagacgaacatgtatcgtcccgggatcgacgtgacgcaggcagagcttgtgcctcatttgaattggcgccggcaggagaggacggaagccgttggacattggaaagctaaggtttatgatatgttaaacgttctggtgactgtgaagtcaaggcgtgtgccgggggcgatgacagatgaggagctgtttgcgatggagggggaggagaagaatgggaggggcactgaacttgacgcggagctggatgaagtgttgacagccgaagagaggaaacagcttgattctgcgttgagaatggggaaccaggaagaagaatttgaggagaggtgcgaggaaggtgatggcggggctgatcatttggatgcaaatggcgtggcaaaagataagaagggatggtttggttggggtggcaagaaaggcaccaagaatgacgagaaaccatccaaggcgaatcaagggagtaaggatgaatcaggtgacctaggaaagggaaaggagaagaacagcagcaagaagaagaagggtgcatcatcaggggattctactaaacatgaaagtgaatacaagaaggggttaagaccagtgttgtggctgacaccagatttccctttgaagacggatgaactgatccctctgcttgatgtcttagcaaacaaagtgaaagctgtcagaaggcttagggaactcttgactactaaactgcctccaggcacatttccggtgaagattgcgatacctattgttccaacaatacgagtcatcgtgacattcacaaagtttgaggaattacaacctttggatgagtttgctaccccaccctcaagcccaacgcaattccaggatgccaagggcaaagaatcagaaggatcaggctcatggtattcgtgggttagaggggggcgtggtgcacagtccagtgatagtggtgatagccgtaactggaaagatgaggttgatccattccaaataccttctgactacacctgggttgatgccaacgagaagaaacggaggatgaaggcaaagaaagccaagaacaggcggggctcaactcggaaacaatcatcgaaaagcacctcgtcggaaggaggtcacccgatgatggatggctttgaggagtaa

SEQ ID NO: 10873 - DNA, 1334 bp, Oryza sativa
  Clone ID: TFbOSC101172j.C1.o1.gp
ccttgtcgaacagcttctgctggtactggtccagcgcgagcatctcgaggtcgaagtcgagctcccgcgcgccgagcgccgtcttgaggcggctcgctggggacgacggccaggcggggctcatcatcgccgccgccgccgccgccatgtcgagcccgttgggcggcgaggagcgcggcgacgatacggtgggctgcatgccgacggacacggcggaggggttgacggcgcggagctcgtcgggcttgtgggcgaagaagcagatgcggcgcgcgcagccgacctcgtccttgcagaggcgcgtcctgtactgcgccgggtggagccagcactcgaacacgccatgggcgtactcgcacgcgtcgcccttgcggcacgagccgcccttgcggaactccgggcaaggcacgcagctgtaggagtagcggcgagggtcgcggcggcgcgcgttctcgccggggtggacgaaggggcactcggtccagtcatgggagtaggcgcgggagcacggcttcaccttgaagctgtacatgcggaactcgtcggtgctgaacagtccgctcttgaggtcgggcagcgtcaggtcaggcgggtactccttcttcgcctcctgcggcggcggcggcgacggcggcgaggccgacttcttcggcgacgacgacggcgacacggccggcgacttgagcagcagccggatggccttctccgccgcggtggcgcgcgggaggaggtcaccggcgcggagccccgaagccgagagcgcgtcgaccgacgcccccgcggcgagcaacaggcgcgtggccgcgaccgcgttcgccgcgccaccggcagccgccatgtgcagcggcgtggccccatccgtctccgacgcgcgcgcggcctccgccggcgctgccgccacgacatacccaagcacccccgtgctcccgtacagcgccgccaccatcgccgccgtcctccgctccatcccgagcctcgccacgccgctcgccgaaggcccataccacaacccagccacgccaagagacaccttctcctcctccacgaccctcctcaccgccgccacgtcgtccgctgccgccagctcaagaagcaaggacgccgccatcaccgtcgcctccttctgctgctgcggcagcggcggtgtggacggcttgcgcggcccagagcacatgacacacacaaacaaacacgcacgcagagtgttcgaccgagttcttgttagtcaaaacaaacacctagttcttgatttcttgttaaattcagagaggagaagaagaacaagaagagggagaagaggaattctcgatcgatggatggatttggagagtggt

SEQ ID NO: 10874 - DNA, 1740 bp, Oryza sativa
  Clone ID: TFbOSC900232j.C1.o15.fg
atggcggcgtccttgcttcttgagctggcggcagcggacgacgtggcggcggtgaggagggtcgtggaggaggagaaggtgtctcttggcgtggctgggttgtggtatgggccttcggcgagcggcgtggcgaggctcgggatggagcggaggacggcggcgatggtggcggcgctgtacgggagcacgggggtgcttgggtatgtcgtggcggcagcgccggcggaggccgcgcgcgcgtcggagacggatggggccacgccgctgcacatggcggctgccggtggcgcggcgaacgcggtcgcggccacgcgcctgttgctcgccgcgggggcgtcggtcgacgcgctctcggcttcggggctccgcgccggtgacctcctcccgcgcgccaccgcggcggagaaggccatccggctgctgctcaagtcgccggccgtgtcgccgtcgtcgtcgccgaagaagtcggcctcgccgccgtcgccgccgccgccgcaggaggcgaagaaggagtacccgcctgacctgacgctgcccgacctcaagagcggactgttcagcaccgacgagttccgcatgtacagcttcaaggtgaagccgtgctcccgcgcctactcccatgactggaccgagtgccccttcgtccaccccggcgagaacgcgcgccgccgcgaccctcgccgctactcctacagctgcgtgccttgcccggagttccgcaagggcggctcgtgccgcaagggcgacgcgtgcgagtacgcccatggcgtgttcgagtgctggctccacccggcgcagtacaggacgcgcctctgcaaggacgaggtcggctgcgcgcgccgcatctgcttcttcgcccacaagcccgacgagctccgcgccgtcaacccctccgccgtgtccgtcggcatgcagcccaccgtatcgtcgccgcgctcctcgccgcccaacgggctcgacatggcggcggcggcggcggcgatgatgagccccgcctggccgtcgtccccagcgagccgcctcaagacggcgctcggcgcgcgggagctcgacttcgacctcgagatgctcgcgctggaccagtaccagcagaagctgttcgacaaggtgtccggcgcgccgtcgccgagggcgagctggggcgccgcggcgaacggcctcgccaccgcgtcgccggcgagggccgtgccggactacaccgacctgctcggctccgtcgacccggccatgctgtcccagctccacgcgctgtccctcaagcaggccggcgacatgcccgcgtacagctccatggcggacaccacgcagatgcacatgccgacctcgccgatggtgggcggcgcgaacaccgcgttcgggctggaccactccatggcgaaggcgatcatgagctcccgcgcctcggcgttcgccaagcgcagccagagcttcatcgaccgcggaggccgcgccccggcggcgcgttcgctcatgtcgccggcgacgaccggcgcgccgtccattctctcggactggggctcgccggacggcaagctggactggggcgtccagggcgacgagctgcacaagctccgcaagtcggcgtcgttcgcgttccgcggccaatccgccatgccggtggcgacgcacgccgcggcggcggagccggacgtgtcatgggtgaactctcttgtcaaggacggccacgccgccggcgacatattcgcgcagtggccggagcaggagcagatggtggcatga

SEQ ID NO: 10875 - DNA, 2682 bp, Oryza sativa
  Clone ID: TFbOSC400269j.C1.o25.fg
atggacgaaccatcaattgtgaaacttccagaatatgaactgccagatgctttccgtggagaaattgatggcaaaggattagaagaaggagcaaccatagataacatggatccttcccgcccttttcttgttctcaatgtatttgattgggataaggtcgacgagtggatagctctaaaaactgcttggatcgccaagcggttaaaaaatgatataatcatcccggacccagtacctcagatcgggcgagacgccttctttgatattactccccgcttgaccactgtattggaaaaggatagcgtacggtgcttcctccccttgtttgtgcaatgtgagtcgatcatgacgtatcagtgtgccatcacctcagaaaccttaacccacatggtcaggcataatgccttgcgatgcgcaaaagttgtattggagggcaaggcagcagaactccgttgtaagcacgctaatccaaactgcatgaatccgtatggatattttgcactccatgaagctgctgaacggttctctgctgacatgaccaagttgctcttccgccatggtgcttcagcaaatgtacgcacagccagcgatgccggaattcagggactactaccgcttgatgttgcggttgaaaatgcttgcatgcacaagtatctggaggacaatctatctccgactccaatgcagtatcatgaggattacatctacaagctcattcatctcctctgcctacctgagatgaaggttttcttggatacgattagacttcttgccgagaaaacagataatcttgttgatgagctctggaattacatgaagaacggcaagcttgtacagaccgcagttttactcctggcagctcaaaaacatattcgcaagatcaaacctgatggattttgtattatcacgcaccatttatttaaagagtatgctaattccctaagatgtgccaaaggtgatactggagaggcgcagaagcagctggaggaaagggaagcacttctgagttgtaaatccgagctttttagtataattttgctagctggtgaggctcttgataactacattcaagcacattcagaggtgtcccatgcggaggttcttgcacgtgtctcatctattcttaaggaattcgggttttgccctaaggaaaaatgcattgacaacataaaactgtactgctccttttgtattcaaaatcataattttttgtctccttatatgtacgggacgtcttactgtgacatatttcacaaaggtgcttattggcatgtagctgttgataatcatgtttctgcaaactgttatgcggttcatgtttctctgagatttgggaggatggcaggacctcatggcccatgtcgtgtattcggctccttgaaccttattgatgtgcgatatctggacacgtgccatcgcatgagccgatctcgaaagaactctgagattaagcgtgcttggtctgcagcaatttcgggatgggtgaccgaccagaaaattcttctcgggtgcgaagcgtgcttggtctgcagcaatttcgggatgggtgaccgaccagaaaattcttctcggagcttcatcctggagaggccacgctacacatcacggctgcagttgaaagtggaggtgatggagaagcagagtatcgacttcggcaaggttttggaagagatccaggagtcactggtggtgctgaatctcaagcaaggagctgcgcgaggaagtgttcgatctgcgtcaacaaatggagctcatgaacaaggcttcaagttcgtctgcggcgaatccttccccaactcgagttccgttgatggacgaggagaggaaggctccgctactccctacgccgcctacgccacatgtggctgtgctaggaggaggggacaaatggcctcatggccgctgcgatgcaacagatcaccggggaagggtttcggggatggttaccaccctgatcccgactccggtcaagagtatgatttccctaccaatcctctaataatttcgagcaatctgaatttgggtgtggagaaattggatttggagacagcattggcaattgcttctttgcaagaggaggttattttggaatcctctgcagtgtcagtttcaaatccgaagaagattgacaatgggttgcagattcgaccaaatcttgcttacaagggtgctttacctttgcccttaccaccaaatcgtggggtgactactggcagtgtgtctcgaatggaagatcgcaagactcttgacaacggtaagttggtgaacggtactgataagatttctgcgctaaaggctcaacgcagagctcatggtttatgttatatttgtgctgagaaatggtctcctactcacaaatatgctaatactgttcagttgcatgctgttcaggaattacttaccaccctgggttctgaaattttgtatgatcaggaatttactgaagaatgtgaaggatctgacagtcagggcttaatggctatttcagttcagtcaatgcatgggtctgaaactatgggctgtatgcgtctgttaggatttattcaaggtagagaggtgctgatccttgttgattctggcagtacagctggtttccttagctctcaggttgctcagactatctcaatgcgtcacgcaattttgctggacctcatgttccacatagaccaaaaactatgttag

SEQ ID NO: 10876 - DNA, 804 bp, Oryza sativa
  Clone ID: TFbOSC900390j.C1.o18.fg
atggtttcattgctactacagtggaaaccaacacttgctactaaggttgacagcaacatttgtgacaaccaaggccaaagctttctacatgcagcagctatgaagggccattcttccatcatctcatacgctgtaaagaacagcatgcttaagcatcttttgaatgcccaagacaaagaggggaacacgccgctccatttagctgtcgttgtagaggaatgcaaggttgtttctaagctattatcaagtggagaggtaagtttagtagtaaagttgcatgagtcaggagcacagtttcaaccacaaaggcaagatcttatagagaaatggaatgctcaagacatcatgaaatggagagacaatacatcaaaaaatctcgctgttgtttcaacacttatagcaacgattgcctttgccgcagcattcaatgttcctggatcatatggagatgatgggaaagcgaatctagcgggtgaccccatgtataacgctttcctgattctagacaccatctccatggttacttcagttgtggcgacaatactgctggtatatgggagggcctccagatctcatcgctcatggctgagctttgtgatctcaatgtactttctgtggctgtcaataaattgcatggtgttcggcttcttcacagcaatagccgcagtaagcaagaagggcataaagattgcaatgtcccaactgatctaccatgggatgtacatcttgacaatgcagcttacatttttagcaatgccagggtcatttataagcactatgaagttcctcgtattttatggatga

SEQ ID NO: 10877 - DNA, 1215 bp, Oryza sativa
  Clone ID: TFbOSC21353j.C1.o1.fg
atggaccgcccgcggcagcagcacgagccggagcatctcggcggcggcggcatcgacgtcgaggtcgagctcgacccggaggacctccagccgtcggtgcccctcaagaaggtccccgcgggggacctcttcgaggcggcccgcgcgggggactgcgcccgcctcgccctcctcctcggcggcggcgccaacgtcaacgagcgcgaccgctgggactccgtcgcgctctactacgcctgcctcgccggccacgccgacgccgcccggatgctgctcgaggccggggccgtctgcgccgagcgcaccttcgacggcgaccgctgccactacgccgcgctcaacctccgcctccggaggctgctcaaggcgttcgaggccaggcccccgccgctgccgccgctccccgccgcgctcagggccacgttcctcgcctgccccgccaaccgcgccgccttcctcgagatgctccagtggaccgccggctccgaagccgccgccctcgccgctgctgctggatttgggccaacggacaatccatcaagtactagcctattccctccggacattacattctacgtggatggaaaaccaattgaagctcatcgggtcattctttgtgcccggtcatccttctttcggaggaaattcaatacagactggaaagacaggaaggaagtgagattttctagccagaagttatcttttggtgccttgtacagccttgtccatttcttctattctgatagactcgaagtggatgtggatgatatggaaaatttggcgcgggcgtgcaaagtttgtaagtgtgagggtttgcaaaagatattgattaaagaagctactctccagagatatgcagaacacaagtcaccgagagatttggacagttcacagaagaggttcattttacatgggcaatccttgccagaggaggatcgccttccatcagccctgcggcatatttttgaggaatgtctagctaactcaagagaacaagaatgttataacgatgaatcaaatgaaatgagcagagactctggtgtagatgctgctgctgatctttatataaaagtgattttagcctcaagatcagagtactttaaagctaggctatctagaaacatggattttcttgaagtcaagagtgggcttcaatcaactcagagccttccttttcttgaagagcatgacatgagtacagaagcatttgaaaag

SEQ ID NO: 10878 - DNA, 282 bp, Oryza sativa
  Clone ID: TFbOSC28359j.C1.o1.fg
atggaggagaaggggatggggaagcagcggtgggagaagatgctcctccaggccgccttcgacggcaaccttcgcctcctcaggaagatggcgcgcgggctggtcacgacggggcgcggccgcggcgaggcggacgtcctggcggccgtggcggacggcggcagcgggagccgcgcgctgcacctggcggccaccgaggggaggatggacgtcctcacgtacctcgtcgaggacctccgcctcgacgtcaaccaaaccaacgacagaggttctgatctctga

SEQ ID NO: 10879 - DNA, 3078 bp, Oryza sativa
  Clone ID: TFbOSC400945j.C1.o7.gm
atgctgcgggaggcggatgagagggcagcggagggcggcagaagagtgccgctcgacggcagaagagcgctgctcggtggcagacggcaggaggtttctgtgttcggacttttgggttcatcggaggtggcaggcttggcagaacggccaactactgagattttagctagccgaagacctctagttggctttagcaatgtcatcaaaaaggtggatgatattattgatggaggtataacacccttagcatgtgcggcatacaatggttcagttacaagcatgaaaacgttgttgcaggctggagctaatgttcagatttcaaagccaatcggcaaagctatagtagctgacctcacttcatctgaatctatggttcagattctacttgattctggtgctaatgcagacgcaattgatgaggacgatgtccatacagcagcaagagttactgcgctgcgtgagcgcatgtttaatgctttggaaaacataaactacttgctagctgatatttgctgtaaagcgctgagaaatgatgacaagggcaaggaggttatgtgtttgaaggcagcgttggcgctgaaccctcaaaatgagagagctgaaagtcttttgaggcacggcccggcggccggccgggccgacacgggcccgacccccatcgggccgggccgctcctcggaggacgccacgacggcgaccgggaagaagatgaacccgctccctgctctggccagccggctgtgggaggcgagcatccgcaagctcaagtactccaccatccttcgcggctccgtcgtcccctccggcggcaccttcgacggaccggcggccgccaccggcaatgccgctggaggtgaccccatcacgctcaccccaagcctctccgtcagctcctccacctccaacaccatctaccagtacgacgacggcgacgaagacatcgactccgtcctcgacgacgttgacaccgacgacgacgacgtcgacgaggcgtcgctcggcgagcccagccactccgaccagctgctgcccagcggagacttctaccagggcgacctacgctgtgacctcccccacggcgccggcaagtatctctggacggacggcagcatgtacgaggggtcgtggcgcggcggccgcgcggccggccgcggcaagttctcgtggtcgtcgggcgccatctacgagggcgacctcgccggcgggtacatgcacggacaggggacgtacatcggcgagctcggggacacgttcgccgggctgtgggcgaacaacctccggcacggccgcggcacgcaggcgtacgtcaacggcgacgtgtacgacggccactggcgcgacgggctgcaggacgggcacggccagtacatctggcgcggcggccacgagtacatcgggacgtggaaggccggcgagatgcacggccgcgggacggtgatatgggcggacggcgaccggtacgacggcgcgtgggaggacgccaagcccaaggggcagggcacgttccggtggtccgacggcgggatgtacattggcctgtggtgccaggagtccggcgagacgcagggcaagggcgtgtactacccgccgtccggtggcccggcggtgccgttgccccgggaacccaagggggtgatcacgaagctgctcgaggagctggagatgtccgaggggaagacggtgtcgctgctgccgtcacagaaggtgctgacatggcctggggtggagcccgtgacgaagaagccggtgtggctgccgccggaggtcgccgctgaccaagggatgtggcggccgccggaggttggagctgaccaagggaggaggtcgagcaggaggaacaacatgtcgtccgacattgacagcctggttgagggggaggacggcggcgaggagagtcgcaacgacaggtcatgggtgcggacaccgtcgtgtatgcgcgcgccgacgatgccgaagccggggaagaagcagggggagaccatctccaaggggcacaagaactacgaactgatgctcaacttgcagctgggaataatattagatgtacctatcattgccacccacttctcagcggagcgcacaatgtcgctgaggggagggggtgaatccgccggcagcgattctccttgtcggcgagaggaggccaagagtaggactcctcggccacagccgggctcagccggcgagcgtagcgcggcggcctccgctgagatgtcgtcgaggggagggagcaaatcttgcggaggcgattcactgcagccaggcgaagccggcgagcatggtgtggcgccctccgccgccgccgtggagacaagctccgaggtcgccaaggtcaggggccaggcggccacgccctactcggctgccccctttgatgaatccatgctggtgcagcattcaacaggcaaggcgatggggaatcgtgaggctgacgttgctgctgttggtttgggtccaaaaaactcaggcctcaagatctgtccagctcgttccttgggacgacgccgcggaggtggccgggagggagcagcggggcacgctgtcgatgcggtggcggaggaggaggacgccggccaccgcgccgcggctggatccggcggggagggcgtttcatggagggggggtgggcggccgaggtacacgacggcggactcgctggcgttcgtggcggcgagcctcgggaagggcaggtggcgcggcggcggagggtggaggaggtgggtggcggagaggtcgtcgctgcggcgggtgatcggcgccgccacgctgcgtgacaccgtcacgccgctgctcgtcccgtgctacgacctcgccaccgcggcgccgttccctcttctcccgtgctggagccgttcctcttctcccgtgccgacgccgtcgagaggacagcttcgacttcaacggacgacaaccgtcgttgtcgttgtcgtcgccatccccaacctcctcaccggacgacactatccagaacgccgcagcaagaatcgggtggagtccaaatcggctacgatcaaggatcaaatcaattggcacgctcatacacctaaaggcaagcttttggacctgcactggagttaa

SEQ ID NO: 10880 - DNA, 218 bp, Oryza sativa
  Clone ID: TFbOSC28352j.C1.o1.gp
caagatatcttctcgatcacggttctgatcctacgattgataaatcagtgttaccttttcatgctgctgcaacgaaaggacactgcgaaatagtagagttgtttctttcaaaaggagttgatgtggatttatattctatcgctgggaccccattgctggcagctgcgattagtggccaacatagcacgatgaagatcttattggagcatcatgctgat

SEQ ID NO: 10881 - DNA, 1299 bp, Oryza sativa
  Clone ID: TFbOSC9793j.C1.o1.fg
atggcatttaagtgtaacatcacctcagaaaccttatcctgcattgtcaggcataatgccttgcgatgtgcgaaaactgtattggagggcaaggcacctcagctcagttgtatgcatgccaatccaaactgcattaacccatatggaatttttccactccatgaagctgctgaacggttctctgttgacatgatcaagttgctgttctgccatggtgcttcagccaatttacacacagtcaatgatgctggcattcccggactactcccgctccatgttgcagttggaaatacttgcttgcataaatatctggaggacaatctatctcctgtgcagtatcatgaggattatatctacaagctcattcatctgctgtgtctacctgagatgaaggtttttttggatacagttagactgcttgctgaaaaaacagataatctagctgatgagctctggaattacatgaagaatgacaagcttgtagaatccgcagttttactcctggcagcccgaaaacatatccgtgagggcaaacctgatgggttcgacattatcgcgcaacgtatatatgaggactatgattccctagtgtgtgataaaggtgatactgcagaggggcagaagctgctggaggaaagaagagcacttttgaaatgtaaatgtctgattgtcactataatttcgcaagctggtgaggttttggataactacattcaagcacattcagaggtccacaacaatgaaactgacctgatgaagttcatgttagcgagaaccactatcatgttgtccaccatgaaatatgatttagtgcccaatgtggaggtccttgcgcgtgtttcatatattcttaaggaattcgggttttgccctaacgaagaatacattgacaccatgatcctctgtccatataacaagatttcttacagcgacatagttcacaaagatgtaaccaaggctgttgcacaaatgtctacttctctgcctgctgcagaaaaaaaggctgcgagaaaaaaggcacttaaaggatgggatccaacattcataaagagaaattttttcccctactggagatcagtattaggggcccagctgtctgtatccaatggagcagcagatgagaagtcaatgcttcatcgtccacagttccgtaattcagtaaatgctcacgaaggtgctaaagacatgagcaaaaaggtgcctagtggcatgttgctgttgataaccataggtctgcaaagtattatgctgcgcacgtcttttgcggacaccttaagaaggttgcgaatatacatgtga

SEQ ID NO: 10882 - DNA, 1287 bp, Oryza sativa
  Clone ID: TFbOSC400769j.C1.o1.fg
atgatgtgtgaaatgacaaaattacccctagttcctttctcacatgtccagagtagaggaggggccgatgtctgtggggactccttccccggtggcaacaatggtttgcgtgggcggcaacgctgtagtgggggcgaccacgacgccctctccacaagcgccaaggccacctccgaccacctcgctgcatctggttgcggcgacgtccatggccactccctcttcttcttcgctccaccctcgcttctacctctccgccatcgacgaggaccgtccctggtaccaggccgacaacgatgcggcggggctcgaggagctcctcaccgcatgcccctcctcgctaacgggcccacgctgtggtaccagctcgacgacgacgtggcagggctcagggagctcctcgccgcgtgcccctccctcgccgacgagcccgcgccatggtactccttggctcgcggcacggaaccgctaaccccgctcatggtcgccaccgcgtacggctcagtggcttgcctcgacgtgctcctctcgccgccctacctcgtggaccccaaccgcgcctcggcctcatcgctctccaccccactccacctcgccgccgcgggaggggctacctctacccccacatcggtttcccgcctcctcgccgctggcaccgacaatgacaacgacgaggtcgaagagcgacaaggtgaggaagggagagctcgaaatctgcaaaaattatcggataattcgggtgaatttgagaggggcagtgtggatttacaaatgatccgatttgaagagctacttgttttttttttctcctttggatttatgggctatttcagtttgttgctacttaaaccttaccaaattttgggaaataaaccgaaattttcaactctgaagggaggtgatgggatgcgcgacccttctctcatgcacatgggtggccctcactgcacgagctcaatttcagatgatcatgaggagctaagctcgatttctggcgttttcagcatgcctagctcaagaccatacaacgtccctcccctgcacgcgggggcgtctcaaatacacctgatcaaagaaaaacaacaagaacaacaaatcaggagagcccaaactccaatccggaagacgctagcgtgcgcggaaacatcgcgtgagacgccaagcttttgcctaattgcctcccaggggaggcatccaacgctgtccgtccattctcccctccgcgtttctgatgacgaactgactagcgacaatgatcgccctctgctacaggctacagcagcttaa

SEQ ID NO: 10883 - DNA, 585 bp, Oryza sativa
  Clone ID: TFbOSC421348j.C1.o4.fg
atggagatggaaggaggtgataatgacttcgccaaagctgttttagctgggctggacaaatgtgaagagctgggatatgaagatgttgaattgtggagcgacagtcagagagcatgtggcgtcctgagtgattttgaaactatcaatatggatgacaggaatcggatggagtgcatgcttcttaggtttaagtcaactaggtttaaaagattggtctctgtgcaaaaaccaagggaaatcaaagattggtctctgtgcgaaatcttgttcatggttgatgatattctcatagagaaagttcattcacgctaccttctgcgtaatttgctaaagaagtggtctccatatttgagaggacaatccatctatagcatcacacgtacgaagctcacaaggtacatcattcgtacgaagctcacaagggacatcatccgccatccgataggagccgttccactccatgaagctgctgaacggttctctgttgacatgatcaaattgctcttccgccaaggcgcttcagccaacattggtcctaattcagattttattttgctgggagatttggtcctaattcatacttaa

SEQ ID NO: 10884 - DNA, 1301 bp, Oryza sativa
  Clone ID: TFbOSC900089j.C1.o35.fg
gtcaacttatgttggacagaccacttgcaaacagtgctcatcattactgcaagattttatgtgtgagaccaattgctgctcctttttcaacaaaagtgaatttcagggtagaaggcttgaacctagtcagtgattcctcaaggctaatttgctcatttgaagggagttgtatattccaggaagacaccgataatatagttgatgacgttgagcatgatgatattgaatatctgaacttctgttgtcctctccctagttcaagagggagaggatttgtggaggttgaagatggtggatttagcaacggcttcttccctttcataattgctgagcaggacatatgctctgaggtctgtgagctggagagcatatttgagtcctccagtcatgaacaggcagatgatgacaatgccaggaaccaagctttagagtttctaaatgagctgggctggcttcttcatagagcaaacataatatctaaacaggataaggttcctctagcatcctttaacatatggagattcagaaatcttggtatatttgccatggagcgggaatggtgtgctgtgaccaaactgctgttagatttcttatttactggactcgttgatatcgggtcccagtctccagaagaggtggtgttgtcagaaaatctgctacatgctgccgtgcggatgaaatctgcccaaatggttaggtttctgctgggatacaagccaaatgaaagcctgaagagaactgcagagacattcctattcagacctgatgctcaaggcccttccaaatttacccccctccatatagcagctgccacagatgatgcagaggatgtattggatgcacttactaatgatcctggactggttgggatcaacacgtggagaaacgcgcgagacggcgcaggcttcaccccagaagactacgctcgccagaggggcaacgatgcttacctgaatatggtcgagaagaagatcaataagcatcttggcaaaggccatgttgtcctcggcgtccctagcagcatacaccctgtaataaccgatggtgtgaagcctggtgaagtcagcctggagatcggcatgaccgtgccgccgccagcaccgagctgcaacgcctgcagccgtcaggccctgatgtaccccaactcgacggcgaggaccttcctgtacaggccagcgatgctgaccgtgatgggcatcgccgtcatctgcgtctgcgtcggcctgctactccacacctgtccaaaggtttatgcagctcctacattcagatgggagctgttagaacgtggaccaatgtga

SEQ ID NO: 10885 - DNA, 2994 bp, Oryza sativa
  Clone ID: TFbOSC401265j.C1.o5.fg
atggaggctgcccgggtcggggcgcagagccgccacctgtacggcggagggctaggcgagcctgacatggacaggcgcgacaagaggctgttcggctgggacctcaacgactggcggtgggacagtgaccgcttcgtcgctacgccggtgcccgccgcggaggcgagcggcttggcgctgaacagctcgccgtcttcctccgaggaagccggggccgcgtcggtgagaaatgttaatgctagaggtgactccgataagaggaagcgggtggtggtcattgatgatgatgatgtggaggatgacgagctggtggagaacggcggcgggtcactgagcttgagaattgggggtgatgctgttgcccatggagcaggggtgggtggtggtgctgatgaggaagacaggaatggcaaaaagatcagggtgcagggaggcagtcctagtggccccgcgtgccaggtggagggctgcactgcggaccttactggtgtgagggattaccatcgacgacacaaggtctgcgagatgcatgccaaggctaccactgctgtggttgggaacactgtccagcggttctgccaacaatgtagtagaaagtcttacattgtgaaacggagggactattatggaagtaatgattttggatcgtaccttttgattttgaagaataattttagattccaccctcttcaagaatttgatgaagggaagcgaagttgccgccgacgtttagcaggccacaacagacgaaggaggaagacccgccctgaagttgctgttggtggttctgcatttactgaggacaaaattagcagttatttattgttgggtctccttggagtatgcgccaatttgaatgctgacaatgctgagcatttaagaggtcaggagttgatatctggtcttttgagaaacctgggggcagttgccaaatcattggatccaaaagaactctgtaaactcttggaggcatgccaaagcatgcaagatggatcaaatgctgggacctctgaaacagctaatgctttggtaaatactgctgtagcagaggctgcagggccatctaactctaagatgccttttgtgaacggtgatcaatgtggcctggcatcatcatctgttgtaccagtacaatcaaagtctcccactgttgcaactcctgaccctccagcatgcaaatttaaagattttgatttgaatgacacttatggtggcatggaaggtttcgaggatgggtatgaaggttcacctacaccagctttcaagacaactgattctcccaattgtccatcatggatgcaccaagattctactcaaagcccaccacagactagtggcaattcagattcaacatcagctcagtcactgtcaagctcaaatggagatgctcagtgtcggactgataaaattgtcttcaagcttttcgagaaagttcctagtgatttacctccagttttgcgatcacagattcttggttggttgtccagtagccctactgatatagagagctatattagacctggttgtattattttaacagtatatcttcgcttagttgagtctgcatggaaagagctctctgataatatgagctcatacctggataagcttctgaatagttccaccggcaacttttgggcatctggtttggtatttgtaatggtacggcatcagatagctttcatgcataatggtcaacttatgttggacagaccacttgcaaacagtgctcatcattactgcaagattttatgtgtgagaccaattgctgctcctttttcaacaaaagtgaatttcagggtagaaggcttgaacctagtcagtgattcctcaaggctaatttgctcatttgaagggagttgtatattccaggaagacaccgataatatagttgatgacgttgagcatgatgatattgaatatctgaacttctgttgtcctctccctagttcaagagggagaggatttgtggaggttgaagatggtggatttagcaacggcttcttccctttcataattgctgagcaggacatatgctctgaggtctgtgagctggagagcatatttgagtcctccagtcatgaacaggcagatgatgacaatgccaggaaccaagctttagagtttctaaatgagctgggctggcttcttcatagagcaaacataatatctaaacaggataaggttcctctagcatcctttaacatatggagattcagaaatcttggtatatttgccatggagcgggaatggtgtgctgtgaccaaactgctgttagatttcttatttactggactcgttgatatcgggtcccagtctccagaagaggtggtgttgtcagaaaatctgctacatgctgccgtgcggatgaaatctgcccaaatggttaggtttctgctgggatacaagccaaatgaaagcctgaagagaactgcagagacattcctattcagacctgatgctcaaggcccttccaaatttacccccctccatatagcagctgccacagatgatgcagaggatgtattggatgcacttactaatgatcctggactggttgggatcaacacgtggagaaacgcgcgagacggcgcaggcttcaccccagaagactacgctcgccagaggggcaacgatgcttacctgaatatggtcgagaagaagatcaataagcatcttggcaaaggccatgttgtcctcggcgtccctagcagcatacaccctgtaataaccgatggtgtgaagcctggtgaagtcagcctggagatcggcatgaccgtgccgccgccagcaccgagctgcaacgcctgcagccgtcaggccctgatgtaccccaactcgacggcgaggaccttcctgtacaggccagcgatgctgaccgtgatgggcatcgccgtcatctgcgtctgcgtcggcctgctactccacacctgtccaaaggtttatgcagctcctacattcagatgggagctgttagaacgtggaccaatgtga

SEQ ID NO: 10886 - DNA, 1842 bp, Oryza sativa
  Clone ID: TFbOSC400938j.C1.o12.fg
atgccggtccaggacccttcctcccccgtgccggcggcggcgcggccgaagcgcacgtcgtcggcgccgatccggccgtcggactacacgcacagcccggcgcaccaccgcgtcgcgctgcgggacgccgccgggctggcgggcgtcctccatgggctcccgccgctcgcccacccgagccgcatcctcaccgccgccgacgccgcccgcgaggcccgcctcgcggcgtccgtgtccggggcgctcgaccgccgcgacgtcccgggcggggacaccgcgctccacctcgccgtgaggctcaggctcccctccctcgcctccgcgctcgccgccgccggcgccgaccccacgctccagaaccacgccgggtggacgcccctccaggaggcgctctgcctgggttgcaaggacatcgccgcgtgcctcctccgcgcccaccgcctcgccgcctgggccaagctccgccgccgcgcccccgcgctgtccgcggcgctccgccgggtccaggacttctacctcgaggtggacttccacttcgagagctccgtcgtgccgctcctctcccgcgccgcgccctcggacacctaccgcatttggaagcgcggcgcggagctccgcgcggacaccacgctcgccggcttcgacggcctccgcatccgccgggccgaccactcgttcctcttcttcggcgaggaggccgacgccggcggccgccacctccccccgggctcgctcctcgtgctccaccgcggcaagcgcgaggtgcacgacgcgttcgcggcggcggcggccgccggcgacgaggattcggccacatctgacgcggccgcgtatcgaccggggctcaacatctcctccgcgaggctcgtgccgaggacgacatggctacggaaggagaagacggagagcgtcggggagtggaaggctcgggtgttcgacgtccacaacgtcgtcttctccttccgcacgctcaaggcagccaacgccggccgcaaggacttcaccttcgagctcgccggagacgacgacgacgacgacaacaacgacgacgaggaagacttcctccccctggagatccgcgacgatgacgaggacggcgacttcctggtcgccgacatccccccgcccccgtcgcgccgcagctgctacgtgcccggccggcgcagcgtggcggcgccgccgtcgcacatggcgacgccgcagaggcggcggaacagcgtggacgtgccgcggcggctcccggcgtgcgcgtccgtcggccgcggcgagggcggcgtgttcggccgccacgccaccacgacggggggagccaggtggaaggaggaggagacggtgaagacgctgcggccaaccgtctggctcaccgaggacttcccgctcaccgtcgacgagttcttgccgctgctcgacatcctggccagccgcgtccgcgccgtgcgccgcctccgcgagctgctcaccaccaagttcccgccggggacattcccggtgaaggttgccattcctgttgttccaacggtgagggtagtgatcaccttcaccaagttcgtccctctcctcgagccggaggaattcttcacgccgatgtcaagccccagcctgttggtgagcccgggtccgggatccatcatgcacaaaccagacactcagaagagctcctatttgaagtggggcttgaagaactccagatcgaagccggtgaacctgtcgcaggttgcggacaacaccgacccgttcacgatcccgagtgactacacttgggtaagcctcgggtctaagggccaagacaagaagtcatccaagactaagaaggggaagaccaaagagaccaagcttagctag

SEQ ID NO: 10887 - DNA, 804 bp, Oryza sativa
  Clone ID: TFbOSC8653j.C1.o1.fg
atgtcatcaaaaagctcgccaagggaactgactggaaagaagaaactgactaaacatgacgatgaagcattaaggtttattgagctggctgagaatggtaccgaccccgcaactatcgatgcatccgaagccaaggtggatgatattattgatggaggtataacacccttagcatgtgcggcatacaatggttcagttacaagcatgaaaacgttgttgcaggctggagctaatgttcagatttcaaagccaatcggcaaagctatagtagctgacctcacttcatctgaatctatggttcagattctacttgattctggtgctaatgcagacgcaattgatgaggtcatgtttgaggacccacccatcattgctgcagccaaaaggaaacagatgaatgttgtccaacttctattgagttcttccaccccaatcgaaggtgttgactggagcttgaatggtataatagcatatacagaatctgttacgtttaaagcagaggacgatgtccatacagcagcaagagttactgcgctgcgtgagcgcatgtttaatgctttggaaaacataaactacttgctagctgatatttgctgtaaagcgctgagaaatgatgtgagtacaacagagtgggacaggttgaggaatctcaatctgctttatctttcacacagtttccatggtcagaaacctgtcctgtcatctgacgccattgttaatatggccttggtttatcaaaaacaggacaagggcaaggaggttatgtgtttgaaggcagcgttggcgctggcccctccaaaatga

SEQ ID NO: 10888 - DNA, 3096 bp, Oryza sativa
  Clone ID: TFbOSC414561j.C1.o1.fg
atggcggagacacgcaagttcttgatgcccaaccagcccccggatatttcgcagatggtgctggaggctaggaagcgatggttgcgacccactgaaatatgcgaaatactctcaaactacaggagtttctctctctcgcctgagccaccaaacaggcccggaagtggctctctttttctatttgaccgcaaaacattaagatacttcagaaaggatgggcataactggaggaagaaaaaggatgggaagaccgttaaagaagctcacgagaaactaaaagctggcagcattgatgttctacactgctactatgctcatggagaggaaaatgagaacttccaaagaaggacctattggctgttggaagaggatttcacgcacattgttcttgtacactatcttgaagtcaagggtgtaaagcaaagttttagtcgtgctaaagaagaaattatgcagttatctggtgctgatagtccatcgtgttcaaattcgattactagtcagaaccagatgaccccacaaataatggatgcagctgaaagcccaattagtgggcagatttcagagtatgaaggtgctgaaccagcgaaattcggtgcagcagataattgcccagcaagctccagatacaaccctctcattgagatgcagcagcctctggatggaatcgtgatggataacattttatacccttcttcttcagccatctgtaaccaagtttcaggttatcatggtgaattgccaccaggaacatctaatctaaatggtcatacattttctcacagtgacatagctagaatgtttgatgattccagctctgggctaagagacatttccagaaccctgtttgattcaatgccttacgatgagcatttctcaggatatgcaaatggattcatggagccaactcttcattcttctttttccatgatagaggctaacaatctggaggatagctctcttctggagacatatacatctgaagctctttacactaacaacctcagccagaaggaagctgatgcactaagttttgctggcatatcatcgccagaggtgaatggtaataaatatactgaaggaagcaccaagcatccgctcctgaagcaattgtcattagatctatttaagattgagtcttctggtttaaagaaacatgacagcttttcaaggtggatgagtaaagaacttggagaggtggttgatttgggtatcaaatcaagttctgatgctctctggagtagcattgagattgtgaatgctgccgatggtcctagtgcaccaactaatgaacagttagatgcttatgcagtgagcccttcacttgcgcaagaccaactattcagcattcttgacatttcaccaagctgctcatatattggtttgaagacaaaggttctggtaactggtacattcctggcaagtaaagagaatgtggaaaattgcaagtggtcatgcatgtttggggatgttgaagtaccagctgaggttttagctgatggttccctacgctgctatgcaccagaacatcaatctggaagagttcccttttatgtgacatgctcaaacaggatcgcttgtagtgaagtgcgagaattcgagtaccgggattctgatgctcagtacatggagacatcacattctcaagccaatggtataaatgaaatgcatctacaaattcgtcttgagaagctactcactttggggccagatgacaatcaactgcttgtttgtggaaatgaaaaacttgagttaatcaatgctataaactccctgatgcttgatgagaaatggtcagatcagggatcaccatccggctctaaagatgttgtcaccccaaggaaccaaagtttaaagaaattgatgaaagaaaagcttcattgttggcttatctataaaatatatgattgtgagaagggcccaaatatactgggaaaggaaggacagggtataattcatttggcggctgcactgggcttcgattgggctataagaccaatactagttgctggtgtcaatgtgaactttcgggatgctcatggatggactgcacttcattgggctgcgtcttgtggaagagagcgaacagtgggcgtccttatagcaaatggagctgcagcaggtgcattgacagatcctacttctgaatttccttctggaagaactccagccgatttagcctctacgaatggacacaagggaattgccggttttctcgcggaatctgctttgacaagccatctgtcagcacttactttaaaggaatcaaaagatagcaatgcggaagaagcatgcagattaacaattcctgaagatctccctgaaatgaattatggtcagcttgctgtacaggattctcatgctgaatcattaaaggattcattaagtgctgttcgtaaatccgctcaagctgcagctaggatattccaagccttcagggtggaatcattccacagaaagaaggtcgtggaatatggagatgatgattgtggattatctgatgaacacacattttcacttatttctcttcaaaaggtcaaacaagggcaacatgatacacgtttgcattctgctgctgtacgtatccaaaataagttccgaggatggaagggaagaaaggagtttatgatcattcgccagagaattgtgaagttacaggctcatgtgcgaggacatcaagtgaggaaaaactataaaaaagtagtctggtcagtaggtattgtcgagaaagttatattgagatggaggagaaagggacgtggtttgcgtggctttcgacctgagaaacaattagaaggccagacacaaatccagcctgcaaaaacagaggatgaatacgattacttgcaggatggcagaagacaggctgaaggcagactacagagggcactggaccgggtgcgctctatgacacaatacccagaagcaagagaacagtaccgtaggcttacaacttgtgttgctgaaatgcaacagtccaggatgatgcaggacgagatgctaagtgaggcagctggtgctgacggaagtgatttcatgaatggactggaggacttgatatgcagagacgacccccaaatgtctgccatttggtga

SEQ ID NO: 10889 - DNA, 1506 bp, Oryza sativa
  Clone ID: TFbOSC9750j.C1.o3.gm
atggcagaaactcctgctgcagcagcagccgtggaattcgggcctcatcctcatgacatgttgacgctcgacggggaacttttgcgagtgctcatcaccggcgacagggtccgcttggaggagattttgagagaagcgggtagctatggtggcgacggtgaacaccctggggatggtggcaatggaggatcaccacctcatgaagttcctccattggtggacgggcaccgcgaccctcgaagggatggcccggagctgatcgcgattaacttacccgatcatgcggcaccagccgtggtggtggaggcagggttgtcgttgagcccaaggagatcttacggctatctgaagagtggcgcctgcagcgcgacacggagcgggctgccttctcggagtgacgagcaacgggaacacggcctgcacctcgtcgccagccgcggccacgccgagctcgcggcgctcatccgcgtgagggcgccctcgctcgtcgccacgcgcaaccggtgcctcgacacgccgctccactgtgcggcgaaggccgggcaccgcgaggtggtggcccgcctcctagatacgcgcaccggcgtggccgaggctgaggtggagttggcggcggcggtggcggaggcggctctgcgggtgaggaactgcctgggcgccaccgtcctgcacgaagccgtccggcatggccataccgaggtggtgcatctcctcatgtcaagggcgggcgcggctgagctggcctccgtagcatccgacgacggcgtctcgccgttgtacttggcggcgacgaccggctcggtgcgcatggtccaggagctgctgcttcgtccggcggatgacgggagacgacgatcatcggcgtcgttcactggccgggagggacagtccaccttttcactttgtcctctgtacccgcgggaagggcacgttatcccgcacaacccaaccgctgtgacgtacatagttcttggcggcttcggccggggcactaggacgtccatcttcttccacttccgttatgatgtgccgaccctcaagcttcttcgctgcacctcgttgcccgcgtgccctcttctgtccaacggagggttgactaccactagcctcctcctcctggttcccctccacatccctttccacgtgcccctgctggttcccctccgcatccctctccacgttcccttcctcgttcaagtactgcgcttggcgcggcggcgtggcgacggcggcggcggcgtggcgttgcatgcggcggcggtgttgcgcggcggcgaaggcggtggtgtggcgtggcggcggtggcgttgcgcgcgtggcggcgaaggtggcggcgtggcgtgccggcggcggcgtggtgcggcgtcgtcgtggcgcggcgtctcgtggcgggcgagatgcggcggcggtggaggaggcggaggcggcggcgaggacgatgagctcgagacgacggcgagatacggcggcgtcggcgcggggatttgccctaggcagtggcggtga

SEQ ID NO: 10890 - DNA, 1407 bp, Oryza sativa
  Clone ID: TFbOSC401064j.C1.o99.fg
atggagccgaagccaagcacgccgacggccgcggcgaccccgcggtttaagctggggaagcagtcgtcgatggcgcccgaccgcggcggtgcgggggagagctcggaggaggggtcgagcgaggcggtcggggtcatgggcttccagctgatgtacatggcccacgagggcgacgtcgaggggatccaggagctcctcgacgccggcgccgaccccaacttccgcgactccgacggccgcacggcgatgcacatcgccgcctgcgaggggcaagccgaggtcgtcgagctgctcctccagcgtggggcggatgccgtcgccgaggaccagtggggcagcacgcctttggcagacgcattgcattaccagaaccatgatgtgatcaagatcttggaaaagcatggctccaagcttaagattgctcctatgcatgttaaaaatgtccgtgaggttcctgagtacgagatttccccgaacgagctagatttcactaatggaaatggtatatcaaagggtacatttaggaaagcaacatggaggggcattctggttgctgttaagaagcttgatgacgatctaattatggacgagaacaaagtacaagcattcagagatgagcttgatgtgctacaactaatacggcatccgaatgtcgtgcaatttttaggtgctgtaacacaaagcagcccaatgatgattgtaatggaatttatgcccaagggtgatttgcgcaagcacttgagtaggaaaggggctctggaaccgtcatatgcagtgaaattagctcttgatattgcaagagggatgaattatttacatgagcataaacctcaagctatcatccaccgtgaccttgagccttcaaacatattgagggatgacactggacatctgaaggtggcagatttcgatctgtgtaagatgctaaaatggagaagaaaagttagagaagagaaagctgtaacttctccaggcaatgcatgtaggtatgtagctccagaagtcctgcgaaatgaagaatatgatactaaagtggatgtcttctcatttgctttgatacttcaagagatgattgaaggatgtctccctttttatgacaagaaaaataatgaaattgagaaggcacataattctaaagaaaggccacctttcagagctcctccaaagcattatgcttacggattgagagagctgattgaacaatgctggagtgaaaatcctgctagcaggcctgactttagaacgatcattgaacaattgtcttatatccagaatgaaatatctcagagaaaccgttggaaggtgaaacctctcaaatgcttcctgagctttgagggcatgtggaagaaagatcgaaatgagggcagcaccactcgttcatcacgttcatcgagatcctatttttaa

SEQ ID NO: 10891 - DNA, 1485 bp, Oryza sativa
  Clone ID: TFbOSC400896j.C1.o7.fg
atggggaactctctggggtgctccgcctccggggagaggctggtgtcggcggcgcgggacggggacgcggtggaggcgcggatgctgctggagctcagcccggcgctggcgcggtactccaccttcggcggcctcaactccccgctccacttcgccgccgctaagggccacctcgacattgtgacgctgttgctggagaagggcgcggatgtgaacgtacggaactactgcgggcaggtgttccatttctattcatccattttatctttatccgagttggaacattttgttgatatttttcttcgtttatttggaatggtggatgaagactgcgttgatgcacgcatgccggcatggccactgggaggtggttcagatgcttctgctcttcagatgcaatgtatggttaccagggcggattacttgagtggccgaacagcattgcatttcgcagcacatgatggacttgttcgtgctcgtttgagatatatcaacaaacctgctgatggcggtgttacagcacttcatatggcagctttgaatggagctggcagtactcctttgcattatgcagctggtggaggaaatgctgagtgttgccagctacttctgtcaaaaggcgctagcaagttgacactgaactgtaatgggtggcttcccattgatgttgctaggatgtttggacgccgtttcttggagccattactttctccaaactcaaactcgagtatccctgcatatcaaccatctaattatcttgccttgccattcatgagcatacttaatatagctaggccagattatgtgctctgtagaattgcaataatttcagaaactgttaagttaggaagagaatttgggttgctgcacaccgtagcctctgtggatgatagtgatctttgtgcagtttgccttgaaaggtcttgttcagtagctgctgaaggttgttgtcatgagttctgcatcaaatgtgctctttatctttgctcaacgagcaatacccgtgttgagttcactggcccacctggatcgattccgtgccctctttgtcggaatggaataatgtcatttaccaagttgccaagcacgccaacagaagggcttaaatctagctcagcactcacgttctgtaatccatgcatgctaaacacccgatctgtagactcaccagcaactatcagcaaagcagaaataaggcgcaaccgtgttgcagctgtctcttcagagctagtctgcccactaacctgcagcccatttccatcgtctgccctcccgacctgcaggtgcagtgacgatgatccatgtgatgccatagaaacacaggatggttccgaggtgcaatctcctcagccatcgcactgcgcaagcatggagatggacaagagggaacagcaggatcttgaccggactagctgctcaggcatgttctggagccgaagaagctgccacagggaggagcagtgtaatgcagagatcaatgcttga

SEQ ID NO: 10892 - DNA, 2130 bp, Oryza sativa
  Clone ID: TFbOSC32694j.C1.o2.fg
atggatcatcatcgtcagatgcaggacatccagctcgcgcgctgttcttcgcagcaccatggctcggaggcggcggtgacggcgagaggtgattctgcaggtggcttggagatgtgcccggctctgtatctcgctgcctccaaagggcgagccgaggaggtcatggcgctccttcttcagccacggcatggtggtgttgcgcagggacatcttgatcaagtcaatggtacttggatggtaccgcataatggtagagaggtggaagggcccggccctggggcagggcgagcagtgcaagcgccctgggccccgccaagtcaggggccccctgaccagcggcatggccagtgcaacatatcagaggtgagcgcggagagtaacaccgtgtttcacgtggctgcggagcaaggacacgacgagctgatccgggaggtgtacctcaggttcaaggagagcagcctcctctctcgccggaactcgtcgcaggacacgccgctgcactgcgcggcgagagccggacacgccggggccgtcacggccatcgtccagctgctggccctggacagcatcctgggatgcaagaacgaggccggagatacggcccttcacctggcggcgaggaacggccatggcgcggcggtagaggcccttgtctcggcggcggcgccggagctgtcctccgagctgaatgccgccggcgtgtcgccgctgtacttggcggtgatgagtaagtcggttacagccgtgaaagcgatcattaccacgtgcagcgatgcatcgcccgttgggccgaacaagcagaatgctctgcacgctgccgtcttccagatctcagaaatggtcgacctggtattgaaatggaagccagctctgtctggacaatgcgacgtcaaaggcagcagcccgctccatctcgcgtcgtccgacggcgaccgctccatcgtaagcgcgatcgtgcgcgccgcgccgccgtccacggcgttcctgaaggactcggacggcctctcggccatccatgtcgccgcgcggatgggccaccaccatgtcgtcgaggagctgatatctgcctggcccgacgccgccgagctccgcgacggccgcggcaggacgttcctccacgccgcggccgagaaagggcacgcgccggtcatctcgctcgccgtcaagaacccgatgctttgcggcatcgtgaacgcgcaggacaaggatggcaacacggcgctccacctcgcggtggctgcagccgcgtccaagggactagccgcactactttccgccggagacaacgtacgagtcaacatcatgaacaacgatgggtacacaccgtttgatctcgctgccaactcgtctagcttcctctccatgtcttctgatcttctccttgagactgaatccgggaaaaaggagaggaagaagagagatatgagaacaagcagagaagatacctggtctaaaataagccttgtggtgacactgtctgcctacggggcacaatcctgcccgcagaggcaagaccacctgaatcaatggagaggcaatgacacaacagattggataaggaagacgtccaacagcctcgctgtcgtggccgtgctcgtcgccaccgtcgccttctccgccacgttcaacgtgcccgggggctacggggacgatggcaaggcggtcctccaggcgaagaccgcctacaaattcttcatcgtcttcgacagcgtcgccatgacgacttccgttgtcgcagtgatacttattgtgtatgggaaagcatctggttcatggaagagcttcattttagctctgcacttcatgtgggtttcgatgatcggcatgatcgtggctttctgggcggctctggtcgccgtcatgagaaggaggacaatcaatattgtgatatacgaagtcataatcaatgggatctatgtcttggtcttgagcatcatgatcttgactaagccggcgtcgtggatcagcttcgtgaagtttatgttcagcagtttattgcctgagagacatcacaggcgtgtcgctcggcagtatccgtttgccggcacttactcgcgtaactattctgtcttcgttgtcacaaacatcttggcatacgttggtgccttcttggcactttcaaaaagctga

SEQ ID NO: 10893 - DNA, 2676 bp, Oryza sativa
  Clone ID: TFbOSC100304j.C1.o3.fg
atgccgaccaccaagtgcgccgtcccgctggtgagcggcgccgccggcggcgggggatcggcggagctgacgcgtcagctgtcgtcgacgcaggcgagcccgcggttcagcttctcgagcggcgtgctgccgtcgctgggctccaggggcggcggcgagcgccacgcccggctccggcggttcatcgtgtccccctacgaccgccgctacgagctgtggaacaactacctcatcctcctcgtcgtctactccgcgtgggtgacccccttcgagttcggcttcgtcccggagcccgccggcgcgctcgccgccgccgacaacgccgtcaacgccttcttcgccgtcgacatcgtgctcaccttcttcgtcgcctacaccgaccccaagacgttcctcctccaagacgacccccgcaagatcgcgctccgctacattaccacctggttcgtcctcgacgtcgtcgccaccatccccaccgagctcgcccgccgcatcctcccaccggacctccgctcctacggcttcttcggcatcctccgcctctggcgtctccaccgcgtcggcatcctctttgctcgtctcgagaaggacaggaagttcagctacttctgggttcgatgcgtgaagctcgtttgcgtgacgctgttcgcggtgcactgctcggcttgcttctactacctcctcgccgacaggtaccctgacccgacgaacacctggatcagcgcctacatgcccaacttccacaaggccagcatctggagccgctacgtcgcctccatgtactggtccatcaccaccctctccaccgtcggctacggcgacatgcacgccgagaacaccggcgagatggtcttcaccaccacctacatgctcttcaacctcggcctcaccgcctacatcatcggcaacatgaccaacctcgtcgttcacggcaccagccgcaccaggaaattcagggacatgatccaagcggcgacgagcttcgcgcagcggcatcagctgccggcgaggctgcaggagcagatggtgtcacatctgagcctcaagttcaggacgaattcagaagggctccatcagcaggagacattcgaggcgttgcccaaggccatcaagtcaagcatctcacaccatctcttctttggccttgtccagaatgtctacctcttcgagggtgtctcaaacgatctcatctttcagctggtttcagagatgaatgctgagtactttgcgccgcgagaggatatcatactgcagaatgaagcgcctgcggatttctacatcatagtctctggtagtatgctagcagggatggccaagtcaggagatgtcgtcggcgagatcggggtcctgtgctacaggcctcagctcttcacagcaagaacaagatcactgtgccagcttcttcgcttggaccgggccgcattcctcaggatcatccagtccaacattgcagatgggacaattgtcatgaacaatcttattcagtatctgagagagaagaaagaaattgcctccattgttgctgtcgcaaaggagatcgatgacatgttggccaggggccaaatggatttcccaatcacactctgctttgcagcttccaaaggggatagcttcttgttgcatcagcttctgaagcgtggattagaccctaatgaatctgatcattatggccgcacagctctgcatatagcagcttctaatgggaatgagcagtgtgtcaggcttctgttggagaatggagctgattcaaattcgagagatccagaagggagagtgccactgtgggaggcgctgtgcaggaggcaccagaccgtggtgcagctgctggtggacgccggcgccgacctgtccggcggcgacgcggcgccgtacgcgcgcgtcgccgtcgagcagaacgacgccgcgctgctcggggagatcgtccggcacggcggggacgtgtccggcgcgtgctccggcgacggcaccaccgcgctgcaccgcgccgtcctcgacggcaacgtgcagatggcgaggctcctgctcgagcacggcgccgacgccgacgccgaggacgtcaacggcctcacccctcgcgccgtcgccgagcagggcggccacgccgacatgcagctcgcgttcgcgtcggcgacgcgccacgagccgcgcaaggctcggccgccaccgccggcgtcggcgatcgtgccggtgccgctccgcgacggcgtggactcctcgccgtcgtcgtcgtctcggcgagggcgcacgtcctccacctccgccgcctccgcgcgcagcacgccgcagcggatggccaacttccgcaactccctcttcggcgtcatctcctcgtcacacgcgttccatcacgaaggcggatacaggggcggcggcggaggcggcggcgccgccgccgagagggagaggtcgtcgagctcgccgccgctggtgagggtggccatctcctgcccggagtcgcgaggcgggaaggatcacagcagcaagctggtgttcatgccggagacgctgcgtggtctcctcgagctcggcgcggcgaggttcggggtgtcgccgacgagggtggtgacgagcggcggcgccgacgtcgacgacgcgcggctcgtcagggacggcgaccacctcctcctcgtcactgacaagtgggtcccacccgaaaatcgtagtaggaatcaatag

SEQ ID NO: 10894 - DNA, 519 bp, Oryza sativa
  Clone ID: TFbOSC900166j.C1.o8.fg
atggatgaggatgatcggcaatcgctcacctctgtgaggatggaggggtatgagccactgtttgaggcagcaagctcgggaaaaattgatctctgcaagtacttggtggaggagcttgggttcgatgtcaatgccgaagctaatcatgattccggtatgacacctttgttttgcgctgtgttggatggacaagagattactgtgaagtattttcttgacaaaggtgctgatccgaataagaaagatgcagcaggctttgctcctcttcatgaagctgcaaaaaaagggcacgttggaatagcacgactgttgttatctaaaggagctagtgttgatgtatcttcttctgaagggacacctcttcatgttgctgcctctaatggaaaatctagcactgtgcagattttattagagcaccgcgcaaatattcaacgatcacaagttgatgcaaaaagctttcgaaacagggtccaagtgttctatgtacctgctttggtttgctactgtcttaccttctga

SEQ ID NO: 10895 - DNA, 1491 bp, Oryza sativa
  Clone ID: TFbOSC100279j.C1.o9.fg
atggggttcctcagccttgtgggcaactcatttgggtgctcggcttccggcgagcggctcgtctcggcggcccgcgacggcgacctgcaggaggcgcgcgcgctgctcgagtacaacccgcggctcgcccggtactccactttcggcggccgcaactcgccgctgcactacgccgccgcgcagggtcaccatgagattgtttctctgttgctcgaatccggcgtcgagatcaacctcaggaattacaggggccagactgctttaatgcaagcctgtcaatatggccactgggaggttgttcagacactgatgcttttcaatgcaaatgttcataggacagattatttgaatggcggtagtgctctccattttgctgcactacatggtcatgcccggtgccttcgtcttgtgcttgcggattatgttcccagcatgccaaacttctggaactcgatgaaggacagcctatctgaagaaggtccatctgctgatcttgatgaagatggtttgttcaagatggtaaatcagaaggcggatggaggactgactccgcttcatatggcagcgttaaatgggcatgtagagtgtgtgcaattgttactggacttgggagcatctgttattgaggccactattgaagatggaacaactattgacttaataggagctggtagcaccccgcttcattatgctgcatgtggtgggaatgctgtctgttgtcaacttcttattgctcgaggagctagcctttctgcacagaatgctagcggctggaccccgttgatggtagctcgctcatggcataggaactctcttgaggaaattcttagcaaagaaccagagagtcgaatacgcactgttccttctccatatttgtgcctcccgcttatgagtatcatgagcattgccagggaatttggctggaggtacctaaaccaatcacctgtatgtattgacccatgtgctgtctgcttagaaggaagctgctctgttgctgcagaaggatgcaaacatgaattctgcacgagatgtgctttatacctttgctcaaccagttacacatcagtgagcccagcaggtgccataccatgccctctctgtcgacacccaatcatcgctttcactgcgcttcctgggacaagcccaataagagagctcccaagaaacagtctttcattgtcattttgcaccacatgcccagctgtgaactccgattctactccctcaatcgccagccatctgtaccggactgaattccagtgtgcacgcatgccacctatgggttcatcctccttccgttccttgagctgccagaggttgccggcgatgaagcttaacccgtcgttttgtatgggtgctatggatacaaatccctgcctaataagatgctcaaggttcggacctagctttcgtcggtcggcttcccaaggagaaagtagcaggagagcatggcctctaacctttgatccaattgctgccactggtagctga

SEQ ID NO: 10896 - DNA, 1265 bp, Oryza sativa
  Clone ID: TFbOSC12218j.C1.o1.fg
gtccgacagaaatgatactcggatggaacagtggcctcgccaaacaaggggacgaaaaggggaggactccactccatttcgccgcatccaccaatcgtttatcgatgcgggctatggttaagctcctactggagcacgacagatcctgtgtgtatcagcctgacgacgagggatcatacccgatacatgtggctgctgcattgggcggtgtagccggattatttgccgtgaggttgatgatcgaattctgccccgattccgcgggtttgcgagacggcacgggccggagtttcctccatgtggccgtcgacaacctgtgtccgtcagtggtcgcgttggctcgtttctcacctgggttacgatccgccgtcatgaacatgcaggatggaaacggcaacaccgcgctgcatcaggccgtccatgtttgtgacataatgatcttcttcttcctactgattgacaggcgggtgctgctagatgtgaaaaataacatggggtatactccggttgatcttgcacgctttaagaaccatctgaaaggtctgaattatcccgtgaatccacagtgtatgatgtcttcgtccctgacccatacggccggcaaccatccatcgggtgacaacccaaccgacagcttaaacgaaaagcgagttgagaaggaggagaggggggagctttccacgatatacaaagacgcagctcagaacctgaccatcggcgcggtgctcatcgtcaccgtgaccttcgccgcaacgttcacgatgcccggaggctacgtatcctcctccgacgacgacggcgaacgccgcggaacgccgaccttggccggcacctgcgccttcgacgcgttcgtcgtcgccaacacgctcgccttcatgctctccgggatggccaccttcagcctgatgtacgccggctacacgccgctcgacttcgccttccgcgagcgctgcgtgaagctctccatgggcctcctgcacagcagcgtcaggtccgtgggcgccgccttcctgacggcgacgtacgtgatgctggcacgggtcgcccctaagctcgtcatcgctgtctacgccgccgctgccgttggtctggtctacataaatttcgaggtttggatgcttggctggatgacgctcgcgctgctgtctagaggggacattttggcggcgctaatcgtcggcctgcaaaccgtcgcggtggcgttttggttttcttggccctttgcagtaatcttcgttttgccactgattcttaagggccactga

SEQ ID NO: 10897 - DNA, 269 bp, Oryza sativa
  Clone ID: TFbOSC28351j.C1.o1.fg
gacactgcgaaatagtagagttgtttctttcaagaggagttgatgtggatttagattctatcactgggaccccattgctgacagctgcgatgaatggccaatatagcacgatgaagattttattggagcatcacgctgatgttggtgctgatgtgaattttagagatcccaatggtgttacttgtgtgatggtcgcagcaaatcatggctctcctgtcatcatgaagtgcttactagatgctggtgctaattcaaatattccagatgaa

SEQ ID NO: 10898 - DNA, 1353 bp, Oryza sativa
  Clone ID: TFbOSC401179j.C1.o5.fg
atggaggcggcggcgaagctgaagaggagcatatcgcggcagctgtcgtcgggggcggcgagggtgtggcggcagctgtcgctggagccggtgtacactccgcggcgggcgggggcggtgggcggtggtggtggaggaggtggaggagggggagggggagggggaggggcgaggccgacgaggttcgggctcgcgaggcagtcgtcgctcgacccgacgccgcgggaggggggcggggcggcggaggatgggtcgggggcggcggcgatgctggccgtgccggagaacctggacgcgacgatgcggctgctgttcgcggcgtgccagggggacgtggccggggtggaggagctgctcagggacggggtggacgtcgacagcattgacctcgacgggcgcacggcgatgcacatcgccgcctgcgaggggcagggggaggtggtgcgcctgctgctcagctggaaggccaacatgaacgcccgcgaccgctggggcagcacgccagcggcagacgcgaagcattacgggcactttgaagtttacaaccttctgagagcaagaggagcaaaaactccgggtcactatgttgccaggtggtatggatccaaagtgtttgttaagatacttgacaaagacagcttctcagacgccaatagcataaatgaatttaaacacgagcttactttactggagaaggcccgccatccaaatttggtccaatttgtgggagctgttacacaaaatgtaccaatgatgattgtttcagagtatcatcaaaagggtgatttagccagttatcttgaaacaaaaggtcgcttgcagccttacaaagctatcagattttcccttgacattgcgaggggattaaattatctccacgagtgcaagccagagccaatcatccatggcaatctgtcaacaaaaagcattgtgcgggatgatgaagggaaacttaaagtggcaggctttggctcacgtagtctgattaaagtctcagaagataatccacaaatggatcagacgacatcaaaatttaacagtgtatacaccgctcctgagatgtacagaaatggaacgtttgacagaagtgtagatgtatttgcatttggtctcattctttatgagatgattgaaggaactcatgctttccacccaaaaccaccggaggaggcggcgaaaatgatttgtttggagggtatgagaccaccgttcaagaacaaacccaaatactatcctgatgatttgagagagcttatacaggagtgctgggatccaacaccttcggtcaggccgacgttcgaagagataatcgagggcaagcagataatgaagtacatgaggaatataccttag

SEQ ID NO: 10899 - DNA, 1128 bp, Oryza sativa
  Clone ID: TFbOSC409420j.C1.o3.gm
atggccaagaggcccgaggcccgatggcccggcacacagcacggcgttttggtccggcccaagcacggcacggcccgtcaggggtcaggcccgtgccggcctggctcaaccactgggccgtgcctgggcctctccaccggcacgatgggccacccgcgccttcgggccggcccggcacggcccgacggctggtggtcgttcctgggcgggaggcgcagcccatgggccggcacggcccggcacgaagtgccgatcgggccgtgccggcccgatggctggtgggccgtgcctgggccaggccgtgccgggcgggccatctatatcgacagacaactcctggaagcagccaaatctggtgattccacaacgttgaaggaggacatggctgcccgtgaagcagacgtgctgcttcgaacaactaagaacgggagcaactgccttcacatagcctgtatccacggtcacctgaaattctgcaaggacgccctcgagatcaaccagtcgtctctcctcgccgccgtcaactcatacggggagacgccactactcgccgccgtgacaagcggacatactgcattggcttcagaactactcagatgttgcagtgaatctggcttgggcgacgtgattctgaagcaagatggcagtggatgtaatgcgctgcaccatgctattcggtgcggccacaaggaccttgcactggagctaatagctaaagagccggcgctgtcgcgagccgtgaacaaggacaacgagtcacccatgttcattgcgatgatgagagattttgctgacattttcgagaagttgttggctatcccagactcctctgatgtaggatgcaaaggtttcaacgctctacatgctgccgtgagaagtggaaatgcaggatttggattggatggatctatcaagaactatcaagaactgaagtatgaaatgcactggattcactatttcgctggatcaggagactggagggcgtcggctgctggatttggatggatgggcgacgaggaagacgagagtagcagccgctgtggcgccgtctcgccgccgccatctcccgtctcccgtctcggctgcgccgctgcggctgcgtctcgcgtctcccagtctgtgccctaa

SEQ ID NO: 10900 - DNA, 1488 bp, Oryza sativa
  Clone ID: TFbOSC401887j.C1.o2.fg
atggaggaaaccctcaagtcgctgtccatggactacctcaacctgctcatcaacgggcaggcgttcagcgacgtcacgttcagcgtggagggccgcctggcctcttcttccgcaagttcttctgcggcgccgccgccgaccaggccgccgcgccgccgggcgcgcatcctcctggatcacctcagcccgcgctccccttccggcggcgcctccgcctcctccccgcgcggcgccgggggctccgccgccgccgccgccgcggcgacgcccggcgccgtgataccggtcagctcggtcagctacgaggtgttcctgctgctcctccagttcctgtacagcggtcaggtgtcgctggtgccgcagaagggtgagccacggccgggctgcggcgagcgcggctgctggcacacccactgcgccgccgccgtcgacctcgccctcgacaccctcgccgccgcgcgctccttcggcgtcgaggagctcgccctcctcacccagaagcagctggcaggcatggtggagaaggcgtcgatcgaggacgtgatgaaggtgcttatggcgtcgaggaagcaggacctgcaccagctgtggacaacgtgctcccacctcgtcgccaagtcggggctcccgccggaggtgctcgccaagcacctccccatcgacgtcgtcgccaagatcgacgagctccgcctcaagtccatgtcgcgccgctcgccgttcctctcgcaccaccaccaccacccgcacgcggccgccgccggcatcgaggcgtcgtcggcggccgagctcgacgaccaccacaagatccgccgcatgcgccgcgcgctcgactcctccgacgtcgagctcgtcaagctcatggtgatgggggaggggctcaacctcgacgacgccctcgcgctgcactacgccgtcgagaactgcagccgggaggtggtcaaggcgctgctggagctcggcgccgccgacgtcaaccacccggcgggccccgccgggaagacgccgctgcacgtcgcggcggagatggtgtgcccggacatggtggccgtgctgctcgaccaccacgccgaccccaacgtccgcaccgtcgacggcgtcacgccgctcgacatcctccgcacgctcacctccgacttccttttcaagggcgccgtgcccggcctggcgcacatcgagcccaacaagctccgcctttgcctggagctcgtgcagtcggcggccatggtgatgtcccgggaggacgcccagaccgccgcggtcaatgcggcgcccatctacggcgagtcccccggcggcggcggcggcggtggcgtgtacaatgccagtggcaccagctcgagcatggtgaacctgagcttggacaacaggatggtgtacctgaacctggggatggacgcgcagttcgggaagatgaacgacggtggcgacggcgacgacggcgggagcagagggccatcgtcgttgttctccccacatggcttcccctga

SEQ ID NO: 10901 - DNA, 4866 bp, Oryza sativa
  Clone ID: TFbOSC32692j.C1.o2.fg
atggacacacctctgcactgcgcggcgagggcagggcacgccggcaccgtgacgatccttgtaaatctggcccaggactgcgaggagaatatcctgggatgccagaacgcggccggggacacggccctacacatggcagcgaggcacgggcatggcgccaccgtggaggctcttgtcgtggcacgtgcgaaggcgaccgtgttagttagcatgaaagttgttgagagcgttgatcaattccctaagagatcaatactcatggcctcgtcgtccagtacggctgccacaaatccgttccaaggccacccaatctcagagaagcttgggaaggcaaatcatgcgctctggaaggtgcaagtaagcgccgcagttagaggagcgcggcttcaggggcatctcaccggtgcaaccaagcggccgccggcagagatcgctgtcacaaaagatggcgccaccaagaaggagccgaacccagcccatgaagactgggaagccaccgaccagcaagttctggggtaccttctctcgtcgctgacaagagaggtgctgatgcaggtcgctacatgcgacaccgcggctgaagtgtggagcgccatcgagcagatgtactccacccacacacgagcaagagcgattaacactcggtttgctctcaccaatacaaagaaaggtaacatgtcaactcctgagtattttgcaaaaatgaaatccttaggagatgagatggctactgccggaggtcgcccgatcgatgaagaggagctgattcagtatatcatcaccggccttggcgagggctacagcgaggtggtgtcggctgtctgcgctcgggttgaaccaatctctgtgagtgatctgtactctcaagtgttgaactttgaagctcgccaagccatctaccgcggcgcacaggaggtcaccgtcaatgttgccaaccgtggaggcttcagccacggggggcgtggcaacagcaatggtggccaaggaggttcgcgcggcggcggcggcggcggccatggtcgcggcaacggaggaggtggccgtggtcgaggccgcacaccaggaggcgttgataaaagaccaatctgccaagtgtgtttcaaacgggggcacacggcagcagattgttggtataggtacgacgaggattacgttcctgacgccaagcatgttgcagctgcagcggttaactcctatggagttgacacaaattggtacatcgacactggtgctacagatcatgtcacgggagagctggacaagctcactatgaaggaaaaatacaacggtggtgaacaaatccacacagcaagtggtgcaggacacatctatatttctcgcgatgttgtctttgatgagaatatttttcccttcactgaacttcatgccaatgctagtgcccgtcttcgttctgagattgatattctcactcctgaactgctaggacccatacggtctgttgggaatgaacaatgcatgcatccagtgactaatccattatctgctgatgtttctgctgctttatctaatcgtgctaatgagccacatagagatggtgcagtacatcccgctgatgcagaagatccgccggcgacgcctcctctggatgccagttttggtccagaaccagaccgtgtcgtccaccactcccctgcggccacgtcatcaggccgtcatccgggtcccacacctggttctgtgccacggggggtagcatcatcgctagcagaggagacagcagaagactcagtgtcgcaggcggtgcaggagcaggagtcgcaggtggtgcaggagcaggagcagtcctcaccagcgcaggaacatgcacaggctgtcacagatgagactaatacattacagcatgcagatgtgactgacacaggttcagaggcaccggcaggaccgcgcaccaggttgcaaagtggagttcgcaaagaaaaggtatatactgatggtactattaaatataagcattcttggtttactgcttcaggtgaacctacaaatgatttagaagccttaaaggataaaaattggaaactagcaatggattcagagtatgatgctttagttaagaataaaacttggcatcttgttcctcctcagagagggagaaatattattggctgtaagtgggtgtataaaattaaaaggaaagctgatggtaccctagataggtataaggcaaggttagtagcaaaaggatttaaacagaggtatggtattgattatgaagatacctttagccctgttgttaaagctgccactatcagaataatattgtctttagcagtgtctaaaggttggagtcttagacagctagatgttcaaaatgcctttctgcatgggtacctagaagaagaagtttatatgctacagccaccaggttttgaggatcctactaagccacatcatgtgtgtaaacttgataaagctctatatgggttaaaacaggcacctagagcctggttctctagactaagtaaaaagttgatggaccttggttttaaaggatcaaaagctgatacgtctctgttctttctgaataaaggtgatataactatgtttgttctggtatatgttgatgatatcattgtagccagctcttcagagaaggccactgcagctttacttcagaatctaaaaggggaatttgcactcaaagatcttggtgagctgcattattttctcggaatagaggtaagcaaggttcagaatggcattgtactgaatcaagacaagtatgccaatgatttattgaagaaagtgggcatgatagattgtaaacctgctaatacacctctttcagtaagtgagaaactctctcttcatgaaggctcattgttagggcctgaagatgcaagtcactatcgcagtgttgttggtgctttgcaatatttgactcttactagacctgacatagctttctctgttaataaagtttgccaattcttgcatgctcccacaactgtacattggattgctgtgaaaaggattcttaggtacttaaagcaatgcactcggttaggacttgaaattcataagtcaggatctactttagttagtggcttctctgatgcagactgggcaggctgtttagatgacagaagatcaacaggaggatttgcaatatttctgggttcaaatctggtctcctggaatgctagaaaacaagccactgtgtctagatctagcacagagtcagaatacaaagctattgccaatgccactgcagaaataatgtgggtgcagactttacttgcagagttagagattaaaagtccaaaagctgctaaaatatggtgtgataatcttggagctaagtatttgtcagctaatccagtgtttcatgccagaacgaaacacatagaagttgactatcactttgtcagagaacggttgttaagtcgtttcatcaatctcggcttcggttgttctcagctgcgccgaactctgtatcgccacgatgggggctgttcccatcacatatatattaacacgaaggcgacgcacaggattagtgcgatcgtttccacccaaactaattcacagaccgagctaaacaaagccggtgtgtcaccgttgtacttggcagtgatgagcagatctcaagcacaaaacaagaatgtgtttgtcaactcgattgataaatttgtgtctttggcagagatggttcacttattattgcaatggaagccagaactggctagccaggtcgactgcaatggcagcaccccactccatttcgcggcatccgacggcaaccgcaaaatcgtacatgcaatcctagccatcgtgccaactggcacagtgtacatgaaggactcggatggcctctccgctcttcatgtcgcggctaggttgggacatgccaatgttgtcaagcaactaattgggatctgccctgatgctgttgagctccgtgacggccatggagagaccttcctgcacaccgcggtcagggagaagcagtcctcgatcgtgtccctcgctatcaagaaacacaagcaggtcggtggccttctggacgcgcaggacggggttgggaacacgccgctccacatcgccgtggttgccggctcgcctgacattgtgaatgccttactccataaggggaaagtgcaaagcgatgtcttgaacgacgatggacactcgccgcttgatctcgcttcgacatcgaccaatttgttcaacatggtaagctttgtggtgatattagttgcttttggggcacaaggccgaccacaaaggaatgaccatctaaagccgtggagcggccgcgacataggtaaagggatagagaggacaactgacagccttgcggtggtggccgtgctcatcgccaccgtcgcctttgccgccggattcaacatgccaggcagctacggagacgacggcacggcgaacctcaagggcaggttctcattcaaatggttcatggtcctcgacaccgtcgccgtagcggcatcggtggtcgccgtgatcctactcgtctacgggaaggcatcgcgctccgccggctcgtggaagagcttcgtggcggcgttgcactttatctgggtctcgctcgtcagcctgatcctggccttctttgcggcttttcgcgccacgatgagaacctcgagggcagtctccatcgtgttcatggttatctacgtgtgcctcatcgttttggttgtcaatgtcggaacatgggttgaacctgtaacgacgatgcgtatattctggaggtttgtgtggcgcagtcaccggactaatgccgtcaagaggcagtatccattggccgtcgctaccgtctacaactgtcttctcttttcggttataaattttataatatttgccggtttgggagtggtaccgtcctag

SEQ ID NO: 10902 - DNA, 1578 bp, Oryza sativa
  Clone ID: TFbOSC401247j.C1.o14.fg
atggggaagaagggtaagggaaggcaccgcggccgcggcggcggaggcggaggcgggggtggtggtggtggtggtggtggtggtggtggtgtgggtggggatcgcggcggtggagggagcggaggaggagggccgggaatggggcggcgcgggagcgatgcgcgtgcccagcaggcggcggcggcggcggcggcaatcagcggcatcgccacccgcctcgggttcgggtgcaccgtcaatgtcggcggcgggatgccaccgcagatggagttcctcatggcgtgtacggacggcgacgtcgcgcgcctcaagggcaatgcaattgtaatgggagctgttgtatgtgaggctagtcttgatagggtcaggaaccgtctttaccttaccatgaagagtttaactatagttacagcactgggtatgacgcctttgttttgcgctgtgttggatggacaagagattactgtgaagtattttcttgacaaaggtgctgatccgaataagaaagatgcagaaggctttgctcctcttcatgaagccgcaaaaatagggaacgttggaatagcacgactgttgttatctaaaggagctagtgttgatgtatcttcttctgaagggacaccacttcatgttgctgcctctaatggaaaatctagcattgtgctgattttattagagcaccatgcaaatccaaacgtgatgacgccagattgttatacaccactgactgcagttctttctgccactcctgaaatagtgaatgaatctgagtgtttgaagtgcatgaaactccttatcaaggctggtgctcattataaacttgcaactcctgatactccattggagatagcaactagaaatggcttaactgagtgtgttgcatacttgttggagatcagcactgttgttagactaagtgaacatgacaaaggaagtgatggagacagaaaatctaagctgaaattacatggtggaaaagcatttgaggagggtgactatgcgggtgcaatcatattctacactgagtttttatgcaaatataatttcttcaataatccaagcccgaactataaacaacagagattagcacaaaagaacccaactccacacataccacatcgcagaagcatggcagtctctgcatcccagttgacatctaggatactattatcacttctattgtctaggaactattgctgtgttaacaaaggaagactcagtttgaatttccaatggcattgccatcatgtgggggatacacttgcaatgaaacttgatcctgcagatgccacactgtattcaaacaggagcctttgccatctgagaagtggtgcagcgcaagaggctttgctggatgctaatgattgcataaaactcaagcctgagtggactaaaggttactatcgcaaaggatgtgcccacatggcactcaaggaatacgaagaagcttgtactgcattcatggctggaacaaagctcgatcctttaagcgatgaaatgcagaatgcattttgggaggcagctaaagcaatgaagaatgaatatatggctggaaggcgcgtcagctcggttgattag

SEQ ID NO: 10903 - DNA, 1176 bp, Oryza sativa
  Clone ID: TFbOSC421303j.C1.o3.fg
atggcgtcagctttcttcaacggagccatgtacgccggtggatggatgcagcacatgctcttcgaggcggctcacaacggcgacctcgacctcgtcagggggatggcgatgctgctggttgaagggagggggcggctcggggaggcggtgcaggcggcgaggctgcgggggacggggccgttggacgggatgggggcgctgcacatcgccgccagcaaagggaggctggaggtgtgccgctacctcgtcgaggagctgcggctggacgtggatgacactgaccaggaaggtaggactcctctgattattgcaatagtcttcaatcatgtaagcactgtcgagtatcttcttgatcgtggtgccgacgcaaacaaagccagccataacggcctcacccctatacatttcgccatttgtttaggagaatgtggaatggtacagctattacttgcaaaaggagcttgtgtggacccagtagcttactgtgggacaccacttcatgttgctgctactgaagggcgagatggtgctatgaagattttattggaccacaatgcagattttaacaagatggtagatggtctgacacctcttgatactgctatggattctggtgaattaaaatgcataaatctcctgattaaggttggtgctgttgtcagtgaagatcgcatgttaactgctgaaaacagtggttctacagagtgcttcaattacttaatggaagagactggtgccaactgtaacatttctgataatggtgagcctgtcaataaaaggaaagcaacagatttaaagtcactgggtaataaggctgtcgagaaaaaggattatctatctgcaacaggattctacagtaaggcactgtacctttaccctgatgatgctaccttgttctcaaataggagcctttgctggcatcgcatgggtgatggaggcaaggctttgctggatgctcatgaatgtaggaagttgcggtctgactggccaaaggcctactaccggctgggtgctgctctgatgttactgaaggactatgagagtgcttgcgaagcactttacaatggattcaagttggatccagggaactctgagattgaggatgcatttcggtatcctttctgcctattttggtcgcattatggcaatatggcttatgatgatagctttggctag

SEQ ID NO: 10904 - DNA, 1221 bp, Oryza sativa
  Clone ID: TFbOSC402924j.C1.o4.gp
taaaatcctcttcttcaggccatcaacactagtagctgcagctggatcgagcatgctcatctcctggtggatcgatcacattggagactacagctccaatattacaagatgaacattgcttgatggtttgaaactttttgaacaaattagctagcatgcaacagtttgctgcgcgcgcaagcgaatcaatcatgcgaaagatcgaacaatccacatcaaataccactaaattgttgcccattatcctagctatatagtagctagctacaccatttgctgctcatcttgtcaaccatgcataaccccacaaatctcaacacggctagtagaagagaaggatagggaataatattacttatgcgaagccattggggaagtacatggcgggcggcgggctccctcggccgttattgcttttcctcccctcgccggcggccacggccgccgccatttcctggccctggtacatgagcgtcgagttcatcgtcaggctcaccaagctgtcgtcggcgtcgctcctcgggaagttgccgccgtcgcttccgccggcctcggcgccgccggtgacaggcgcgccgtcgtcacgcgtggtcaccatcaccgccgactgcacgagctcgaggcagagcctgagcttgttgggctcgatgtgcgtcagccccggcacggcgcccttgaagaggaactcggaggtgaggctgcggagcacgtcgagcggcgtgacgccgtcgagcgtcctggagttcgggtcggcgtggtggtcgagcagcacggacaccatgtccggggagaccatctccgccgccaggtgcagggcggttttgcctgtcgggccggcgcgggagttgacgtcggcggcgccgagctcgagcagcgccttgacgacgtcgcggttgcagtgctgcacggcgtagtggacggcgagcgcgtcgtcgaggtccaggccctcgcccatgaccatcagtttgacgagctcgatgtcggcggcgtcgagggcgcgccgcatgcgccggatcttgttgtcgcggtccgccgcggaggacgccgggttcatggggaggtagtggtgcgtcaggaacggcgagcgcggcgcggccaccgcggcgagcggcgacttggcgcggatctcctcgatcttggcgaccacatcgatggggaggtgcttggcgaggagatcggcggagaggccggagcgcgcgacgaggtgggagcaagtcgccc

SEQ ID NO: 10905 - DNA, 1221 bp, Oryza sativa
  Clone ID: TFbOSC900071j.C1.o24.gp
aaaaatcctcttcttcaggccatcaacactagtagctgcagctggatcgagcatatgctcatctcctggtggatcgatcacattggagactacagctccaatattacaagatgaacattgcttgatggtttgaaactttttgaacaaattagctagcatgcaacagtttgctgcgcgcgcaagcgaatcaatcatgcgaaagatcgaacaatccacatcaaataccactaaattgttgcccatttatcctagctatatagtagctagctacaccatttgctgctcatcttgtcaaccatgcataaccccacaaatctcaacacggctagtagaagagaaggatagggaataatattacttatgcgaagccattggggaagtacatggcgggcggcgggctccctcggccgttgttgcttttcctcccctcgccggcggccacggccgccgccatttcctggccctggtacattagcgtcgagttcatcgtcaggctcaccaagctgtcgtcggcgtcgctccgcgggaagttgccgccgtcgcttccgccggcctcgcctccggtgacaggcgcaccgtcgtcgcgcgtggtcaccatcaccgccgactgcacgagctcgaggcagagcctgagcttgttgggctcgatgtgcgtcagccccggcacggcgcccttgaagaggaactcggaggtgaggctgcggagcacgtcgagcggcgtgacgccgtcgagcgtcctggagttcgggtcggcgtggtggtcgaggagcacggacaccatgtccggggagaccatctccgccgcaaggtgcagggcggttttgcctgtcgggccggcgcgggagttgacgtcggcggcgccgagctcgagcagcgccttgacgacgtcgcggttgcagtgctgcacggcgtagtgcacggcgagcgcgtcgtcgaggtccaggccctcgcccatgaccatcagcttgacgagctcgatgtcggcggcgtcgagggcgcgccgcatgcgccggatcttgttgtcgcggtccgccgcggaggacgccgggttcatggggaggtagtggtgcgtcaggaacggcgagcgcggcgcggccgccgcggcgagcggcgacttggcgcggatctcctcgatcttggccaccacatcgatggggaggtgcttggcgaggagatcggcggagaggccggagcgcgcgacgaggtgggagcaagtcgccc

SEQ ID NO: 10906 - DNA, 1485 bp, Oryza sativa
  Clone ID: TFbOSC900071j.C1.o23.fg
atgagctccgaggactcgctcaaatccttgtcgcttgactacctcaacctgctcatcaatggccaggccttcagcgacgtcgccttcagcgtcgagggccgcctcgtgcacgcccaccgctgcgtgctggcggcgcggagcttgttcttcaggaagttgttctgcgggctcgatccgaatcaccagccgccgccgccgccaccgccgccgttaaactggccgacggcggggggaggcggcggcggctctggtggtggagggcgtggcggcgccggtggtggtggaggagcgcctgccacgccggagcttgtcatccccgtcagctcgatccggtacgaggtgctcgtgctcgtgctgcagttcctgtacagcgggcaggcgtcggtggcggcgcccaagagcgggccgctcccggggtgcggcgcccggggttgctggcacacgcggtgcggcgccgccgtcgacctcgccctcgacacgctcgccgccgcgcgctccttcggcgtcgagcagctcgccctgctggttcagaagcaactggagagcatggtgaaggaggcgtcggtggacgacgtgatgaaggtgctgatggcgtcgcgcaagttcgagatgcaggagctgtgggcgacttgctcccacctcgtcgcgcgctccggcctctccgccgatctcctcgccaagcacctccccatcgatgtggtggccaagatcgaggagatccgcgccaagtcgccgctcgccgcggcggccgcgccgcgctcgccgttcctgacgcaccactacctccccatgaacccggcgtcctccgcggcggaccgcgacaacaagatccggcgcatgcggcgcgccctcgacgccgccgacatcgagctcgtcaagctgatggtcatgggcgagggcctggacctcgacgacgcgctcgccgtgcactacgccgtgcagcactgcaaccgcgacgtcgtcaaggcgctgctcgagctcggcgccgccgacgtcaactcccgcgccggcccgacaggcaaaaccgccctgcaccttgcggcggagatggtctccccggacatggtgtccgtgctcctcgaccaccacgccgacccgaactccaggacgctcgacggcgtcacgccgctcgacgtgctccgcagcctcacctccgagttcctcttcaagggcgccgtgccggggctgacgcacatcgagcccaacaagctcaggctctgcctcgagctcgtgcagtcggcggtgatggtgaccacgcgcgacgacggtgcgcctgtcaccggaggcgaggccggcggaagcgacggcggcaacttcccgcggagcgacgccgacgacagcttggtgagcctgacgatgaactcgacgctaatgtaccagggccaggaaatggcggcggccgtggccgccggcgaggggaggaaaagcaacaacggccgagggagcccgccgcccgccatgtacttccccaatggcttcgcataa

SEQ ID NO: 10907 - DNA, 1485 bp, Oryza sativa
  Clone ID: TFbOSC402924j.C1.o1.fg
atgagctccgaggactcgctcaaatccttgtcgcttgactacctcagcctgctcatcaatggccaggccttcagcgacgtcgccttcagcgtcgagggccgcctcgtgcacgcccaccgctgcgtgctggcggcgcggagcttgttcttcaggaagttgttctgcgggctcgatccgaatcaccagccgccgccgccaccgccgccgttaaactggccgatggcggggggaggcggcggcggctctggtggtggagggcgtggcggcgccggtggtggtggaggagcgcctgccacgccggagcttgtcatccccgtcagctcgatccggtacgaggtgctcgtgctcgtgctgcagttcctgtacagcgggcaggcgtcggtggcggcgcccaagagcgggccgctcccggggtgcggcgcccggggttgctggcacacgcggtgcggcgccgccgtcgacctcgccctcgacacgctcgccgctgcgcgctccttcggcgtcgagcagctcgccctgctggttcagaagcagctggagagcatggtgaaggaggcgtcggtggacgacgtgatgaaggtgctgatggcgtcgcgcaagttcgagatgcaggagctgtgggcgacttgctcccacctcgtcgcgcgctccggcctctccgccgatctcctcgccaagcacctccccatcgatgtggtcgccaagatcgaggagatccgcgccaagtcgccgctcgccgcggtggccgcgccgcgctcgccgttcctgacgcaccactacctccccatgaacccggcgtcctccgcggcggaccgcgacaacaagatccggcgcatgcggcgcgccctcgacgccgccgacatcgagctcgtcaaactgatggtcatgggcgagggcctggacctcgacgacgcgctcgccgtccactacgccgtgcagcactgcaaccgcgacgtcgtcaaggcgctgctcgagctcggcgccgccgacgtcaactcccgcgccggcccgacaggcaaaaccgccctgcacctggcggcggagatggtctccccggacatggtgtccgtgctgctcgaccaccacgccgacccgaactccaggacgctcgacggcgtcacgccgctcgacgtgctccgcagcctcacctccgagttcctcttcaagggcgccgtgccggggctgacgcacatcgagcccaacaagctcaggctctgcctcgagctcgtgcagtcggcggtgatggtgaccacgcgtgacgacggcgcgcctgtcaccggcggcgccgaggccggcggaagcgacggcggcaacttcccgaggagcgacgccgacgacagcttggtgagcctgacgatgaactcgacgctcatgtaccagggccaggaaatggcggcggccgtggccgccggcgaggggaggaaaagcaataacggccgagggagcccgccgcccgccatgtacttccccaatggcttcgcataa

SEQ ID NO: 10908 - DNA, 1485 bp, Oryza sativa
  unsure (1)..(1485): unsure at all n locations
  Clone ID: TFbOSC413271j.C1.o2.fg
atgagctccgaggactcgctcaaatccttgtcgcttgactacctcagcctgctcatcaatggccaggccttcagcgacgtcgccttcagcgtcgagggccgcctcgtgcacgcccaccgctgcgtgctggcggcgcggagcttgttcttcaggaagttgttctgcgggctcgatccgaatcaccagccgccgccgccaccgccgccgttaaactggccgatggccgggggaggcggcggcggctctggtggtgaagggcgtgncggccccggtggtggtggaggagcgcatgccacgctggagcttgtcatccccgtcagctcgatccggtacgaggtgctcgtgctcgtgctgcagttcctgtacagcgggcaggcgtcggtggcggcgcccaagagcgggccgctcccggggtgcggcgcccggggttgctggcacacgcggtgcggcgccgccgtcgacctcgccctcgacacgctcgccgctgcgcgctccttcggcgtcgagcagctcgccctgctggttcagaagcagctggagagcatggtgaaggaggcgtcggtggacgacgtgatgaaggtgctgatggcgtcgcgcaagttcgagatgcaggagctgtgggcgacttgctcccacctcgtcgcgcgctccggcctctccgccgatctcctcgccaagcacctccccatcgatgtggtcgccaagatcgaggagatccgcgccaagtcgccgctcgccgcggtggccgcgccgcgctcgccgttcctgacgcaccactacctccccatgaacccggcgtcctccgcggcggaccgcgacaacaagatccggcgcatgcggcgcgccctcgacgccgccgacatcgagctcgtcaaactgatggtcatgggcgagggcctggacctcgacgacgcgctcgccgtccactacgccgtgcagcactgcaaccgcgacgtcgtcaaggcgctgctcgagctcggcgccgccgacgtcaactcccgcgccggcccgacaggcaaaaccgccctgcacctggcggcggagatggtctccccggacatggtgtccgtgctgctcgaccaccacgccgacccgaactccaggacgctcgacggcgtcacgccgctcgacgtgctccgcagcctcacctccgagttcctcttcaagggcgccgtgccggggctgacgcacatcgagcccaacaagctcaggctctgcctcgagctcgtgcagtcggcggtgatggtgaccacgcgtgacgacggcgcgcctgtcaccggcggcgccgaggccggcggaagcgacggcggcaacttcccgaggagcgacgccgacgacagcttggtgagcctgacgatgaactcgacgctcatgtaccagggccaggaaatggcggcggccgtggccgccggcgaggggaggaaaagcaataacggccgagggagcccgccgcccgccatgtacttccccaatggcttcgcataa

SEQ ID NO: 10909 - DNA, 537 bp, Oryza sativa
  Clone ID: TFbOSC3754j.C1.o1.fg
tatgtcgacaagcttcttattgccaaagataccaatcaaattaccattgatatattggaggctgtaaggacgaatgatgtgagggcagcatatcgcattcttgtgttggctgatgtgagccctaacatgatatatgatgagttaaacaatgatgttcatcatgatccttcagtaacagatgggaagttatttgatccagcatcttgtgatgtaaaggatgattctgggaaaccagaaggttgtctacaaggctgttccctgttgcacattgcttgccaatatggccattctataatggcagagcttctgcttctttttggtgcggatattaataagcaagacttccatggacggacaccgttgcaccattgtgtccgaaggaaaaatgatgcacttaccaagcatctgctaaagaggggtgcaagaacaaccattaaagatggtggagggttgactgctttagagagaagaatggaacttggagcaataactgatgaagatttgttcattttatttgtaaggtatgatcaagattag

SEQ ID NO: 10910 - DNA, 1950 bp, Oryza sativa
  Clone ID: TFbOSC407383j.C1.o4.fg
atggtgttgggtgtcaaggtgtggaggacttgtgggctacgcattatgccagacatggagcaccagagtgagggcaggttttttgcatggcatatacaaattgaggttgatcatatgcttagtgaacgtttgatgcaattcattgatgtggatttgcatggcgtgaaggcacgtgaaaaatttgtatcagtacggaaagggactagagcagaagtagtgacaggacttgaggaggatctacacaatgccaagtcagctttcgaacgatgccgctttaacctaggatatgaactactgagtcaaatggaaccattcattcaccaggttctaacatatgcacagcaatcaaaagaaatggctatcaatgaacaagataaacttgcaaagagaattcaagaatataggactcaagaggaaattgcgaacttgagaatggctagtaatgtggacacatctaccagtggtgatggtatccatgttgttggtcttcaatcctataaaaagattgaagccctaatgcagtcaactgccaatggcgaggttcaaataatcaaacaaggttatctctttaagcgttctgaaaattcacgagaatggaagagaaggttctttgttctcgacagtcacgggactcttttctactacgggaataaaggacaatcgcaaggagcggcatcacagcaaacagctggtgaagggactggtgtttttagtcgtttcagattcttgaaccaaaaggctccaactcagggtgacaatgcactttcgtgccacaaaattgatctaagaacttcaacaattaagattgatgcagaagaaaatgacctaagattttgcttcagagtaatctctcccatgaaagcatacactttacaggcagaatctggtgctgaccaaaaggattggattgagaaagttactggagttattgcatcactgcttaatttaccattcccaagacaggtgtcgtatggaaatctagaggcggaacatcatggttctgcaaattctgttgattctctctctcttgaggagaacaaaagtccagagggacatgatgatatattcaatcatctcaggaatattcctggaaatgacagttgtgcagaatgtcgttcaccggatcctgattgggcatctctaaatttaggaattcttatttgtatagagtgttctggggctcacaggaatcttggagtccatatttcgaaggttcgatccttgcgattagatgtcaaggtatgggagccagtgataatggacttgttccatgaacttggaaatgactacactaattccatttgggaagctatgcttccgaaagaagatcaaggaataaacgagtttaatgatgctattcttttcattgaaaagcctaaacctactgatgctttttcaataaaggaaaggtacatacagacaaagtatgtcgacaagcttcttattgccaaagataccaatcaaattaccattgatatattggaggctgtaaggacgaatgatgtgagggcagcatatcgcattcttgtgttggctgatgtgagccctaacatgatatatgatgagttaaacaatgatgttcatcatgatccttcagtaacagatgggaagttatttgatccagcatcttgtgatgtaaaggatgattctgggaaaccagaaggttgtctacaaggctgttccctgttgcacattgcttgccaatatggccattctataatggcagagcttctgcttctttttggtgcggatattaataagcaagacttccatggacggacaccgttgcaccattgtgtccgaaggaaaaatgatgcacttaccaagcatctgctaaagaggggtgcaagaacaaccattaaagatggtggagggttgactgctttagagagaagaatggaacttggagcaataactgatgaagatttgttcattttatttgtaaggtga

SEQ ID NO: 10911 - DNA, 2294 bp, Oryza sativa
  Clone ID: TFbOSC407404j.C1.o11.np
atggcggccttcaccaagctcgaggactcccccatgttccgcaagcaggtcaattctatggaacagctaagcgatgaactgaaacaacggtgttcaaatcttcataaaggatgcaaaagattcatgggatcacttgatgaaggatacgcgggagatctaacatttgccgatgctctagaagcatttggtgctggtcaagatgatcctgttagtgttgccattggagggcctgtaatgtccaagttcactactgcttttagggagcttggaacatacaaggaactccttcgttctcaggttgatcatatgcttagtgaacgtttgatgcaattcattgatgtggatttgcatggcgtgaaggattgtcgtcagcgtttggatagggctacagtggggtatgatcaggcacgtgaaaaatttgtatcagtacggaaagggactagagcagaagtagtgacaggacttgaggaggatctacacaatgccaagtcagctttcgaacgatgccgctttaacctagtgcacgcactttcaaatattgaagcaaagaagaagtatgagttcttggaatcaataagtgcagtgatggatgcccatttgagatatttcaagcagggatatgaactactgagtcaaatggaaccattcattcaccaggttctaacatatgcacagcaatcaaaagaaatggctatcaatgaacaagataaacttgcaaagagaattcaagaatataggactcaagaggaaattgcgaacttgagaatggctagtaatgtggacacatctaccagtggtgatggtatccatgttgttggtcttcaatcctataaaaagattgaagccctaatgcagtcaactgccaatggcgagataatcaaacaaggttatctctttaagcgttctgaaaattcacgagaatggaagagaaggttctttgttctcgacagtcacgggactcttttctactacgggaataaaggacaatcgggaagcaaggagcggcatcacagcaaacagctggtgaagggactggtgtttttagtcgtttcagattcttgaaccaaaaggctccaactcagggtgacaatgcactttcgtgccacaaaattgatctaagaacttcaacaattaagattgatgcagaagaaaatgacctaagattttgcttcagagtaatctctcccatgaaagcatacactttacaggcagaatctggtgctgaccaaaaggattggattgagaaagttactggagttattgcatcactgcttaatttaccattcccaagacagtcccaggtgtcgtatggaaatctagaggcggaacatcatggttctgcaaattctgttgattctctctctcttgaggagaacaaaagtccagagggacatgatgatatattcaatcatctcaggaatattcctggaaatgacagttgtgcagaatgtcgttcaccggatcctgattgggcatctctaaatttaggaattcttatttgtatagagtgttctggggctcacaggaatcttggagtccatatttcgaaggttcgatccttgcgattagatgtcaaggtatgggagccagtgataatggacttgttccatgaacttggaaatgactacactaattccatttgggaagctatgcttccgaaagaagatcaagggtatgttgaagagtttaatgatgctattcttttcattgaaaagcctaaacctactgatgctttttcaataaaggaaaggtacatacagacaaagtatgtcgacaagcttcttattgccaaagataccaatcaaattaccattgatatattggaggctgtaaggacgaatgatgtgagggcagcatatcgcattcttgtgttggctgatgtgagccctaacatgatatatgatgagttaaacaatgatgttcatcatgatccttcagtaacagatgggaagttatttgatccagcatcttgtgatgtaaaggatgattctgggaaaccagaaggttgtctacaaggctgttccctgttgcacattgcttgccaatatggccattctataatggcagagcttctgcttctttttggtgcggatattaataagcaagacttccatggacggacaccgttgcaccattgtgtccgaaggaaaaatgatgcacttaccaagcatctgctaaagaggggtgcaagaacaaccattaaagatggtggagggttgactgctttagagagaagaatggaacttggagcaataactgatgaagatttgttcattttatttgtaaggtatgat

SEQ ID NO: 10912 - DNA, 2568 bp, Oryza sativa
  Clone ID: TFbOSC900240j.C1.o3.fg
atgaagacctcgagcttcgagagcgctagtagcagcggcggcagcggcggtggcggtggcggcggtggcggcgagggctccggctcgttcaacctccggaacctatccaagctcatcctgccgcctctcggcgtgccggccggcggccacgcccagtccggccatgccggccccaacgacaggcgtgtcatctcgcctctcgactccagatacaggtgctgggacacgttcatggtggtgctggtggcgtactcggcgtgggtgtacccgttcgaggtggcgttcatgaacgcgtcgcccaagggcggcctcgaggtggccgacatcgtcgtcgacctcttcttcgccgtcgacatcgtcctcaccttcttcgtcgcctacatcgactccaggactcagctcctcgtccgcgacaggcggaggattgccaccagatatctgtcgacgttcttcatcatggatgtggcgtcgactatcccgttccaaggccttgcctacatcgtcaccggcgaggtcagggagagcccggcgttcagcctcctcggcatcctccggctatggcgtctcaggaaggtcaagcagttcttcacaaggctggagaaggacatcaggttcaactacttctggatccgctgcgcccggctcatcgcggtgacgctgttcctggtgcactgcgcggggtgcctgtactacctgatcgcggacaggtacccgcacagggagaagacgtggatcggcgcggtgatcccggacttccaggaggcgagcctgtggatccgctacacctcctccgtctactggtccatcaccaccatgaccaccgtcggctacggcgacatgcacgcccagaacaccgtcgagatgatcttcaacatcttctacatgctcttcaacctcggcctcaccgcctacctcatcggcaacatgaccaacctcgtcgttgagggcacccgccgtaccatggaattcaggaacagcattcgtgctgcctccaatttcgtgggccggaaccacctgccgcctaggctgaagcagcagatactggcctacatgtgcctcaagttcagggcagagagcctgaaccagcagcagctgatggatcagctccccaaatccatctgcaagggcatctgcgagtacctcttcctccccgtcgtcaaggacgtctacctcttcaagggtgtctcaagagaagtgctccttctcatggttacgaagatgaagccggagtacataccgccgaaggaggacgtgatcgtgcagaacgaggcgccggacgacgtctacatcgtggtgtccggcgaggtggaggtgatctactccgacggcgaagccgaggagcgggtggtggcgacgctggggacgaggggcgtgttcggcgaggtgagcgcgctcagcgaccgcccgcagagcttcacgctgcggacgcggacgctgtgccagctgctgcgcctgcgccaggccgcgctcaaggaggccatgcagagcaagcccgaggacagcgtcgtcatcatcaagaacttcctcaagcatcagatcgagatgcacgacatgaaggtggaggacttgctcggggaggacgccgccggcgagtacgaccacggcaacataccgtgcaatctgctgacggtggcagccaccgggaacagcagcttccttgaggatctcctgaaagttggaatggatcctgacgtcggtgactccaagggaagaactgcactgcatatagcggcatcgaaggggtacgaggactgcgtgctggttctcctcaagcaagcgtgcaacgtaaacatcaaagacgcgcagggcaacacggcgctgtggaacgccatcgccgcgaggcaccacaagatcttcaacatcctgtaccacttcgcgcgcgtctcgagcccgcaccacgccgccggcgacctcctctgcctcgccgcgcgccggggcgacctcgacacgctccgggagctcctcaagcacggcctcgccgtcgactcggaggaccgggacggcgccacggcgctccgcgtcgcgctcgccgagggccacgccgacgtcgccaggctcctcgtcctcaacggcgccagcgtcgacagggcggccagccacaacgagcagcaggcggcggcggcggtgtcggtcgacgagctgcgggagctcatgaagacgcgcgagctcgcgcacccggtcaccatcgtcgtcgactcgccgtcgccggccgccgcagccgtcatccgggaggtcggctcgtcgggggacagccggaatgggcggcgccagagcgcgagatcagacggcgcgcactggccacgggtgagcatatacaggggccatccattcgtcagaaaccgtagctcagaagccggcaagctgatcaacctgcccggcaccatggaagaattcagaatcatcatagaggagaaactgaaagtcgacgcgaggaagacgctgatcatgaacgacgaaggagcggagattgactcgatcgacgtgatccgggacaacgataagctgttcatagtgaccgaggagcatatgacagcagtagcatcgatggactcggtgtctggatcatag

SEQ ID NO: 10913 - DNA, 1902 bp, Oryza sativa
  Clone ID: TFbOSC100264j.C1.o5.fg
atggcgtcggagatcgaggtgctcgaggacaccaccgccgccgccgccgccccggccgccaccatcggaggcggagaggtcgcgggcgcgggcgcgggggaggagggggaggcggcggcggatgcggaggcgctcaaggacgacgtgtacacgggcgcggcgtacggggacctcgagaagctgcaccgcctcgtggagcgggagggccggccggtgacggagcccgacgccctcggctaccacgcgctccagtgggccgccctcaacaaccgcgtcgccgccgcccagtacatcctcgagtatgtcctatccttttcagttgtttgctttggtgggatgacggttctcagcttgttgtctggacagcatggagcagatgtaaatgctatagaccatacagggcaaacagcactccactggagtgcggtacgtggtcatattcaagttgcagaactacttctgaaagaaggagctaaggtggatgccgctgatttatatggatatcagactacacatgttgcagcacagtatggtcaaacatcatatctttatcatattgttgcaaaatggaatgctgatcctgatgtccctgataatgatggaagaagtcctctccactgggctgcttataaaggatttgcagattctctcaaatgcttttcattaggttgcactcctttgcattgggctgctatccgcgggaatttggagtcatgcactgtgctggttcaggctggtaaaaaggaggatcttatggtgcaagacaataccggcttaactccagcccaacttgctgctgataaaaatcatcggcaagttgcctttttccttgggaatgctagaagagtacatgagagaggatgtgttatctcaggacaatatagcagtaatatgacattactatttgggttattttcatggttgggaattttccttgctactgccggattggttatgttctataagtgtagcagaaaagatcctggctacattgacaagaatacaagagatgcccaaaatcaaagagatgatgaacctttgttgaagaggggtctagacaaccctgaacttctggctggcaattggtctcagctatgtataacctgcaaaattgttaggcctgtacgctcaaaacattgctctacatgcgatcgctgtgttgagcaatttgaccatcactgcccttgggtgtctaattgcattggaaagaagaacaaatgggaattttttatgttcctgatcctagaagtttctgcaatgattattactggtgtgacggccgtcataagagtagtaggagacccagattctcctgcatcatttggtggatggcttaattattcagccactaaccatccttgggtggtgtcttttgttgtgatggatctctttcttttctttggcgttataactctaactgtagttcaagcatcacagatatccaggaatttaacaacaaatgagatggcaaatgccatgaggtatagttatctcagaggcccaggtggccgattcagaaatccatttgaccatggggtgcgtaaaaactgttctgacttcttgctgaaagggtacaatgaggatattgagagggtagaacagacattacaacctgatgaggaattgggaatgattcaaatgacaagaagtgcagtctcacagaatggcgagagcatgtcacttcatgctaatggcacagaccatggttgtgctgatccacaagggaactcaaaatcccatcgtcactcgcacggttcatcacaatgttgcagtcacagtaagagacctgacaagacccccttggggctaggattgggccttggtcgtaacaacccatctagccgctacacacgttcacttccttccattcattcggagagtagtgcttatttgcccttgtga

SEQ ID NO: 10914 - DNA, 1557 bp, Oryza sativa
  Clone ID: TFbOSC423045j.C1.o7.fg
atggcagggaggcacacttcacacacaatggaacacaaattgctcaaagctgttgccaccggcgatgcagacctcttagcgcaggctctaggcatatggccaacagcaacagctgagcaaggtgacgttgatcagagctgctgcctaaaaggtgtcacagcagagggcagctctgtgctccatatcgcagccagccgtgggcacctgaagctcgtcgtgatgatatgtactcacgacatctcgctcatcaagtcgaggaacaatcagctggacacacctctgatctgtgccgcgagggctggccatgccgatgtggtcgattaccttgtccgtgctgcttcagccatgcaagaacctgaacgttctgtgctgagggcatggaattcaggtggagcgaccgcgatgcatgaggcggtcaggaacggctacgcaccggtcttgcagaagctgatgtcgagcgatagcggactggccaccgctgtacttggcggttgtgtccaaccggccagatatggtcgccagcaagctacgcggggccagatggaaaaaccgcgttgcacgctgcggtctacatcggtaaaggggttcacaactcccaccctcgttttccgcgcgcacgcttttcaaactgctaaacgagaaatgagcgagtccctgaggcgctgggagccaacacttgccgaaaaggttgacatcgatggaagaactgcccttcactatgctgtattaactggggaaactggattggtcgaacttctactggacaacagttcagctgcatacattccagataatgatggcctatttcctgtgcatgttgctgctatagccggcaaggccagtgttacccgtatgttgatggaaatgtgtttaaactgtgatgagttgcttgacaacaaacagagaaatgttttacactgcgctgttgaatatggaaggttaatggtggtgtggtacatatgcagaaacccaaagttcacgaggttgttgaatgcaggagattgtgaaggaaacacaccgctccatctagctgtaaagcatggcaatgcaattatcatctcctgtcttatgatgaatactagagtgaatctcagcattattaaccatgggggatcaacacctctagatgttgccttcaacaagagcactcgttattattcattatcatggctctctagtaccagcatcaccatgtgcctacaagcttgtaatgcttataccagcagattcctaaatcgagctgataagaggttcttggaagacaaggaggaatcaagcgtttacaccaatgtgtcccaaagtatcttatgtatctccgtactaatcgcagcaggttcatttgctgctgctttcactcctcctgggggatacattgcagacggtgaggatgctggcatgccattgctcaaagaatatgctgaattctcgagctacgtggctgcaaatagcatgtcgttctattgctccacatttgcgacatgtctgcttgtgcatgacagtctaacaaataggcgtgttaggaactcccaacgattatctctcaggaactggaattaa

SEQ ID NO: 10915 - DNA, 846 bp, Oryza sativa
  Clone ID: TFbOSC400151j.C1.o22.fg
atggagaatgaatatatatacagagaagaagaagagtcaatcaaggaagacgaagagtcgtggcccttccggagaaatcagcctaacgtaattatcaataatggagccggtagtcccctgatgagttcccttatctaccgatcattgaagtgtatgaagctactcataaaggctggtgctgatgttaatggcaagggtacagttgtaacccctttgatgcttgctgcgtcgcagggaggctatactaacttcattcagtttcttctgaaggctggagcaaaccccaatattcctgatgatttgggttggttgccaatagagcatgctgcattacgtgattgcagggaagaagttgaaatgctatttccattgacttctccaattccaaatgtcccaaactggagtgttaatggaataatcgctcatgcaaaagtcaaaaatacaaagccaatggatcaacatcagaaggagagtagaaaagtcgttttgaaggcacaggcagatttggtattcaagcagaagaattacgccgctgcagcaaaaatatatgatctggcaatagctcatggaccgactgcagttttgtacgcaaacaggagcatctgtagattgctcatgggtgatggtgaaggtgctctttctgatgcttacagatgccgaatgatgcggcctaactgggcaaaagcttgctaccgtcagggtgcagctcacatgctactcaaggagtacaaacatgcgtgtgatgctctcatggatgcacaaaaattagattctgggaatgtcgagattgagagggaactaaggaaagctagggaattaatggcgaaacctccagatgagcagtga

SEQ ID NO: 10916 - DNA, 2566 bp, Oryza sativa
  Clone ID: TFbOSC400177j.C1.o39.np
gcgggagcgggcggatgggacccgctcgtcggctccgagatccacggtttcctcacttacccagacttgaactatgagaagctggtggcggaggcggcggcgcggtggttccggcctaatgagatctacgcgatattggcgaaccacgcgaggttcaagatccacgcacaaccggtcgacaagcccgtgagtggaactgttgttctatatgatcgtaaagtagtcaggaacttccgtaaggatggccataattggaaaaaaaagaaggatggcaggacggtccaagaagctcatgaaaaattaaagattggtaacgaagaaagggttcatgtctattatgctcgaggtgaagatgatccaaatttctttcgaagatgctactggctacttgacaaagatttggagcgcatagttcttgtgcattatcggcaaacagctgaggtacttctttttctctcttgttttatgttttacaataaattattcatttcggatgctgaagtgaggatgcattctaaattagtaacactcatgatcagtctcttaatctggtttatcttgatcaggaaaatgcaatggctcctccgaacccagaacctgaagttgcagatgttcctacagtgaatttgatccattacacctctcctctgacctctgcagattcaacctctgcaaatcatggcctcaatcaagtaaatgcaaatcattttggagctctgaagcatcaaggagatcagactcaatctcttttggcgtctgatgtagattctcaatcagatcaatttataagttcttcggtgaaatctccaatggatggtaacacatctattcctaatgaggtgcctgctaggcagaacagtcttttccacagagcttctgtccagtgaccaatgaaagactattagaaatcaatgagatctccccagaatgggcttactctacagagactaccaaggtcgtggtgattgggaatttctatgagcaatacaagcatttggctgggtctgctatgtttggtgtctttggtgagcaatgtgttgccggagatattgttcaaactggtgtttaccgtttcatggttggaccacatacacctggaaaagtggatttttatttgactttggatgggaaaacgccaatcagtgagatttgcagtttcacgtatcatgttatgcatggtagttccttggaggctaggctgccgccatctgaggatgattacaaaaggacaaatcttaagatgcagatgagactagctcgcttgttgtttgccacaaacaagaaaaagatagcaccaaagttgcttgtagaaggcaccaaagttgccaatctcatgtcagcattaccagagaaggaatggatggatttgtggaatattcttagtgacccagaaggcacatatgttcctgttactgaaagcttgcttgaactagtgttgcgaaataggttgcaagagtggcttgttgaaatggtaatggaaggtcataagtctactggtcgcgatgatctaggacaaggagctatccatctgtgttctttcctaggttatacttgggctattcgattgttttctttgtcggggttctccttggatttccgtgattcttctggttggactgctttacactgggctgcataccacgggagggaaaggatggttgccactcttttatctgctggagcaaatccaagtttagttacagaccctactcccgaatcccctgctggactcactgctgctgatcttgcagcaagacaaggttacgatggcttggcagcatatcttgctgagaaaggattgactgcacattttgaggccatgtcactgtccaaggatactgagcaatcaccatcaaagactaggctaacaaaactacaaagcgagaagtttgagcaccttagtgaacaagaactttgcttaaaagaatctctagcagcctatcgcaatgctgctgatgctgccagtaatatccaagctgcactcagggagagaactcttaagcttcaaacaaaagcaattcaattggctaatcctgagattgaagcatctgagatagttgctgctatgaagattcaacatgcatttcggaactacaacagaaagaaagcaatgagagctgctgcacgaatacagagtcatttccgtacatggaagatgaggaggaacttcattaacatgcgaagacaagttatcaggatacaagctgcgtaccgaggtcatcaagtgagaaggcagtaccgcaaggtaatatggtctgttggaattgttgagaaagcaattttgcgatggagaaagaagagaaaaggccttcgtgggatcgcatctggaatgccagtagttatgactgtggatgccgaagcagaaccagcaagtactgcagaagaagacttcttccaggccggccggcaacaagccgaggacaggttcaatagatctgtggttcgcgttcaagccctgttccgttcttacaaggcacaacaggagtaccggaggatgaagattgctcatgaggaggccaaggtaattttttttaaaactttctccaataattgctggcatgtgccg

SEQ ID NO: 10917 - DNA, 1176 bp, Oryza sativa
  Clone ID: TFbOSC33142j.C1.o5.fg
atggacggacggctctttgaagccgcaaagtcaggcgattgcaggttgatgaaggagctggtggctgccatggatccaagcatattgctccgcacaactcctcaggggaacacctgcctccacatatccactatcaatggtcatgaggaattctgccaggaggtgttgatgttagacaattctcttctcaccgttgcaaactcacacggcgagacgccgctgctcaccgcggtaaccaacggccgcaccgccttggcctccgttttgctcagacggtgctgcgaagcggggctcagagaagctatcttgaaacaagatgagaatggatgtaatgccctgcaccatgccattcgcaacggccacagggaccttgcgttggaactgatagcagcagaagcaggcctgtcacaaggtgtaaacaagtacagggaatcacccatgtacatcgctgtgatgagagatttcactgatatcttccggaaactgttggggattcctggttctgctcacgtgggttgtcatggccgcaatgctctccatgccgccgtgagaaacgggaatccagttattgctaaagagttagtggagaagcgtccagggctggctagagaattcgacgatgaaatggatactccaatgcatcatgccgcaatgtggggtaaaacccatgttctcggagcattgctgcagtatgattggtccttggggtatgtcctaagtaataataaggacagtgtcccgctccttaattccgccgcataccgtggctatgttagtgttgctagagagcttgtgcatcattgtccagatgctccgtattacgacgctaatggttgcacatgtctccatcaagccgcattcaaaggtcatctggagttcgtggaatttatcctagagtcgccgtatcttcggaaactcgtcaacatgcgagataacggcgggaacactgctctgcattacgcggtgcaggattgcaacccaagaattgttgccgctcttttgtcccatggagacacggacgtcacggtacttaactacacgggaaacgaagcagtttggcaattagggggagccgccgattatgccaagacattaaattgggaactaaacacagccatattgcgctcttacacaacttaccatgcattacatggactgttactattgttactataa

SEQ ID NO: 10918 - DNA, 6837 bp, Oryza sativa
  Clone ID: TFbOSC401247j.C1.o10.fg
atggccgacccgagcttcaacttccgcgtcggcctcgccctccgccgcgcgctcccgtactacaatgacgccggcccgcagagcgagttcttcgaggcggccacccgcggcaacgtccgccgcctcagggagctagcgagcggcaaggacgcggaggggaaggcgtggctcgccgacatgggcttctcgggcatcgggccgctccaggctgcagcgcgcttgggggaagtggagtcttgcaggtgcatggtggaggagctcggcttcgacatcaatgccggcagccagcttggtcatgatgaagtagcacgactgttgctatctagaggagctagcattgatatagcttattttcatgggacaccactacatattgctgctgcatatgggaaggctgatgtcatgaaagttttattggagcaccatgcagatccaaacaaggtttcagaagagttgggtacaccgttggttgcaactcttcatgctacttctcaaggactagctgagtctatttcactgaagtgtgtaaagctacttgttgaggcaggcgctgatgttaacttcagtgatcgtgacactccgttggtggacaaacaggatgatcagaatgaaaaggctcagctcaaactatgtggtgagaaagctgttaagagaaaggactaccgtggtgcctcaaatttctacagtcagtttcaaaacatagaattggcaattgagatggatcctactgatgcaacactctattcgaataggagcctttgccatcttcaaatgaccgaagcggaggcagctttgtttgatgctgagttttgcatacaattgcggcctgaatggataaaaggttattacaggaaaggagctgctctcatgttgctgaagaagcacgaaaaggcatgcgatgctttcatggctggactgaagctggaacctggaaatgctgagatggagaaagcattacgctacgatcgcttggtgaacacctcctacaccgtcgtcctaccgctgctcagcagctcgttgtgtgaaaccctggcaagtcagcaaacacctccacttaggggtggaaaaggcgacccgagggagaacgagttgctgaacgccgtgacggagggaaatgcccgccgcctcaagaaaatggtgaatacaatgggcgagaaggacagggcaaagtttactgatatgaatatagatggcaatgggttactgcaagtggcagcacacctgggaaaaattgaggtcatcaggtacttcgtggaggagcttggctttgacgtcaacgctggttgcctctctgatggtgtgacagctttggcttctgccgcaatgtttggagaagcctatgttgtgagatatcttcttgagcatggggctgatcctaataagacagatgagacgggctctgttgctcttcattttgctgcgaaaaatgggtatgaagaagtagtccgtctcttgttatccagtggagctaggactggtatagttgttgctcatgggacaccactacatattgctgttttctataggaggattggtgtcgtcaagattttattggatcaccatgtagattcaaacaacacttcaggagtttggggtacccctattcttacggctctccgttctgctaaacatggattggatgaatctgattctttggaatgtgtaaagctgcttgttaaggctggtgctgatgtgaactatgcttgtccaaacactcccttggtggtggccacgacagctggcttaactgactgtatcaagtacttgcttgaggttcatgcagatcctaacattccagataaacagagcggacgtacacctgtagaaatctctgcaagcgttggaagaagagatcatgtggagattctatttcctttcacttcctctatcagtgcagtaacaaattggacagttgaaggaattattgctcatgggaaatcgagacgcttgactcccaagattgtagacttggattcgaagtttgaaatagtaccaaacatgggcatgtccagatacatagtcaagatcccttattttgggatggagttggctgccttaggatacgctgaagcagcacgcaccgcggaggcggccaggcaggctgcagctgctgctgctactttgcgagctgaggaggagcggcgtgacttggagctggcaaacgcggcctgcgtgcgacgcgacgcagaccgggatcgacacgtaggccgacgtgatcgcgacttcagcccccattgcggaggatcagatctccaccgcgatgaggagtggcatgatctatggcgcgatccttggatcgaccgcgctctggaggcccagcgactctgggagcaggcagcggcgattgaggcacaactggacttcgaccgggagcagggtggacgggacattggcgcacgaagccctcgcaggcagcgcgcctccccttcctcggaccggcaccgtggtcgccgtggacgctccggctctcctcccgttgtgcagaccatcgtcaaggatgttggcggcgcatggcccatgctcaccaagactaactacgccgaatgggcgatggtgatgaaggtgaagttgcaggcgcgccacatgtgggacacggtctggtacggcgatgtcgactacggggaagatcggcgggcgttggaggcgctccttgctgctgttccgacggagatgcagtcctccatcgtgaacaagcggactaccaaggacgcctgggacgccattgcttcggcacgcatcggcagcgaccgcgcccgcaggtccacgcttcagaagctgcgtcaggattgggagaacctggccttcaagccgggtgaggacatcgatgacttcgttctccgcctcaactccttgcagcagcggttggcgcagctcggcgacaccaccattgacgaggagagagccgtggagaagctccttcgcgtcgtccccgagaagtacacgcagctggctctgtcgatcgagacgctgctggacttcaccgagctcacaatcgaagaggtgatgggtcgcctcaaggccgtcgacaaccgcaagcagctacctccctcagagccgatcaccattggtggcaagcttttcttcaccaaggagcagtggctcgcccgccagcaggagtggaagaagggggaggccacaggctcttcggcttcgggatcgtcgagcagccgcaagcgtcgaccacgcaagtgggagaaggcgcgtagtggcgctcttggcgacgccaatggcgagcacaagggcagccgcgacgacacctgccacaactgcgggaagaccggctactgggccaaggactgccggcaggcgaagcacggcggtcaagcacacgtcgctcaagcacaggaggccgcggcccacgtcttcctcagcaacggatcatgcggcgacaagatcgacggatggtgcctcgacaccggtgccactcaccacatgaccgggcggcgggaattcttctccgagcttgactccagcgttcaaggctccgtcaagtttggggacgcctccaccgtggtgatcaagggcgtcggctccatcctcttcactgccaagaccggcgagcaccggctgctcaccggtgtctactacatccccgcgctaaggaactccatcatcagtttgggacaactggatgagaacggctcgcgcgtggagatagaggacggggtcttgcgggtttgggatcgccatcgtcgccttctcgtcaaggtagcgcagcctgtgtgccttgcagcccgccgcgacgatgatgcatggcggtggcacgagcgctttgggcacctcaacttcggagccttgaagcagctcggcaacaaggagatggtgcagggcatgccgcgagtcgagcacgtggagcagttttgcgacacctgcgtcctcaccaagcagcggcgactcccctttccccgccaagcaagtttccgcgccgaggagaagctggagctcgtgcacggtgacctctgcggccctgtgactccggccacacctggaggccggcgcttcttcctgctgctcgtcgacgacgtgtcccgctacatgtgggtggtcctgcacgactccaaggcagctgctgcagacgccatcaagcaccatcaagttgctgcggagaaggagtgcggccgcaagcttcgggtgctacgcaccaacaacggtggcgagttcacggcggctgagttcgcggcgtactgcgccgacgaggggatccagcgccacttctccgcgccatacaccccgcagcagaacggcgttgtggagcgccgcaaccagacagtggtggccactgcccgcgccctcctcaagcaaagagggatgccggcaatctactgggaggaggcggtgatgactgccgtccatctcctcaaccgcttgcccaccaaggcccttgacggcaagacgccgtacgaggcctggcacgggcgcaagccggtggtgagccacctccgcgtctttggctgtctcgccttcgccaaggagctcaaccacgtcggcaagctcgacgaccggagctcgccgggagtcttcatcggctatgcggagggcgtcaaggcctaccgcatcctcgaccctgcgacgcagcgtgtccgcatttctcgggacgtcgtgttcgacgaagggcgaggttgggcttgggacaaggcggtggacgacggctcgacttcgactctccgagacttcgtcgtcgactacgtccactttgggggagccgggggagctagcagctcatcttcaccgagctcgtccacctcggcacccggctcgccatcagctccggcgagtcctccaccacctacaccaccagcgactcctccatcaccggctacgccctgctctcctacaccagcgcccacaccaccggtggagttcgccactccgttgtccaacgacgaggatcgtgttgatgcgtaccacgacgacgagcctctgcgctaccacaccgtggacaacatcttcggtgatcagcccgtccttggactggcgacgcacgacttcgaggccgagctgcacctggcgcatgaggacggcgagccctgctccttcgcagaggcgaatggagatgtggcatggcgcactgcgatgcagcacgagatggacgcggtcgagcgaaaccggacgtgggtgctggcagatcttcctgtcggccaccgcgccatcacccttaagtgggtctacaagctcaagaaggatgaggccggggcggtgatcaagcacaaggcgcgtctggtggcgcgcggcttcgttcagcaggagggagtcgactttgacgacgccttcgcgcccgttgcgcgaatggagtctgttcgtctcctcctcgcgctggcggcccaggaaggatggcgtgtgcaccacatggatgtcaagtccgccttcctcaacggagacctgaagaaggaggtctacgcccaccagccgccaggattcgtcatccccagcaaggagaacaaggttcttcgcctgcgcaaggccctctacggcttgtggcaggcgccccgagcttggaacgccaagctggactccactctcaagcaaatggggttccagcagagctctcacgaagctgctgtctaccggcggggcaaggacggcaatgccctgttggtaggcgtctacgtcgacgacttggtgatcaccggcaccaaggaggctgaggtggaggcgttcaaggaggagatgaaggcgactttccagatgagcgatttgggccttctctctttctacctggggatcgaggtccaccaggacagctctggcatctctcttcgccagaccgcctacgccaagcgcatcgtcgagttgggcgggctcaccggctgcaacctagcctacactcccatggaggaaaggttgaagctgagccgcgacagcacggctgaggagatttggcattcgctgttggctgttagccggttcatgcagcgaccaacgacagagcaccagcaggctgtcaagaggatcctccgttacgtcgagggcaccaccaactacggcttgcactacccgaggtgtcccggtgcgcagcacttcattgggtacagcgacagtgacctcgccggcgacagcgacacgagcaagagcaccagtggcatgctgttcttcctcagcaagtgcctgatcagctggcagtcggtcaagcaacaagtggtggccctgtccagttgcgaggcggagtacatcgctaccacaaccgcctcaactcaagctctctggttggttcggctgctgggagatctcttgggaagagacgctgaagcagtggagctcagggtggacagcaagtctgctttggccttggcaaagaatcccgtcttccatgagcgcagcaagcacatccgcatcaagtatcatttcattcggagctgcttggaggagaggagcatcaaggccagctacattaacacccaggatcagctcgtcgatcttctcaccaagtccctcgggcgggtcaagttccaggagtttcgcgccaggattggaatggacgagtcatgtggcaaggtcaatgacagaaaggctgagctaaaatcacatggagaaaaagcagttaagagaaatgactaccttgctgcgtcaaagatctactccgaggcacttgagctagattattttgatgcaaccttgtattcaaacagaagcctttgcaacctacaaattggagaagcacaaaaggctttgcttgacgcagatagatgtgtagaactgcggcctaagtgggtgaaaggtcactaccgggaaggagctgctttgatggtgctaaaggagcacaagaaagcatttgaggcattcttgaacgcgctgaaactggatcctgctaatgccgagattgagaaagtgatgtggtaa

SEQ ID NO: 10919 - DNA, 1848 bp, Oryza sativa
  Clone ID: TFbOSC400431j.C1.o45.fg
atggagccgccgaccagccacgtcaccaacgcgttctccgactcggacagcgcgtccgtggaggaggggggcgccgacgcggacgccgacgtggaggcgctccgccgcctctccgacaacctcgccgcggcgttccgctcgcccgaggacttcgcgttcctcgccgacgcgcgcatcgccgtcccgggcggcggcggcggcggcggcgacctgctggtgcaccgctgcgtgctctccgcgcggagccccttcctgcgcggcgtcttcgcgcgccgcgccgccgccgccgcaggcggcggcggcgaggatggcggcgagaggctggagctccgggaactcctcggcggcggcggcgaggaggtggaggtcgggtacgaggcgctgcggctggtgctcgactacctctacagcggccgcgtcggcgacctgcccaaggcggcgtgcctctgcgtcgacgaggactgcgcccacgtcgggtgccaccccgccgtcgcgttcatggcgcaggtcctcttcgccgcctccaccttccaggtcgccgagctcaccaacctcttccagcggcgtctccttgatgtccttgataaggttgaggtagataaccttctattgatcttatctgttgccaacttatgcaacaaatcttgcatgaaactgcttgaaagatgccttgatatggtagtccggtcaaaccttgacatgattactcttgagaagtcattgcctccagatgttatcaagcagattattgatgcacgcctaagcctcggattaatttcaccagaaaacaagggatttcctaacaaacatgtgaggaggatacacagagcccttgactctgacgatgtagagctagtcaggatgctgctcactgaaggacagacaaatcttgatgatgcgtttgcactgcactacgccgtcgaacattgtgactccaaaattacaaccgagcttttggatctcgcacttgcagatgttaatcatagaaacccaagaggttatactgttcttcacattgctgcgaggcgaagagagcctaaaatcattgtctcccttttaaccaagggggctcggccagcagatgttacattcgatgggagaaaagcggttcaaatctcaaaaagactaacaaaacaaggggattactttggggttaccgaagaaggaaaaccttctccaaaagataggttatgtattgaaatactggagcaagctgaaagaagggacccacaactcggagaagcatcagtttctcttgcaatggcaggtgagagtctacgaggaaggttgctgtatcttgaaaaccgaggtaaccttcacatatatcataatgggttcataatgctggtttctttggaattaactgtttttggtcttggcaacaaaaggaagtttttgtacgatgtagttgctttggcgaggattatgtttccgatggaggcaagagtagcaatggatattgctcaagtggatggaactttggaatttaacctgggttctggtgcaaatccacctcctgaaagacaacggacaactgttgatctaaatgaaagtcctttcataatgaaagaagaacacttagctcggatgacggcactctccaaaacagtggagctcgggaaacgctttttcccgcgatgttcgaacgtgctcgacaagatcatggatgatgaaactgatccggtttccctcggaagagacacgtccgcggagaagaggaagaggtttcatgacctgcaggatgttcttcagaaggcattccacgaggacaaggaggagaatgacaggtcggggctctcgtcgtcgtcgtcatcgacatcgatcggggccattcgaccaaggagatga

SEQ ID NO: 10920 - DNA, 462 bp, Oryza sativa
  Clone ID: TFbOSC31727j.C1.o1.fg
atgacagaaaggctgttgagatggaagaacgatctttctgaagaaagggataaatacgggagtacacctcttcactttgctgcatcagtggaatcgtcactacacaatcgattcagttccaaagcaattgtctccaaagttcttgaagcttgtccttcttcagcatttcaaccagacaatgaagagtccctaccaatccatgtcgctgcatctgcaggtgtccggagcgccatagcaatcttgatagaaaaatggccaggttgtgcctcatttcgtgactctgatggaagaacattccttcacattgctgtcgagaagcagaggaatgatattgttaggtttgcttgcaaaaaagacaaagaaggcaacactgcactgcacctagctgtccagcttgggaacctgagtttagtctgctctttgctaggtaacaagcgggtactcttaaatctgacaaataag

SEQ ID NO: 10921 - DNA, 1794 bp, Oryza sativa
  Clone ID: TFbOSC401824j.C1.o47.fg
atggacaccgggatgagggtggcgctgcaccggcaggtgtcgtcggggtcgctgaaggagagcggggagctccggcggcagtcgtcgctggagtctccccggacggggagggcggcgacgaggttcctgttcgggaggcagtcgtcgatggacccgaaccggcggcgcgggcggagccagagccccgtcggcctcgccgaggacctgaccgtgccggacaacctcgacgccaccatgcagctgctcttcctggcctgccacggcgacgccgccggcgtcgaggccctgctccgcggcggcgtcgacgtcaacagcatcaacctcgacggccgcaccgcgctgcacatcgcctcctgcgagggccaccccgacgtcgtccgcgtgctgctcacctggaaggccaacatcgacgcccgcgaccggtggggcagcacggctgtagctgatgccaagtgttatggccacacggaggtgtacaatcttctcaaggctcgtggtgcaaagatcccgagaaacaggaggacaccgatgatggtgtcgaatcctggggacgtaccagagtacgaattgaaccctagtgagctccaattcaagaaaggggatgaggtggtcaagggcgtgtaccaagttgccaaatggaatggaaccaaggttcatgttaagatacttgatagagaatgctactgcgatcaggaagtcataaactctttcaggcatgagctgaccgtattggagaaggtccggcacccgaatgttgttcagttcgtcggagccgtcactcagaacatacctatgatgattatttctgaatacctcccaaatggtgatttatcaagctgtattccgaggaaaggaaagctacatggtcagaaggttctaaaatatggccttgagatcgccaggggcatgacttatcttcaccagtgcaagccagaccccatcatccactgcgacctaaagccaaaaaatatcttcctggatagtggaggccaactgaaaatcgcaggattcggtctgacgaggctgtcgaaaatctctcctggcagagtgaaactggccgatcatgagtccatggttgacagcttcagtcactacactgcacctgagctgtacagaaacgaaatattcgacgcaagcgtcgacgccttctcatttggtttcatcctctatgagatggttgaaggaacacacactgtacatgggaagtcatcagaggaatctggccacacaattcgatatgatgggatgcgtccatcgctgaagaacaagctcaggggatatcctccagatttcaaagcgctgatcgaagaatgctgggatactcagggaaatgacacgtgtgggctaagctgcatgaacgccttcttgtgtacatatcactgcgaagcaaatgcgtcactctctgtgaagaagaagcctgagctagcactcactcgtctggaggaggatgacacgacgtaccgacaaatttgtgcgggcgccgccgcggtccgcgcgatggaagaaggccgcggcggcgatccgccgtcgtcgtcgtcgtcggcggcggcggcggccggggtggcgattgggtacccattcctcgagcctcagcagggcgcccgcttacgccgacgcaggacgattagcccgttcaagaagtacttttcaaggggttttgcaatcggtatggaaatcgcgtttatagttttcggcaccatagtacatttccccgtctgggccaggatatttcttataatttccttatccatcttgccgttttctgccttttcgatcacgttccaggagtattga

SEQ ID NO: 10922 - DNA, 699 bp, Oryza sativa
  Clone ID: TFbOSC900390j.C1.o25.fg
atggacctcacacctgctggcggtgagcgtgacattcctgacgacttgttcatgtgctctgagctctacattgcagcgttcgaggggcacaccgatcaggtcatcggacttttagaaggaagccgcgcctccgcggcagtcgccgggaacggctggtcgtcgccggcggcacaaccaacagctaaacaccatggaaactgtaacattcacgaggtgaccgccgagcgctggacgctgctccacatcgcggcggcgcaggggcacgacgacctgatcgacgagctatgccgccgggacagcggcctcctctccgcggcgagctcgtcgggggacacgccgctgcactgcgcggcgagggcggggcacgccggcgcggtccgggccatcgaccggctggcacgcgcgaacgtggaggaggacaggctgcgggaggcccttcgcgggaggaacgaggccggcgacacggcgctgcacctcgccgcgaggcacggccacggcgaggccgcggaggcggtggtggagscggcgccggagacggcggccgatctgaacggcgccggcgtgtcgccgctctacctggcggtgatgagcgggtcggtgcgcgccgtcacggcgatcctctggtgcagggacgcgtcagccactggaccgaaatcacagaacgcgttgcacgctgcggttctccagtgttcaggttaa

SEQ ID NO: 10923 - DNA, 4779 bp, Oryza sativa
  Clone ID: TFbOSC423276j.C1.o2.fg
atggcttcgccgcttcccttttgctctctctctctcgcccttccctccttttggattttgagtgaatataatgtaaaatcggagaggaggagaggaggagcatttgagattggagagggggagggggaggaggaggaggacgcgagtgaagagacgaccgggagcatggatcgcgccaaggcagcagcgcgcaaggacaaggcggcggcggcggggaaggagaccgccgtgtcccgcgccgtcgcgttggacgacaccgcgctgctgctcgcggcggtgggaagcttcaggaaggagggctccgacgcgtcgcggatgctggaccaggagatgtccacgaggctgctccacctcgcctgcaagcacgacgccgtgcagtgcgccaggctcctcctcgagggcggtcacggtatcaccgcgtcacccgtggatgccagggaccagctcacgcggacgccgctccaggtggccgccgaggcgcactcggccaggtgcatcgagctgctgctctccaagaacgcgcgcaccgacctcaagctggtcgatggccggcctcttctcgcgctcgagatcgctctcttgagcagaagagctcaagttaaatggtcactggacaactccattgaggatcttctgtcttctctgcaggaaaagaaatgccaccttgttccatgtgtaggatctgaatgtagtgaggctctggcagagaaaaccagagaggttggggaggtggcctacagatatgccatggagggtcgtgttactgtgttggcaatgctgcttctggtggctgaagagaagatatcggcaccagtcagtgtagtaatagagggcgtcaggacaaagaaatcaatctactactctattgtggatgaggctctgtccattggggatgctccagcccgggacagcaatgagaggagaaaggccctgctcagtgagattcagctacttaaccaatttggggcagcgttatggagagatcgcaacattgacaagagaagcctgccccctctgcttaaagctgccaagctcccgaagtgggccattaaagatattgaacgctgctgcaggggttttctatggaaagggcaagaagaagttagtgggggtcactgcctcgttgcttggcgagtggtctgcaggccggttgagtgtggcggcctgggcatcagggacatcgatcgcttcggaaaggctttaaggttgaaatgggaattcaacagactagagcaagaagacagaccttggacaatggtgcggtggaaatctgataaggatgttcgcgacatcttcaattcagtggcacagcacattgttggagatggcaatcgcactgatttttggagaggtaagtggctgccccgtggaggaagcattgcaaacaactggcctattcttttctcctttgtgggtcgcacgaagatcaccgttgcacaaggcctgctaaacaacagatgggtgagggatttgcaggggtctctctctaatagagctcttgttgattacctggcgctttgggatgagctgcagctcgtctcgcttcagagtggtgaggcagattcagttttatggcggttctcagctaacggggtcttttcggcttcttcggcttatgagtttctcttctccacctcaatcaaatgcccccacggggagctgatttggaagaccaaagcgccagcaagagtgaggttcttcctctggttggcggtgaaggggcgttgcctcacggccgacaacctcagcaaaagaggttggccacatgatcccacttgtctgctatgtcaatcggcgccggaggactgcaatcacttgctcgtcaaatgccctttcactaacagagtgtggcagcaattgaaggcttgggtgaatgtcacttttcctctccctgctcagcttggcatggaactggcagattggtggcattgtgcccgccgctgttttcagatgaggttcaggactgcttttgattcacttttcatgctggttggagatgtaaatgtcacaaagatgctcctgatgggggatgttgatgtcaatgaagccgatcctgaaggaaacacagcacttcactggtgccttagtggtagttcaagcacacaggagccaaggattgtgtggctcctgctgaagaatggtgccagagttttccaggggaacaaacttggtcttacaccagtacacagtgctgcagctaagggaaattataaagctcttcagtcacttctgcttcacgctcaagattgcgttgatacaccttccaagaccaaagaaaccccattgttcttagcagtgaagaatggttctttggactgtgtaaagcttctcctgcgttctggggctagcaccaaaaaagcaaagaccaatagatgtggcaacgtcccaagatatgcgtttcattcttacctctgcaaatgtggctccatggggggcaagagtaagagccattgtgctcccaagcaaggttccaagtttgtgcctcggcctaatcattggctgaagcacgactacactcggaaaatttttgttgggggcctcccaccttctgtgggcgctgagtacctcactgagttcttcactgctgaatttggacctatggaggaagcagtagtcattgggataaggatgggtgatcgggtgcaatccagaggattcggttttgtaaagttcaaaagagaagaggatgtgataagtgcaaaggaaactcatcatgtgtacatgcttgggaagagagtggaggtaaaggatgctgttgctagaggatccttgccttcagaaatccagaaaacttcttcattcaggcaccacaaccaggaggttccaaaggtaactcatcatctgttgggtggtgagctaaaggaggaacattacattaggaagcggaggcccttgccagagaagtgtcttccatcttggttctttatattcaggaagtggctgccaggatttcttgcagatgctactgaacgacttggagataggtacccattgagctccctgaagggtgatttcagagcaatttgcagaatggagcttgatcatagcacacttggttatcctaagctcagtgatttcatgcgctcccttcctggtatctgcagaatgtgtgtagtccctgtaggaagcggtcctgcaacacacaaggtcctccttccaccggtctcgcgaccgaagtatgtacccttgctagtaccattctcctttgatcatgatgagctcccagaatcagtgtcagatcatcagttcccgatgtctccacttaccactaatatcaccgaggactcccctcgtaacacagacagtcagcacggtgatacttgcagcgagagcaatgcggagagccagcaggatagtgcttccactgacaatggtagccaattgtacacttcaattgagcctgtatctacaagaaagcttgatgtagttgagcctctacctgcaagaacacctgatcgagttgaacctcagaagattggttctgatcctgcgagaaagactatttcccttgaatctggacttggtgtgcagattttcataggcaatggtagtgcaaatttgtcactacaggtcgacgtcaagaaagacgttgaatacatgctgatgttatatcaaaagagaactggaatcagcagtagaaatatctattttgtatacagagggaagaggctcaggttaaaccgcagcttactatcatatggtgtacagaaagacagtactgtgaatgttcgcagtagaattctggggggtgctggtacatcactggaggaatatttacacaagcacaagaatagtcttgtgaaaaaaaccgccttgtatgatggaagattcttcccagagttgacacccagaagcagtattcttttgagaacatgggtcttatgttttacaaaggcattcaaggagcgacattgctgggagcccaaatgtgaactctctcatttcaaggttatcaatggtcatgtcaaggttagcacaccagcaaaagggaacctcacaacgcattttctgcaagaaaatttatcttttctggcaaagacattaaaggatttcttcagaacaattggaacaaatcttgtctcagaatacccaccgtactttgaatattttatgaagtttatattgaaaatagatctaccatgcgtaccacatttgcagaaagttataattgaattgaacctatgctttatggattcatacatgagaggggtgctgacagtgagattgaagcaaaaatttgatagcctacctccaaaacaaagagccactttgatagataagatcaatcatatcacatgggatacatctcgaatgccaaatctttctacaattcctgtctttgataaaatcatcaaaaaagcaaaggatgatggagagccttacttcattgagaattcagtgaacttcgagtttaaggcgttcaatggatttaggttgagccgtgatgctcctatacatgctcctcaacacagatttgacaaaacatcggtaccttggaaggaaaattttccagataatacaatagaattgatgacacctgcttatctgggtgatttgcttcccgaaattatctggtgctttattctaaataaggtggacatcacagaggaattatcacaaagtcagactccatgctgtactatgtgccatcctataaaaacagatgtgggtgaatatcccacgacacagcaaactactgtgcaggataaacagcctacaatggaagatgttggatcctcctcatcaatgcagcaaaatgtatggaagaaaatctggtaa

SEQ ID NO: 10924 - DNA, 6094 bp, Oryza sativa
  Clone ID: TFbOSC28359j.C1.o1.np
atggccgagccagcaaaggcgcgcgacctctccccgagtatgagcggtgacgacggggagccaaacccacgccgttgagctcgtactccaccgccccctccacgccaaagtcctaggcgggaaaaggcgctcgagagggctgaaggatccgcgacttcgacatccacaggaggtggagaagggcggcgagatggggagcgtcgtctcctcgtctacggcgacggcagcacgccccagggcgcgctccaagctgcaggcgcgctcctacgtcacccgcccgtcgcccatgaaccggagtctccagcccaacgttggctggacgatgtggccaaattggtcatgactgcacggcagcgcctagatgctggtgggcggtcctccgccaccaaggcctctggagctgctaccaccggctccgcgtcgtcaagacggagggcacgacgagcggcagccgctgttcgccattcggccgccactcctttgtcgactccttcgacccgggaagatctgcgtggggggccggacgcccgcaccagcatcgagcgccggcgtaatgaccgacgtgctgcccacgcaacggagggcgcttcctcgtccagagtgtcacctcaacacggacgcggggaccagccctccgtgcccccggttggtggtgtcggctgtagagcctttgtggcgagccttcggaatgtccgttgccccccaaggttccggcccaccatcgccgaaaaatatgacgggagcgtcaaccccgccgagtttctctaggtctacacgaccgggatcgaggccgccgggggtgacgacagggtcatggcgaatttctttcccatggccctgaaaggacatgcacggggttggctaatgaacttgccacccgcgtctgtccactcttgggaggatttgtgccaacagttcaccatgaacttccaaggcacatatccgcgccccggtgaggaagcggacttgcacgcagtacagcgaagggacgatgagtcacttcgatcgtacattcagcggttctgtcaagtccgcaacaccataccatgcatccctgcacacgcggtgatttacgcgttcagggggggtgtgcggcacaaccgtatgctcgaaaagatcgcctccaaagagccccagactaccgcggagctttttcagctcgcggaccgagtggctcgtaaggaggaggcatggacctggaacccctccggttccggtgtggcagcttcggccgcccccggatccgctgctcagacagggcggcgtgacaggaggaggaagaagaggtcagcccataccgacgatgagggtcatgtcctcgccgtcgagggcgctccgcgggccacccgaaaggggaggcctggggagacaaaaagaaggaggccggcgctcccagcagggagcgcccgaccggcaagtggtgcaccgtccacaacacttcccttcacgacctcgcggactgccgtgcagtcaaaagtttggctgagcggacgaggaagtgggaggaggagaggaggcaggagcgccgagagggcaagtccccggcggttccttccggcaatcggcgaagtgaggccaagcagaaggcccccgccgaggacatcgatgacagcgatgatgacctaggtttccaagagcctggggccatcgttgccactgtcgatgggggagcgtgtgctcacgtttctcgccggaacctcaaggccatgaagcgagagcttctggccgcggcccctactcatgaggcgacgcgccgggcgcggtggtcggaggttgccctcaccttcgaccagaccgaccacccaccgtgcgttgcccggggaggacagatcgcaatggtggtttcccccactgtttgcaacgtgaagctggggcgtgtcctcattgatggaggagcagccctcaacatcctttcccccgcagcctttgacgccatcaaggccccggggatgatgctccggccgtcccagccgatcatcggtgtgacgccggggcacacttggccgctaggtcatatcgacctcccggtcaccttcggtggacccgccaacttccgcacggagcgggtgaactttgatgtgacggacctcagtctgccctacaacgcggtcttggggaggcccgcgttggtaaagttcatggcggcggtccactacgcctacctccagatgaagatgccgggccccgatggccccatctctgtccatggcgacctcaaagtcgcgctcgcttgtatggagcagcgcgcggaccgcctcgccgtcgtgtccaagcccgagggtggcgacgagaggcttggcacatccgcccccgccgccccgaggcagcggatagtcacgtgcgatgaggtcccggtcaaggaggttgccctgggcgacggccccgtctctttcctgcgggcaaacgctgacgtcttcgcatggagaccggcggatatgcccggggtccccagggaggtgattgagcaccgtctcgccgtacggccgggcgcaaggccggtccggcagaaagtgcggcgccaggccccggaacgtcaagccttcatccgcgaggaggtggcgcgacttctggaggccggattcatccgcgaggtcatccatccggagtggctggcgaacccggtggtcgttcccaaggcgaacggcaagcttcggatgtgcatcgactacaccgaccttaacaaggcatgtcctaaggatccttaccccctgcctcgcatagatcagattgtcgactccacagcggggtgcgaccttttgtgttttctagatgcatactctggttaccatcagattcgcatggctagggaggatgaggaaaaaactgcgttcattacccccataggaacttattgttatacaacaatgcccttcgggttaaaaaatgcaggtcctacttttcaacgtactactcgaatttctttgggtagccaaataggacgtaatgttgaggcttatgtcgatgacttggttgtaaagacgcgcaaccaagagaccttactctcggatctagcggaaacttttgagagtctccgctccgcccgcataaaactgaaccccgataagtgcgtgttcgttatacctgcgggcaagcttctcgggtacttggtctctgcccgaggcatcgaggccaaccccgagaatatacgagctatagagcggatgcgccccccagcaagcttagggatgtgcaatgcgtcaccggttgcatggccgccctaagtcggttcatatcgaggctgggagggaaggcgctacccttatttaagctcctcaaacgctccgggccgtttacttggacggaggaagctgaacgtgccctcactcagttgaaggcgtatctcagctctcccccagttctggtcgccccggagccaaatgaacccttgctactctacttagcggcgaccccgcaagtggttagtgcggcgttggttgtggagcgcgatgaggacaatcctcattccgcgcacccccaccctgtgctggcttggcccgggagagagcagggaggagaggcccccgagccggacggtggcccaaggcccccgacgaccggagcaggccctctccccgcttgtcagacggtgccaggtgcccccgacccccaggacggccccgaggccactgcgggaaggccgcacctatcgccctctgaccccgaggctaaccctgtaccgattcgacccgggagagagcagggagaagaggcccccgagccgaacggtggcctaaggcccctgacgaccggagttggccctttgcccgcttgtccgacgacgccaggagcccccgacccccaggacggccccgaggccactgtgggaaggccgcccctgtcgtcctccgaccccgaggtcgtcggcacagaagacgagtgcgccccgcgaggccgcttgggtgaagagcgccccagggatgcagcccctagcgaagaggatcggccccaccgaaaggtgcagcggcccgtctactttgttagtgaggccctccgggatgccaagacccgataccctcaggcccagaaaatgctttacgctattctgatggcctcgaggaaactgcgccattatttccaggcgcatcgggttacggtggttacgtcttaccccctcggccaaatcttgcataatcgagagggtactggacgggtggtgaaatgggcaatcgaactttctgagtttgatttgcactttgaaccacgcaacgctatcaagagccaagccctcgccgactttgtggcagaatggaccccggctcccgagctcgtctcggtccccgaagcaaactcgggcccctcgcagctgcctcacaccgcccactgggtgatgcagttcgacggctccctgtctcttcagggcgtcggtgcgggggtcacgttgacctctccgagtggagacgtcctcagatacttggtccgcctcgactttcgagtgaccaataatatggcagagtacgagggactccttgccggactcagagtggcagctggactggggatccgccgcctcctggtgttaggcgactcccagctggtcgttaaccaagtctgtaaggagtaccggtgctctgacccgcagatggacgcctacgtgcgccaagtacggcgtatggagcaccattttgacgggattgagcttcggcacgtgcccagacgggataacatgatggccgacgaactctcacggctcgcgtcctcacgagcccagaccccaccgggcgcctttgaagaaaggcttgcccagccgtcggcgcgacccgaccccttaggggagacggatgcgcctgaccggcccccgaggcccgtcggagtccaggcctcgggacccgaggggagtgctcccagctcccttagattgattgcttggatcgccgagatccaagcatacctcacagataagactctacccgaggaccgcgaagggagtgaacgcgtccatcgcatctccaaacgctacgtgctggtagaagggaccctctatcggcgcgcggctaatggaatcctcctgaagtgcattcctcgggaaggcattgtgcttcttgccaatatccatgaaggcgaatgcggagcccactccgcctcgcgcaccttggttggtaaagcttttcgccaaggtttctattggtcgacagctctcaatgatgcggtcgacctggtccggcgatgtagagcgtgtcaattccacgccaagcaaatccatcagccggcctaggccctgcagaccataccactttcgtggccatttgctgtctggggactcgatatcctgggaccgtttaggcgggccccgggcgggtttgagtatctgtatgtcgcgatcgacaagttcactaagtggcccgaggcttatctggtcgtcaagatcgataagcactccgcacttaaattcattaagggcatcacggcccggtttggagtgcctaaccgtattattacggataatggcacccaattcactagtgaactcttcggcgactactgcgaagacatgggcatcaagctctgcttcgcctcacctgcccaccccagaagcaatggccaagtggagcgcgctaatgcggaaatcctcaaaggccttaaaaccaagaccttcaacatactcaagaagcatggcgattcatggatcgaggagttgccagcagtgctctgggcaaaccgaactacaccaagccaagcaaccggggaaacgcctttcttcctcgtctacggcgcggaagcagttctcccatccgagctcaccctgaggtctcctcgggccaccatgtactgcgaggctgatcaagatcagcttcgcagagatgacctcgactacttggaagagcgaaggcggcgcgcggccctccgagccgcgcgctaccagcagagcctgcggcgctaccatcagcgtcacgtccgggcccgatcactctgcgtcgacgacctcgtcctacgccgcgtccaaacgcgtgctggattgagcaagctttcaccaatgtaggagggtccgtatcgagtggtcggcgtcccccggccgggctccatacggctggccacgggcgacggcactgagctgcctaacccgtggaacattgaacaccttcgtcgcttctacccc

SEQ ID NO: 10925 - DNA, 1458 bp, Oryza sativa
  Clone ID: TFbOSC401247j.C1.o16.fg
atggagaagaaggataagggaaggcaccgcggccgcgacggcggaggcggaggcggcggcggcggtggtggtggtggtggtggtgtggatcccgccggtggagggagcggaggaggagggccgggaatggggcggcgcgggagcgatgcgcgtggccagcaggcggaggcggcggccgcggcaatcagcggcatcgccacccgccttggcttcgggtgcaccatcaatgtcggcggcgggatgccaccgcagatggagttcctgatggcgtgtacggacggcgacgtcgcgcgcctcaaggaggtggttgatagcatggatgaggatgatcggcaatcgctcacctctgtgaggatggaggggtatgagccactgtttgaggcagcaagctcgggaaaaattgatctctgcaagtacttggtggaggagcttgggttcgatgtcaatgccgaagctaatcatgattccggtatgacacctttgttttgcgctgtgttggatggacaagagattactgtgaagtattttcttgacaaaggtgctgatccgaataagaaagatgcagcaggctttgctcctcttcatgaagctgcaaaaaaagggcacgttggaatagcacgactgttgttatctaaaggagctagtgttgatgtatcttcttctgaagggacacctcttcatgttgctgcctctaatggaaaatctagcactgtgcagattttattagagcaccgcgcaaatattcaacgatcacaagttgatgcaaaaagctttcgaaacagggtccaagtgttctatgtacctgctttgccaaacgtgatattaccagattgttatacaccattgaccgcagttctttctgccactcctgaaatagtgaatgaatctgagtgtttgaagtgcatgaaactccttgtgaaggctggtgctatttataatcttgcaactcctgatactccattgaagatagcaactagaaatggcttaactgagtgtgttgcatacttgctggagatcaccacagttaaactaagtgaacatgacaaaggaagtgatggagacagaaaatctaagctgaaattacatggtggaaaagcatttgaggagggggactatgctggtgcaatcatattttacaccgaggcaatgaaacttgatcctgcagatgccacactgtattcaaacaggagcctttgccatctgagaagtggtgcagcgcaggaggctttgctggatgctaatgattgcataaaactcaagccagagtggactaaaggtcactatcgcaaaggatgtgcccacatggcactcaaggaatacgaagaagcttgtactgcattcatggctggaacaaagctcaatcctttaaacgatgaaatgcaggatgcattttgggaggcagctaaaggaatgatgtatgaacatatggctggaaagcgcgtcagctcggttgattag

SEQ ID NO: 10926 - DNA, 903 bp, Oryza sativa
  Clone ID: TFbOSC423046j.C1.o5.fg
atgccccggcgcgcgcgctctccgcgcctcccaccgcccccgcaccacccttcccctcctccgccgccgcttctctcggttggccccggggcggcgccgcgcgccgcgcgcccttcccacggcgacgtgttctgggaggagccggacgacggcggctccgggagcgacgacgaggatggggatggggcagaggccgaggccgagcggcaggaggccaccgggcggaggagcagcttctcctcgttcccttccccctcgctgttctccaggctcggcgccgcgcggcggcaagagcagcgagaagaagaggagcttcgaggagaaatcgagcttctcttgacgcctgaagaaatggctatcctggatcagaacgagaccccggatatcaccaaaatatcatcaccgaaatggcatccacttcatagttacgcattggcgctgcagatacctctcatggacagcctgctcgatagtggtgtcgatatcaatttacttgacaaagatggtttcaccccacttcacaaggctgtcataggcaaaaaggaggccgtcattagccatctcctgcgaagaggggcaaatcctcatgtcagagatagggatggagccacaccattacattatgcagttcaagttggtgccctgcaaactgtgaagttactgattaagaatagggttgatgtcaatgttgctgataatgatggctggacaccgttgcatttagctatacagagtagaaatagagatatagcaaagatattgcttgtcaatggtgcagataagacgagaagaaccaaggatggaaggactgccttggatataagcttgtgttttggaagagatttcaagtcttatgatttggcaaagcttgtcaaacttgttccggcaaatagaaaaatgtga

SEQ ID NO: 10927 - DNA, 3090 bp, Oryza sativa
  Clone ID: TFbOSC421183j.C1.o15.fg
atgggcagtctctgtctcgagcgccggaagcaaccggacgatcccctctccatttcgcagcagctccacctgtgcctccttcctctcctcttctgcgcggcttcaaagttttcggcttttgagggagttcttgctcaatatcccgatttttctttcttttttttctctgcctctgcgagaaatcgaggttttgatatcaacgtgcttcacaaagaagcaaggagcaggtggctaaagccttctgaagtctactatatcttgcaaaatcatgagaggttcccaatcacccctgaaccgccaaagaagccacccagtggttctctattcctttataatcgccgtgtgaatcggtattttcggagggatggccatgcatggcggaggaagaaggatggaagaactgttggggaggctcatgaacgattgaaggttggaaatgttgatgctctcagttgttattatgctcatggtgagcaaaatccatgttttcagaggcgatgtttctggatgctggaaccagcatatgaacatattgtgctggtacaatatcgagaagtaggagcagctgagggtagatataattcagcatcactgttgaatgggccaacagattctctttcagtcttgagttatccaaatgctacatatggaaaccaatatcttggctccacttctggcgttagtgatggtagtgaatcactccattctaatttgagctctgtaacggaggtaagttcctattctgcaaacaaagacaatggtattctgcaaagcatacaggagctcagccagtcaactataatgggtgcaccggcgcttggccagagtagtctggagcaaagtattgaagttcgctgggtagataacagtaattcaacaaataaatctgggctcaaccgagctttgaagcaaattgttgagcagttaagcttgggggatgatgaggatgatgactacatacaccaagcacagccttttgacttcattacaaatattgaagctccagataggcagcgtgatgcaagcagaaatgtttcagaatatcaaccaccaggaagtctatacaacagtgatatgcagcagatttctgctgctaaaagatttcttttggagacagaagactctattgattcaccatcttataactatgtgcccagagaagaaggaaacaatggcactaatactctttcagttcatgactatagtcttcagagcagtctgaacccagattggaaaaaaacagcacctctaacacttcaaagcaatttgtatggctctgaaataccaagcttattgttggaccatggtcagtttgaatcattgtcctctggtgaaaatacaagattgatcttgggtcaaaacccccggtttagcatccgtgaggtctctccagaatggacatactgctatgagatcaccaaggtcatcattactggagatttcttatgtgatccatcaagctcatgttgggcagtaatgtttggtgatagtgaggtgccagctgaaattgttcaggcaggtgttcttcgctgccacacaccattacatagtagtgggaagctaacaatctgtgttacttctgggaatagagaaatttgcagtgaagtcaaagactttgagttccgtgcaaagtcaacagcttctagtttcctagacatttcaccatcatctagatctctgaaatctagcgaagagttgttacttcttgcgaaatttgtaagaatgctattgtgtgagaatggaagtcatgcaaattcaaacggtgatcctcagtctgtgcagtgtccaaaacttaagatgaatgacgagcactggcagcggttgatagatgaactcaaaggaggatgtgagaatccattaaacgtgtctgattggattatggaggagcttcttaaaagtaaattgcagcagtggttatcagttaagctacaaggatatgatggcatagcctgttctctgtccaagcatgagcagggtattatacacttgatctctgcactaggctatgagtgggctctgtcttcaattcttagtgctgatgttggtataaatttccgtgatacgaatggatggacagcacttcattgggctgcttattttggaagggaaaagatggttgctgcacttcttgctgctggggcgtctgctccagcagtcacagaccccactgcacaagatccagtgggaaaaacagcggctttcctggcttctgaacggggacacttgggccttgcagcctatctttcagaagtgtcactaactagttatcttgcgtcgctcactatacaagagagtgatacttcaaaaggatcagctgcagctgaagcagaaagagcagtagagagcatatcccagaggaatgcccagctgcatggtggtacagaagatgagctctcgttaaaggactctttggcagccgtgagaaatgcagctcaagcagcggctcgaattcagaacgctttccgtgccttctctttcaggaagagacaacaaaagactgctcgacttaaggatgagtatgggatgacccaagaagatatagatgaacttgcagctgcatcaaggtcatattaccaatctcttcttccaaatggtcagttttatgataaagcagctgtctcaattcagaagaaattcaaaggttggaaaggacgaagacattttctcaacatgcgcaggaatgcagttaaaatacagctgtattttacacaagcacaaggaccttaccttagcggcccattctttgtacaggctcatgtaagaggccatcaagtgagaaagaaatacaagactttcgtcagcactgtcagtgtgctagagaaagtgatactgaggtggcgtcggaaaggacatggtctacgtggcttccgagctgagcaaacagcaatggctgaagcagaagaggatgacgaggatgatgatgatgacgacttcaatgatgatgaagcagtcaaagtgttccgccgacagaaggttgatgaatctgtcaaggaggctatgtcaagagtactgtccatggtggactctcctgaagcaaggatgcaatatcgtcgaatgcttgaggaatttcgacaagccactgctgaatag

SEQ ID NO: 10928 - DNA, 498 bp, Oryza sativa
  Clone ID: TFbOSC413065j.C1.o5.fg
atggcgccgcctcgcttccctccctcctcctccgccgcgcgcctcccgccgcgatccacaccgccggagcccaggcccagccccccagccgcagccgccggcgccgccgccctcgcccccggctcgctggaggaggtcctcctccaggcggccttcgacggcaacctccgcctcgtcaggaagatggcgagggcgctggacgagggggacggccgccgcctcggcgacaaggtgggggccgtgagggacggcaacggcgtcggcgcgctgcacctcgccgccggccgggggagcctgcccgtttgcgggtacctgctcgaggagcttcgtgtggatattgacgccgtcgaggacagaggtgaaacggccttgacatttgcgatcaattccgggaatgcggacatggtgcggtatcttcttgatcatggagctgatactgaaaagctcaacaacgatggacttactgttctccattttgcttctggcgaaggtgtataa

SEQ ID NO: 10929 - DNA, 1335 bp, Oryza sativa
  Clone ID: TFbOSC400555j.C1.o7.np
atggcagtccccggccgccgcgacgacctcgtcggcgacgacctcgtcgacgacgacgggatcggcgaggagtacatggccccctccgacgacgaggaggcgcaactgcctgacgaactcttccgcctcgccgacgccgcccagtccggcaacgtcgctgccctccgcgccgcgctcgataattattctggcaacattgatgatccaatagaagatggtgatactctgcttcacatagcatgcttatatggccatctaccttgtgttcagctactgttggaacgtcaagctagcttggaatgcaaagatgaagaaggagcaattcctcttcatgatgcttgtgctggaggctttagtgatatagtccagtacattttgaattttgctgcgaacattgatggctgcgtaacaagaatgctcaacactgttgattctgaaggcgacactccactccatcatgctgccagaggggaacatctgggtattgtggatctcttgcttaaagctggggcatgtgccaagaaggagaatacttatggccaggtccctgctgagatggctgatgaaggcactgaagtccggaaactgaaggtagtcactgtaccatcctcaaatcctcatccatgccatcaattgccgatccgccactctcccaaccacgacgatggcggcggtgcagcgccttccccttcctcccgccgcccctcctcagccgtgccgcggacgatggaagacgaacgagacgaacgggtcgtttccatggacggaacgtacgacgccgacgagaagcccgtgcttcttttctctcgcggcgacggcgttgtccgtgtccacgatctcccgtcgctgaagaagagaggggatattctctgctacgacgaggtcaagacgatatccatcaggtcgcgcggcgtcgtcttcaccggagatgcgtccggcgaggtacctagtactggagttatgtttgcaaagctcaatgctgatacttctgagattaagcttactgagaaacaggatgatgatactgaagacgacaagaagaaagtcaatgggtcgatgaaaatcccgcgagtatggctgtctttgtctgattgctgggagaaaatgaaggtctctatctttgagtttatgattgatacaagtggaaagaaagaggcaatctatactgtgtacagctatatcgctattgggattatcctgagccttaactgtttctggaaagtatggcgtgaagctagtaattcggatgaaaaaccatctgggtttaaagctttctttattaccatcgtttgcatggttggcaaaaaactctatgactctctgaagaccaccaag

SEQ ID NO: 10930 - DNA, 1674 bp, Oryza sativa
  Clone ID: TFbOSC401007j.C1.o11.fg
atggagaggcagacgagcttccgattgggcgcgctggagaagctcaagagcttcagggggatggagaagcagaagagcttcaagatgatgtccacggacaacttccggaggcacagggacagccccgggaagcgcggcgacacgccgctccacctcgccgcgaggtccgggaacgccgccggcgcgcagcggatcatcgccgagttcgacccggaggtggcggcggagcgcgccgcgcaggccaaccacgacggcgagacgccgctgtacgtcgccgccgagagggggcacaccgacgtggtgcgcgagatcctcaaggtctccgacgtgcagacggccggcgtcaaggcgaacaacagcttcgacgcgttccatattgcggcgaagcaaggccatctagaagttctgaaggagctgttgcaggcttttcctgctcttgcaatgactacaaattctgtaaatgctacagctttggatactgctgcaattctgggtcacactgaaattgttaacctcctactggaatctgatgcaaaccttgcgagaattgcaagaaataatgggaagacagttctgcattcagctgcaagactgggccatgtggaaattgtaagatcattattaagtagggatccaggaattggtttaagaactgacaagaaggggcaaacagcactacatatggcttcaaaaggacaaaatgctgaaattgttatcgagctgttgaagcctgatatctcagtaattcatctggaagacaacaagggaaacagaccattgcatgttgcaacacggaaggccaatatcgttatagtgcagactctactatcagttgagggaattgaagtaaatgcagttaacagatcagggcacaccgctcttgccattgctgagcaactcaacaatgaagaacttgttaacatcttgagagaggctggtggagtaactgcaaaagagcaagtacatccacccaatccggcaaagcaacttaagcaaacagttagtgatatcagacatgatgtccagtcccagatcaagcaaactaaacagaccaagatgcaagtccagaaaatcaagaagagactcgaaaaactccacattggtggtctaaacaatgccatcaactccaatactgtggttgcagtgcttattgccaccgtcgcctttgctgccattttcaccgttcctggcaattttgtggaagatatcactcaggcacctccaggcatgtccttggggcaggcatatgtagcaagcaacccggccttcctagtatttttggtctttgatgccttggctctcttcatctcacttgctgtcgtcgtcgtccagacctcgctaattgttgttgagcagaaagccaagagaaggatggtctttgtgatgaacaagctgatgtggctggcatgcctctttatctcggtggccttcatagcactaacctatgttgttgtcgggcgcgacgactggtggctagcttggtgcacaatggcaatcggtgcagtgatcatgcttacaactcttggttccatgtgctactgtatcattgctcataggatggatgagaggaagatcaggaaggcgtctacaagccaatctcgctcatggtctcaaacagttgactcagatccagatctactcaacagtgaatataagaaaatgtatgcactatag

SEQ ID NO: 10931 - DNA, 1887 bp, Oryza sativa
  Clone ID: TFbOSC400632j.C1.o12.fg
atggccgcctccgccgcccccgtggcgcccgcgtccccatccccatcccccgccgccgctgccgacggcgaggagggggaggggccggcccctgcggcggaggacgactcgctgaagaacgacgtgtacacggcggcggcgtacggcgatctggagaagctgcagcggctagtggagggggagggccacccggtcacggagcccgacggcctcggctaccacgcgctccagtgggccgccctcaacaaccgcgtcgccgccgcgcagtacatcctcgaggttttcccccctcctgcttcccgcccgagcgtctcgcgatttggctggccttcgtgtagtcgttgtttgctagctagcgagggatttgggtgggggtttggtgtattcacttttagctcattggctggtgttttggataccaaattaccagtgcctgtggttgaattactccagcatggagcagatgtaaatgctgtggaccacactgggcaaacagcacttcactggagtgctgtacgtggacacatccaagttgctgagcttcttctgaaagaaggagctaaggtggatgttgctgatttatacggttatcaggcaacacatgttgcagcgcagtatggccagacagcatttatttatcatattgttgcgaagtggaatgctgatccagatgtccctgataatgatggaagaagcccactgcactgggggaacctggaggcatgcactgtgctagttcaggctggcaaaaaggatgacttgatggtgaaggataagactggtctaactccagcacagcttgctgctgataagagtcatcggcaagttgcattttttcttgacaatgctaaaagggtatatgatagaggatgtgatgggaataccaattttggaaagctatcgaaactggggctagctcctgtactttggtgtattattgttggcttgcttgctacatatatacactctgttatatcaggtcaatatatcatggatatgacagcaccatttgggctgtttgcatggtcaggagttttccttgcaactgctggcctagtcatgttctataaatgtagcaggaaagatcctggctacatcaaagcaaatatacgagattcacaaaatcaaagggatgatgaacctttgttgaagttggagttagacaatcccgcacttctgtctggtaactggtcacagctttgtataacatgcaaaattgtgagacctgttcgttcgaagcattgttctacatgtgatcgctgtgttgagcagtttgaccatcactgtccttgggtatctaattgcattggcaagaagaacaaatgggaattcttcatgttcatcactctagaagtttttgcaatgatcattactggttctgctgccattataaggatggtaagagatccggcttctccagcatcctttattccttggctcagctattctgcttttaaccatactggggcactttcctttttcataatggacctcttccttttcttcggtgttgcagttctagcagtagtccaggcatctcagatagcgaagaacattacaacaaacgagatggcaaattccatgagatacagttatctaagaggtccaggtggaagattcagaaacccatttgaccatggagcgcgcaagaactgctcagaattcttgttaaatggatacaatgaggacattgaacgtcttgatcatacgtcacacactgatgaggaaatgggaatgatacagatgacaaacgcagtctctcagaatggcgagggcccttcccaccatggtaacggcactggccattcttgtgctgaatcacatgctcactcaaaatctcacagtcaaattgtatgtgttcatgctgaggctccattatttatttag

SEQ ID NO: 10932 - DNA, 1395 bp, Oryza sativa
  Clone ID: TFbOSC413065j.C1.o4.gm
atggctctcaatgctggctcgctgaaatgtgttgtgcttctgcttaaggctggtgctgatgtgaagggtgttggtacggtaactcccttaataactgctgcaaacaacgggcaaactgacttctataagtgcttactggaggctggtgcagatcctaatgttccagatgaagatgaccctatgtacaaaatgagtccagctgatatgaagttagcagcaagtgaggcatacaggagacaagattacattactgcaatgaagctctatactagggatgctcaaatttgcaggttgatgcattctgactggtcgaaggcatgctatctggaaggtgctgctcaaatgttactgaaggactttgaaaaggcatgtgatgcgttttttgatggactcaaattggatccagcaagtgatgagattgcagaagcattaagtcatttcgtcgaacacttggttggcatcaccccgccgtcagcctgggcaccgccaccgccaacactcgacgccgacaccgccaccggccccggcgtaccgcagcagctgctcatccagtcggcggccgccggcgacctccccgccttcaagaagtttgctcgtatgctggacggcgggaaggggcggctcaaggaggcggtggaggccgtgaagaaccgcggcgctggggctctgcaccaagccgcccgctacgggaggaccgcgatgtgcgcgtacatggtcgaggagctccaggtggacatcgacgccgccgatgagttaggcataacgcaactcgatgaggctggtgctgatgttaagggtgttggtacttttacccccttaatagttgctgcaactgaaggcttaactgatttctataagtgcttactggagggtggtgctgatcctgatgtgcctgataaagttgaccctttcttcaaaataagaccagctgatctgaagttggaaggaaatagggcatacatgagaaaagactatcttactgccgcaaaactctacaatatggccgatgggcggcggcagcaggcagcggcagcgacagcagcagcactaagcggcgtcggcggcagcagcagcaacaacagcagcaccagcaccattaccaggaggcggcaccggctacaccatcggcagcatgtgacggcggtagcatgtagcagcaacactacatcaacagcagcagcaacaaccagcaaggaagactgtggaactaggatattgcgccctgattggcccaagggctgctacagggaagggaccgctcacatgttcatgaaggactatgaaaaggcctgcaatgcatttcttgatggtttcaaactggacccagcgaatattgagattgaaaatgcgctacgggaggctttgaaatcattgaaggcgtctcgtgctgcttga

SEQ ID NO: 10933 - DNA, 1269 bp, Oryza sativa
  Clone ID: TFbOSC900166j.C1.o9.fg
atggagaagaaggataagggaaggcaccgcggccgcgacggcggaggcggaggcggcggcggcggtggtggtggtggtggtggtgtggatcgcggcggtggagggagcggaggaggagggccgggaatggggcggcgcgggagcgatgcgcgtggccagcaggcggaggcggcggccgcggcaatcagcggcatcgccacccgccttggcttcgggtgcaccatcagtatgacgcctttgttttgcgctgtgttggatggacaagagattactgtgaagtattttcttgacaaaggtgctgatccgaataagaaagatgcagaaggctttgctcctcttcatgaagccgcaaaaatagggaacgttggaatagcacgactgttgttatctaaaggagctagtgttgatgtatcttcttctgaagggacaccacttcatgttgctgcctctaatggaaaatctagcattgtgctgattttattagagcaccatgcaaatccaaacgtgatgacgccagattgttatacaccactgactgcagttctttctgccactcctgaaatagtgaatgaatctgagtgtttgaagtgcatgaaactccttatcaaggctggtgctcattataaacttgcaactcctgatactccattggagatagcaactagaaatggcttaactgagtgtgttgcatacttgttggagatcagcactgttgttagactaagtgaacatgacaaaggaagtgatggagacagaaaatctaagctgaaattacatggtggaaaagcatttgaggagggtgactatgcgggtgcaatcatattctacactgagtttttatgcaaatataatttcttcaataatccaagcccgaactataamcamcagagattagcacaaaagaacccaactccacacataccacatcgcagaagcatggcagtctctgcatcccagttgacatctaggatactattatcacttctattgtctaggaactattgctgtgttaacaaaggaagactcagtttgaatttccaatggcattgccatcatgtgggggatacacttgcaatgaaacttgatcctgcagatgccacactgtattcaaacaggagcctttgccatctgagaagtggtgcagcgcaagaggctttgctggatgctaatgattgcataaaactcaagcctgagtggactaaagatcatgaggaggatgcttgtgaagatcctgttgacccgttagagtgggacagctatggtttctag

SEQ ID NO: 10934 - DNA, 2322 bp, Oryza sativa
  Clone ID: TFbOSC900128j.C1.o2.fg
atgtttttcaccaggctggatgactcgcccatgttcaggaagcagatacaatcccttgaagaaggttctgaattgctgagagagagatgtttgaggtttcataaaggttgccgcaaatacactgaaggactaggggaagcatatgatggagatattgcatttgcaagttcactggaagcatttggaggggggcataatgatccaatcagtgttgcttttggaggacccgtcatgaccaaatttacaattgccctgagagaaattggaacttacaaggaagtattgcgctcacaggttgagaatatgctaaatgacaagttgctgcaatttgtggacattgatttgcatgatgtgaaggatgccaggaagcgttttgacaaggctagccttctctatgaccaggctcgtgagaggtatttatccttgaagaaaggcacacggacagatgtagcaactgcggtggaggatgtgactgcactttcaaatatcgaggccaagaaaagatttgaatttttagaggctgtcagtgggacaatggatgcacatctgcgctatttcaaacaagttcttgcttatgcacagcaatcaagggaacggtctaactatgagcaagctgctcttgtagagaggatgcaagagtttaaaaggcaaattgatcgggaaagtcgttggtcaccaaatggcataaacgattcccctaatggtgatggaatacaagcaattggtagaagttcacacaaaatgattgaggcggtgatgcaatcagcttcaaagggcaaggctcacatttcagcatggaaattcatgtcatattttaaaagtggttatactaaccaaagaagtagcgctccgtcagagcatggttctgggttgcttagcagatggttctcttctcattatcatggtggagtacacgatgagaaatctgtagcaaggcataccgtgaacttgctaacatcaaccattaaagctgatgctgaccaatcggatctgcggttctgcttcagaataatttctcccacaaaaaactacactttgcagcgtcttctgtcgagcccaaagggtagcggccataatcgaactgccagcgaaagtagttcctttagtagctcgacagaacttgaccattccattagtgaagactgcatgctggaaaggaactctggaagtgggtattttgaccactctggcagagccatccagcatcaccgaaccagcatgaaacctgacaagccaattgacttgcttaggaaagtggtcggcaataatatttgtgctgattgtggtgcagcagagcctgactgggcatccctaaaccttggaattcttctatgcatcgaatgctctggggtacacagaaatctcggtgtgcatatatctaaggtaagatcactgacacttgatgtcagggtctgggagccatctgtaatcaatctcttccagtcattaggaaacacatttgccaacactatctgggaagatatgttaccttcatcaagcagtgttgatcatggtgataattcaagggctgatggactagaaaacacatcacataacttaattttcagcaagcctaaacactcggatcatattgctgtgaaggagaaatttattcatgcaaagtatgccgagcgagattatgtgcgaaagcttaatatggatgatagcctggtagctcaacagatgtgggaaaatgttagttcaaacaacaagaagggggtttacagtctgattgtggggtcaaatgccgatgtaaatttaacttatgggcagacatcatttaattcggccctaacccttggaaaagctctacttttacaagagcagccaacttcaccatcagatggaagttccagatgttttgatcgtagttcacttgaaaggatttctcccagggactctctttctcttgccagcacaagtgcacgtatagatgaattggatgattgtgtcgagggattgtcattgcttcatctagcatgccgtgttgcagatgtgggtatggtcgaacttctcttgcaatatggtgccaacgtaaattctgcagactctagaggtcgaacgcctcttcatcacagcatcttgaaaggacgacatatgtttgcaaagttgttgctatccagggaatgtgtcaatattatcaaattaggaattgtacctggagagatgatcagtggtagttggttcctacaatgtggttcttggggcgctgattcacaagccacggaccgagatggtagaacagcattacagtatgctattgacagtggaactattgacgacgaagagattcttgttttgttagaagacccaagtagataa

SEQ ID NO: 10935 - DNA, 1221 bp, Oryza sativa
  Clone ID: TFbOSC900390j.C1.o14.fg
atggtttctttgccactgcagtggaaaccagcacttgccacccacgtggacaggaacaagagcagccccctacatttcgcttcatctgatggggattgttccatcgtccaagcaatcttagcatgctctccgccgagcgctccatacatgcaggataacgagggattctcacctatacatgctgcagcgttgatgggacacacagctacagttcgcctcttgttgcagttctcccctgcctctgcagatatttgtgacaatcgtggccaaagctttgtacatacagcagccacaaaaggccactcttccattatctcgtatgctataggtagcagcatgctcgagcatcttctgaacgcacaagacagggaaggtaacacgccactccatttagctgtggatgcagggaaatgcaagattgtttctaagctattatcaagtgaaatagtgcaagcacacatcatgaacaatgaaggccacacaccatcggacctcgtacaaaattgtaaaggtttctactcaatggtaagcttagtggtgaagatgtatgcctcaggagcacagttccagccacagaggcaagatcatatagagaagtggaatgctcaggacatcatgaaatggcgagatactacatcaaaatatcttgctattgtttcgacacttgtggcaacggtcgccttttctgcagctttcaacattcctgggtcatatggagatgatggaaaagcgaatctagcagggaattgcatgtatgacacttttctgatccttgacaccatctcattagtcacttcagtcgtggcgataatgctactggtatttggtagagccttcagttctcatcactcatggttgagcttcatgatctcaacgcactttctatggctgtcaataaacaccatggtattaggcttcttggcagctatatctgcagtgatgagcaagaagaagggcttaaacattacaatggccatcctgatttatttcgggatgtggatattaacgatgctgcttacaagcttaacgacagtagggtcatttacaggcattctgaagttcctattcggaggtcgcatggaaagacagcggcgagcgaagaggcgcatcagccggcagtatccctacgcgatcttttacactttcaacatggttttgttctttgtcatagctaatatagcattggctggatttgacacttttaaatctctcagttattga

SEQ ID NO: 10936 - DNA, 1167 bp, Oryza sativa
  Clone ID: TFbOSC416911j.C1.o18.fg
atggaggctgtcctacgacacccatccctttcccgcctcaaaccccccaaccccaatgctcagagaactccagccctctccatcaccgtccctttccggcttcgtctccccaaccggcggctcaccgccgcggcggtgttccaggaccagaccaacccaagaaacccagcgagcaagggaggcgacgacgatgaggcgtacggcgaggtggaccgtattgtgtccagccgcaccatcaagaatccggtgttcgcggaggacggctcggccaccacggtcaccgccacggagtacctcgtcgagtggaaggacgggcacgagccttcgtggatcccggcggaggccatagcggcggacgtggtggcggagtacgagacgccgtggtggacggccgccaagaaggcggacgcggcggagatcactgcgctactcgcggacgagacgctgcggcgtgaccccgacgcggaggatgcgcaggggcgcacggcgatgcacttcgccgcggggcttggatccgaggagtgcgtgcgcgcgctcgccgaggccggggccgacgtggggcgacccgagcgcgccggcggcgggctcacgccgctgcacatcgcggtcgggtacgggcgcccggcggccgtgcgcgcgctgctggagctgggcgccgagccggaggcccccgacgggcagggccggacgccgctggagctggtccaggacgtgctcgcgaagacgcccaagggcaacccggcgacgttcgagcggcggctggcgctggaggcggcggcgaaggagctggagaaggccgtgtacgagtggggcgaagtggagaaggtggtggacggccgcggcgagggcaagtggcgggagtacttggtggagtggcgcgacggcggcgacagggagtgggtgagggcggcgtgggtggcggaggacctggtgaaggacttcgacgccgggctggagtacgccgtcgcggaggccgtcgtcaacaagagggaggcggcggaaggggaggggaaatgggagtaccttgtcaagtgggtggacatcgaggaggcgacgtgggagcccgcggagaacgtcgacgccgaactcctccaggagttcgagcagcggcaatctggggtggctgctggcggtgatgctccgccgccgccgccggtcgccgggtga

SEQ ID NO: 10937 - DNA, 1581 bp, Oryza sativa
  Clone ID: TFbOSC422826j.C1.o2.fg
atggatctcccgccgctctcccaccaggcgctcttcgccgccgtccgatccgcggacgccgccgccgtcgccggcctcctggccgacgccggggcgtccgggcccaccacccaggcgctcgccgccgcgcagacggacgccggggagacggcgctgtacgtcgcggcggaggccggctccgaggagatcgtccgcctcctcatcccgctctacgacctcgaggccgccaccgtccgctcccgcctcgacctcgacgccttccacgtcgccgccaagcaaggccacaccggggctgtgaaggagttcttggggcggtggccggagctatgttcaatctgtgactcttccaatactagccctctttactctgcagcagtaaaagatcacttggatgtagttaacgccatactggacactgatgacagctgcataaggattgtgcggaaaaatgggaagacatcactacacactgctgcaagaatcggttaccatcgtattgtcaaagcacttatagaaagggatccggggattgttccaatcagagataggaagggacagactgcacttcacatggctgtaaaaggtaaaaatacagatgtagttgaagagttactgatggctgatgtttccatactcgatgtgcgtgacaagaaggcaaatacagctttgcacatagctacacgaaaatggaggccccagatggtacaacttctgcttagctacgaggcgcttgaagtcaatgctatcaataatcagaatgaaacagctatggatttggctgagaaagttccttatggtgagtctaaaatggaaataattgagtggctgacagaagctggcgcaaagaatgcacggaatgtggggaaaattgatgaggcatcagagcttaggagaaccgtgagtgatatcaagcacaatgttcaagcacagctcaatgagaatgccaagacaaataaaagagtgacaggaatagccaaagagctccggaaactacacagagaagctgttcagaacaccatcaattcagttactatggtagcaaccctgattgcctccatcgcattcgtagccatattcaatttgccaggccagtactatgttgatagggatagtgggggagacattggtgaagcccacatagccaaccttactggtttccgagttttttgtctgctgaatgctaccgcccttttcatttcccttgcagtggtcgtagttcagatcaccttggttgcctgggaaaccggtgctcaaaagcgggttatcaagattgtaaataagctgatgtggtcagcatgccttagtacatgtgcggcttttatctcattggcctatgtggtagttggcccccagaatgcctggatggctttcaccatatcagccatcggagggccaatcatgattggtactctcttgttcctggcctatctgttgttgcgccctcgcttcaagtttggtgaagatagacagcggcgcatcaaaagggcaagtggcagcaagtccttctcctggtctatccatgaggggatatcagacctggaagcattctctgatcatgagaagagaatttatgccctgtag

SEQ ID NO: 10938 - DNA, 1671 bp, Oryza sativa
  Clone ID: TFbOSC403477j.C1.o12.fg
atgtcgctcgaaatccatgaagaggagggaggaggtacggcggcggcggcggcggtgaaggtgatgacggtgtcggggagcgggaagcgggggcggtacgtgcggcaggtgacggggcggcacaacgacaccgacctgcacgtggcggcccgcggaggggacgccggggcgctgcgccgcgcgctggacgaggcggcggcggccgtggccaccggggaggggagggaggcgctggaggaggtgcggcgggccgtggcggcggagcccaacgaggccggggagacgccgctcgtcgccgcggcggagagggggcacctggaggtggtaagggagctgctcaggcacctcgacgccgagggggtcgccgcgaagaacaggtcggggtacgacgcgctgcacgtcgcggcgagagaaggccgtcatgctgttgtgcaggaaatgttacttcacaataggttgcttgccaagacctttgggcctgcgaatactagtccacttatttcagcagctacgaggggtcacaccgaagttgtcaaattgttactagaactagatgattttggattggtggaaatggctaaagataatgggaaaaattccttgcattttgctgctcgacaagggcacgttgaaattgttaaagcattactcgagaaagatcctcagctagcaagaagaaatgacaagaaaggtcaaacagccttgcatatggctgtaaaaggaacaaactgtgatgtgcttagagcacttgtcgacgctgatccagcaattgtaatgctgccagacaaaaatggaaacaccgccttgcatgtagcaacaaggaaaaagcgagcagagatagttgctgttctcttgcgattaccagatacccatgtcaatgcactaaccagagaccacaagactgcgtatgatatagctgaagccttgccactctgtgaggagtcttctgaaataaaggatattttatctcagcatggcgcactcagatctagggagctgaatcagcctcgagatgagctccgaaaaacagtgacagagatcaagaaagatgtccacacacagctggaacagacaagaaaaacgaacaaaaatgtgcatgggattgctaaggaactcagaaagttgcacagagaaggcatcaataatgcaacgaactctgtaactgttgttgcagtactttttgccacggtagcctttgcagccatattcactgtgcctggtggaaatgccaacaatggagttgcggttgttgttcaggcagcctcctttagaattttcttcatcttcaatgctatagctctgtttacatcattggcggtggtcgtagttcagataacggttgtcaggggagaaactaagtctgagaggaaggttgttgaggtgatcaacaagcttatgtggctggcatcagtttgcactaccatttctttcattgcctcttgctatattgtgctaggccgccatttccaatgggcagcactactagttagtttgataggtggcatcacaatggctggtgttctgggtacaatgacatactatgtggtgaaatcaaagcgcatgaggaagataagaaaaaaagagaagatgtcaagaagaagtggatctagctcctggtatgataatactgagctctcagagactgagcttaaccaagtgtatgccttgtaa

SEQ ID NO: 10939 - DNA, 1860 bp, Oryza sativa
  Clone ID: TFbOSC401044j.C1.o4.fg
atgggggagcctgggggcgccgaggcggccgtctccgcgaggctgctcgagctggcggccgacgacaacgcggcggggctcggggagctcctcgcggcgtggccctccctcgccgacgagcccgcgccgtggtacaccccggcgcggggcgcggagccgctgaccccgctcatggtcgccgccgtgtacggctcggtgggctgcctcgacgcgctcctctcgccgccctacctcgtggaccccaaccgcgcctcggcgtcgtcgctctccaccccgctccacctcgccgccgcgggcgggtccgcctccgcccccgcggcggtctcccgcctcctcgccgccggcgccgacccggccctcctcgaccacctccagcgccgggcgtccgacctcgtcgcgctcccgcccaactcgctcccgctcaagaaccacctcctctccctcctcggcgcccgcaaggagtggcctcccgacccctccctccccgacatcaagaacggcgcctacgcctccgacgacttcaggatgtactcgttcaaggtgcgcgcgtgctcgcgggcctactcccatgactggacggagtgccccttcgtccaccccggcgagaacgcgcggcggcgcgacccgaggaagtaccactacagctgcgtgccgtgcccggagttcaagaagggggccgggtgcaggagaggggacatgtgcgagtacgcgcacggggtgttcgagagctggctccacccggcgcagtaccggacgcgcctctgcaaggacggcgtcggctgcgcccgccgcgtctgcttcttcgcccacacgcccgacgagctccgcccgctctacgtctccacgggctccgccgtgccgtcgccgcgcggggcgttggagatggcggcggcggcggcggcgatggggatggggctgtcgtcgccggggtcgtcgtcgttcacgccgccgctatcgccgtcggccggcgggggcgggggcgggggcgggggcagcggcggcggcggcgcgtggccgcagcagccgagcgtgccggcgctctgcctgcccgggagcgccgggaacctccacctgagccggctgcgcacgtcgctgagcgcgcgcgacatggccgtcgacgagctgctcgccgcggcggcggcggcggcggactacgacggcctcgtcgcctcccccgcctccatccggtccgcgagggggaaggcgcttgtgccgtcaaatctcgacgagctcttctccgctgagctcgccgccgccgcggcgtcgcgctcgccgcgctacgccgaccaaggcggcgccgcgttctccccgacccgcaaggccaccgtgctcaaccaattccagctgcagcagcagcatagcttgctctcgccgcgggcggccgcggtgacaccagagccggtctccccaatgagctcccgcctcctcgccgcgctggcgcagcgggagaagatgcagcagcagacgctgcggagcatgagctcacgggacctcggcaacgccgcgtcgctgctggtcggctcgccggtgagctcgagcatgtccaaatgggggttcccctccggcaacccggactggggcgccgacgacgaggagctcggccgcctcaagcgttgctcctcgttcgagctccggtccggagccgccaatggcaaccatgagcctgacctctcatgggtcaacaccctagtgaaggagccgacaccggagaagatgatgacgacgacatcggcaatggattccattggcatcttgggacagaacacaagccgtgatcacatcgtcggaggcgaggatgacactgccggagtcatcagcagctggcttgaacagctccagctcgatgagatggttgtctag

SEQ ID NO: 10940 - DNA, 1449 bp, Oryza sativa
  Clone ID: TFbOSC404797j.C1.o18.fg
atgagcggggcggaggaggaggcggcggcggcgaggggagggggaagcgggagcgagagcggggggagcggaggaggtggacggggagggggagggggaggggcggggtcgtcggggagcagcggggcgcggcggcggttcgacgacaaggggcttgtggcgaggacgtcgctgatcctgtggcacacgcaccagaacgacgccggcgccgtgcggaagctgctggaggaggacgccgcgctcgtcaacgcccgcgactacgacagccgcacgccgctccacgtcgctgcgctccacgggtggcacgacgtcgccgagtgcctcatcgccaacggcgccgacgtcaacgcccaggatcgctggcagaacacgccacttgctgatgcggagggtgcaaagaggcatgctatgatcgagctactcaaggaacatggtggattgacatatgggaaaactggaagtcattttgaaccaaagacaattccaccacccctaacaaacaaggctgactgggagattaaccctcttgagttggatttctcaaaagctgttatcatcggaaaggatgatctttttagatgttatatgcaaatagagatagttgggtgttcaaaacttgccattatattagctggctcttttggtgaaattctgaaagccaactggcgaggaacacctattgctgtcaagcgcattcttccatctctatctgatgacaggctggtgattttttttggggtatgcagacaagatttcaagcatgaagtcaacttgctaataaagctgagacatccaaatattgtgcagttccttggagcagtcacagaaaccaagcctttaatgctcgttactgagtttttacgaggaggcgaccttcatcaatacctgaaggagaaaggtgcacttgccccagcaactgctgttaatttcgcactagacattgccaggggcatggcctatcttcataatgaacctaatgttgtaattcaccgggacttaaaaccaagaaacattcttctagtaaattctgctgccaatcacttgaaagttggagattttggtcttagcaagattatcaaagcccagcatgccaatgatgtgtacaagatgactggggagactggaagctaccggtacatggctcctgaagtattcaaacaccggaaatatgacaagaaagttgatgtcttctcgtttgctatgatactttacgagatgcttgaaggggatccacctttctctaactatgaaccttatgaagccgcaaagttaattgagctatgctggtccggggatatccatctgaggccatctttcctagagatcctcaagaggctcgagaagatcaaggagtacttagctgcgcacgatcaccattggcatttgttctcccagttccctgctctttttatgtttcttgagaatcagtacagtggatacaggaagtaa

SEQ ID NO: 10941 - DNA, 1155 bp, Oryza sativa
  Clone ID: TFbOSC900309j.C1.o12.fg
atggcggcgcggcgatctcgcctcgccgctccgacgtcctcctccgccgcggccgcttcgatgcagcacgagctcctcgaggcggcggccagcggcgacctccgccacctcaagaggctggtgcgggcgctggataaggtcaggggccgcctccaggaggtggtggaggcggcgaggacggacggcggcatctgggcgctgcagctcgccgcgggcaacgagcagctggaggtgtgccgctacctcgtcgaagggctgcgcgtggatgtgaacgccgccgatgatgagggtagaacacctctagtttttgcggtgatcggtgaaaatgctgctattgtcaagtaccttcttgatcatggtgctgatccagacaaagctgatgatgacgggctaacccctctacattccgctgctggaataggagattgtgaaatgatagaaacgttgctggcaaagggggctgatattgatccggctgtaaatgtttcatcagtggaatgtgtgaagctcctggttgaggctggtgctgatgtcaactcagattgtatctcaactgctgcacttgattctgcaatgggcaatgatggttcaactgagtgcttaaatttcttaatggaggctggtgccaactatggtggccctaatgattttagggtctattcagtttgtggctgcagtttgccacatttctggcagccaaagtttggcaacatcctagtggaggacatgatccaccaaccttggcaccaggatcaacatgtgaataaaaagaaaatagaagagttgaagacatctgggaataaagcagtcgatagagaagattacatttctgcttcagcgttctacactaaggcaatggatcttgaccctaatgatgcaaccttgttctcaaacaggagcctttgctggctctgcatgggtgatggaaagaaggcttttctggatgctcttgaatgcagagaaatgcggcccgattggccaaaggcctgctaccggcttggtgctgctctgatgaccctgaaggacttcgagagcgcgtgcgatgcactttttgatggattcaagttggacccggacaatgcagagattgagcgtgcattacgggaagctatggaatctctgaagatatcatctaaaggcaccaaggcaacatga

SEQ ID NO: 10942 - DNA, 1728 bp, Oryza sativa
  Clone ID: TFbOSC32693j.C1.o1.fg
atgggcgggccatacaggagtatagtgccggagccggtggcgcatgaacaatgcaacctactcgaggtgacggcggagaggaacaccgttcttcatgtcgcagcggagaaagggcacatcgagctgatcaaggagctctaccacaggttcatcaaggacaacaacttcctctctcgtcgaaactcggcactgaacacgcctctgcactgcgcagcaagggaagggcacaccggcaccgtgacaaccctagtacatctagcccaggaccgtgtggagaatatcatggggtgccagaacacggccggggacacggccctacatctggcagcgaggcatggtcatggcgccactgtggaggctcttgtcgcggcacacgcaaaggcgacagagctgaacaaagtcggcgtgtctccgttgtacttggcggtgatgagcaggtcggtgcctgctgtaagagcaatagttactacctgcagtgacgcatcagccgttgggccgagctcgcagaatgctctgcatgctgctgtctttcggagcttagagatggttcacctcttattgcaatggaagccagaactggctagccaagtcgactgcaatggtagcaccccgctccatttcgcggcatccgatggcaacagcaaaatcatacgtgcaatcatggccactgcgccacctggcacagtgtacatgaaggactcggatggcctctctgctcttcatgtcgcagctaagttggggcatgccgatgttgtcaagcagttgattgggatccgccctgatgctgtcgagcttcgtgacagccatggtgagaccttcgtgcactccgcagtcagggagaagcgctcctcgatcgtgtcccttgccatcaagaaacacaagcaggtcggtggtcttctggatgcgcaggacggggatgggaacacgccgctccacatcgccgtggttgccggcgcgcctggcatcgtgaatgctctactccagaaggggaaagtgcaaaccgatgtcttgaacgacgatggacacacaccgctagatctcgcttccacatcgcccagtttgttcaatatggtaagggaaggggatagagaggacttcggacagcctcgcggtggtggccgtgctcatcgccaccgttgccttgcagctggattcaacatgccgggcgggtacacgaacgacggctcggcaagcctcgagggcatgtccttgttcagatggttcgtggtcctcgaccccatcgcggtagcatcatcggtgatcgccgtgatcctgctcgtctacgggaaggcgtcgcgctccaccgggtcgtggaagagcttcgtggcggcgttgcactgcatctgggtctcgctcgtcagcctaatcctggccttcttcgcggcctcccgtgccgtgatgagaacctcgacggcagaatccatcgtgtacattgttatctacgtgggcatcatcgttttgtctctctttgtcgcacagtggattggacctgtgacgacggcgcgtgcattctggaggtttttgtggctcagtcaccgggctcacaccgtcaggaggcagtatccgttcgccgtcgcttccatctacaactggcttctcttcttacatataacttatataatgtttgctggtttgggagtggtacataatcactccaattcggatcggggaggattatcaagcagctggaacccgaaccatatctcacctgcccctgcacctatgtaa

SEQ ID NO: 10943 - DNA, 4158 bp, Oryza sativa
  Clone ID: TFbOSC401914j.C1.o21.fg
atggagatgaggaggcggatcttccgcccgccgcacgctgctccactccagccgcctgccgactgccgcccgtcgcccgctggtcctctcccgttgtcttccgcccaccgcacgccgcacgccggtccacttcggctgcctgccgctcctctcctgccgcccgccgcacgccgcttctctcacgccggcgtcattgaaggagaaataagtagagaggaagttgagttggttttcgtgttccgagaaaaatttgtttccgtattcgtgcccgatcatattcgattcttattcgtattcgagataatccgtattcgtttccgtattcgagctatccatattcgttttcgtatccgtttcgcccgccgcgcctcgcctcgccgcctgcgccgcttcccatccatctcccgcgaggtgggtgccgtcgtccttctgcttccgcctccggaaagtaaacccgaaaggatggagttgagatttaaggcacccgattatgctacgtggaaaaaggaggcagctgcatgcgacaaaaataatggcaatgataaagatggatcaattccagtaagaaataagtatccacggcaccctccccctcgttttgaacttgctgagggattagattataaaaagattgacaagtttatggatgaaagggctatttcgattgccaagaccatagcaaatgacataatcatcccagaccctgctcctgagtggatgtgtcataccttcttggacaaacatgatgaattggagcccatctttgtaaaggatagcccccgttgcttcctccgatatttcaagaactgtgggtgctatggcatgtcatggaatctcaccatcaccgcacaaaccttaacctgcatggttagtttcaatgccctgagatgtgcaaaagttgtattggagggcagggcacctgagctctttgggatgcatgccaatcccaactgcgtaaccaaatacggatacttcccgcttcacgaagctgctgaaaggttctctgttgagatgatcaagctactcttacgctttggtgcatcagccaatgtacgcacagttggcgacgatgtcattgaggacctactcccgctccatattgcgattgagaatacttgcctgcataagtatcttgaggacaatctttcgcccagccagaatcatttggattatatctacaagcttatccacctgctatgtttacctgaaatgaagatcttcttggatacaattagactgcttgcaggaaaaacaaataatctacttgaagagctctggtattacattgaggatggaaaactcatccagtctgcaattctactactggctgctcaggagcagatccgagggggctgttcctccaagataaatggcagtagtaagaaagatgggtttggcattatctctaagcgtatactgaggctttcatttgccctgagatgggagaaaggttcaaatggaatggcacagaagcttcgggaggaaaagagggcacttattgattgcacaggcctgcttgttgatgtaatttcccaagctggtgaacctctttctgcatacgttcaggcgcattcagaggcgccccatgtggaggttttggaacatgtttcaactatcctcaaggagtatgggttttaccccactgcagaagtcattgacactatgaaccttcagccttatgactgcgaaatggagagagagtcatgtagcaaaggctgggagaaaggaagtaggcggaggatgggatcccacgtatacaaggagaaattttttcccatattggagatcagttttacgaaccctgtgtcctgtgaagtgggaagaatcccaccatttgcaaacaatcatcaatccaaaaggagcttcagcacttgtgctactggtgcattcaggctcttgaagctgctgaaatctagtgtgacagatctagcatgggggctccggtacccttgcccgctggatcttgaggctcagcaattaggaaaatacattgtcaagtacagtttgttattctgccaatttcaaaacgtgatggtcaccatttactggtgcagcaggcaaaaagttgcatggagcgctacaggctgtacacttttgatttccctgctgttctttttctctggttcaccgcataggatcctcttgaacaagaaacctctcaatttcaaaacagcaccatctaggttattgcgtgagattagcatcagttcaagtcgtgttcagagggttaacaattcatccgcggagtttgttgcaaacctgaatgaccgtaatgtagaaattgtacaacatatggaagacaacgatcataacatcatcaatgcaactgcaaatgtgacttctgactggagcattgtcaaggaggaattcacatttccagctggaagtgcccctttcaatagctgccatgcttctactattgtagagactgagaaggatagttttttggtggcttatttcggtggatccaaggaaggtgctcctgatgtgaagatctggctgcagagatacagtcctttcttggttgaagatgggcgcttgctatgtgggtcatctgttgaaagctggaactcttggggtgcatggcttgaggtcacaaaagatgccggacgaacatggcggaagtatggccctatatatattgaaggcgaaacactaggggtgatccagccagttccctacatgactgccaatgggactattcgagtgttgctgcgatcttttgagacaattggtcgtgtctgcatggctgattctgctgatgggggtgtaacatggagttatgtgcacgagactgaccttcctaacccaaactctgggattgatggagttaagatgaaggatgggagagtactccttgcttacaacaccttctccagaggaacactaaaagttgcagtctccatggatgatggtgattcatggaacgatgtaatgacattggaagatactgaaggcatggagttttcatatcctgcagtgatccagaccatggatgatctcatacatatcacgtacacatacaaccggacacaaattaagtttgacctgcctactctcagctctcaggggagtaaagaccacggattaatccttcatatccaagaaaagtgtgacaaaatgaccaataagtggagcgtattgagggaagaatttacattttcagaaggcaacgtacctttcaaaacctgccatgcttccacaattgttgaggttcagaagaatatgtttctggtggcctactttgggggaacacaggaaggtgctgacgatgttaaaatttggctacagagatattacaatggctcgtggcactctcctgaagtagttgatgaagtgcccaatgttcctctgtggaaccctgttctcttccagcttccttctggtgagatcctccttttctacaaggttggcaagactgtcgaaagttggagtggatgcatgaaatgctcatcggatggtggtgttatctggtcaaagagagagcaactcccacctggtatccttggccctatcaagaacaaggtcaccaaggaccatggtaaaacatggaagaagtatggcccgatttacgtaagaggaaaaaccatgggagtgattcagccagtcctctaccagaccagcagtggcacaatccgcatgctgctgcgcccgtccgatgaagtaggtcgcatctgcgttgcggagtccaaggattctggtgtcaactggagctatgcgcaaccaaccgagctcccaaaccccaattctggtatcgatggcgttaagctcaaggatgggagggtggtgctggtatacaacagcacctcaagaggggtgctcaaggttgctgtttctcaggatgacggcgacaaatgggaggatgtgctgacactggaggagacccatggtgtggagttctcataccctgctgtaattcagacttctgatgggctggttcatgtgacatacacatacaaaaggactcaaatcaaggtagttttacccatgttgtttggtcttcttatggtaattaccagtttcatcatcttccatgttaagaatgaatttcttttggtcactgctctttgcagcatgtcgttctacaaccaagcgaggtttgatgcagtcagtaatcagacatgtggatttgtctcaggagtgaagtttgaactgtag

SEQ ID NO: 10944 - DNA, 329 bp, Oryza sativa
  Clone ID: TFbOSC3475j.C1.o1.fg
agctcgctgcggcgctcgacgaggagggcaagggcgtcgccgccgtcgctgctgccgtcaaggacgccaacaagcgcaccgccctgcacttcgccgcccgcgagggccgcacccacgtctgtcacttcctcatctccgacctcgccctccccgtcgaccccaaggacgacgatgggaacctggaccttatgaaactatttctctccaagggggttgatgttgaatcagaaagcgatgccggcacacccctcatatgggctgctggtcatggacagcaagaggcagtcaaacttttgcttcaacacgatgctaaggttgctcctcaataa

SEQ ID NO: 10945 - DNA, 699 bp, Oryza sativa
  Clone ID: TFbOSC900390j.C1.o19.fg
atggagatcacacctgctggctgcgaccatgagattcctgaacacctattcatgtgctctagactttacatcgcagcatttcgcggttacacagatgaggtcttcagtctcttagccggaagcagtggcgccgccgtggagccggcgaacagccggccgtcgccggcagcgcaagaacatgcgaatcaccatggaggctgcagcattcgcgaggtgaccgcagagcgcagcaaacttctccacatcgccgcgggggaaggacacggcgaactgatcgccgagctgtgcagtcacgacagcagcctcctctcctcgtcgagctcgtcggggaacacgccgctgcactgcgcggcgagggcggggcacgccagcgcggtccgtggcatcgtgcggctagcccgggccaacgtggaggaggacaggctgaaggcgatgctgcgtggcatgaacgccactggggacaccgcgctgcacctcgccgcgaggcacggccatggcgaggcggtggaggagctgatggaggtggcaccggagactgcgttggagctgaacggcggcggcgtgtcgccgctgtacctggcggtgatgagcaggtcggtgcgcgccgtaagggcgatactctcttgtagggatgcatcggctgctggccctagttctcagaatgcgctgcatgctgccgttctccaatcttcaggttag

SEQ ID NO: 10946 - DNA, 783 bp, Oryza sativa
  Clone ID: TFbOSC400831j.C1.o4.fg
atggggaggcgtcacggcggcggcggcggcggcggcggcggtcgtggccgtggaggccgaggccgcggaggaggcgaggaggatgacttgcatctgcacaaggccgcgcggtcgggagatttggcggcggcggagtctctgtgcgaggccaaccctctcgccctcaattccagagatcgcctctctcgcacccccatgggctggcatgttgagcttgtgaagtgcctttgcaagcacaaagctgatgttggagctgcagctatggatgacaccgctgcgatccattttgcctctcagaaaggccatgtagaggttgtccgtgagctgctggcatctggtgcctctgtgaaagcaaagaacaggaaaggcttcactgcgttgcactttgcttcgcagaactcccacctggagcttgtgaagtatttagtcaagaaaggtgcagacatcgccgcaaagacaaaagggggtcagacggctctacatgttgcagagaaggatgatgttcgtgatttcctgaaagaatgtgagcagtcattgaagaagggaggtgagcttccatcggagaagaaggatgattctgtgtcaacgattgctgagaagcctgacgatgacaagtcctcgggtgaggctacaaaagacgaagatgaagcggggtttggcgagaagaggaaaagcgatggcattgctgctgcactgaggtcaccggaactgaaaaaagccaaagtttcacttgggcatctaataagtgcaaatgacatggaggaagaggaagaagctgactag

SEQ ID NO: 10947 - DNA, 1212 bp, Oryza sativa
  Clone ID: TFbOSC415629j.C1.o25.fg
atgggtcacggtgtcagctgcgcccgcaccggcgacgagcacgacttcttccgggcggcgcagctcggcgacctcgacgccctggccgccctcctcgccgccgacccttccctcgctcgccgcgccaccctctacgaccgcctctccgtcctccacatcgccgccgccaatggccgcatcgaggtgctctccatgttcttggatcgcggggcgccgccggacgcggtgaatcggcacaagcagacgccgctgatgctcgcggccatgcacggcaagatcgactgcgtgctcaagctcctccaggccgacgcaaatatcttgatgttcgactcggtgcacgcgaggacctgcctccaccacgcggcgtactacggccacgtcgactgcctgcaggccatcctcgccgccgcgcagaccacgccggtggccgactcatgcttccctggaagcacgtcgcttcatttggctgctcgtagcgggaacttggattgcatcaggaagctgcttgcctggggagctgatcggctccaaagggattcggctgggagaattccctattctgttgcgctgaaacggaaccatggagcatgtgcagctttgctgaaccctacatcagcagagcccatggtgtggccatccccacttaagttcatcagtgagcttgaaccagaagctaaggctctcctggaagcagctctgatggaagccaacagggagagggagaagaaaatcctgaatggcacaaagtactccctgccatccccttcgcccggtgatgacagtgccgatgacgatgcatgctcagaggtgagcgacacggagctttgctgcatctgcttcgaccaggcttgcaccattgaggtgcaagactgtggacatcaaatgtgtgcaccgtgcacgctggcactgtgctgtcacaacaaacccaatccgacgaccctgacaccgccctcaccggcctgcccattctgccggggcagcatctcacggctggtggtggcccaaacaaggtctgcttgtgatcctgacaagccgtcatccctgcagctcacccggaagcggtcgcgtcgatctcacaacctcagtgagggcagcagcagcttcaaagggctaccttcggccatgggctccttctcaaagcttggccgtggctcgagccgcatggcggacagtgacagcagcaacctggacaagcctgagcacgatctatga

SEQ ID NO: 10948 - DNA, 1236 bp, Oryza sativa
  Clone ID: TFbOSC413065j.C1.o12.fg
atggcgccgcctcacgcgtgcagcccaggcgcgacgcagcggctgctcctccatgcggccgccgacggtgacctccgcctcttcaagaggattgctagtaggctggacggcggggaaggacgcctcaaggaggcggtggaggccgtgaaggaccgcggcgctggggctctgcaccaagccgcccgcaacgggaggaccgcgatgtgcgtgtacctggtcgaggaactccaggtggacatcaacgccgccaacgagtcagaggttgagaaatttgagatctatggcatttgtggtattgtgggatgcggtaactttgcaacactggagccgcacccgcacgttctgggtgggattgtgtatactgtgagttatcttcttgatcatggtgcaaatcctgataagcccaatgaacaagggcgtgctcctctccatttagcagttgaacaaggaaattgcgagatattaaaggtcttactagtgaaaggagctgatgttgattcatcttctgactgtgggacgccactgcatattgcagccgtgaaaagtcatgatggctgtatgaagattttattggaccaccatgcagattgtaataaggtattttccacattttatacacccctcatcgcagcgcttatggttcgctcattgaaatgtgtgaagcttctgattaaggctggtgctgatattaagggtgttggtacttttacccccttaattgctgctgcaactgaaggcttaactgatttctataagtgcttactcgaggctggtgctgatcctaatgtgcctgatgaaaacagacggaaagatgtggagatcctacttccagtaacttctcgtattccatctgtgtatgattggagtgttgatgggataattacttatgtaaacaaaaatgtgcaggcgacgaatcttgaacctgaagatggaacttgtactcgaataggagcatttgcttggcttaagatgggtgaaggaatgaaagctttgacagatgctcacctctgcaggatgttgtgtcccgattggccaaaggcctgctacagggaaggggctgctcacatgttcttaaaggcaaaatcgttttttatatgcaacaattattttgttttcaggactgataaggcttgcgatgcatttcttgatggtcttaaattggacccagcgaatatggagattgaaaatggtctacgggaggctttcaaatcattgaagaaatctcgtgctgcctga

SEQ ID NO: 10949 - DNA, 2250 bp, Oryza sativa
  Clone ID: TFbOSC401482j.C1.o8.fg
atgaacggcacgccgatctccgcgtccgccgcggccggcgtcgacggagtcggcgcggcggtggcgctggcggccgcgaccaagaagagtgccgccgcggcggccgccgtcgccgagatggcgaaaaccctcaccgtcgacacggacgacgccttcgcggggctcctcgagctcgccgcggacgacgacgcggagggcctgcgccgcgcgctggagcgcgccccgcccgccgccgcggacgaggcgggcctctggtacggccgccgcaaggtcctcgagcaccgcacgccgctgatggtcgcggccacctatggcagcctcgcggtgcttcgcctgctgctgtccctcccgtccgtcgatgtcaatcgccgctgtggctccgacggcaccaccgccctccactgtgcggcgtctggtggctcgccgtcttgtgtggaggccgtcaagctgctgcttgctgctggggctgatgctgatgccacggatgcttccggatatcgtccagctgatgtgatctctgttcctccaaagatgtttgacgccaagattgccctccaagatcttcttggatgcccaaaggctgggcatggcgttctccgggtggtgacaagggccgcaaactctatgttgtcacctgtatcatcccctacagcagaagatgcacgatctccatcagctgctgtgatgatgacgacaaagtttgcagatcttccaagggttgtgacatcggaaaagaaagaatatccagtggatccgtcccttcccgatatcaagaacagcatctatgcttccgatgagttccgcatgtactcatttaagatcaggccatgctcgcgggcgtactcacatgattggactgagtgcccgtttgttcacccaggggagaacgcacggcgtcgggaccctcgcaagtatcactacagctgtgtgccatgccccgactttagaaagggagtttgccggcgtggtgacatgtgtgaatatgctcatggcgtgttcgagtgttggctccatccagcacagtaccgtactcgcctttgcaaggatggcacaagctgtaatcgccgtgtctgtttctttgcgcatacaactgatgagctccgaccactatatgtttccactggatctgcagtaccatccccaagagcctcggcaacagctacaatggagatggctgcagcaatgggcttgatgcctggttctccatcatcagtttcagcagtcatgtccccatttacaccaccaatgtccccttcaggcaatgggatgcccccttcattgggctggcagcagccaaatgttccgacactacaccttccaggcagcagccttcagtcgagccggctccgtacctcacttagtgcaagggatatgcctgctgatgattactccctgatgcaggatattgattcacagcttataaatgatttgtgctattcacgtattggttcatcaacaggaaaccacacgtctcggaccaagtccctaaatccgtcaaacttggatgatctcttctctgctgagatggtctcttccccgaggtatagtaatgctgatcagggtggtatgttttcaccatctcacaaggctgctttccttaatcagttccagcaacagcagcaggcacttctttcaccaatcaacacagtcttctccccgaagtctgtggacaaccagcagttgccttcacactcatctctgttgcaagcatcacttggtatatcctcccctggccgcatgtctcctcgatgtgttgaatctgggtcccctatgaactctcatcttgctgctgctcttgctcagcgtgagaagcaacagcagacaatgagaagtctcagttctcgtgatcttgggccgagtgctgcaagagcatcaggtgttgttggctcccctctaagctcatcatggtcaaagtggggatcaccttcagggacacctgactggggtgttaatggtgaagaattgggcaagcttcgccggtcatcatcgtttgagctgagatctggtggtgatgatccagatctctcttgggtacacacactggttaaggaatctccaccagagaagcaagtcactactgctgaatccataaactctgttggaccttcaccactgatgcctcccagtgtaagcaacggtgaaggtcctagtctgaatgccccgctggatgggcatgaccaagctgctgttattggagcattgcttgaacagatgcagcttgatcagcatattggtagtctagcaacataa

SEQ ID NO: 10950 - DNA, 1023 bp, Oryza sativa
  Clone ID: TFbOSC900351j.C1.o1.fg
atggggaagcaggagcaggagaagatgctcctccaggccgcctacgatgacaacctccgcctcctcaggaagatggcgcgagggctggacaccgggcagggcgaggctgccgtcgtggcggcggtggcgggcagggccgacgggaaccgcgctctccacctggcggccgcccgaggaagcatggatgtcctcaggtacctcgtggaggacctccacctcagcgtcaaccagttcaatgccaaagtttgtattgttgaaggctcgatccatatgaccatacgggttccctatggtccttatgccatatttttcttggcaggacactgcgaaatagtagagttgtttctttcaagaggagttgatgtggatttagattctatcactgggaccccattgctgacagctgcgatgaatggccaatatagcacgatgaagattttattggagcatcacgctgatgttggtgctgatgtgaattttagagatcccaatggtgttacttgtgtgatggtcgcagcaaatcatggctctcctgtcatcatgaagtgcttactagatgctggtgctaattcaaatattccagatgaatttaataggactccaattgaagttgccgctaatcgaggcagaagggacattgttaaaatgttgtttcctttaacttcaccaatttcaacactgcctgattggagtatcgatggagttatttctcatgtgcaaacttttggtttgaagccaagggataatgatctgtctaaaaggaaaagtgctgaactgaaattacaagctagagaggctttcgagagagaggaatatatgcttgcaggacaacactacactaatgcaatagaacttaccactaatgctcatgataaggcaaccctgctagcaaacaggagcctgtgctggttgcgtttgtcaaccggcaatggggctcttgctgatgctaacatgtgcagaatgttgcggcccagttggcccaaagcatgctatcgacaaggggcagctttcatgtttctaaag

SEQ ID NO: 10951 - DNA, 437 bp, Oryza sativa
  Clone ID: TFbOSC401693j.C1.o5.gp
aagtcgcgcatgcggcgcatggcggcgacgacgcgggggaggcggcggcaccacttggcccaggcgagcggctggtagtggcggacgatgacgcgggcgagcgcctcctcgcgggcgcagatggcctcctggagcgcgctccacccttgctcgttttgcaggctccagtccgcgcccgccgccatcagcatctccgccgccgccgcgtcgcccaggcggacggcgaggtggagcggcgtctcccgcccggggacgtcgcgccggtcgatgaccgccgacgccgcctccgcgcgcgcctcctccgccacggagtcggcctccgtccggatctcctccggcctccgcgccctcggcagcgcgtccagcacccgccgcagcgccgcgtggtccctcgtcgccaccgcgtggtgcgcctcgctgtgcgcgtacctcgccgc

SEQ ID NO: 10952 - DNA, 1971 bp, Oryza sativa
  Clone ID: TFbOSC401693j.C1.o8.gm
atggccggtgtggacgcggcgaggtacgcgcacagcgaggcgcaccacgcggtggcgacgagggaccacgcggcgctgcggcgggtgctggacgcgctgccgagggcgcggaggccggaggagatccggacggaggccgactccgtggcggaggaggcgcgcgcggaggcggcgtcggcggtcatcgaccggcgcgacgtccccgggcgggagacgccgctccacctcgccgtccgcctgggcgacgcggcggcggcggagatgctgatggcggcgggcgcggactggagcctgcaaaacgagcaagggtggagcgcgctccaggaggccatctgcgcccgcgaggaggcgctcgcccgcgtcatcgtccgccactaccagccgctcgcctgggccaagtggtgccgccgcctcccccgcgtcgtcgccgccatgcgccgcatgcgcgacttctacatggagatcaccttccacttcgagagctccgtcatccccttcatctcccgcatcgccccctccgacacctaccgggtctggaagcgcggcgccaacctccgcgccgacatgaccctcgccggcttcgacggcttcaagatccagcgctccgaccagaccatactcttcctcggcgagggctccgacgacggcaaggtgcccccgggctccctctgcatgatcaaccacaaggacaaggaggtgatgaacgccctggaaggctctggcgcgcccgcctccgaggccgaggtgcagcaggaggtcaccgccatgtcgcagaccaacatcttccgccccggaatagacgtcacgcaggccgtgctgctcccgcagctcacatggcggcgccaggagaggaccgagtcggttgggccatggaaggccaaggtgtatgacatgcaccatgtgatggtcagtgtcaaatcaaggagggtccccggcgcgatgacggacgaggaattcttctcggcttgcaacgagaacgataccgagagcgagggcttcgacgatgttttgactgaagaggagaagaagcagttggaagccgcgcttaagatggactctcctgatggtgctggtggtgaaggccagtccgacacgtttgttggtcctcgacatagctgtgttgagccgagggagagagagataccaattgaggatttgagcatctccggaaatggggatagtaaacatgataagaaaggttggtttggtcattggggaaagagggttcagagtagcaagctagaggggacgaagaagatggcacctccaaggagttcgctctgtgtagatgagaaggtgagcgatatccttattgaatctccatcgaatgtacaaactaggccaggaaggcattcggtagatgtagtaagaggggatgagagcagaaggggcaaggaaagggattatcggagacctgctgcttcgtcggagtgtggacataggcgcaaagaaggtagcaaagaaagcgagtacaagaaaggtctaaggcctgttctctggctttctcctaacttccctcttcggactgaggagctcttgccactgcttgatattcttgcgaacaaggtgaaggcgatccgtcgcttgagagatctccttacaacaaaactgccaccaggaacttttccagtcaaggttgccatcccagttgtacccacaatcagggtacttgtgacattcacaaagtttgaagagctacagccattagaggagttcaccacaccgccatccagccctgacaatagcaagagcccagtggcgcagtcttcctcaagttcttggattcaatggatcaaggctccttaccatcagaacttctcaacagctccaggccccagcagccgtgtagaggacatccaggacccatttgtcatccctgctgattatgtgtggacgacaccagaagagaagaaaaagaagacacaagaaaacaagagtaagtcgaagaaaggccgaaatgcggcggcatag

SEQ ID NO: 10953 - DNA, 2034 bp, Oryza sativa
  Clone ID: TFbOSC900416j.C1.o6.gm
atggccggtgtggacgcggcgaggtacgcgcacagcgaggcgcaccacgcggtggcgacgagggaccacgcggcgctgcggcgggtgctggacgcgctgccgagggcgcggaggccggaggagatccggacggaggccgactccgtggcggaggaggcgcgcgcggaggcggcgtcggcggtcatcgaccggcgcgacgtccccgggcgggagacgccgctccacctcgccgtccgcctgggcgacgcggcggcggcggagatgctgatggcggcgggcgcggactggagcctgcaaaacgagcaagggtggagcgcgctccaggaggccatctgcgcccgcgaggaggcgctcgcccgcgtcatcgtccgccactaccagccgctcgcctgggccaagtggtgccgccgcctcccccgcgtcgtcgccgccatgcgccgcatgcgcgacttctacatggagatcaccttccacttcgagagctccgtcatccccttcatctcccgcatcgccccctccgacacctaccgggtctggaagcgcggcgccaacctccgcgccgacatgaccctcgccggcttcgacggcttcaagatccagcgctccgaccagaccatactcttcctcggcgagggctccgacgacggcaaggtgcccccgggctccctctgcatgatcaaccacaaggacaaggaggtgatgaacgccctggaaggctctggcgcgcccgcctccgaggccgaggtgcagcaggaggtcaccgccatgtcgcagaccaacatcttccgccccggaatagacgtcacgcaggccgtgctgctcccgcagctcacatggcggcgccaggagaggaccgagtcggttgggccatggaaggccaaggtgtatgacatgcaccatgtgatggtcagtgtcaaatcaaggagggtccccggcgcgatgacggacgaggaattcttctcggcttgcaacgagaacgataccgagagcgagggcttcgacgatgttttgactgaagaggagaagaagcagttggaagccgcgcttaagatggactctcctgatggtgctggtggtgaaggccagtccgacacgtttgttggtcctcgacatagctgtgttgagccgagggagagagagataccaattgaggatttgagcatctccggaaatggggatagtaaacatgataagaaaggttggtttggtcattggggaaagagggttcagagtagcaagctagaggggacgaagaagatggcacctccaaggagttcgctctgtgtagatgagaaggtgagcgatatccttattgaatctccatcgaatgtacaaactaggccaggaaggcattcggtagatgtagtaagaggggatgagagcagaaggggcaaggaaagggattatcggagacctgctgcttcgtcggagtgtggacataggcgcaaagaaggtagcaaagaaagcgagtacaagaaaggtctaaggcctgttctctggctttctcctaacttccctcttcggactgaggagctcttgccactgcttgatattcttgcgaacaaggtgaaggcgatccgtcgcttgagagatctccttacaacaaaactgccaccaggaacttttccagtcaaggttgccatcccagttgtacccacaatcagggtacttgtgacattcacaaagtttgaagagctacagccattagaggagttcaccacaccgccatccagccctgacaatagcaagagcccagtggcgcagtcttcctcaagttcttggattcaatggatcaaggctccttaccatcagaacttctcaacagctccaggccccagcagccgtgtagaggacatccaggacccatttgtcatccctgctgattatgtgtggacgacaccagaagagaagaaaaagaagacacaagaaaacaagagaaggatgagtgggagatttgaagatttcgacgagctgcagggatcaatattcatggttgaatttgtctttagtgtcttatctggtctgctattctga

SEQ ID NO: 10954 - DNA, 3012 bp, Oryza sativa
  Clone ID: TFbOSC410211j.C1.o17.fg
atggcggaggggcggcgctacgcgatcgcgccgcagctagatattgagcagatactgaaggaggctcaacgccgatggttacgtccgactgaaatttgtgaaatacttaagaattacaggagtttccgtattgctcctgaacctccaaataggcctccaagtggttcacttttcttgtttgatcggaaggtcctgagatatttcaggaaggacggtcataattggaggaagaaaagagatggaaagacagtcaaagaagcccatgaaaggttaaagtctggaagcattgatgtgcttcattgctactatgctcatggggaggagaatataaatttccaaaggaggagttattggatgttggaggaggattacatgcacattgtacttgtacattatctggaagtcaagctgaagtttcatttcctgcacatatatgggtatgaccatcaggctggaaaattaagctctcgtagtacgggacatgatgatgtactgcaagcatctcatgcggatagccctttaagtcaattgccttcacaaactaccgaaggagaaagctcagttagcggacaggcctctgaatatgatgaaacagaatcaggcagttatcaaggattacaggctacagcacctaatacaggcttctattctcatggtcaagataacttacccgtggttcttaacgagtcagaccttgggactgcatttaatggccctaatagtcagtttgatctatcattatggattgaagcaatgaaacctgacaaagggacccatcaaattcctctttaccaagctcctgttccctccgaacagtctccttttacaggaggcccaggaattgaatctttcacatttgatgaagtatacaacaatggactgagtatcaaggatgtagatggtgatgatacagatggagaaactccatggcagattccaaatgcaagtggtacatttgctacagcggacagctttcaacaaaatgataaaactttggaggaagccattaattaccctctcttgaaaactcaatcatctagtctttctgatatcataaaggacagttttaagaaaaatgacagtttcactagatggatgagcaaagagcttgctgaagtagatgattctcaaatcacatctagttctggagtgtactggaacagtgaagaagctgacaatatcattgaagcatcaagcagtgatcagtatactctgggaccagtgcttgcacaagatcagctgtttactatagttgatttttctccaacctggacatatgcaggttcaaagactagggtatttattaaaggtaatttcttaagttctgatgaagttaagagattaaaatggtcatgcatgtttggagaatttgaagtcccagctgagattatagcagatgatactcttgtatgtcattctccctcacacaagcctggcagggtccctttctatgtgacttgctccaatagattggcctgcagtgaagtacgggagtttgatttccgacctcagtacatggatgctccaagtccacttggttctacaaacaaaatatatctccagaagcgtcttgataaactattgtctgtggagcaggatgagatccagacaactctgtctaaccccacgaaggagattattgatttgagcaagaagataagttcattgatgatgaacaatgatgattggtctgagttgctaaagttggctgatgataatgagcctgccacagatgataagcaagatcagttccttcaaaaccgcattaaggaaaaattgcatatctggcttctccataaagtaggggatggaggcaaaggtcccagtatgttagatgaggaggggcagggtgtgcttcatttggcagctgccctagggtacgattgggcaataagaccaacaatagctgctggtgtgaatataaacttcagagatgctcatggatggactgcactccactgggctgcattttgtggaagagagcggacagtcgttgcacttatagcactaggtgcagctcctggagctgtaacagacccaacaccaagtttcccttcaggaagcacaccagctgatcttgcatcagccaacggacacaagggaatctctggtttcctagcagagtcttctttaacaagtcatctgcagactctcaatctaaaggaagccatgcgtagcagtgcaggagaaatatctggtctacctggcattgtaaatgttgctgatagaagcgcctcgcctttggcagttgaaggccatcagactggatctatgggagattcactaggtgctgttcgtaatgccgcccaagctgctgcccggatataccaagtttttaggatgcaatccttccagagaaaacaagcagttcagtatgaggatgaaaatggtgcgatatcagatgagcgtgccatgtcactcttgtctgctaaaccatccaaacctgcacagcttgatcctctgcatgctgctgcgactcgaatacaaaacaagttccgtggatggaagggaagaaaagaatttctgcttattagacagcgaatcgtcaagatccaggcgcatgtgcgaggtcaccaagtgagaaagcattatcgcaaaataatttggtctgttgggatagtggagaaggttatattgcgctggaggcgacgaggtgctgggttgcgtgggtttcgacccacagaaaatgcagtcacagagagtactagcagcagcagtggcaacgtgacccaaaacagacctgccgagaatgactatgatttcttacaagaaggacggaagcagactgaagaaaggctacagaaagctcttgccagagtgaaatccatggttcaatacccagatgccagggatcagtaccagaggattttgacggtggtaactaaaatgcaggaatcccaggctatgcaagaaaagatgctcgaggagtcgacagagatggatgaaggccttttgatgagcgaattcaaagaactgtgggatgacgacatgccaacgcctggatatttctag

SEQ ID NO: 10955 - DNA, 1371 bp, Oryza sativa
  Clone ID: TFbOSC1309j.C1.o3.gm
atgaccatggaagatggaagctgtcctccagcagtcgcccccagtggcagccaagccgaagattacggatcatggacactgaagcagaagcttgaggatctcatcaactgtgatcctatccatggtatcatgccaaaaaatcctaaatataaagcatatttcgaggaaaagttcgaggagaagttaagtttcatgggactgggagagtttctttaccctgatatcctcaccaacatggcctcccagaacgctctgcgttgtgccagggtcgcactccagggcacctctcctctcttgcgttgccgccgccgcgctgaccccaacacccgccaccgctacggcttcgcccccctgcacatggccgccgagaacttcagcgtcgacatggtcaagctcctcttccgctgcggcgcgtccgccaacatccgcaccaagggcgacaacgtcattgagggcctcctccctctccatgttgctgtggagaatgccagcatgcacaagtacattgaggatcattgggctcatggggaccatatcatcaacctcatcttcctcctttgtcttcctgagatgacggacaacattgtcgacgaggtatggaattacattcagcatgaagagaagcatgtccaggcagcaattttgctgctcgctgctgaaaagcagctccgtggtcgccttaacaagagcagtggcaaagcctctctgaacgggtttgatattgttaaaagccgcattggtgatgctcttagcaccatacatcttgagggcttaaatatggttcaagagggaaagaatggcagggcactaaagagattgaaagacaaaaaggaagcccttcttacagcacttgtactagtgtgcattgttcacaaagctggtgaagctcttgacggatacattcaaactcattcacagccgccgccgccgccgcggaggtggttctccctcgccggcgaattgagcctccccaacgatggagcggcaagctcagcaacacgggggctcgtgagcggcggcgctgagcaaggcggtggggttgtcgaggatcgcgaggagcgaggtggggtcgtcgaggagggcgaggagcaggcgaatcaagcaacgactccaacagcgcagatttccttcgccgcgtgccctcgttgcggcgagaaaacgtgcatcccagataggggccaagcggctgagctagggtgcgggcctcgtcgccacgtcgacctgaatccgagctggagcaacgagatcacgcgccaggtcggtgcacttcgttcacggcacctcctcctggcgcaccagctccggatccagctcctgtcggcggcggcgcaccagctcctgtcggcggcggcgcaccacctccgccggtag

SEQ ID NO: 10956 - DNA, 319 bp, Oryza sativa
  Clone ID: TFbOSC16667j.C1.o1.np
actcaagcttgcatgcctgcaggtcgaggggacacgccgccgtcgtcagcgtcttgctgaaccatggcgctgatgtaggcggacgcacccaacaggattgccaatttcgtcttcacaccgttggtttcgtcacttttggggggatcattggaatgcatgaagttgctctttcagcatgtagtcataccggctccatcagatttgtcaattgcttggtggaatctggggcagatccaaacattcccgacgaatttcatggggatcctctagagtcgacctgcaggcatgcaagcttgagtattctatagtgtcacctaaa

SEQ ID NO: 10957 - DNA, 3102 bp, Oryza sativa
  Clone ID: TFbOSC401695j.C1.o21.fg
atggcggcggcggcggacgcgcggcgcttcgcggtcgtgccgcagctagatattgcgcagatactgaaggaggctcaacaacgatggttgcgtcctgctgaaatttgcgaaatacttaaaaactacaaaagtttccgtattgcaccagaaccaccaaacaggcctcaaagtggctcgcttttcctatttgatcggaaagtattgagatactttaggaaggacggccataattggaggaagaaaaaggatggaaagactgtcaaagaagcacatgaaaggctgaaatctggaagtattgatgtgcttcactgctactatgcacatggagaagagaatgagaacttccaaaggaggacttactggatgttggaagaggattttatgcacattgttcttgtacattatcttgagaccaagggtgggaaatctcgtactaggggcaacaatgacatgcatcaagcagctgttatggatagtccattaagtcaattaccttcacaaactatagatggtgaaagctcacttagtggacagttctctgaatatgaagaggcagaatcaggaggaaccggataccactctttcactcagatgcagcagcagcaaaatggaattggacctgtgactgatgcttctatgttcagttctcgtgtttctgcttcatccataggtaattatcagggacaacatgctatgggacatacaacaaacttctattctagtagtcaacatgattcacctcttgttctcagtgatccaaaccttgaacttgcaaataatggacatgagtcattgtggaatggggttatgaaacctgatgaagggactgttcaaatgactcatctacaacctcctgttcatcctgagcaaggcatgttcaccacagaaggccaaggggttgaatatttgacattcgatgaagtatattctgatggactcagtctgaaggatataggtgctgcaggtgctgatgtagaaccattctggcagttttcttcaaacagctatctaacagaagccattgcatttcagctctctagtgctactgctgatatatctgcaacagagaacagcgtccaacaaaatgatggatctctaggggcagctattggcttcccatttttgaaaactcagtcatccaatctatctgacatcctgaaagacagctttaagaaatctgacagttttacaagatggatgagcaaagagcttcttgatgttgaggattcgcaaattcagtctagctcaggggcatactggaacactgaagaggcagatagtatcatcgaagcatcaagccgtgagccactggatcagttcaccgtggcccctatggttttgcaagaccagctattcagtatagttgatttttcgccaagctggacatatgcaggctcgaagaccaaggttttagttactggtagattcttacatgctaatgaagtcacggagagatgcaagtggtcatgcatgtttggagaagttgaaattcaagcggagatttcagcagatgggactcttcgatgttattctcccccgcataaaccaggcagagtccctttctatgtcacctgttccaacaggttagcctgtagtgaagtacgtgagtttgaatttcgaccaagtgactctcaatacatggatgctcctagcccgcttggtgcaaccaacaaagtttatttccagatacgtcttgacaacctattgtccctggggccagatgtgtaccaagctactataactaaccccagtaaggagatgatcgacttgagcaagaagattagttcactgttggcaaacaatgatgagtggtccaagttacttaaattggctgatgataatgagcctcttagccatgatcagcaggatcagtatgctgaaaacttaattaaggaaaaattgcatgtctggcttctccataaagtaggcgatggtggcaaaggacccagtgtgttagatgatgaggggctgggtgttcttcatcttgcagctgcccttggttatgattgggccataaggccaactgttactgctggtgtgaacataaatttcagagattttcatggatggactgcattacattgggctgcattttgtggcagagaacggactgtagtagcacttattgcactgggagcagctcctggagctttgacagatccacatcctaattaccctgctgaaagcacaccagcagaccttgcatctgctaacggacataagggcatctctggtttcctggcagagtcctctctgacaagtcatcttcaagccctcaatctgaaggaagccaatatgtctgaaatatctggtctacctggtattggagatgtaactgagagaaatgcatctcagcctgcaattggagattccttaggtgctgttcgaaatgccgctcaagctgctgctcgaatatatcaagttttcagggtgcaatccttccagaggaaacaagcggtccaatatgagggtgacaaaggtggcatatcggacgaacacgcactttcactcctgtctatgaagccatccaagtcaggccagcttgatcccctgcatgctgcagcatctcgtatacaaaataaatataggggatggaaggggagaaaggaatttcttctcttcagacaacgaattgtgaagatccaggctcatgtgcgaggccaccaggtgaggaagcattatcggaaaatagtttggtctgttgggatagtggagaaagttatattgcgctggaggcgaagaagggctgggttacgtggttttaggcctacagaaggtgcaatagagagcagcagtggtggcacaagtagcaatttggtcaaagataaacctgctggagatgattatgatttcttgcaagaaggacggaagcaaactgaagaaaggctgcagaaagctcttgccagagtgaagtccatggttcaatacccagaagcaagggatcagtaccaaaggattttgaatgttgtttcgaaaatgcaagagtctcagaccgtgcaagaaaagattttagacgaatcaaccgagatggatgaaggtgatttcatgagtgaattcaaggagctgtgggatgatgatacaccactccctggttatttctag

SEQ ID NO: 10958 - DNA, 603 bp, Oryza sativa
  Clone ID: TFbOSC400782j.C1.o8.gp
ttagcatggtcggcggcatcatttggtacccagattggggggttaccgttgctgtcgagcactgtgacatcctgggctttacattgcagtaaaagagcgacgatcttcggatggcacttccggattgcataatgaagggcagtttcaccgtttctgtctcgcatgttaatgagtttccgcagctcctttgactgcaaaacaaattccacaaactttatgtgacctttttgtacagctatgtggagacatgtggtgccatcgttttcaactagaaatggagcatctggacaatgtttaagaatctccatagcaacaccaacatggccctggtatgcggcactaccaagaagagggataccacttgtgctgattatatatcctaaagagaaatcatgttccaacaatacttttagcacgtcaatcttgttctcaagcacaccaaattgcattggattaacccgtgcgctgttctcttctcttgccaatttaggacgagtctcaataatctttttggcgatatctgagaaaaaaatgtgaaggcatggataatattaatggttaacaagcacatatagctagatcgatacatatagctagatcgat

SEQ ID NO: 10959 - DNA, 3222 bp, Oryza sativa
  Clone ID: TFbOSC400432j.C1.o22.fg
atggaggcatcgatatctccaccaggctcatcaaagcaagcaggtcttcgtagaccttctcctggaaactctcttaaggatctgtgtcttgtttccaagcaaggatcaatagctgaagtagaatctgctttagctttgttgaaaaagagtggtggaagcattgatggcagaaatgtgtttggtctttgtgctctccaccttgcaacgtggagaaatcatctaccaattgtgaggaggctcctcgatgctggtgctgatccagatgcaagggatggagaatctggctggagcagcctgcacagagcacttcattttggccacctgtgtgttgctagtgttcttctacagtttggagcatcccttgctttggaagacaccaagggacgtacacctgttgatcttctctcaggccctgtatcacaggccaatggagattctcctgattcagttgcaatggaagtcttcagttggggaagtgggacaaattatcagctgggaacaggcaatgcccacatacaaaaactaccatgcaaagtagatgccttgcatgggtcatacatcaaaacagttgctgcatcaaagttccacagtgtagcagttagttctgatggtgaattatacacatggggatttggtcgaggtggtcgtcttggtcatccagatatccatagtggccagacaactgctgtgattactcctcgccaagtaacagtaggattaggccgtaaacgagtgaatgttgtggcagcagcgaaacatcatactgtgattgctacagaggctggggagttgtttacgtggggatcaaatagagagggccagcttggttacccttctgtggatacccaaccaacaccacggcgcgttagttccctgaaagcaaggattatttctgtcgctgctgccaacaagcactcagctgctgttgctgatactggtgaagtgttcacctggggtagcaataaggagggccagctaggttatggcacttctaattcagcatccaactgcattccaagaatggtcgagtacttgaaaggaaaagcatttaaatgtgtgtctgcagcaaagtatcatactgtagcattaggaactgatggcgaggtgtttacttggggtcatcggcttgtgactccacgtcgtgctgtaatatctagatgtcttaagaagggtggaaatacaaacctgaagttccatcgtatggagcggcttcaggtgatctcagtggctgctggagtgatgcacaccactgttttaaccgcagatggtgctattttctactgggtttcatcggaccctgatttaagatgccgacagatattctctatgtgtggaaggaatgttgtgaacatctcagctggaaaatactggactgcattggctaccgcaggtggtgatgtttttatgtgggatgcaaagaaacataaggatgatctcccaatgtttactcgagtgcatggtgttaagcgagcaacgtcagtttgtgttggtgaaacacatatgcttgtgctttctagcatataccatcctgagtacccacccaaacctaaaatccaatgcaagaaagccatgttagaatggaatggtgggatggaagaattggatgaagacatcatgtttaatgatgtacagcctgacagcggtatatctggaagcgatggtgtaataaaaaagggagcacctagcctgaagagcttatgtgagaaagttgcgattgagcatattctggagccaaagaattctatacaacttcttgaagttgccgagtccttggaagctaaggagctcaagaagcactgcgaggatatagctattcgcaatcttgattacattttcacagtggcagctccatcagttatgaatgcttctcctgaaactcttgcaaacttagagagattgctggatgaaaaatcgtcagagccatggagtcatcgtcgccttcccacagtgacagctacttatcctgctgtcattgatagtgatgaagagggagatgaagcaggaggatttcttaggctcagggacagtcagaagtctgcatcgaagtcatatggaatatcaagttatgggaacttccttgagaaagatagcaatgctggacaagctgcctctaaacagatcagggcacttcgcaagaaactgcagcagattgagatgctcgaggctaaacaactggatggtcatcagcttgataatcagcagctagcaaagcttgagtcaagggctgcccttgagggtgaacttgcagaactcggcattcccacagatttaagaactccagtctgtgttacagaagaaaagacaaacaagaaatcgagtgtttctaagaaacagaagcggaaaaacaagcaggcagcacattctgatactcccttggtgaaaagggaggacagggaccaaatctatgtcaaggatcttcaggaagtcttaccagtccatatttctgcagaaaaggaagcaagcgttgctgattcaatcaaaccctcagagcatgtcactttcattaacacaaaggctatctcttgtccattggaaaacaaagcttcccagccaacttcgtcaaagaagaagaataggaaaggtggcttatcgttgtttctgagtggtgctcttgatgacaccccaaaaccaagcccgcctacccctgttgtgactgtcacaccaaagcatgaaggtcctgcctggggtggtgctaaggtaacaaagggatctgcttcccttcgagatattcaaagcgagcagaggaaaacaaacgagccgatcacggccaaggcaaaagaccgctttgaggactcacctgacagtgctgggcgcatgcgactttcttcgtttatacctgatgcacgctctacaccgataactgtcacacctgctcgtgtcgtgcctgcttctgaaggggataagagcacactatcctggtcgtcttctgctacctcacctaatgtattgcggccttctctcagggacatacagatgcaacaggagaaacggcaaactggcatctcccacagtccaaaaaccaggacatcgggcttcgctataccttcccagggcacatcacctgaggttggtggcatcaaggacaatgttcccaaccgctggttcaagccagaggccgacgctccgtcctcgattcgctcgatccagattgaagagcaggcgatgaaggacttcaagcgcttctatagcaacgtgaggattgtcaagccacaggtccagtga

SEQ ID NO: 10960 - DNA, 711 bp, Oryza sativa
  Clone ID: TFbOSC900400j.C1.o3.gm
atggcgtcgagcaacggagagcaacctccagaatcgccgaaggaagcaaatgctgcgcctgtagcagccaagcttgccatggcgtcagggcgcgatggatgtgagaggctcaaggatctggctgaaggaatctctgcgactgatcagcaagcctctggtgctgtatattcgctctcgctcctggagggactgactcttgactcggaccagaactccgcgctgcatgtggtggcagcctccggtgacagccaggcctgggaaccactcctcgcgctggctgctgctgcgcctgcgcgtgacagcagcggtgcagcgagggtggatgaccaggagctcctagcaaggaggaagaacaaggtcggtgagacggctttgcacggggcggtccgtgctggccacagcaaagtggtggaggtcctcatgaaggaggatccgggactggccggcgttgatcggcacgacggcacgtcaccgctgtaccttgccgtttcgttgggacgcttcgagattgcgtgggatctgcttgatatgagctctaggaaattatcttactccggaccagatggtcagaatgtcttgcacgtcgcagtacaacacccccaagggaaggagggatgtgtcacggagagggagggagaagaggagcaggtagcaggtggcttgccgctcctaccagccaacaacggcatgcacccccgccccaagccttaa

SEQ ID NO: 10961 - DNA, 513 bp, Oryza sativa
  Clone ID: TFbOSC900156j.C1.o11.hg
atggatctggacggggtcaccactgaagggaacactgcactccatgttgtggccacctgcggtgatggcccgggctacttgaggagtgcaggcgtcatctacagcaggtcccaacatctcatgttagtgcagaacaacaacggtgacacacctctgcactgcgctgtccgggctggccattccaaaatggttgatcatctaattgatctggttgaaactaaggacaactcccctagcagcgcgagactggaggaactcctgagaaaggaaaactgccgtaaggagacggcctttcatgatgccgtctgcattggaaataaggatataatcaccaaccttcttaaatattattcagaattggccggcttccttatggatgcaacagacaaaatgcattgcacgcagccgttctacaagaccaaggtcaatatgtcatacacaaatgcaaaactcatgcttttgcaagttggggcccacaatgcaaataggaaatgggtgctaaggagtgcctag

SEQ ID NO: 10962 - DNA, 2064 bp, Oryza sativa
  Clone ID: TFbOSC900348j.C1.o23.fg
atggatcatgttgctggtgttcaatttgccgagcaaatcgagcaagctttgagaaaggccgacgagctcggcgacgatgacctgagagccgcgttacgtcgtgcgaggaactcaccggctgacacggcgttccaactccctctgctgcaacttcccgtagaagaccccgtccatgccggagcagcagccacccagccggagcagcagaatgcgggacgcaggttgatgtgcccagagctgtatcgcgccgccttctctggatctgtagacaagctccaggaacttcttgtttcacccagtggaacggcagcagaggaacaaggaagaaggcatgacggccagtgcgtcctggacgagaccaccgcagggctgaacaccgttcttcacttggcggccagtcaagggaagattgggcttgtgaggaagctctgcgatggcgacgacacggccgcggcggcggtggcggcgctgctgccgaaagagaccaccaagtcggagacggcgttgcaccacgccgcgagggcggggaggcgcgacatggtgtcccttctcatcaggctagctcagatgcatggatccggcgctcccgggctactggtgacgaagaacagcgcgggcgacacggcattgcacgtggcggcacggcacgggcgcgtggcggtggtgaaggtcctgatggtggccgctccggccttgtcttgcggtgtgaacaacttcggaatgtcgccgctgtacctcgccgtcgtcgggcggtcgattggcgccgtgaaagccatcgtccagtggaagcacgcgtctgcgtctggccccaagaggcagaacgctttgcacgcagctgttcttcagagcgtagaaatcacacgcgagttattgtcatggaactcgaatctggccaaggaacccgatgaatcggaaagcactccgctgcactacgcggcgtctgatggcgtccgagagatcatcagcatgttgattcagtcgatgccatcggctatgtacatcccagacaaagaaggattgacacctcttcatgtcgcagcgaagatgggtcatcttgatgtcatccaagacatgctgaaagaatgcccagactctgccgagcttgtcgacaacgagggcagaaacattctccatctggccatcgagagaggccatgaacctgtagtgtcatacatccttggcgatccatctcttgctgagcttttcaatgagcaagacaagaaagggaacacacccatgcactacgcggtgaaggccgggaacccgcgtctcgcaattttggagagcagaaacatcaaactgaacattgttaacaacgaagggcaaacaccattcgacctcgcatcaaacacaaccggtttcttgcacatgattggttttttgctcagactgtcagccaatggagctcggttcggggcgcaacgacaagattgcatatcccaatggagcagcaaaaatgttaaggaatggaacgagaaaacgaccaagaaccttggcatcgtcgccgtgctgatcgccaccatcgccctgaccgccatgttcaacgtgccaggagggtacaactccgacggcgtggcgaacctccgcgcgacgacgccttacaacgccttcctggtgctcgacaccgtggccatggcgtcctccgtgatcgccaccatgctcctcacctacggcaggggggcggcacgctcaagcacggcgtggatatgcatgtccctcatcttcctctggatggcgctgatgagcatgatcctggcgttcatggccgccgtcgtctccgggctggacagcacgaccaccaagtacatcctgtggagcatcttcgtgctgccgttcgccttcttggtcgcgctcagcttcgtctgggccgtgccagcgccgaccttcaccacactgcttctgttgcctcgtgccctcgccggagaagacagtgggtggacgcgtcggcgcatcgggcggcgtttccggtcggtgggggtttacctgttagttctgtacttgttctggttcttgaatgctgtggcgtttttccttaccgtctatgtcgtcgtaaacgcgatctga

SEQ ID NO: 10963 - DNA, 1137 bp, Oryza sativa
  Clone ID: TFbOSC900390j.C1.o21.fg
atggtttctttgttactgcagtggaaacccgcacttcttagcgattatgacagcagcaagagtagcccactgcattttgcttcatctgacggggattgctccatcatccaagaaatgttaactcatgcgccacctagcactgccttcatgctggacaatgaaggcctttcacctttgcatgttgcagcattgatgggccatgcagctatagtccatttattgctacagttttgtccttcttcggcagacattcgcgacaactatggccgaacctttctgcatgcagcagctatgaaaggccattcttccatcatctcatatgctataaagaagaagattcttgagcatcttttgaatgcgcaagacaaggaggggaacacaacacttcatttagctgttattgcaggggaatgcaaggttgtttctaaactattatcaagtggaaagatgcaagccaacatcatgaacaatgttggccacgcaccaactgaccttatcaaaaattgtaaaggtttctactcaatggacatcatgaaatggagagagactacatcaaaaaatctggctgttgtttcaacacttgtggcaacaattgccttctctgctgcattcaacattcctggatcatatggaaatgatgggagagcgaatctagcagggaatagcttgtatagtgctttccttattctggacaccttctctgtggtcacttcagtcatggcaacaatactactagtctatgggagagcttcaaggtctcaacgctcgtggctaggcttcatggtcacaatgcactttctttggttgtcactaaacagcatggtgttaggcttctttgcagctctagcggcggtgatgagtaaggagaagggcataaagattgcaatgtcccaggtgatctactatgggatgtacatcctgacgacgctgctttcaatcttagcaatgccaggatcatttacaagcattgtgaagttcctcatcagtgctcccaaggagcgacaacgacacactaagagacagattagccggcagtatccctttgccatcttttacattgtcaacgctgttttgttcgttatcataaatagtctagcaatggcatcattcgaagtggctagaaatcttagttactga

SEQ ID NO: 10964 - DNA, 453 bp, Oryza sativa
  Clone ID: TFbOSC401078j.C1.o13.fg
atgggcgcggaatcggagcaaccaacggcggcggcggcgaccgccgagcaggcgcaggatctcatcgacgccgctaggtacgatgacctggaggacgtcgtcgcgctgttcaccgccggtgtttccctagactccgcggattcgcaaggacgaacggcacttcatatggcctctgccaatggacatctcgctgtggtgcagtacttgatccaaaatggagcgaatgttaatgctacaaactcagagaagaacacacccctccattgggcatgcctcaatggacatatcgaggtaattaaagcgttgatatgcgctggggctagtgtcagtgcactgaacagccatgagaaaacccctatggatgaagcagtgacgaagggcaagatggaggtgatcgatgcaatcggtgcagcagtagctcaagcagaactcgatggtgtcactgtctcctaa

SEQ ID NO: 10965 - DNA, 2472 bp, Oryza sativa
  Clone ID: TFbOSC401583j.C1.o5.fg
atgtctctcccccgccgctttggatcaatcgtcagcgactcaccattcggcgactcggccattgacagcgatagtcgcacgggttcttgcttatttggatccgttcttccggggagcgagctaaccgggcgagcgagatgcagcaccagcaagctaagtttggttctgagtaaccgggctggtgggttagggtttgggggaaatcaagaaggcgcaagtggtccatattttcttggtggtgcttggtttcttttcaaccgtagagttcttcggtacttcagaaatgatgggtatgaatggcgaaaaaagaagaatgggaagactattgctgaagcccatgagcgccttaaggttgataatgttgatgcactgaattgctactatgcacacgcagacaaaaactctacatttcagaggcgtatatattggatgcttgatccggcttatgatcacatagtttttgtccactacagagatgttcaagagggcagcatttcagtatcagcactgaatgattcatcaacatccaatcagaatggcagtggtagcagagctgaggctcaaagttcacccggattgactagcgagctatttgccccatgtcttaattcatgcagtccaggatctgcggaagaagttagttcccagattatggccataaacaacgaaacaaatagcgttagtcaacctgattgggttcaacattgtaatcaggcagcgctgcgaaaacttaaggtgcagctgagtctggaagatagggaagatcatgatgtcgatgccaaagatattccatcaaacagtgaacctatcactgtgtatgggattcagaatgaagaaccaggcacttgtagaaatcttgcagatgtttttagtggactggagttcagcaaagaaaatcatcctgaagaaaccggactccctttttccagcactattgatgtgctgaaaaattcagacacttggttggaggaggatcagattgaagcaattctgcattcagcatctatgatagtgactgaaaaccaatggttcaatattcgtgaggtttccccagaatggtcctattgttctgaaagtacaaaggttatcattgcaggagacttccttcgtgatccctctcatggttcatgggcaatagtatttggcgatgttaagttgcttttcgatggtcatgtttctgagcaatttttaaagtttggcttgccattcccaaatcttgaatgcggactccaagttagcccatctgaaattatgaagggggcatctgagcggctgaaccgtgacaccgcagtaaattgtgtcatggaagtactgcttaacaacaagtttgaagagtggctgttttctaaatatgaacaaaatagtgaagggaatcattttctccctaggcaataccatggtgttatacatacaattgctgccttggggtacaactgggctttgaaacttctgcttaattcaggtgtacttgtaaactaccgtgatgcaaatggatggactgctttacattgggctgcacgatttggcagggaagagacggtagtgctccttcttgatgcaggtgccgcagctggtgcactgtcagacccaacagcacaagatcctgctgccaaaacacctgcttcagtagcttctgcatatggtttcaagggcctttctgcgtatctttcagaagcagaactaatagctcatcttcattctctcgaatcaaaagaaaacgggtcttctggagatcaaatatcaagagttgtgggcagaatatcagacacatctgcccatgcacaaagtggtagcgatgatcagcttgcactgaaggaatccctaggagctatgcgatatgctgttcaagctgccgggcgcatacaaactgccttccgtattttttccttcaggaagaaacaacaagcaggtcttcagaatagaggtaaccacattatatccattcgtgaggtaggtgctgcttcacacggtatgcttgagaaagccgcgttatctatccagaagaacttcaggtgctggaagaaacgcaaagaatttctgaaaatacgcaaaaatgtcatcaagatacaggcgcgtgtcagagctcatcaacaacataacaagtacaaggagttacttcgaagtgtgggcatccttgagaaggtcatgcttagatggtaccgaaagggtgttggtttacgaggattccaccctggggcaatagcaatgccaatcgatgaagaggacgaagatgacgtagccaaggttttccggaagcaaagagtggaaacagctctcaacaaagctgtttcaagggtatcatcgatcatcgacagtcctgtcgcgagacagcaataccgaaggatgctcaaaatgcacaaacaaaacaaggatgatgatgaaaaagtagaagtttctccagcatctcatgtttatggcagtggcagtcatcacatgtgttggctaagccacaacaacaaagcaatgcactag

SEQ ID NO: 10966 - DNA, 1137 bp, Oryza sativa
  Clone ID: TFbOSC900390j.C1.o23.fg
atggagcctgcaggctgcagcacagacgaggtgaccggagaccgtagcacgcttctccacatcgctgcgtggaaagggcacagcgacctgattgctcagctatgccgctggggaaacggcagcctcatcacctcggtgaactcatcggggtacacgccgctgcactgcgcggcgggcgcagggcatgccggcgcggtcgaggccatcatccgggcgctggctgcaggagccaacgtggaggagggcaggctgcaggagatcctgcgcggcaggaacgaggccggggacacgccgctgcacctcgccgcgaggcacggccatggcgaggcggcggaggcgctggtgcgggtggatcctgggctggcggccgagctgaacggcgcgggggtgtcgtcgctgtacctggcagtgatgagcgggtcagtgcgcgccgtcagagcaattctctggtgtcggaatgcatcagctgtcggccccaagtcgcagaatgcgctgcatgctgctgttctccaaagttcaggtgattactttgttgacaacttggcattttatatctgcacgggccagcgacaggaggagcacaccggcctaccggagaggaggggaagagagtatccccagccgcttgaggagcctcctgcgctcggcctcctcccaagccctacccttccgcttgtcgtcatcgtgggggaccacagccaacgatgccatggggcggccatccccatcgatctgctctctccgcacaggaacacggctacatccctatttgttcacatcgccaatcttggccagtgtcagcggcttgggatgaagaggatgccgttgcccacggcctcctcggtggccaccatgccccgcgcctcgaacgagtgccgctgccacttgagtacatctgaggtgggggccatcggatttgatgaagcgacggcgacggtggcctcctcaaccatcggcacggtctcgtcgacagcgatgggagagagaagggagatcacggttgccgtcgttagctctggcctcgagccgccactctgccgtcgggccaaccccgccgccggtgtggccagcgctgccatctctctcactgctgcttgcctgccatcgccattggtgcatccagcagtggaggagtag

SEQ ID NO: 10967 - DNA, 2028 bp, Oryza sativa
  Clone ID: TFbOSC101199j.C1.o3.fg
atggaggaggaatcccaatcccaatcccatttcccgctccggtgggagagcaccggcgaccaatggtggtacgcgacgcccatcgactgggcggcggcgagcggccactacgacgtcgtccgggagctcctccgcctcgacgccaacctcctcatcaagctcacctcgctccgccgcatccgccgcctcgagtccgtctgggacgacgacatgcgcttcgccgacgccgccaggaaccgcgccgccgtcgcccgccgcctgctccacgactgcgagccccccaggggcgccgccgctggcggcggaagccggcccaaccggctcatccgcgcgggctacggcggctggctcctctacacggcggccgccgccggggacgcggccttcgtgcgggagctgctcgggaggcagccgctgctggtgttcggcgagggggagtacggcgtcaccgacgtgctctacgccgcggccaggagcgacagctccgaggtgttccggctgctgctcagcgcggtgctgtccccgcccgagtgctccgccgggggagaaggcgacggcggcaccgccgccattgctgggggtttcatgttccggtgcgagatgatgaaccgcgcgatgcacgccgcggcaaggggaggcaactggaggtcctcagggagctcctgcaggggtgctccgacgcgtcggcgttccgggacgctcagggatcgacgatcttgcacgccgcggccgcgagggggcagcttgagctgtcacgaatgtttggttgtgaaggatcttattgcctctttcgatatagtcaactccacagacgagcaagggaatacggcattgcatctagccgcctttcgaggtcatttgcccgtggtcaaagccctcatcactgcatccccatcacttatatcagctacaaatgaagttggcgacacgttccttcatatggcgctgactggctttaggaccccaggattccgaaggcttgatcgtcagatggagcttatgaagcaattgattggtggagtgatcatggatttaagcagcattatcaatatgcaaaacgacgatggaaggacagttcttcacttggctgtgattggcaatctgcactctagccttgttgagctcttgatgactgcaccgttgattgaccttaatgtccgggacaatgatggcatgactcctctggatttacttaggaaacagccaccaacagcatcgtctgagatactcatcaagcagcttattttggctggtggaattgcaaattcaatggaccatgagaccagatcagccattgcttctcagctaaagatgcactgtatcgtaggcagcccgggaacatccttcaagatcccagatgccgagatcttcctccatgcaggtatcgatgcgtcagacatcagcgaaagaacgaactcattctctagcgttggacagagtgagccagaatttccggaatccagtcgtaagaagctgaactctatgcaaaatgcagcgaaacatctcaagatcctactcagatggcccctccgcaaggagaagaaatcatcatccggtgcccgaaatgaactggacgacgacgcatcctctgtggattcagtcaagagctggagccacggggagaccccgacaccgctgaggcagaagtactccaggatgagctccctgttcaacaacaagcggaccatggcagccaggatcggctcaccgagtccatcgatgaagaagagcttcgcagatggcctcgcacatggcgtgatgcagcccgaatcgccttcaggctcgggctcctggtcgtcgtcgtccttggtcgacaggattgaagccgtccatctggacaagaatggccaagcatctcctgataccagtgtggtgatcaggcgtacacccaagaagcacgggtctttgaacagcaggctcatgaaccaatacttctgcatcggagcgcaggggatagctgtcgaggactcaaccacggggcagcgatcaagtcggatgttcagaagttcacttctgtcagctgcctga

SEQ ID NO: 10968 - DNA, 1716 bp, Oryza sativa
  Clone ID: TFbOSC900001j.C1.o24.fg
atggcggagatcgaggtggtcggcgacggcggcggcggcggcggaggtggaggggtgaagcagggggtggtggaggtgagggaggcgcgggcgaacggcggggagggggaccccgtggtggacgtgtactccgccgcggcgtacggggacctggagcgtctgcgcgggttcgtggagcgggacggcggcgcgtcgctcgcggcgcccgacggcaacggctaccacgcgctccagtgggccacgctcaacaactacccccacgtcgcgctctacatcatcgagcatggaggcgacgtcaacgccggggacaatgcgcagcagacggccctgcactgggcggcggtgcgtggagccatagctgcggcggacgtgttgctggagaacggtgcgagggtcgaggcggccgatgtgaatggctaccgggcagttcatgttgcagctcagtatggacaaacagcattcttgcaccacattatctcaaagtacggtgcagactttgagtgtttggacaatgatgggaggagtccattgcactgggctgcctacaaaggaaatgctgatacaattaggttactgctgtttatggatgctaatcaagtaaggcaagacaaaaatggttgtactccattacactgggcagcaataagaggaaattatgaggtgtgcactgttcttgtacatgctggtaccaaggaggaactcacattgaaggatagcggtgggtttactcctgtggaacttgcaaacgacaaaggtcatcggcatctttcctatatcctttccaatgctacaaaagtaacatttgaagacaagtactgctcagggagatcgcggaagattggatatgcttctatcctgttttgctttcttattgtccttatcaccctttttctgaactcaattatttttgcaccgaatttttctagaataactgccgctgttggtatttggtcatggggtgctatttctcttgcctttgcttcattggtgatgttctacagagtaagcagaaaaaatccaggctacatccaagccaataccaagcgacttgatccaaaggaaccacttatggagattgaccttaattcttctgcttggacaggcaattggtctcagttatgccccacatgcaagataattcgcccaatgcgctccaaacattgtccaacttgtaagcactgtgttgagcagtttgaccatcactgtccttggatatcaaattgtgttggaaggagaaataagtgggacttttttgtgttcctttgtatgggaacaactacagcatttctgggcgctgcgattgggttccacagactttggacagagcccattatactctcatcttctgagtcatggattaacttcatgctgtcaaaccatcctggtgctgtactgttcatgttcatggatgtctttttattgactggagcgcttattctgacaggagcacaagcaacacagcttaaagtattctatgtttctattactcccctatggcgtaagttcttggaagagcaaatgatagcacgcaatctcacaactaatgaagcagcaaaccagtcacgctatgcatatcttcgggggcctgacggacgcttcaggaatccttacagtcgaggatgccggaggaactgcgctgattttcttgtaaatggatacagtaatgacgaggaggctgcatggccaacgcttcaacaaacagtgcaacgaagctag

SEQ ID NO: 10969 - DNA, 2073 bp, Oryza sativa
  Clone ID: TFbOSC900367j.C1.o17.fg
atggcggagatcgaggtggtcggcgacggcggcggcggcggcggaggtggaggggtgaagcagggggtggtggaggtgagggaggcgcgggcgaacggcggggagggggaccccgtggtggacgtgtactccgccgcggcgtacggggacctggagcgtctgcgcgggttcgtggagcgggacggcggcgcgtcgctcgcggcgcccgacggcaacggctaccacgcgctccagtgggccacgctcaacaactacccccacgtcgcgctctacatcatcgagcatggaggcgacgtcaacgccggggacaatgcgcagcagacggccctgcactgggcggcggtgcgtggagccatagctgcggcggacgtgttgctggagaacggtgcgagggtcgaggcggccgatgtgaatggctaccgggcagttcatgttgcagctcagtatggacaaacagcattcttgcaccacattatctcaaagtacggtgcagactttgagtgtttggacaatgatgggaggagtccattgcactgggctgcctacaaaggaaatgctgatacaattaggttactgctgtttatggatgctaatcaagtaaggcaagacaaaaatggttgtactccattacactgggcagcaataagaggaaattatgaggtgtgcactgttcttgtacatgctggtaccaaggaggaactcacattgaaggatagcggtgggtttactcctgtggaacttgcaaacgacaaaggtcatcggcatctttcctatatcctttccaatgctacaaaagtaacatttgaagacaagtactgctcagggagatcgcggaagattggatatgcttctatcctgttttgctttcttattgtccttatcaccctttttctgaactcaattatttttgcaccgaatttttctagaataactgccgctgttggtatttggtcatggggtgctatttctcttgcctttgcttcattggtgatgttctacagagtaagcagaaaaaatccaggctacatccaagccaataccaagcgacttgatccaaaggaaccacttatggagattgaccttaattcttctgcttggacaggcaattggtctcagttatgccccacatgcaagataattcgcccaatgcgctccaaacattgtccaacttgtaagcactgtgttgagcagtttgaccatcactgtccttggatatcaaattgtgttggaaggagaaataagtgggacttttttgtgttcctttgtatgggaacaactacagcatttctgggcgctgcgattgggttccacagactttggacagagcccattatactctcatcttctgagtcatggattaacttcatgctgtcaaaccatcctggtgctgtactgttcatgttcatggatgtctttttattgactggagcgcttattctgacaggagcacaagcaacacagcttaaagtattctatgtttctattactcccctatggcgtaagttcttggaagagcaaatgatagcacgcaatctcacaactaatgaagcagcaaaccagtcacgctatgcatatcttcgggggcctgacggacgcttcaggaatccttacagtcgaggatgccggaggaactgcgctgattttcttgaaggcatttctcctaatttacttcctttatttgcatttccagcagtgatggccactacgacctgctccaagatcgtgtcaggtcgatgcaaaaacgaaatcgtttatagagacgatagatcttgcattcacagctactccctccggttaggacaatttgacgttttcgagtctctgatttttttatggattcgggtggcgccggcggagttcgagcgggcggccgccggggcggatgggcagcgggcgaagtccatggctctcaacagtgagggcctcgagggtcttgttccacgggcaaagttgctattgtcacttggcagtacattttttcttggatttgcccctttgattcttgttacagtttctctgtttgctgttctttatgtggacagaaagtgctttgctcctatttcacatgcatag

SEQ ID NO: 10970 - DNA, 648 bp, Oryza sativa
  unsure (1)..(648): unsure at all n locations
  Clone ID: TFbOSC4136j.C1.o1.np
ctagcggttgctacagatgcgttgagctttggttaatctatccggcgagagataatgggcgagcttgctgatctcgttgtcgtgccgtcgcagccgccgctcgccggcggccggcgggacaggctggcggcgctgctggagctcgcggcggcggatgatgttgatgggctcaggggggcgctcgcggagggaggcgaggaggcggcggagttggctgatggggtcgggctgtggtatggtcggagcaaggcgtccgaggcgcgcacgccgctgatggtggcggcgacgtacggcatcgccggagtggtctcgctgctggtgggcctcggcggttgcgtcgacgtcaaccgtcgccctggagccgacngcgccccgcgctccactgcgccgcctccggtggctcgcgcaacgccgtcgctgttgtcaagctgcttttggccgctggcgccgatccggccacccccgattccgccggccgcttccgcgccggcgtcatcctagctcctccggcttcgccagatgcccttggcgatctcgaggtgctcctcgggcgccgccgagcactcgccgtggcgacctcggtggcttcaggttcgtcatcccctccgctctctccttaccagatgagggcaacaggtcgccctcgtc

SEQ ID NO: 10971 - DNA, 1974 bp, Oryza sativa
  Clone ID: TFbOSC12505j.C1.o11.fg
atgggcgagcttgctgatctcgttgtcgtgccgtcgcagccgccgctcgccggcggccggcgggacaggctggcggcgctgctggagctcgcggcggcggatgatgttgatgggctcaggggggcgctcgcggagggaggcgaggaggcggcggagttggctgatggggtcgggctgtggtatggtcggagcaaggcgtacgaggcgcgcacgccgctgatggtggcggcgacgtacggcagcgccggggtggtctcgctgctggtgggcctcggcggttgcgtcgacgtcaaccgtcgccctggagccgacggcgccaccgcgctccactgcgccgcctccggtggctcgcgcaacgccgtcgctgttgtcaagctgcttttggccgctggcgccgatccggccacccccgattccgccggccgcttccccgccgacgtcatcctagctcctccggcttcgccagatgcccttggcgatctcgaggtgctcctcggccgccgccgagcactcgccgtggcgacctcggtggcttcaggttcgtcatcccctccgctctcgtcctcaccagatgagggcaacaggtcgccctcgtcgcgttcgtcgtcgctgtctcccatcactgtggatcgtgggaagaaggagtatccggtggatccaactctgccggacatcaagagcagcgtgtatgcttcggatgagttccgcatgtttgcgttcaaggtccggccctgctcccgtgcctactcacacgactggactgagtgcccgtttgtgcaccccggcgagaacgcccgccgccgtgatccccgcaagcacccatacactgctgtgccttgccccaactttcgccggcctggtggctgccctagcggcgatagctgtgagttctcgcatggcgtgtttgagagctggctacacccatcacagtatcgcacaaggctctgcaaggagggagcagcttgcgcccgtcgcatttgcttctttgcccatgatgaggatgagctccgccatgtgcctcacaacagtggtgccggcctgctgtctccccgcgcttcttcatccattgatatgactgctgcagctgcgctcgggcttcttccaggttctcctaccagacactttgcaccgccgcctgtgtcaccatctgctgggagcaatggaggagctgctgctgcgcattggctccaaggcagtaggctgcgttcttctttcaatgcaagggatgctgctgttgatgaccttggcatgctcctcgaatgggaatcacaataccttggggcactctgcctgccacccagcagccgcccccaaccacgcctttcagctggtctgagtatcaggccaacaattgctccatccaatcttgaagacatgtatgcttcagacatggcaatgtctccgaggttccctaatgaccaaggtcactcagtctactcaccagcccacaaatcagccctcctcaacaagcttcatcaacagaagggcctcttatcacctgttaacaccaacagaatgtactccccaagggctcttgatccgtcatctttggcacattctccatttggtggcatgtctccccggtccccccgtaccatggaacctacatcacccctaagtgctcgtgtaggagcccctgccacacagcggccttctgttggttcaccacggaattccagtgcttggggcaccgtggggtccccgatgggtaaggttgactggggtgtcgatagcgaggagctagtccgcttgagacgccctgcacaaccagggtttggagaagatgagacagatgtatcatgggtgcagtcactggtaagcaatgctgagcttaatggcaagaggggcgaagtacaaggcatgcctggtacttctgcattgatgaacaggcctgacctgaacaatcagggtgacttgttggaccagacggtgatcggtgcttggcttgagcagatgcacctggatcagaagtga

SEQ ID NO: 10972 - DNA, 1281 bp, Oryza sativa
  Clone ID: TFbOSC401716j.C1.o83.fg
atggccaccgcgaagccagcctctccctcgccgccgccgagcaccgccgtcgtcccggccgccaataccgcagcagccgcggacaagccggcggtcgagcagctcctggaggtggcggaggacgaggtcgtcatcgacttcaagcccaacgccaagtgccgcgctgacctccgcctccgctcgctgcacccgtccctccccgtcgccttcaaggtccagacctcctcccctctcaagttcctcgtcagccccccgcgcggcgccgtgcagccgctctcgtcggcctccctccgcgtcgtgctccgcccgcagcagcacgctcccgcgtccttcccgcgctcccgaggcgaccgcttcctcgtgctctcctccctctccgccgcgcacctcgactcctccgcctcctccagcgccgctaccggcggcaccaccgccatccgcctccgcgtgttcttcggcgggccgtacctgctccgcctcgcggcggaagccggggacgccgcggccgtgcgcctcatcctgcgccggcagccgcacctcctgccgctcctggagcccgaggcggcggtgcccgacggcgccgagcagtgggcgccactgcacgcggtggccgcgaggggggacaccggggaggtgaggcgcctggggccggactcgatgggagcgcgcgaccgtgaggggaggaccgccctccacgttgccgccgcggccggggaggcggaggcggcggcggcgctggtggacatgggcgccgacgccgcggcgaccgacgcgcgcgggaggactccactggacgtcgcgcgcgagaagggctatcaagaagtggtggacgtcctggaacggtgggaactggtcatgacggcggcgaggcgaggcgacctccagagcctcgagtccctcctcagcaagcgcgccggcgtccggggacgtgaccagtacggcctgacggcgctccaccttgctgccatcaaagggcactgcgacgtgatcgcgctgctcgccgggtcaggctgcatggacatcgagtgcgaggacgtggaagggcaccgcccgctgcacctcgccgtcgaaggcggcagcgccgaggccgtcgagctgctgctcgacatgggcgccgaagtgcacgccgccaccaggcggggcgcgacgccgctccagatggccgtgacgatggggtacgaggccatcgcgctgctgctgcgaggccgtggcgccgacgaggcggccgcgccggcgttgtgcatcgcgtcctcgtcttcctcctcgatatcgtgtgcgtag

SEQ ID NO: 10973 - DNA, 1335 bp, Oryza sativa
  Clone ID: TFbOSC418098j.C1.o3.fg
atgtcgctgcccgacctcttcgagaagcttctcggcgacgagatcgccgcgacgctggacgacgacggggaggggatcgcggccaccgtggcgcgcacggccttccacggcatgaacgcgctgcacgccgccagaagcctgcacgtctaccgctacttgctcgaggtggccaacatggacgtcaacaagccggacaccactccaggtaggaagactcccctcgagcgagccattgccggtggggacctgccctctgtcaggtatctcattgatcatggtgctgatatccatcatgaacgtgaaggaaacatcacttttcttcattcagctgcaaagaaaggattccctgctacatccaatctgcattctgtcatgatgagcagccttacgttgaatgtggagaaaaatgcagacaatactccactgaaacatgttcctccaagagtgaactgctctttttgtgtgttatttaggactgggaggactgaaatagtaaaattgctgctttctagaggagctcatgttgatggcaaatcagatcatgggacacctctgcattttgctgctattaaaggatatgaaagtactgtgaagattttgttggagcaccaagcagatcccaacaaggttatgccttcttctcaagcaacacctttatctgcggcgttattcactacttccttaccttgtgtgaagctattgatccaggctggagctgatgtaaatgctacaaacaaccccctggcgagagctgcagggagtggattaactgaagctataaagttgttgttgaaggctggagcaaacccaaattgtcctgacacgcatggtagaatgccaatagagctggctgctgtgtatggtacaagggaagatgttgagattctatttcctttgaccaacccaattccaactgttgctgactggagcgttgatggggtaattacttatgccaatctggaacgcaagaagctagaggatgatgattacgttaacacgaaaatgtctgacctgaaacaaaaagggaatgaagcatttgatgagcaggattatgaaaaagcatcagtgtggtacacacaggcactggaagttgatccttgtgatgccacaactcttctaaagaggtgtctttgctggcttcgcatgggtgagggaaaaaaggctgtgaaagatgcaaccacatgcgcaaaacatcacccgaagttgtcggaggcctaccatcggctaggagaagctctaatgcttgagaaggattatgagaaagcttgcgtggcgttgacccatggtatagagttggatcctgaaagtgatgagatggacaaactgttctggtaa

SEQ ID NO: 10974 - DNA, 1039 bp, Oryza sativa
  Clone ID: TFbOSC31716j.C1.o1.fg
atggaggcaaatgctcctgctgtactgcccatggacgccaaactgatggtggccacagcccatggcgactgccagcagctgaaggatgtcgtgaacaaggaggatgctgccatgatggtgctggtgatggcgtcaagcaacggcacgccggcttccgccgcggcggcaagtcctccggtggccatgcatccgctgctgcacgcctcagcttcctccggggattggaagggtgtgaattttcttctcaacagggaagaagcatatgcagattcatctgttcagcccagtaaaaagtttctgaagtccctagaagcatgcatccccggcaactgcaccaacggaaggtgccgacctcgccgcaagcttttaatgacatacaagaagtcgcttctggagggtgtcaccatcgagggagacactgcgctccatgtggtggccacacatggggatggccacaactacttgaaatgtgttgacacaatctgtgccaagggcaagcacctcctgtttaagccaaacaataaggatgatacacccttgcactgtgctgccagggctgggaatcacgaaatggtcaataagcttattggtctagctattggacctagtagaagggaggaaagtgttgacagcatagcgaataacctgatccttaaaagtgataatctttctacagagacattcttgagcgatgatgtccgtgttgcaaataatcttacagtcggagatagtattagcataagtgaagacaatgtccacaggggagtggaatatctcagaatggaaaatgacagtaatgaaacggccttgcatgcggcaattcgcattggtcatagtcctatagtaacggagctattgacatatgattctgaattggcgctatttccgcaagaaggcacatcaccattgtacctagctatcttgctgaagcaatttgacatcgcgcggacattataccagatgagtagacaaaatattctctcatattctgggccaagtggacaaaatgcattgcatgttgcagttctccgaagcagag

SEQ ID NO: 10975 - DNA, 2169 bp, Oryza sativa
  Clone ID: TFbOSC413151j.C1.o12.fg
atggctgaagagtatgagctgaacgagatagatgacaccctgcatggctctgtggggagcaggctctcgctgtttgcgagggagctcaagtcaaggagaagcagcagctggcatggcggcaccgccctgaggctgccaaaggatctgtatgaaagccttgtcatacaccccaatggcagatggtacaggatctgggcgaacatgatgttcctgtggtccatctactccaccttcttcaccccgttcgagttcagcttcttccgcggactccccgatcagctgctcgacctcgagtgcgtccagctcgtcttcctcgccgacgtcgccgtccacttcttcctcgcctaccgcgacccccacacctacaggatggtccacgacaagcgccacatcgccctccgctacatcaaaggcagctttgctctcgacgtgctcggctgcttcccctgggacgccatctacaaggtgacgggcagggtggaggcggtgaggtggctggtgtgggtgaggctgtacagggggaggaaggtgatggcgttcttcaagcgggtggagaaggacatccgggtgagctacctcctgacgaggatcgtgaagctcatcaccgtggagctctactgcacccacaccgccgcctgcggcttctactacctggccaccacgctcccgcccgcgcgcgagggcgggacgtggatcggcagcctctccctcggcgacgcccggtacatcaacttcagggaggtcgacctgctcacccgctacgtcacctccctctacctcgccatcgtcaccatggcaactgtcgggggttcaggctatggcgacatccacgcggtgaacacgagggagatggcgttcacggtggtgtacatctcgttcagcatcgtcctgagcgcgtacctgatcggcaacatgacggcgctgatcgtgaaggggtccaggacggagcggttcagggacaggatgaccgacctcatcaggtacatgaacaggaacaggctgggcagcgccatcaggtcccaggtgaaggatcacctgatgctgcagtacgagagcagctacacccgggaccgcgtaatcgtcgacgacatcccggtcgccgttcgatccaagatgtcacagacactgtacctggatatggtttcgagagttgggctgttcagaggttgctcggatgacttcctaagccagattgtgctgaaattgcatgaagagttcttcctcccaggagaagttatcttggagcaaggcaccgtggttgatcaaatttacatcgtggcacatggatgcctggaagaggtggccaatggggaagatgggtctgaagagatcatctcagaactgcggccttacggcatagttggcgatgtcgcggtgatctgcaacattccacagccatacacagttagagtctgtgagctttgcagccttctgagaattgacaagcaatccttgactagcatcttacaaatttacttcaaggataatagtcagatattgagcaaccttctaaaggggaaagaaacggagtcgaagcggaagcaattggaatcagatatcacatatctgctagcaaagcaagaatcagaactagtccttggagtaaacaatgctgcatatcatggggatatatttcgtttgaaaagcttaatcagtgcaggagcagatccgagtaaatcagattacgatggcaggactgcattgcatattgctgcactgagaggatacgaaaatattgtcaggttccttattcaacgaggagcgaatgtcaacagcatagacaggtttggaaactcaccactgctgcaggcagtaaaatcaggccatgacaggatcacgtcgctcctcgtggagcacggcgcgatcctgaacctggaggacgctggaggttacctctgcagagtagtcaggggtggcaggatcgatctgctgaagaagctgctcagattcgggatcagcccaaactgcaggaactacgatcagaggacgccgctccacatcgctgctgccgagggcctgcaccttgttgccagcacgctgatagaatctggagcagacatacaggccaaagataggtggggaaacacgccgcttgacgaagggagacggtgcagcagcaaaccactggtcaggatactggagcaggctagaactgttgcgactaattga

SEQ ID NO: 10976 - DNA, 2175 bp, Oryza sativa
  Clone ID: TFbOSC900133j.C1.o17.fg
atggaggcaaatgctcctgctgtactgcccatggacgccaaactgatggtggccacagcccatggcgactgccagcagctgaaggatgtcgtgaacaaggaggatgctgccatgatggtgctggtgatggcgtcaagcaacggcacgccggcttccgccgcggcggcaagtcctccggtggccatgcatccgctgctgcacgcctcagcttcctccggggattggaagggtgtgaattttcttctcaacagggaagaagcatatgcagattcatctgttcagcccagtaaaaagtttctgaagtccctagaagcatgcatccccggcaactgcaccaacggaaggttgccgactccgccgcaagcttctaatgacatagaagaaggtgcaaacatgccattgttgttgtctcccgagtcgcttctggagggtgtcaccatcgagggagacactgcgctccatgtggtggccacacatggggatggccacaactacttgaaatgtgttgacacaatctgtgccaagggcaagcacctcctgtttaagccaaacaataaggatgatacacccttgcactgtgctgccagggctgggaatcacgaaatggtcaataagcttattggtctagctattggacctagtagaagggaggaaagtgttgacagcatagcgaataacctgatccttagaagtgataatctttctacagagacattcttgagcgatgatgtccgtgttgcagataatcttacagtcggagatagtattagcataagtgaggacaatgtccacaggggagtggaatatctcagaatggaaaatgacagtaatgaaacggccttgcatgcggcaattcgcattggtcatagtcctatagtaacggagctattgacatatgattctgaattggcgctatttccgcaagaaggcacatcaccattgtacctagctatcttgctgaagcaatttgacatcgcgcggacattataccagatgagtagacaaaatattctctcatattctgggccaagtggacaaaatgcattgcatgttgcagttctccgaagcagagttggtgagaaacggaccatcgagatttttgttcagaagtatcccagcagtgctggcctgcgcgataaaagaggaagaacatttcttcatgttgctgttgagaacaggagagtgaatgtagtcggctatgcttgcagaaatcggtctttccttatttttcagagcaccgaagaaatggtacgctttgtattgacacaagctggtgctatgaatgacagttgccgccacgatcactttagagaaaaacacaaagacactcacaacctaaaatcagatagtgaaagcaaagaattagaaaagctaaaggacgcaacggaaacaatggccattggctcagttctaatagcaactgtgacgttcggtgcaactttcgcattgcccggaggttacagagcagatgaccactcaaacggtggcacaccaacacttgttgggaggaccggagcggcggcgggcggagacggcggcgagcggcggaggcgcgggtgtggcgtggcggcctgcgagcagcagagacatgggagtggcggcggcaggcactggagtggcgacggcggtggcgcctgggctgagctccaccgcctcctcaccgacggtgaccaggcgttggagcaggaggacggcgggcggcggcaagacaaacaagcagcagcagatcgccaggagcggaggcggcggcggccgtggtggtacatggtccagatcaatgtcaaacgatggctacacaggaggaccatgctgcttctgagagacaatggcggcatgaattcactgtgcgaggataggtacatcaagctcacatgcctgggcactcatcgcatcctcatccattacgccaggcagatgcagtgcttgtactacaacgtcctcatgaacgaggttgggatggatagctgggaggagtacaccgagcaggacagggaggatgtccgggcgctgatagacaagatcgtcgatctctgccggagttcgattcccaggccgccgcacgacggttttgtgtggttctctctcttttgcgatttgtacttgtcgccagaaattgttttgatcttggaccttcaaggatctgaagacgaagacttgagggaagtcaccctttga

SEQ ID NO: 10977 - DNA, 1200 bp, Oryza sativa
  Clone ID: TFbOSC400284j.C1.o23.fg
atggcggcggcggcggagagcaaggcggggaaatcgccggaggagctcctctgcgcggcggcggagtccggtgacgcggaggccatcaccgggctcctcgccgaaggcgccgacccgacccacttcgatgcctccgggttgaccccgctgatgcacgcggccaccggtggccacgccgccgtcgtgcagcttctcctcgacgccggcgcgccatggaacgcgctctcccccacggggatctccgcgggagacctcgcctccgattccgccaccttcgacctcctcctcgaccacgccctccgctccgagctcgtcctcggcaccgtcgctcgccgccaagcggggcccgcggactcccccgccgagagctacctcgaatccagggtttcattcagcgaggagagggtgatggacgcggatagcaaggccgtgatgatggagtgggagcggccgctgatggaggcgcacgcgcgggcggtgtgctccggcggcaaggtgctcaacgtgggattcgggatggggctcgtggacacggcgatccagaggtacgagcccgaggagcacaccatcgtcgaggcccacccggaggtgtacgcccggatgctcaagctcggctggggcgagaagaagaatgtcaaggtcgtgttcggacggtggcaggacgtgctcccgcagctcggctcttatgatgagttgtcggtctcttgttttgaagggattgcaaagcaggatttctaccttttggattcgtctcagatttctgcagccagtgataaatatgatgctatactcaataaaatcattgcattggataattcagtcctccttattcattactatccaaaaatgtttgttcatgtttatttcattacaaaacagcatggtatattcttcgacacctatggagaatactacgaggatatgagagagttccaccaacatcttcctaagctattgaagcctggagggatctactcgtatttcaatggcctctgtggcgataatgccttcttccacgttgtgtattgccagctcgtagcgttagagttggcaaatcttggctactcgacacagttcatcccgctcccagtcaaagattgtctttcagaggaaatatggaatggggtgaagcagaaatactggcaattggatacttaccacctcccagtttgccaagcagaatcagaaccggagcaataa

SEQ ID NO: 10978 - DNA, 1881 bp, Oryza sativa
  Clone ID: TFbOSC414121j.C1.o6.fg
atggcgaaccgagaggagccttattctaccactggcggcactgctgcaaaagctcctccggtggcgatggacgccaaactgctgatggcggaatgccctgaagatcgcaaacttctcaaggagcttgtgcacaaggaagacgcttcgaagatgatggtggttttggcgtcaaccaccaaccagcctgctgcagagaagcctgcggcagcccgtgcagtaatgaatccgctgctgctagcagcagcatcctttggtgcttgcgaggttttctactttcttttctgcagagaagacgcacgagagccgctgccgacaatgacggctcgtgcatttcacgccatgcttgctggggacgcctccggcgccgatgggcggtggccgtcgacccatcagcaagctctcgacgaagtagaagaaggcggcgccggtgccgccgttgccgttggtcatcagtccactcgacggctaccaccacctgacgcgccgctcctggagggcatcaccgttgaaggtgacaccgcgctgcacgtggtggccacccatggtaacgccgccaacttcttggagtgcgctgaaatcatctgcaacagagccagacgcctactgttggcgactaacgacaagggtgacacggccctgcattgcgctgccagggccaggaggttggagatggcctctcgtctcattgctctagccaaagctagggaagaccacgaagtcgaacgtggccaagcagcatcgtttggcaaggtactcctgagaactgaaaatgagcgcaatgaaacagccttgcatgatgcagttcgcgccggagatggtgacatggtccggcggctaatggacgaggacccagatttggctttgtttccagtacagggcacttcacccttgtacctggctatctctctacggaatggcactattgctgagatactacatgagaagagcaatgggaatatatcctactccggaccacatggacaaaatgcactacatgctgctgttcttcttcgacatacagcggtgttagaactactattgaaatggaacagcaaccttacaaaacaaggagacgaaaatgggagtacacctgttcattttgccgcatcttttcctctatggcatcgaaaattccattggagacatccttggattattcgtgttccccatagtctctcgatgttgttaaacactggtgaggtagatccattctatcaatccgacaagaatggaatgtttcccgtacacgtcgctgctgccgtgggggcagaacttaccgtcgcttttttgctcgacaagtttcccaacagcgcgggtttgcgtgatgccaagggaaggacattcctctatgtcgcagttgagaaacagagtttagctgttgttaggttcgcttgccggactacgtcgttacagtggattttgaacatgcaagacaaggatggcaacactgcactgcaccttgctatccaggccaatcaccatcgattgttttgtgctcttttagggaatcctcaagtcaatttagatttaacaaatcatagtgggcatactcctctcgatttgtccagaaggatgcttcccagagggatgaaatatacggcgaacactgaggagctcatatatttgacactcaaacaagttggctctgaacactatcacgatcgccgggatcacatcgaagaaatctatagccgtcgtgtggtatcaaaagaggatctggccgaagaattagacaagatgcaagaatcgacacaaacactaggcattggttcggttctaattgtgactgtgacgtttggtgcaatgtttgctcttcctggaggatatagagctgatgatcacccttatggaggcacaccaacattttctgggaggtggtag

SEQ ID NO: 10979 - DNA, 671 bp, Oryza sativa
  Clone ID: TFbOSC19440j.C1.o1.fg
gccgacggaagctgttcacagatgaggagaaggttcttctgaacaagagagtacctgatcttgaagctgctacttctagcaagtggcttccacttcacacaattgcagcatcaggagatttctatctgttggacaatcttctaaaacataatattaatgtgaatgcccttgataaggatggtttaccagctattcataaagcaattctttccaagaagcatgccattatcaactatctcctaaggaattcagcaaatccattcatccacgataaagatggtgcaaccctaatgcattatgcagtccaaacagcatgcagtcagaccataaagactctcttgctgtacaatgttgacattaatcggccagatgattatggatggacacctttgcatctagctgtgcaaacacagagaactgatatcgttaagctactcttaataaagggtgctgatagaactttgaaaactcaagatggatttacccctttggagttatgcctccggttgggtcatcatgcaaggacgtatgaacttatcaaattactcaagagctttcgtctaccaaagcaacatgacccagttcagcacttggatgatagaggttgctccttgaagggaatcaacaggttgtggtatgcccatgataattggaaggccaaagttccatga

SEQ ID NO: 10980 - DNA, 1305 bp, Oryza sativa
  Clone ID: TFbOSC416913j.C1.o38.fg
atgcctccttccctctccctccaccaccacctcctcctcttccccttcccttcccatgtccaaaccctaaacccgctctccgcctctcctcgcctccacccacatagcaaatctctcctccccaggcgccgcccgctcgttacctctccctcctccttcgccgtcgccgccgtcgatgaattcgacgaggatttcgccatcggcgactgcgtcgtgttcgaggacgacgccttcgaggagcccgatgtcgacctcccctctccggcgccatcgaccacctcgcgccccaggcggaagccggccgcggaggccggcggcggaggggggagtagcctggtgccggagaggtggagggacgcggcggaggagataaacctgacgaagaaggagaagcgccgcatcgcgcacggcttgcgcttcgggagccgcctcgagcggcgggcgccccccgccgtggccgcgcccgatgagtaccgcgcgtaccgcgaggggaggctggacgcggagctcggacgcgtcgcgcgcgactaccccgagccgatcgagaggtcacccgtaccggatagagtggaggctccgccgcctcctgagcctggtgctcgtgtggcacctaggaatccgaggttggggctgggccgacggaagctgttcacagatgaggagaaggttcttctgaacaagagagtacctgatcttgaagctgctacttctagcaagtggcttccacttcacacaattgcagcatcaggagatttctatctgttggacaatcttctaaaacataatattaatgtgaatgcccttgataaggatggtttaccagctattcataaagcaattctttccaagaagcatgccattatcaactatctcctaaggaattcagcaaatccattcatccacgataaagatggtgcaaccctaatgcattatgcagtccaaacagcatgcagtcagaccataaagactctcttgctgtacaatgttgacattaatcggccagatgattatggatggacacctttgcatctagctgtgcaaacacagagaactgatatcgttaagctactcttaataaagggtgctgatagaactttgaaaactcaagatggatttacccctttggagttatgcctccggttgggtcatcatgcaaggacgtatgaacttatcaaattactcaagagctttcgtctaccaaagcaacatgacccagttcagcacttggatgatagaggttgctccttgaagggaatcaacaggttgtggtatgcccatgataattggaaggccaaagttccatga

SEQ ID NO: 10981 - DNA, 1698 bp, Oryza sativa
  Clone ID: TFbOSC403629j.C1.o29.fg
atggacgcaaagaaccaacaatccggcgacgggcagcagcgaccggcgcagcaggctgcggggatggacccggcgaaggcggcggcgcaggcggcgacgcggcggaagaagatgacgaagcagctgacggggaagcgggacgacacggcgctgcatggggcggcgcgcgccgggcagctcgtcgccgtgcagcagacgctgtccggcgcgccgccggacgagctgcgggcgctcctgtcgaagcagaatcaggccggcgagacgccgctgttcgtcgccgccgagtacgggtacgtggccctggtggccgagatgatcaagtaccacgacgtcgccaccgcctgcatcaaggcccggagcggctacgacgccctccacattgccgccaagcaaggggatgtagaggtggtgaacgagctgctgaaagcgctgccggagctgtcgatgacggtggacgcgtcgaacacgacggcgctgaacacggcggcgacgcaggggcacatggaggtggtgcggctgctgctggaggcggacgcgagcctggcggtgatcgcccggagcaacggcaagacggcgctgcactcggcggcgaggaacgggcacgtggaggtggtgcgcgcgctgatggaggcggagcccagcatcgcggcgcgggtggacaagaaggggcagacggcgctgcacatggccgccaagggcacccgcctcgacatcgtcgacgcgctcctcgccggcgagccgacgctgctcaacctggcggacagcaagggcaacaccgcgctgcacatcgccgcccgcaaggcgcgcaccccgatcgtcaagcggctgctcgagctccccgacaccgacctgaaggcgatcaaccggtcccgcgagacggcgttcgacacggcggagaagatgggcaacaccgagtcggtggccgtgctggcggagcacggagtcccgtcggcgcgcgccatgagcccgacgggcggcggcggcggcaaccccgggcgcgagctgaagcagcaggtgagtgacatcaagcacgaagtgcactcccagctggagcagacgcggcagacgcgcgtgcggatgcagggcatcgcgaagcagatcaacaagctccacgacgagggcctcaacaacgccatcaactcaacgacggtggtggcggtgctgatcgcgacggtggcgttcgcggcgatattcacggtgccaggcgagtacgtggacgacgcgggcagcctgaccccgggtcaggcgctgggcgaggccaacatctcccaccagacggcgttcctcatcttcttcgtgttcgactcggtggcgctcttcatctcgctggcggtggtggtggtgcagacgtcggtggtggtgatcgagcggaaggcgaagaagcagatgatggcggtgatcaacaagctgatgtgggtggcgtgcgtgctggtgagcgtggcgttcctggcgctgtcgttcgtggtggtgggaaaagccgagcggtggctggccgtcggggtgaccatcatgggggcaaccatcctggtgaccaccatcggcaccatgctctactgggtgatcgcgcaccggatcgaggccaagcgcatgcggagcatcaagcgatcctcgctcagccgctcgcgatccttctcggcgtccggcatgtccgaggccgagtgggtcgaggaggagttcaagcggatgtacgccatctga

SEQ ID NO: 10982 - DNA, 1875 bp, Oryza sativa
  Clone ID: TFbOSC400525j.C1.o62.fg
atggagccctcgtcgtccatcaccatcgcgtcgtcgtcctcgtacctctcgaacgggtctagcccgtgctcggtctctcttgcgccgccgggggcaggggcggtggcggcgcaggcggcgccggttgccgccggggagggcggcggcggcggaggaggaggaggaggaggagggagtagtagcgtggaggtggtgagcctgaatcggcttagcgctaacctcgagcggctcctcctcgattccgacctcgactgcagcgacgccgacgtcgacgtggccgacggtggcccgcccgtgccagtccaccgctgcatcctcgccgcccgcagcaccttcttctacaacctcttcgcggcgcgcggccgcggcggcgatggggctgccggcggcggcggcggcggcggtggtgggggaggggagaggactggggggaggccgcggtacaagatggaggagctcgtgccgggaggccgcgtggggcgcgatgccttcctgtcgctgctgggttacctgtacacgggcaagctccggccggcgccggatgacgtggtgtcctgcgccgaccccatgtgcccgcacgactcgtgcccgccggcgatcaggttcaacgtcgagcaaatgtacgcggcgtgggcgttcaagatcaccgagctcatctcgctgttccagcgacggcttcttaacttcgtcgataagactctagtagaagatgttcttccaattctgcaagttgcttttcattcagagctgactccagtgcttgaaaaatgtattcggagaattgcaagatcaaatcttgataatgtatcgttggataaggaacttcctccagaagttgctgttcagataaaagagattcgccaaaaatctcagccaaatgagggtgacaccgtcatttcagaccctgtacatgagaaaagggtcagaagaatccacagggcactggattctgatgatgttgagcttgtgaagttgcttcttaacgaatctgagatcaccttggatgatgccaatgcattgcactatgctgctgcttactgtgattcgaaagttgtttcggagttgttagacttgagacttgccaacttgaatttgaagaattcgcgtggatacacggcactccatctggctgctatgaggagagagccagctattatcatgtgtctcctaaacaaaggagcagctgtatcacaattgactgctgatggccagagtgcaatgagtatctgccggaggttaacaaggatgaaagactacaatacaaagatggagcaaggccaagagtcaaacaaagacagattatgtattgatatattagatagggagatgataaggaaacctatggcagtggaagattctgtcacctcgcctttgttggctgacgatcttcacatgaagcttctctaccttgaaaacagagttgcatttgcaagattattttttcctgcagaagcaaaggttgcaatgcaaattgcacaagcagacaccacaccagaatttggcattgttcctgcagctagcacttctggaaaattgaaggaagtcgatctgaacgagacaccagtaacacaaaacaaaaggctccgttcaagggtggatgcactcatgaaaacagttgagctgggacgtcgctacttccctaactgctcgcaggtgctcgacaaatttctggaggatgatttgcccgatagtcctgatgcactcgacctccaaaatggcacttctgatgagcaaaatgttaaaaggatgcggttctgtgagttaaaggaggatgtgcgcaaggcattcagcaaagacagagctgataatagcatgttttctatcttgtcatcttcatcgtcatcttcgccacctcccaaggttgcaaagaaatga

SEQ ID NO: 10983 - DNA, 522 bp, Oryza sativa
  Clone ID: TFbOSC401105j.C1.o1.fg
atggcggcgcggcgatctcgcctcgccgctccgacgtcctcctccgccgcggccgcttcgatgcagcacgagctcctcgaggcggcggccagcggcgacctccgccacctcaagaggctggtgcgggcgctggataaggtcaggggccgcctccaggaggtggtggaggcggcgaggacggacggcggcatctgggcgctgcagctcgccgcgggcaacgagcagctggaggtgtgccgctacctcgtcgaagggctgcgcgtggatgtgaacgccgccgatgatgagggtagaacacctctagtttttgcggtgatcggtgaaaatgctgctattgtcaagtaccttcttgatcatggtgctgatccagacaaagctgatgatgacgggctaacccctctacattccgctgctggaataggagattgtgaaatgatagaaacgttgctggcaaagggggctgatattgatccggtagctgatgaatgtgggacgccactacatcttgctactaaggaatga

SEQ ID NO: 10984 - DNA, 1356 bp, Oryza sativa
  Clone ID: TFbOSC900134j.C1.o1.fg
atggcaaaaactctggatcgtttaaaaccaaagaagaaacaaggctctgataccacttgtaggatcaaaacacaagaactaagccaaccagaggaggggtcaatggttgctatgcccaaaaacccaaacttattgcggaataaaaagttaccctcaaattcgacgaagatcggtctgaccgagattgacctggcgctagatgattttctgaacttggtagctactcctacagtacctgccactctatcaccatctcctgatggcctcaagggtggccctgcgagcaacaacggtttgaatacaaccatggggacgcagcaggcttcttcttcttcttcttctgctgctgctgctgctggagaagagcgtgcttgtgtcatcctgtacaaccctgttcaaagcccgtcgataccagggctggcaaggttaatggtttctcgtctgattggtctggctaaaaccgaggatgacaactctggttgcggctcgagcctgaagcagctcctgagaaaggagaactaccttcatgagacggccttgcaggatgcagtgcgcagtggaaataaggaaattatcaccgagatacttgaatttgatccagaattggccagctcaccgatggatggaacaggaacttcaccgatgtacatagctgtcttgcttggccgtgtcgacatcgcaaagttattgcatgaaatgagtaaagggaataatccttcgtactctggcccagaaggacagaatgcattacacgcagcggctctacaaggcaaagatagcaagcttgcagtcgcctatttgattaaggagcgacctgagatcgctggtttccgtgattctaagggaaggactttccttcatgttgctgttgaaaggaagaagtcagatatagttgcgcatgcttccagtattccatctttggcctggattttgaatttgcaagacaatgatggcagcacagctatgcatgtagtagtgcagcttgcgcatatcaaaagtttttgttctctattgaggaacacggaagtaaagttaaacataccaaacaataaggggcagagtcctttggatgtatcgcagagtaatattccaagagggactttctatgactcgaaaaataaccctgaactacagattgcgagggcactaatagcatgcaatgcaagtactggtcgtcggatggatctctttctggaacaacgacaaaagcaatcagatgaaaagacggaatcagagaaaatgacatattcaacacaaactctgggcgttgggtcggtgctgattgttactgtcacacttggtgcaatcttcgccatacctggaggttataaaggtgacgattgttacataagttag

SEQ ID NO: 10985 - DNA, 726 bp, Oryza sativa
  Clone ID: TFbOSC900390j.C1.o16.fg
atggagatcacacctgctggcagcgaccatgagattcctgaacacctatccatgtgctctaaactttacctcgcagcatttcgcggctacacagatgaggtctgcaatctcttagccggaagcagtggcgccgccgtgcagccggcgaacagctcgccatcgccggcagcgcaagaacgtgctaatcaccaaggaccctgcagcattcgcgaggttaccgcagagcttcgcacgcttctccacattgcagccgggcaaggacacgacgacctgatcgccgagctgtgccttcacgacagcagcctcctctcctcggccagctcgtcggggcacacgccgctgcactgcgcggcgagggcagggcacgccctcgccgtccgggccatctcgctgttggccggggcaagtgttgaggaggacagggtaagggacgtagtgcgcagcaagaacgtcgctggggacaccgcgctgcacatcgccgcgaggcacggccatggcaaggcggtggaggagctgatggaggtggcgccggagaccgcgtcggagctgaacggcgccggcgtgtcaccgctgtacctggcggtgatgagcaggtcggtgcgcgccgtcagggccattatctcgtgcagggatgcgtcggctgccggccctaattctcagaatgcgctgcatgccgcggtgctccaatgttcagattttcaactaatattcacacgtgttaattaa

SEQ ID NO: 10986 - DNA, 753 bp, Oryza sativa
  Clone ID: TFbOSC12219j.C1.o1.fg
atgaatcctaagctgctcatggctgctcgacatggagacatcgagaccctaaaacgcctcctcgccgtgaacacagcacagccaccgccacaagtcgtcctccaagtcgaccggcctgcggcggcggcgccatctgcagctgcgaacacgctcctggagggagtcaccagcgaaggggactccgcgctccatgtcgtggcggcagcggcggtggcggcggcatgcggagacgacgacgacgacgtgttcctcgactgcgccggggtgatccacggggcagccaggcacctcatacgtgcccgcaacagcaacggcgacacgcccctccatcgcgcctccagggctgggagcgttaacatggtccgccgcctcatcgccatggcaaaagacgaggccggcgacgacgaccacgacgaccacgacgacggcggcgaacggcggagacagagggcggcggtggagctcctcctgagagcgcagaacaagcgcggtgagacggccttgcacgaggcgatccgctcgaacagcagggatctcgtcgtcgacgagctcctctcccacgatccggagcttgcccgtgttccaggagaagaaggaggcacctcgccgctgtacctggccatctcactgcgacggtttgaggttgcgaagaagctgcacgagagggacgaacagctgtcctactctggacctcaaggccgaaacgctttgcatgtcgcggtgctcattggcaaaggacttaaatttgggtga

SEQ ID NO: 10987 - DNA, 1326 bp, Oryza sativa
  Clone ID: TFbOSC401247j.C1.o9.fg
atgggcgaccccaacccgagcttcggcttccgcgtgggcctcgccttcctccgcgcgctcccgtacctcaacgacggcggcccgcagagccagttcttcgaggcggccacccacggcgacgtcagccgcctcaggggtgagcatggcggctggtcacgcttagcggcggccggtccggtgctagccttctcctgggcttgtgtgttggcgatgtcgaacttcgcaccgtctcgtgcgagttgttcaaaaaaaaaagagttggcgagcggcgaggacgcggaggggaaggcgaggcttgccgacgacatcagcttctcgggcatcgggccgctccaggccgcagcgcgattgggggaagtggacgcgtgcaggtgcatggtggaggagctcggcttcgacatcaatgccggcagagagcttgggcatgatgaagtagaacgactgttgctatctagaggagctagcgttgatatagcttattttcatgggacaccactacatattgctgctgcatatgggaaggccagcgtcatgaaagttttattggagcacgatgcagatgcaggtgctgacattaacttcagtgatcgtgacactccgttggtggtagcaattactaatggcttgactaactgcattaaatacttgctaaaggctggtgcagaccctaatatcccaacttgtcattgtggtgccttgccaatacaacttgctgcaagctatggaagaagaaaggatgtggaattactgtttcccttaacttcccccattcgagctgtgtcaaactggactgttgaaggaattcttgcccatgccaaatcaaagcatgccagatcaaaatgttcaaagcccaaggacaagcaggatgatcataataaaaaggctcagttcaaactacgtggtgagaaagctattaaggacaagcatgatgagcaggataaaaaggctcagctcaaactacagggtgagaaagctgttaagagaaaggactaccatggcgcctcaattttctacactgaggcaattgagctggatcctactgatgcaacattgtattccaataggagcctttgccatcttcaaatgaccgaagctttgtttgatgctgattattgcataaaatcgcggcctgaatggttaaaaggttactacaggaaaggggctgctctcatgttgctgaaggagtatgaaaaggcatgtgacgcattcttggctggactgaagttggatcctttgaatgctgagatggagaaagtattccgggaggcggtcgaggcgatgaagaagcatcatgttactacaaaaagcttcaagccatcagattag

SEQ ID NO: 10988 - DNA, 1689 bp, Oryza sativa
  Clone ID: TFbOSC401323j.C1.o1.fg
atggatccacggctgcacaaggcggcggtgcaggggaacacggcgagcctggcggcgctgctgggggaggagcagggcggcggcaagatcctcaactcgacgacgccgcaggggaacacggcgctgcacatcgccgccgggctcgggcgcgtcgcgttcgccgaggccgccgccgccgagcacggcgacctcctcgtcgccaggaacgaccagggggacacgccgctgcacctcgccgccagggccggcaagatggccgtcgccgacatgctcatcaccttcatcaccatggctgggccttgttggccggaggaggagccactgatgatgatgaacaagacacggaacacgccgctgcacgaggcggtgaagcagcggcggagcgcggtggcgctgcggctgctggaggcggagcccaactgcgggcacacgcccaacgtggacatgcagacgccgctgcacatcgccgcccgcgagggcctcgccgacgtcgtcgacaagatcctcgaccagccatgggtccccgagaagttcgtcaccgccgacaacgtcagcggcaccgccctccaccaggccgtcctcggcggccacacccgggtggtggagatattgctgatgaagacggcgccggggctgatcgacctgacggacgccgtcggcaacacggcgctgcacttcgcggcgcagaagaacgacaagcgcatggtgcggatgctgctcgaccacaagcccgacctcgcccaccgccgcaacgagcggcagcagtcggcgctccacgtcgcggcctactacggctcgacggcagcggcggcggagctgctccggcacagccccgacgcggcggagatgctggaccgggagggccggaacgccgtgcacgtcgcggtgtcgagcggcaaggtggacgcgctccggtgcctcctcggccgcgtccgccccgccgaggtggtgaaccgcggcgacaactccggcgacacgccgctccacctcgccgcgaagatggcccgcatcaagtcggcgctgatgctgctcagggacccccgcgtcgacccctgcctcctcaaccgcgaaggccactcggcgcgcagcctcgtggaggagcgcgtcgccggcggcgagatggacgcctacgtcgtctacctctgggagaagctcaagaagtacgagtcgcggcggtgcaagaaccagcagctgccgccggtggcgacgtaccagtcgctgcgcagccggcggccgggctccggcagcaacgacgagtacttcgagctcagcgtcggcacctacaccctcgtggccaccctcatcgccaccgtcaccttcgccgccacattcaccatgcccggcggctacaaccagaacacggggctcgccatccacgccgacagggcgccgttcaagatcttcgtggtgtccaacaccgtcgccatgtgcagcgccatcgtcgtcgtcttctgcttcatctgggcgtggagggaccccgtcaagttcaagctcgaccagctcacctggggacaccgcctcaccgtcgtcgcctgcctcgccatgatcgtctccctcatgacgtccgtctacctcaccgtcctccccacggagcggtggctggcgtacctggtcatcgccatcggagcctgcactccggccgtcgtcatactcatactgcgctgggaggtgttctacgtgccattgtga

SEQ ID NO: 10989 - DNA, 129 bp, Oryza sativa
  Clone ID: TFbOSC28368j.C1.o1.gm
gttggtgctgacatgaattttagagactccaatggcgttacttgtgtaatggttgcagcaaatcatggctcttctgtcatcatgaagtgcttactagatgctggtgctaatccaaacattccagatgaa

SEQ ID NO: 10990 - DNA, 1551 bp, Oryza sativa
  Clone ID: TFbOSC409418j.C1.o2.fg
atggcagcctgtgcagccagtactgcaaccatagattgggagctcctggaagcggccatatctggtgataccaggtcaatgaagatgaagtacatggattcacatgatcctacaattctgcttggaaaaaatccacaaggaaacacatgtcttcatatatcttccatgtgtggccatttggaattttgcaaagatgttctttcacttccacaggatccaaccgtgaagaagaaactactcactactgtgaatgtgatgaatgagacgccactgcttactgccataacaagtggccatgttactttagctgcttttctactcaaatactgccatgaacaaggattcagtgaggtaatcttgaaacaggacaagcacaaatgtaatgcactgcaccatgccatttgcaacggccacaaggacctggcactggagttgatagcgactcagcctgccttgtccaaagatgtcaacaaatacggcgagtctcccatgtacattgcgttgatgatgagggattctaagtttacagatatttttgagaaactgttgggaattgatggttcttctcattcaggaacctatggctacaatgctctccatgcagctattagaaatggaaatccagatattgctaaaagaatcatcgttgaacgcccaaatctggccacagaagaaaataaggatggtaatactccaattcagctagctatgctccatattgcaaaaaagatgggtggacatgtcttcataaagctgtcaaatcagaaactcgtgaacatgcgtagcagcaaggggaaaacagctctacattatgccatccagaagtgtgatccgaaaattgttgctgctttacttgacaagaaaatagacttgacaattcttggcagtgacggtaatgcagccgcttgggaawtacgggatgccttggatagtgcgaagacattaaactggaatgaagtgtcaatgcttatgattaaagctgatcctccaaatgcaaaatccgtttataatcttcacgaggaagccaaagaaaagttgatcaatgcgtcaaggaaggatgcaaggtcgctgactcaaacatacacaagcaacacttcgctagtggcgatcctcatcgcaacaattacctttgctgctgctttcaccctgcctggaggatacagcagtgatgctggaagccagggacttcctataatggcaaggaacgttgcctttaaggcattcttgatatcagataccttagcaatgtgcgcctcacttgctgttgcgttcatatgcatcatagcaagatgggaggatctcgatttcttgctttactacagatccttcaccaagaagcttatgtggttcgcgtacatggcaacaactacagcatttgcaaccggtttatacacagtattggcccctcggctgctatggttagctgttggaatttgctctgttgctgttttagtgccaattctcactaaggtgctcggggaatggcctgtcttaaagctcagaattcggttgggccaagctttcaaatcagagttccttgatatggtctga

SEQ ID NO: 10991 - DNA, 782 bp, Oryza sativa
  Clone ID: TFbOSC421303j.C1.o1.fg
gagattgtggaacagtacagctattgcttgcaaaaggagcttgtgtggacacagtcgcaaaccgtggcacaccacttcatgttgctgctagtaaagggaaagatggtgctatgaagattttattggaccacaatgcagattcaggagttcagattccagaagttctgatttttgtgtcatcatttaacaagatggtagatggtcatctgacacctctagctactgctataactgctggtgaattgaaatgtgtaaacctcctgattgaggctggtgctgttgtcagtggagactgcatctcaactgctgcaaagggtggctcaaatgagtgcaattactcaatggaagagactggtgccaaccgtaacatttctgataatggtgagcctgtcagtaaaaggaaagcaacagagttaaagtcattggggaataaggcggtcgagaaaaaggattatctttctgcaacaggattctacagtaaggcactggacctttaccctgatgatgcaaccttgttctcaaatagaagcctttgctggcatcacatgggtaatggaggcaaggctttgttggatgcttatgaatgcaggaaattgcggcctgactggccaaaggcctactaccgacagggtgctgctctgatgctactgaaggactacgagagtgcttgcgaaacactttacgatggattgaagttggatccagggaactctgagatggaggatgcattacgggaagctctggcgtccttgaaggcatctgcaagcacagaggctaggtga

SEQ ID NO: 10992 - DNA, 1149 bp, Oryza sativa
  Clone ID: TFbOSC420016j.C1.o2.fg
atggggcagggcgccagctgcgggcggcccagcgaggaggtggacttcttcggcgcggcgcagtcgggcgacctcgcccgcctcgccgccgccgtccgctcccgcccttccctcctcggccgcaccacgctcttcgaccgcctctccgccctccacatcgccgccgcccacggccacctccaggtggtgtccatggcgttggatctttgcgtgcacccggacgtcgttaaccgccacaagcagacggcgctgatgctcgcggcgatgcacgggaggaccgagtgcgtgcggcggctgctcgacgccggcgccaatattgtgatgttcgattcgtcgcacgggcggacgtgcctgcactacgcggcgtactacggccacgccgactgcctacgggccatcctctcggcggcgcagtcggcgccggtgtcgcaatcctggaggattccgtacgaggtggcgatgaagcgagggcacgtcgcgtgcgccgcgctgctgaacccgtcgtcggcggagcccctggtgtggccgtccccgctcaagttcatcagcgagctcgagccggacgccaaagccctcctggaggcggcgctcatggaggccaaccgggagagggagaagaggaccctgaaaggggccaggagcgcgtcgccgttggcgttgccatcgccgtcgcgttcagacgacggcgcgcacgacgccgccatctctgaggaggcggcggcggccggcggcggcgaggtgtgcagcatctgcttcgagcaggcgtgcacgatcgaggtgcgggagtgtgggcaccagatgtgcgcggcgtgcacgctggcgctgtgctgccacgcgaagcccagcgcggcggcggcgacgccgtgccagcagccgctgccgacctgcccgttctgccgcggcggcatctcccggctggtggtggcgacgaccaagaccagagcaggcggcgacgacgaggaggacgacgaggaggcgggcagcaggctggcgtcgccgctgcacaggaggtctcgccgggcggtgaaccaccccagcggcgacggcggcagcaccagcagcatcatgggcagcattgcgtcgtcgatcgggaagatgggcagacggcgaaccgacagcagcgaacacgtcgacgtcgacaagccctag

SEQ ID NO: 10993 - DNA, 1207 bp, Oryza sativa
  Clone ID: TFbOSC413853j.C1.o1.np
acatgaatgggcgaaatgcgcttcacttggctgcaagctatgggcatctggagatctgcaagttcctggtggaggaatcgggccttgatgtcaactcaggctctcacagaggtgcgtgcacatcaatgatttctcgcgcattgggaggatgggaggattcctatcatgatggcagcagctcgtgcctagggcatgatgaggctgtaagactattgctgtccaaaggagttcatgtggatcctctgaattatcgtggggccccactgcacttggctgcctcaaaggaccgggttcaagccatgaaggttctgcttgaacatggtgctgatgtaagtggtggttctcgttgttatcagttgtcaatcatatcttttcaccactcatgatggcatgctgcgggcactccttgaaatgcgtgaagctacttgttgaggctggcgctgatgtgaacggtaatagtaccaatggacctacccctttaactgaagcggttgatgacagtttaaccgatgttgtcaaattcttggtaggggctggagctgaccctaacattcctgacgagcaggaagggaggattcctatcatggtggcagcagctcgtggtcaacgagagcttgttgaaattctatttcctcggacaaaacctattccatgtctgccagattggaatgttgacgggataattagaactatgagaaccacacgtattgaacctcaggtatgtagtcctgtggaagaacaagtgtctgatgcaaagtcgaaaggaaaggaagcatttgcaaagggtgactaccttacagccatctacttctacaccctggcaatggataaatccccacttgatgccaccttgtttgccaaccggagcctttgctggctgcggcagcgagaaggggacagagctttactggatgcacagcagtgcaggatgctgcgccctggttggtccaaggcatggtaccgtgagggcgcagctctcagtttcatgaaggactacaaaggagcagtggacgcattcggggaggcactgaaacttgaccccatgagcgacgaggtcaagaacgcgttaagggaggcgatcgagtgtctgaagagagctgcttgatctgaagatccgaataacccttgagcagctactgcatcgtccttttggcctcacctcacctgtcagactgcttcacatctttccactgtaactaccaacgac

SEQ ID NO: 10994 - DNA, 611 bp, Oryza sativa
  Clone ID: TFbOSC100876j.C1.o4.np
ctgtgctgagagccaacccagttcagttgtataagcaagactctgaaggattgtaccccatacacgtcgctgcctcctccggtgccaatctgacagtcaagtcctttattagagagcgacctgagatcgctggtttacgcgattctaaggggaggactttccttcatgttgccgttgaaagggaaagatggaatgtagttgtgtatgcttgccatactcaatcgttggctaggattttgaatatgcaagacaacgatggaaacactgcattgcacatagcagtgaagcatgggaataaggctatcttctgttctctactgatgaataaggaggtaaacttaaatatatcaaataataaggggcaaactgctttagatatatcgcagagtaagattcttgcaggattgtttgctttgcagaaccctaacaaactgatattgcgggcactaacgttttgcaatgcaagaggtggttgtcgtcgggtagatcacctgcaggaacaatatattattcatcaaaaacaagtagatgaagtgagggaatcggacaaaatgacaaattcaacacaaactttgggtattgcctcagtgctgattgttactgtcacgttt

SEQ ID NO: 10995 - DNA, 606 bp, Oryza sativa
  Clone ID: TFbOSC400368j.C1.o21.gm
atggagcctgatcagtggcatggcaatggcaaaggcctttctccatcatgcagatgcaggggcaagctagcagacatgccttgctcttgtggggtaatgaagcactgggcagacatagaggaggcgagctacggtggcggcggcggtggcggcggtggttctcctctctttgatgagttggcggcggcggcggggaggaggagcatctccggcgccggccgcctgaagatccctgtctccgggaaggaggggagacgcatcatggggctcttaggtatggtgggcgactcattcggttgctcagctactggtgagcggcttgtctctgctgcaagggatggagacatccaggaggctatggccctgttggagcttaacccccgacttgcgcgagctctccggaggctaataaacaacaagtctgatgggggcgtcacaccgcttcacttggcagcccttcatgggcatgctgagtgcgtgcaattgctgttagaccttggagcctctgtttcagaggttcaggaagcacacctctccactatgcggcctgtggtggaagtgctgtatgctgtcaaccggagcaaacatgagagctcaaaatactaa

SEQ ID NO: 10996 - DNA, 1983 bp, Oryza sativa
  Clone ID: TFbOSC415431j.C1.o4.fg
atggcatcgccggcggcggagacctcgccgccgtccaccccctccaccgcatcttgccccaccccgcggccggatgcggcggcggcggcgccaagcatgagcccctcgctgctccgcgccgcgcgcagcggcgacgagcgccggttcgtgaaggcgctcctcgccgacccggccgccccggacctcgacgccgtcgccaccgcgggggggaacacgctcctccacgtggccgcgtggggggggcaccccgcgctcgcgtcgctcctcctccgccgcgccccgggcctcctcgccgcgcggaacgcggcgctcgacaccccgctccacctcgccgcccgcgccggggcgcacaaggtcgtcgccctcctcgtcgccgcgttctcctcctcctcctcctcctccgccgccgcggatgcctcctccccgtccttgcgcgccctcacccgcgccaccaacaggcgcggcgagacgccgctccacgacgcggtgcggggcgggcacgaggccgcggcgcgcgcgctgaccgccgcggacccggggctcgcggggctgtgtggcggcgcgggggagtcgccgatttacatggccgcggcggccggatcccttggcatggtgcgccttctcacaaagacttacaggaacgacgaggaggaggaggaggaattgcccgtattgtgttcgtgcactggcccgggcgggcgcacggtgctgcacgctgctgtgctcacgagcaacgtaatagaaatgacacagggattgttgcagtggaacccaacacttgtgaaagaagtagatgattctggaagtactcctcttcattatgttgcatctgttggaaatattcctgcgttgaagctgttattgggatatgatacatctccggcatatgtcccagattcaaatggtttatttcctgtacatattgctgctaaaatgggatatggtcaactgatctatgaactatcaagatacttcccagattgtgatgaaatgcttgacagcaaaggaaggaacttcctacatattgctgttgagcacaagaaatggaaagttgtttggcatttctgtggaacccaagaacttgaaagaatgttgaatgtcatggattatgaagggaatacagctctgcatcttgcagtcaagaatgctgaccagatgatagtgagccttctgatggcaaataaagctgtattgccaaatatagtgaacaaccaggggctcactgccttagatcttgccgtgttggcaactgacaaaggaattagttatacactgaatccacaggtcattatacttcgctgtttggcatggacgggagctgtccttagtcctcgtcgcttggatcatttcatagatgagtttaacatcgggaaagcttctggaaatgaactaaagaaattcaccaacatttcacagaacttagtagttggttctgtgctgatctccacagtcacattcgcagcagtgttcactctgcctggcggttacatatctgatggtcatccacatgccggtgcaccgattttatggcacagatataccttcaaggcatttgtgatggcaaacacccttgcatttgtgggatccacgctgtccaccatttggctcacttatgctggttcagagcatgtccacccactgctccgggcactctacatgttcttctcagtgatttcgatggagcaggcgacgagaagcatggtggcggcattcgcactgggagcatatgttgttctgagcccggtcagcgagcggatcgcccttgtgctgtatctcctggcactcaagctcaagtcgatcaccgtcgggcttccaccattgcttcagaccgtgcccgtcaccgtcaatgctcgagttcttccacaacctcgccgatggcaggagatgctgcagcgctccttctcgtcgtcgccgatcaaggagaagaacatgccaaagtacgacagcatctcattgtcgtcatctgcacctttctcgaagtag

SEQ ID NO: 10997 - DNA, 477 bp, Oryza sativa
  Clone ID: TFbOSC400431j.C1.o7.fg
atggcggcgccgttcgtccgccgcccgaccgatgacggcaccagcggcaccagagaagatattataaagagccttgatatggggaaaggaaaggcccgagatgcagtcttagctcgtaaaaaggatgggattgggttgctgcatgccgcagcatgccagggccatctgactgtttgcaagttcttgatggaggaattggggggatttatagctcatctcattcacgctcaggatgctgctggtgctgatgttaataacaagggtacaggtataactcccttaatgtttgccgcgttgcaagggtgttatacttacttcatcaagattctcctggagactggagcaatccctaatattcccaatgttttgggttggttgccagtagagcatgttgcatcatgtgattgcagggaaggagttgaaatgctatttccattcacatccccaaattccaaatgtcccaaactggagtgttga

SEQ ID NO: 10998 - DNA, 1641 bp, Oryza sativa
  Clone ID: TFbOSC900398j.C1.o6.fg
atgcaacctgtgaggattcaggcccatgacgataagatcatctgggcgaagtcccatggcgaagactatgaagtagagatggcgaaggctgaagaatcgcgttggtatctggcaagaccaaatgcatcattgggcgaagggtgtatgctgaaggatgggggcttcgccataacaagcccaactttgaagaggcccaaggggccatcccagccgcttaggcctattccagacagcaaagcaaccgcagattcgccagtgatggacagaggtctgctgaaagcagccacatcgggtgtgaagccggctctgcatgacccaagccttctgcttggaaggacagtgcaggggaacacctgcctccacatagcatcggcccatggccacgaggaattctgcaaggatatcttgatgctgaacccgtccctcctctgcactgtaaacgcggatggcgagacgccgttgctcgccaccgtaaaaagcggcaatgtcgctttagcttcttttcttctcagttactactgccgccgccatgacgatcttgatacgagggaggcgatggtgaggcaagacaagcaaggatgcaacgcgctgcaccacaccatccgcaggggacacaggaagcttgcattcgagctgatagaaaaagagcctgccttgacgaaagctgttaacaaacacgatgaatcgcccatgttcatcgcggtgatgaggaatttcaccgatgtgttcgataaactgttggaggttcctgattctgctcacggtggaacctccggatacaatgctctgcatgctgcctttagaaataacaatactgatatcgccaaaaagattattgagactcgtcctaaattggcaagagaagagaacagcgcacgggttaatccaatgcaatttggtgtgcttgagaacaagattgacgtgctaaaagtattgttggaacatgatttctctttaggatatataatcagcacaagtggtatccctcttcttggtagtgccgcataccagggccatgttggtgttgctatggagattcttaaacattgtccagatgctccatttctagttgaaaacgatggcaccacatgtctccacatagctgtacaaaaaggtcacataaagtttgtggaatttgttttgcagtcaaaggagctgcggaaactcattaacatgcgagacagaaacggtgaaactgcccttcattatgcaatccggaagtgccatccgaagatcgtcgctcttttactgcaatgtaaagcccaggatgtcacagtgctcgacagcaacggtaaccccccaatctgggtaccaaatgatgccgccgaccatgctaagacgctcaactggagtgaagtctccatgcgtatgttgaaagctgacccggaagacaaaggtgaaatctataatcttataaaaacaatcaaagatcaagtaactgagaaagcaaggaaggatataaggacattgactcaaacatacacaagcaacacttctttagtagcaatcctccttgcaacaatcaccttcgccgctgcttttaccttgcctggaggacacagtaataatgctggaagtgaggggcttcctaacatgggtagaaagcttgcatttcaggcattcttgatatctgacacctag

SEQ ID NO: 10999 - DNA, 1401 bp, Oryza sativa
  Clone ID: TFbOSC400144j.C1.o1.fg
atggcgtcgctctctcgcgtgcctcctcccgcccgcggaagccgccgccggccgcccccgtccagccccgtccccctctccccgcggcaggagatgctcctcgaggcggcatccgacggcgacctcggcttcctcaagcgggtggtgaggtcgctggacggagggaggggccgccccgcggaggcggtggaggccgtgcgggagtgcggcgcgggcgcgctgcacctcgccgccggcgcggggaagctggcggtgtgcagagtccatctatatactaaatttgtgtttagcgcattgttaggaaagcaactgctacatcagtcccaattctcaaaaggaccttcatcgggaatggaggagatggaaggtgaaacacctctggcttatgcagtcaatggtgcaaatgtagctaccgtgaggtaccttcttgaccatggtgcccatccagaaaaagctgataataaaggattcacccctctccattttgctgctgaagaaggatattgcaatgtagtggagctcttgcttgctaaaggggctcaagttgattcgatgtctgttcgtggtacaccactacatctggctgctactaatggacaacatcgtgtagtgaagattttattggaccacaatgctgattgcaataagattgtatctgctgtctacactcctctcctcgtcgccatttatggttcatcactgaaatgtgtaaagctgctgattaaggctggtgctgatgtaaatggtgttggtaatataacccccttaatagcttctgttggctcaactgagatcatgaagtgcttattggaggccggtgctgatcctaatgtccctgatgaattcggcaggatgccaatagaatttgctgtgcgatgtggtacattgaaagatgtcaatatcctatttcctttgacatctcctatgccgactgtacctgattggagtgtcagaggaataatccgtcatgtgaacacactgccagggcaaaaggactatgagagtggccttgaaaaagaagtggctggtttgaaattacaaggagttgaggcactgaagaggcaggattatcttgctgcatcagacctatacactaaggcgctttgcctcgacttcaatgatgcaaccctgtattcaaacaggagcctctgctttcttcacatgggtgatggagacaaagcttatggggatgcctatacttgtaggatgatgcggcctgattggccaaaggcctgctatcgccaaggagcagctctaatgctgctgaaggaataccaaaaggcgtgtgatgctctcctcgatggtttcaaaatggacccagggaactctgagattgagaacgctctaagggaggcgatggagtccttgaagatatctgatggtgctaagctgacaacctga

SEQ ID NO: 11000 - DNA, 3399 bp, Oryza sativa
  Clone ID: TFbOSC402545j.C1.o5.fg
atggatcgcgccaaggcagcggcgcgcgaggacaaggcggcggcggcggcgacggggaaggagaccgccgtgtcccgcgccgtcgcggaggacgacaccgcgctgctgctcgcggcggtgggaagcttcaggaaggaggcgatgggccgtctccggaagggctccgacgcgtcgcggatgctggaccaggagatgtccacgaggctgctccacctcgcctgcaagcacgacgccgtgcagtgcgccaggctcctcctcgagggagggcacggcatcacggcgtcgcccgtggacgccagggaccagctcacgcggacgccgctccaggtcgccgccgaggcgcactcggcccggtgcatcgagctgctgctctccaagaacgcgcgcaccgacctcaagctggtcgatggccgccctcttgtcgcgctcgagatcgctctcttaagcagaagagctcaagttaaatggtcactggacaactccattgaagatcttctgtcatctctgcaagaaaaggatctgaatgcagtgaggctcctggcagagaaaaccagagaggttggggaggtggcctacagatatgccatggaaggtcgtgttactgtgttggcaatgctgcttctggtggctgaagagaagatatcggcaccagtcagtgtagttatagagggcgtcaggacaaagaaatcaatctactactctattgtggatgaggctctgtccattggggatgctccagcccgggacagcaatgagaggagaaaggccctgctcagtgagattcagctacttaaccaatttggggcagcgttatggagagatcgcaacattgacaagagaagcttgccccctctgcttaaagctgccaaggttggagatgtaaatgtcacaaagatgctcctgatgggggatgttgatgtcaatgaagccgatcctgaagggaacacggcacttcactggtgccttagtggtagctcaagcacacaggagccaaggattgtgtggctcctgctgaagaatggtgccagagttttccaggggaacaaacttggtcttacaccagtacacagcgctgcagctaagggaaattataaagctcttcagtcacttctgcttcatgctcaagattgtgttgatactccttccaagaccaaagaaaccccattgttcttagcagtgaagaatggttctttggactgtgtaaagcttctcctgcgttctggggctagcaccaaagtccagaacctaagaaagcaaagaccaatagacgtggcaacgtcccaagatatgcgtttcattcttacctctgcaaatgtggctccatggaaccgtagctcacatccaaaaaaaagtgtgacgaataaggaaagctgcaaagagttcctggaagattttggtgattatgacagtgatgatttaaatgaaagctttactgggcttaaaacatcagcaagccatcgggatttccggtctagtaatggttctgcccaagggggcaagagtaagaaccattgtgctcccaagcaaggttccaagtttgtgcctcggcctaatcattggccgaagcacgactacactcggaaaatttttgttgggggcctcccaccttctgtgggcgctgagtacctcactgagttcttcactgctgaatttggacctgtggaggaagcagtagtcattgggataaggatgggtgatcgggtgcaatctcgaggatttggttttgtaaagttcaaaagagaagaggatgtgataagtgcaaaggaaactcatcatgtgtacatgcttgggaagagagtggaggtaaaggatgctgttgctagaggatccttgcctgcagaaatccagaaaattgctccattcaggcaccacagccaggaggttccaaaggtaactcaccatctgttggatggtgagctaaaggaggaacattacattaggaagcgccggcccttgccagagaagtgtcttccatcttggttctttatattcaggaagtggttgccaggatttcttgcagatgctaccgaacgacttggagataggtacccattgagctccctgaagggtgatttcagagcaatttgcagaatggagcttgatcatggcacacttggttatcctaagctcagtgatttcatgcgttcccttcctggtatctgcagaatgtgtgtagtccctgtaggaagtggtcctgccacacacatggtcctccttccaccggtctcgcgaccgaagtatgtacccttgctggaaccattctcttttgatcatgatgagctcccagaatcagtgtcagatcatcagtccccgaggtctccacttaccactaatatcaccgaggactcccctcataacacagacagtcagcagggtgatacttgcagtgagagcaatgtgcagagccatcagggcgatgagtgctgcgggagcaacactgaaagccagcaggatagtgcttccactgacaatggtagcttactgggtgaagttactgtcagtaccccaaagcctgattccattgagtccatacctacaggaaagtctgatttgattgagcttgtacctacaagaaaacctcatctgattgacacagtcactacaagaaaacctgatttgattgtgactgaacctacaagaaaaccaattgtgattgagcctgtgcctacaagaaaaccaagtgtgattgagcccgtgcctacaagaaaaccaatggcaattgagcctgttgtgcctacaagaaaaccaattgtgattgagcctgttcctacaaggaaaccaattgtgattgagcctgtgcctacaagaaaaccaattgtgactgagcctttgcctacaagaaaaccaactgtcattgagcctgcatctcttactcagaagattgtttctgagcctatgaggaagactgatttgtttgaatctggacttgcaaggaggattggtttgattggttccagaccaacaacatgcttcgttgactgtccagttgaaaggccagcagtaactccaagcaactgtgaggctgatatgagattctctttcttccaatcacaatgggacaggttcctggctccatatcccaagagtgattactgcatcatctgtcgatcctatgatgctgtgatgcagcttgtcccatgccttcataagatttgtgttgcctgcatgatgagatgcaatgtcagggcatgcatgacctgtggcactgctggagtcatggagcgtgcatcagatcaaaggtgccagctgatggtggtctgccgtggagctgaggcgattgtcagatgttccccctgtatgcacagcatcgcatgtcgaggatgcttcctggcttcagtaacattactcaagggctgcaccacttgtggctgcatgattgagcacttcaagttttgttga

SEQ ID NO: 11001 - DNA, 501 bp, Oryza sativa
  Clone ID: TFbOSC100621j.C1.o7.fg
atggtgcaattccgcagctctctcagcatgagccgggcacggacccgccacggcgatggcgacgaccgcggctggaaccagctccacgtcgcctcccgcaagggcgacctcaaccaggtgaggcgtctcctggatgatggcatggatgtcaatgcacctgcatgggggccaaaatcacctggcgctacccccctgcatttggctgctcagggtggacatgttaaaatcatggacgagctactggagcggggtgcaaatattgatgctcgcacaaaaggagcttgtggatggacccctctacatattgctgctaaggaaaggaacaaaagagctgtcaggtttctgattgagaatggtgcattcttgccacctgacatgaatgaccacaggttcaatcctcctctccattactgctctggattggaatgggcatatgagatgaagcgcatgcaagacgaaagtgattcgaccggtgaaacttctctgggctcggagagctag

SEQ ID NO: 11002 - DNA, 5118 bp, Oryza sativa
  Clone ID: TFbOSC413065j.C1.o13.fg
atggagagggtggtcgggcgcggaggcccggccggcgcagcgtgcggtgaggcggcggccggcatgcagatccaggtccatcaagatatagaagggttgcaaacttgcagcaactactatgtttcggtgctgattttggttttattgttttttgtcttgtcccttgcagagaacgtgagggcactggacgagggggacggccgcctcgccgacaaggttggggccgtgagggacagcgacggcctcggcgcgctgcacctcgccgccgcccgtgagaagctgcccgtttgccattatcttgtggaggagctccgcgtggatgttgatgccgtcgacaacaaaggtgaaacggcattgacatttgcgatcaattgtgggaatgaggacatggtgcggtatcttcttgatcatggggctgatactgaaaagatcaacaacgatggacttactgctctccattttgctgctggtgaaggaaagtgcaaaatagttgaaattttgctgtctaaaggagcttatattgattcgttgactactggtggaacagcactgcactgtgctgcttataatgggagggatgctgttgtgaagattttattagaccaccatgcagatcacaagaaggtatcttggggtgcctatacacctctttttgttgctgtcgagtctggctcactgaaatgtctgaagctcctgattgaggctggcgcagatgtgaaaggaattggtaaagaaatacctttaataactgctgcttctaagggcttaactgacatcataaagtgcttacttgaggctggtgcagaccctaatgttcgtgactgtcttggacacatgcctatagaagttgctgcacgctgcggtgagcggaaagctattgagatcctatttccagtcacttctcgtattcagtctgtgtctgattggactgttgatggaatcattaatcacgtaaagtcactacctgaggtgaaggaggaagatttttgtgaagctacgcttgatatgggaaaattccaaggccgtgaagcagtcaagaataaagattatcttggtgccatgaacatttatactgcggctattgctctcaatcctagagatgcatctttattctcaaataggagcctttgttggcttcacttgggtgaggggaagaaggctttgatggatgctgaagcttgcaggatgatgcgaccagactggccgaaagcttgctaccgtaaaggaactgctctaatgttactgaaggacagcatctaccctttagcatatttttcagttgctaggacaactgcggtgcggcacatgtgggaggcagtccggtacggtgacgtcgactacgacgaggatcggcgggcactggatgccctcatcgttgcagtcccgcccgagatgcagttctcgctttcccagaagcggactgccaaggaggcctgggacgccatcgctgcggcacgcatcggcagcgaccgcgcccgcaagtccacactgcaggcactccgcaaggagtgggagaacctggccttcaagccaggtgaggatgttgatgactttgctctccatctcaacactctcttgcagaaaatggagagagctgtcgagaagctcttccgctgcgtccctgagaagtacaggcagatcgctcgctcgattgaatctctgctggacctctccacgatatcgatcgaggaggcgttaggtcgcctcaaggtcgtcgatggtgatgagccacagcctctctcggggcccatcaccatcggcgggaagctccatctcactcgggagcagtgggaggcctctcagggtgacgggaggaagggggagtcatcttccccgacaggcggcccggctttcctccaccttgatgagccgaaggtactcgtctccctctgcaacggctctagcaatgacaaggctgatgggtggtacctcgacaccggcgccacccatcacatgaccggccgacgggagttcttcaccgagttcgactccagcgtccgaggctccgtcaagttcggggacgcctccggcgtggagatcaagggtgttggctccgtcaccttcaccgccaagtccggtgagcacaggctgctcaccggagtctactacatccccgcgttgaggaattctatcatcagcgtgggacagctggatgagaacggctcacgcgtgttggtcgaggacggactcatgaggatttgggatcgccgtcgtcgccttcttgccaaggtaaccagaggcactaatcgactctacatcctcagcgcgcaggtcgcacaaccagtttgcctcgccgctcgtcgggacgacgaggcgtggcagtggcacgagcgcttcgggcacctccacttcgaggccctgaagcagctcagtgccaaggagatgctctgcgacatctgcgtggtgacgaagcagcggcggctcccctttccccagcagacgagcttccgagccaaggagcggctcgagctcgtgcacggggacttgtgtggcccagtgacaccggccacaccaggaggacgacgttacttcctactgctcgtcgacgacctctcccgctacatgtgggtgatggtcctcggcagcaagggagaggctgcggacaccatcaggcatgcgcaggctgctgcagaggcggagtgcggccgcaagctgcgcgtgctgcgcaccgacaacggcggcgaattcacagcggctgaattcgcgtccccgcagcagaacggcgtcatcgagcggcgcaaccagacggttgtggggatggctcgggccctcctcaagcagagggggatgccggccatcttctggggggaggcggtggtgacggccgcctacatcctcaaccgctcgcctaccaaggccctcgatggcaggacaccgtacgaggcttggcatgggcgcaagccggcagtctcccacctgcgggtcttcggctgcctcgcgttcgccaaggagcttggccacattggcaagctcgacgacaggagcaccccaggggtgttcatcggctacgtggagggctcgaaggcctaccgcatcctcgacccggagacacagcgtgtgcgcactgcgggcgacgttgtgttcgacgaagggcgagggtgggtatgggacaaggcggtggacgatggtttgactccgatgtatgacgacttcaccgtcgagtacgtccacttcgagggagctgggggagtaggcagctcttcttcacctagcgtgtctaccccagcccccgaatctccaccgactccgacaccaacacaccctcgggccacgacttcgactacgacgagctcttcgtcgatacaaccccagccagtgactccacatgctccagcaccaacagccactcctccaagcacgtctactccgacgccagctcgtgttgagcgcagcccggtggagttcgctactccgctctcccacgacggggagcgcatcgacgcgtaccacgacggcgagcagctacggtaccgtacaatggaggatcttctcggcgaccagccggtgccgggactggtgcctcgcgacctagaggcgcagttgcaccttgcgtgcgacgacggtgagcctcggtcttatgtagaggccgagaaacacgcggcatggcgtgccgcgatgcagtcggagatggacccggttcaggagaaccgcacctgggagcttgctgacctccctcgtggtcaccgcgcgatcacccttaagtgggtgttcaagctgaagagggatgaagccggagccatcgtcaagcacaaggctcgcttggtggcacgcggtttcgtgcagcaggaggggatcgactacgacgatgatttcgctcccgtggcacggatggagtctgtgcgactccttcttgcgctggctgctcaggaaggctggggcatccatcacatggacgtcaagtcggcgtttctaaacggtgacttgaaggaggaggtctacgtgcaccagccgccgggatttgtgatccccggcaaggagggcaaggtgctacgcctgcacaaggccctctacggcttgcggcaggcaccgagggcgtggaatgccaagttggattccacgctcaaggggatgggcttcgagcaaagcccgcacgaggcggccatctaccagcggggcaatggaggaaatgccttgctggtgggtgtttacgtcgacgacttggtgatcaccggcaccaaggatgcggaggtcgcggcgttcaaggaggagatgaaggccaccttccagatgagtgatctggggcctctctccttctacctggggatcgaagtgcaccaggacaactccgggatcacacttcgacagaccgcctacgccaagcgcgtcgttgagctggctgggctcaccgattgcaacccagctctcactccgatggaggagagactgaagctgagccgcgacagcatggcggaggaggtagatgctacacagtaccgacgtcttgtggggagccttcgctacctcacccacacacggccggacttggccttctccgttggctacgtcagtcggttcatgcagcgaccgacgacggagcaccagcaggctgtgaagaggatcatccgctacgttgcggggactctcgaccacagtctctactacccgaggtgtcttggcaaggcacacttcatcgggtacagcgacagcgaccacgccggcgacatcgacaccagcaagagcacgagcgggattctcttcttcctcggcaagtgcctcgttagctggcagtcggtcaagcagcaggtggtggccttgtccagctgcgaggccgagtacatggcggcctccgccgctttgacccaggcgctctggcttgctcgactgcttagtgatctcctcggcagagacactggaacggtggagctcagggtggatagcaagtccgctctggccctgccaaagaaccccgtttttcacgaacggagcaagcacatccgggtgaggtaccacttcatccgaagctacttggaggaagggagcatcaaggcgagctacatcaacaccaaggaccagcttgcggacttgctcaccaagcctcttgggaggatcaagttcctcgagctctgctccaggatcgggatggcccaacttccccacaagacgacgcacaagacttag

SEQ ID NO: 11003 - DNA, 1137 bp, Oryza sativa
  Clone ID: TFbOSC400867j.C1.o23.fg
atggcggagcggtcttcttcttcgtcggagtcgactggtaatgatgagaaaaaaagttcaaaaccacaaggatcatccaatgatcatcaagggtttctgccaggaggctctcctgcaaatacttttgattttgcttctttgcacagcttgctcaatttattttacatgatcctgccagctgcatacttgcgctttagattttatgaaccttcggatccatctgtaaaggagatagcagatcagattgcaaaggaccctgcgttcacccagatggcggagcaggcactggaaggcgaaggagaacagggcatgcctgcaatagacccttacattgaaacaatgcaaaagttcatggaaagcccccatttttttacaatggcagagcgtcttggggatgctcttgtgaaggatcctgcaatgtccagtctgctggaaaacttgactagtccaatgcataatgcaaagatagaagagcgtgtttctcgtatgaaggaagatccagccgtgaaatcaattatggatgagttagagactggtgatcctgctgcactgataaagtactggaatgacccagaaacatttcgaaagatcagccaggcaatggggcctttaggcggccctgattttgctgaaccttctggaactgaaggaactgaggaagaaggtgaatatgaagatgaatccattgtccatcacactgccagtgttggtgatgatgagggtctgaagaaggctttagatggtggagcagacaaagacgaagaagattcagagggcagaagggccttacactttgcatgtgggtatggggaggttagcaatgataaaaacatctcgttgcgaatcctgtgcaaaacggattgcatgtatgccttactagtcttcagaaaattgcatttgaagtgtgcccaagtacttcttgaggcgggtgctgcagtggatgctttggacaagaacaagaacactccgctgcattacgccgctggctatggtatgaaggggtgcgtggatcttctgctgaagaacggagccgctgtcaccctcgaaaacatggatggcaagacggccattgacgttgcgaagctcaacaaccaggacgaggttctcaggttgctggaaaaggatgccttcctgtag

SEQ ID NO: 11004 - DNA, 1215 bp, Oryza sativa
  Clone ID: TFbOSC32697j.C1.o2.fg
atggttcaccttctactacaatggaagccagaattggccgtccaagtcgactgcaatggcagcactccgctccatttcacggtgtccgacggcaaccgtaaaatcgtacgtgcaatcctggccacggcgccacctggcacggcgtacatgaaggactcagatggcctctccgctctccacgtcgcggctcggctgggccacggcggcatcgtcgaggagctgacagggttctacccagacaccgccgagctgcgcgacggccgctgcgagaccttcctgcacgccgcggccagggagaggcgctcgtcggtggtgtccctagacatcaagaaccccataatgatgggtggcctcgtgaatgcgcaggacgccggcgggaacacgccgctccacctcgccgtggtcgccggcgcgcctgacattgtggaggccctgctccgggaggggaatgtgcaaactgatgtcttgaatgacgatggacacacgccgcttgatctcgcctcagaatcaaacagtttgttcaatatggcccagccacaaaggaacgaccatctgaagccgtcgagcggccatgacatggcgagtggtatcgagaagacatccgacagcctcgcattggtggctgttctcattgccgccgccgtcttcgccgtcgggttcaacatgcccggcgggtacggggacgacggcacggccaacctcagggacaacatctcgttcaaatacttcatggtcctcgacaccttcgccatcaccacgtcagtggtcgccgtcatcctgctcgtatacgggaagacggcggcggcggcgcacctcgccgtctcgtggaagagcttcgtggtgacgctgcagtgcatctgggtctcgctcgtcagcctgatcctggccttcttctccgccatccatgccgtcgtcatcgcaacctcgagctcgaggacggtcttgatcaccatgttcttggtcatctatgtgtgcttcaacgccttgattttgtggatcgagaagtggattgatcctgcagcgacgacgtatcgcgcggtttggaggttcgtgtggcgtggtcgccatgctcacgccatcaagaggcgatatccgttcctcggcgactccctatacagcttgcttatcttctcggttataattataaatatcacagcatttgtcgttctggttgtggtgtattatttcgatgtgagaagattgtcgaacaattga

SEQ ID NO: 11005 - DNA, 1320 bp, Oryza sativa
  Clone ID: TFbOSC401411j.C1.o8.fg
atggcgctgcctcaggccttcgagctcctcctcggcagagatcgagacgcctggccgcgcggggccgcgttcctcgtcgccgcccactacggggacgtccgcgaaatgaagaggattgcaaaggagctggacgaggacggcaaagggatcgaggcgactgtggctaacacaagcttcctcggcatgaacgcccttcacgcactgggttggctcggcaaggtgccggcctaccggtatctggtagaggaggtcaaaatggacgtcaacaaggccgacactgctcagggattcacacccctggagcatgccgtctaccatggtcgcctgcctgccaccagatacctccttgatcatggcgctgatgtgcatcaaattcgctctacgggaaatgtctctcttcttcactcagctgcagtaaaagggttctctgaagtagcaaaatttctgctttctagaggagttaatgttgatgcagaatcagaaatggggacaccactggctcttgctgctttcagaggatatgatagcactgtcaaggtccttttggagcacaatgctgatcccaacaaggttacaaacaaggcacttggtgcacctttagacttggcattaaccagctcttctgtgtcctgtgtgaagctgttggttcaggctggagctgaagtgaaagttgaggggccaaataatcatttggtaagagctgctgagaaaggcttaactgaagctattaaatgcatgttggaagctggtgcaaacccaaatgttcctgacaggctcgggagaatgccaatagagctggctgctgagtatggcacacgggaagatgttgagattctctttcctttcagctctgctattccaactgtggcaaattggagtgttgatggaataattaatcatgtacagtcagaaatcaagcaactagagatattatttactcaggacgataattttatcaaaaagagaaggtctgacatgaaacaacaaggggatgctgcatttaagaagcaggattatctaaatgcatcagtgttctacactcaggcactgaaggttgatccgtttgatggcacgttgttctcaaacaggagtctttgctggctccgcatgggtgatggagaaagggctttggatgatgccaatgcatgcgaaaagctacggccaaagtgggcaaagtcctactatcggcaaggagcagctctaatgtttctgaaggagtatgagagggctcatagggcacttggtcgagctttagagttggaccctgaaagtgaagagatcgagaatttgtattgggagtcgatggaactgtgcggttga

SEQ ID NO: 11006 - DNA, 2544 bp, Oryza sativa
  Clone ID: TFbOSC418633j.C1.o8.fg
atggggagggggatagggtcgaagcggagggtggaggacgacgacggggagaatatgccggggaggaagaagaaggaggaggaggaggaggaggaggatgacgatggggaagaggagtacgaggtggacgtggtgcgcgaccggatcgggtcgtcgcgggggagccgcctggcgctgttcggctccgacctccgcctcggccgcttccgcccgcgccgccgccgcgtcgcccccgtcgacggcgacgatggcatcttccaggacttcgtcatcgaccccgacaacaagtggtatcggttatggacgaggttcatactagtgtgggcagtgtacagttccttcttcacgccattggaatttggcttcttcagggggctccccaggaacctcttcttcctagacatagctggtcagatcgccttcctcatcgacattgttctcaggttcttcgtggcctaccgtgatcctgacacctaccgcatggttcacaatcccacctccatcgctctccgatattgtaaatcaagcttcatttttgatcttcttggttgttttccgtgggatgctatctataaggcttgtggaagtaaagaagaagtaagatacctattgtggattcggttgacacgagctatgaaggtgacagagttcttcaggagcatggaaaaagatatccgtataaattacctgtttactaggattgtgaaactcatagttgtggaactctactgtacgcacacagcagcatgtatcttctactatcttgcaacaacacttcctgaatcaatggaaggatatacatggatagggagcttgcagttgggagactatagttattctcatttcagggagattgatcttaccaagcgttatatgacatcgctgtactttgccatagtcaccatggcaactgttggttatggtgacattcatgctgtgaatgtcagggagatgatattcatcatgatttatgtttcctttgatatgattcttggagcctacctcattggtaacatgactgcacttattgtcaagggctcgagaaccgagcgattcagggataagatgaaagaagttatcaggtacatgaacagaaacaagcttggaaaggacataagggaacagattaaaggacatttgaggttgcagtatgaaagcagctacactgaagcttctgtccttcaggatatcccagtctcaattcgtgcgaagatttcacaaacactgtataagccatatatcgaaagcattccactgtttaaaggatgttcagcagaattcattcaacagattgtgatcaggctgcaggaagagttcttcctacccggagaggttattttggagcagggaagtgcagttgatcaactgtactttgtctgtcatggggcactggaaggtgttggcattggtgaagatggtcaagaagagaccattctaatgctagagcctgaaagttcttttggagaaatcgctgttctctgcaatatcccacaacccttcaccgttcgtgtctgcgaactttgtcgtcttttgcggcttgacaagcaatccttcacaaacatcctggagatcttcttcgttgatggaagaagaattctgagcaacctttctgagagtagcgaatacggcagccggatcaagcagctggaatccgacatcacgttccacatcgggaagcaagaggcagagctgacgctgcgagtgaacaacgctgcgttctacggtgacatgcatcagctcaagagcctgatccgtgcaggagccgatcccaagaacaccgattacgacgggcgatctcctctgcatcttgcggcttgcaaagggttcgaagatgtcgtccagttcctcctccacgaaggcgtcgacatcgatctttccgacaaatttggcaacacgccattgctggaggcggtgaagcaggggcacgaccgggtggcgacgctgctgttcagcaagggggcgaagctgagcctggagaacgccgggagccacctgtgcacggcggtggcgaggggcgacacggacttcgtccggcgggcgctcgcctacggcggcgacccgaacgcgagggactacgaccaccgcgcgccgctccacatcgccgccgccgagggcctctacctgatggcgaagctgctcgtcgacgccggcgccagcgtgttcgccaccgaccggtggggcacgacgccgctggacgaagggcgcaggtgcgggagccggacgatggtgcagctgctggaggcggccaagtccggcgagctctccaggtacccggagcgcggcgaggaggtgcgggacaagatgcacccgcggcggtgctccggtgttccggcccccacccgtgggacggcggcgagcggcggcgggaaggggtggtgctcggcgcaggagaagctcggcctcgccggctccggcgaggggctccggctgctcggcgaggacggcgccagagtgctcgacgtcgacatggtccacgacgggcagaagctctacctcgtcgtcggcggcggcggcgatgacggcggcacggaggcaaggcagtga

SEQ ID NO: 11007 - DNA, 1107 bp, Oryza sativa
  Clone ID: TFbOSC900156j.C1.o2.fg
atggcatcggcagtcaaatccaaactgacggtggccaaaacaaaggaggacaccgcaaagcctcccatgaatccatggttgctactccttgcatcgcgaggtgattgtgatgggataaccgatcacattcttctgaacatggaagctgcgacgcaacagaaggctgctaaagaggaaggtgcttgtcatcgtcctgcaccctctgcagactcgtcgcccctggaccaagctaaccctgcaattcctaccatggcgacgcagcaagcttctggtgatgatgggcatcagtcatgcctggacctggagggggtcaccattgaaggcgacacggcactgcatgttttggccacctctggtgatggctggagctacctgaggagtgtggagatcatctgcagcaaggccccgcatctcctgctggtgcagaacaacaaaggcggcacgcctttgcactgcgctgtcagggctggccattcccaaatggtttcttttctaattgatctggctaataatccgaggtcaaatctgcaggtagcggctagattgaaggaagttctgagaaaggggacggcctttcttcccttgcatgatgcaatccgcatcggaaacaaggaaatgatcaccaagcttcttgaattcgatccagaattggctagttcccctacggatgaagcaggaatttcaccgttgtacctagctatcgtgctacaacgtagtgacatcgcaaagttattgcatcaaatgagtccagagaatctttcatattcgggcctaagtggacagaacgcattgcatgcagcggttctccaaggcaaagttaccaattctgttatcagtgctagtccactattaataagtggctcctttctaaatgccactgttagatttggtcctatgttttttccatcggagagagaaggtttcctaatattttgccacttccacctaagtggtgtgacaagtaggattgccagcatgggtggtgtgaaaaagtccattttgcctcttgtagaccctacaactcagccacaacctttccccacactgctcacttctgtcttattcaagacggtgcttgacgcttatatggatggcgaaggcacataa

SEQ ID NO: 11008 - DNA, 1188 bp, Oryza sativa
  Clone ID: TFbOSC421842j.C1.o8.fg
atgccggtgccggggagccagaacgggcggccgaggccggcgaaggcggagaccatccacggcctcgcccgcgccggcgacctcgccggcgtccagaggaagctgcaggagaatcccgccctcatcaacgaccggaaccccgtcatgtcccaaacaccgcttcatgtcgcagctggctacaataacactggcatagtcaaattcttgcttgatttccaaggcacggataaagttgagctggaagcaaagaacatgtatggagagacacccctgcacatggctgtgaaaaacagttcttgtgaatcagcaaaattgctacttgaacgtggtgcacatatagaagccaaagcaaataatggcatggcaccattgcatttagctgtctggcatgcacttcaatctggagattgtagcacctgtactgaatcttgttctcatcacacattgccccaccaggaaggcaaaatcccttcgaatcatattcctggaggagctggtaaaacaatggttgctcggattcttggaaagcttcttcatatggttggggttctccctaccgacaaagttactgaagtacagcgaactgatcttgttggagaatttgtggggcacactggaccaaaaactaggcgaaagatacaggatgctgagggtggaattctgtttgtggatgaagcttacaggttgataccgatgcaaaaatctgatgataaggattacggtgtggaggccttggaggagataatgtctgtaatggacaatggcaagatagttgtgatatttgctggatactgtgagccaatgaagcgcgtcatcgcctccaacgacggcttctgtaggagggtcacaaagttcttttattttgacgatttcaccacaacagaattagcagagatcttacatctgaagatgaataacccaactgagagcagtttgctgtatgggttcaagctggacccaagctgcagcatcgaggtcgttggagagctgattgccagggagacaactgaacagcggcgtaaacagatgaatggtggccttgtagacacgctgctcatcaatgcccgtgagaatctagatctacgtcttgatttcaactgcgacgatgcgaatactatgatcacaatcacattggaagacctggaagctggccttaagcagatctccaaacagcggcagttgcagtga

SEQ ID NO: 11009 - DNA, 2535 bp, Oryza sativa
  Clone ID: TFbOSC412194j.C1.o18.fg
atggggttcctcaaccttgtgggcaactccattgggtgctcggcttccggcgagcggctcgtctcggcggacagggacggcgacctgcaggaggcgcgcgcgctgctcgagtacaacccgcggctcgcctggtactccactttcggtggccgcaactcgccgctgcactacgccgccgcgcagggtcaccatgagattgtttctctgttgctcgaatccgaagtcgagatcaacctcaggaattacaggggccagcgatgccacgcccccgtctctccaccatcttcgccggcgcggccacctccacggcgccggccccggcccccgcggcctcgccgtcggcgcgcgcacccctgcggcgacggcgacggctcggccccggtcccggcgcgcgccctcaacgggatcctcgccgcgctcgcccgcgccccgccttccgccgcctgcggtgacgcccccgccctcgccatcgagctcttcaagcggatggaccgatgggcctgcccccgccactctcctcccaccatccacacctacaacatcctcatcgactgctaccgccgcgtgcaccgccccgacctagggctcgccatcgtcggccgcttgctcaagaacggcctggggccggatgatttctcgtactcgctcatctacggtttcgttaaggatggggaggtggacaaagctcactgcttgttccttgagatgatggagcagggcgtattgccgaagatactgatttgtaactcaattatcaaagagctttgcaagatgaaggaaatggacaaggccgagagcattgtgcagaagatggtcgattcgggtattgcaccggacttgtttacttatagcttgattattgacgggctgtgcaagtcaaaggcaatggacaaggctgagagggttttggagcagatggttgaggctggtactcgacctaacagtataacatacaatagcttaatccatggatattccatttcggggatgtggaacgaatcggttagagtgttcaaacaaatgtcaagttgtggtgtcatcccgactgttgataattgcaactcattcattcacgctctcttcaaacacggtagaaccaacgaagcaaaatgtatttttgactcaatggttctgaagggccccaaacctgatattatctcctactctacgatgcttcatgggtatgctactgctactgacagttgtttggctgatgtgcataatatcttcaatttgatgctaactaaaggtattgcacccaacaaacatgttttcaacatactgattaatgcatatgctcgttgtgggatgatggataaggctatgcttatatttgaagacatgcagaacaaaggaatgatccctgacactgtcacatttgcaaccgtgatatcttctctttgcagaattggcaggttggatgatgctctgcacaaattcaaccacatggttgatattggtgtaccaccgagtgaggctgtttacggctgtctgatccagggttgttgtaatcatggtgagttggtaaaagccaaggaattgatttctgaaatgatgaacaaggatattcctcctcctggtgtcaagtatttcagttcaataataaacaacctgtgcaaagagggaagggtagcagaagggaaagatatcatggacatgatggtacaaacggggcaaaggcctaatgttgttacttttaattcattgatggagggatattgcttagttggtaatatggaggaggcatttgcattacttgatgctatggcatcaattggcattgaaccgaattgttacatatatggtacgcttgttgatggctattgtaaaaatggaaggattgatgatgcattgactgtattcagagacatgttgcacaagggagtcaagcctacaagtgttttatatagcatcattctccatgggttatttcaggccaggaggacaactgctgcaaagaaaatgttccatgagatgattgaaagtggaacaaccgtgagcattcacacatacggtgttgtgcttgggggactttgtagaaacaattgcaccgatgaagcaaatatgctgttggagaaattatttgctatgaatgtaaaatttgatattattactttcaatattgtgattagtgcaatgttcaaagttggcagaaggcaagaggctaaggaattgtttgatgcaatctctacttatgggttggtgccaaatatacaaacctacagcatgatgataacaaatcttataaaagaagagtcatacgaagaggctgacaatctctttatatcagtggagaagagtggccatgcttctgactctcgtcttcttaatcatatcgtcaggatgttactcaataaagctgaggttgccaaggctagtaattatctgtctataattggcgagaataacctcactcttgaagcttcaactatttctttactggcttctctcttctcaagggaaggtaaatatcgggagcatataaaattgctccctgcaaagtatcagttttttgagggagcctggcaagattaa

SEQ ID NO: 11010 - DNA, 1296 bp, Oryza sativa
  Clone ID: TFbOSC400025j.C1.o16.fg
atgtcgctgcccgacctcttcgagaagcttctcggcgacgatcgccgcgacgctggacgacgacggggaggggatcgcggccaccgtggcgcgcacggcttccacggcatgaacgcgctgcacgccgccagaagcctgcacgtctaccgctacttgctcgaggtggccaacatggacgtcacaagccggacaccactccaggtaggaagactcccctcgagcgagccattgccggtggggacctgccctctgtcaggtatctcattgatcatggtgctgatatccatcatgaacgtgaaggaaacatcacttttcttcattcagctgcaaagaaaggggaatatcctatcttcttgtaggattccctgctacatccaatctgcattctgtcatgatgagcagccttacgttgaatgtggagaaaaatgcagacaatactggaggactgaaatagtaaaattgctgctttctagaggagctcatgttgatggcaaatcagatcatgggacacctctgcattttgctgctattaaaggatatgaaagtactgtgaagattttgttggagcaccaagcagatcccaacaaggttatgccttcttctcaagcaacacctttatctgcggcgttattcactacttccttaccttgtgtgaagctattgatccaggctggagctgatgtaaatgctacaaacaaccccctggcgagagctgcagggagtggattaactgaagctataaagttgttgttgaaggctggagcaaacccaaattgtcctgacacgcatggtagaatgccaatagagctggctgctgtgtatggtacaagggaagatgttgagattctatttcctttgaccaacccaattccaactgttgctgactggagcgttgatggggtaattacttatgccaatctggaacgcaagaagctagaggatgatgattacgttaacacgaaaatgtctgacctgaaacaaaaagggaatgaagcatttgatgagcaggattatgaaaaagcatcagtgtggtacacacaggcactggaagttgatccttgtgatgccacaactcttctaaagaggtgtctttgctggcttcgcatgggtgagggaaaaaaggctgtgaaagatgcaaccacatgcgcaaaacatcacccgaagttgtcggaggcctaccatcggctaggagaagctctaatgcttgagaaggattatgagaaagcttgcgtggcgttgacccatggtatagagttggatcctgaaagtgatgagatggacaaactgttctggtaa

SEQ ID NO: 11011 - DNA, 3081 bp, Oryza sativa
  Clone ID: TFbOSC401616j.C1.o29.fg
atggcggaggttcgcaagtacgggctgcccaatcagccgccagatattccccagatactgctggaagctcagaatcgatggctacgtcctactgaaatctgccatatactgtcgaactacaagaaattctccattgcgcccgagccaccgaacagacctgcaagtggctcgctttttctgttcgatcggaaaatattgagatacttcagaaaggatggacataactggaggaagaaaaaggatggaaagacagtcaaagaagctcatgagaagctgaaagttggtagtgttgatgtacttcattgctactatgcccatggggaggagaatgagaacttccagagacgtacctattggttgttagaagagggtttcatgaatattgttcttgtgcactaccttgaagttaaggggaaaaataatttttccagggtggcaagcaaagtttcagccgttctaaagaagctgaagagagtgcaggattatctaatgctgatagtcctgcatgctcaaactctttcgctagtcagagccagtgtatctaaagaaaaattcggtgcaacagataattgtcgagcaagctccagataccaccctttcgttgagatgcagcagcctgtggatggagtcatgatgaataatatgctgggtgtttcagctccaagtgcaggatatcatggtgaaatgcagactacaacagctaactcagacaatcattttgctactcattatgacatagctggtgtgttcaatgaagctggagctggattaaggggcgtttccaaaactctacatgattcagtgcgttttgctgagccctatcctgaatgctcagctgagtttatggagccagcactctattcttctaatgccaccatggagtccaacaatctggatgataactcacggttggaaacgttcatgtctgaggcactctacaccaacaacctcactcagaaagaagctgatgcactgagtgctgcaggcataatgtcatcacaggcagagaataatagctatacagatgggatccggtatccacttttaaagcagtcatcactagatctctttaagatcgaacccgatggtttgaagaaatttgatagcttctcgagatggatgagtagtgaacttccagaagtagctgatttggatatcaagtccagttctgatgccttctggagtagtactgaaacagtgaacgtcgctgatggcactagcatacctataaatgaacagttagatgcattcgcagtcagcccttcactttcccaagaccagctcttcagcattattgatgtttctccaagctacgcatgcactggctctaggaataaggtcctaattactggtacattcttggcaaataaagaacatgtggagaattgcaagtggtcatgtatgtttggggacgttgaagtacctgcagaggttttagcacatggctctctgcgctgctacacaccagtacatttatctggacgagtcccattttatgtgacatgctccaatagggtggcttgtagtgaagtgcgagagtttgagttccgtgattctgatgctcgacaaatggatacttcagatccccagacaacaggcataaatgaaatgcatttacatattcgtcttgagaagttactttcgttgggaccagatgactatgagaagtatgttatgagtgatggaaaagagaagtctgaaataatcaacactattagttccttaatgcttgatgataaatgtttaaaccaggcagttccattggatgagaaggaagtttccactgcacgggatcagaatattgagaaattggtgaaagagaaactatattgttggcttgttcataaggtacatgatgaagacaaaggtcccaatgtgcttggcaaggaaggacaaggtgtgattcatttggtagctgcacttgggtatgattgggctgtaaggccaataattacggctggtgtaaaggtgaacttcagggatgctcgaggatggactgcgcttcactgggctgcatcatgtggaagggagcggacagttggggccctgatagcaaatggagctgaatctggtttattgacagatccaactcctcaatttccagcaggtagaacagctgctgatttagcatcagaaaatggacacaaaggcattgctggtttccttgcagagtctgctttgacaagtcatctttcagcacttacactgaaagaatccaaggatgggaatgtaaaagaaatatgtggcttaggaggggctgaagattttgcagagtcgagttctgctcaacttgcttacagggattctcaggctgagtcactgaaggattcacttagcgctgttcgtaaatcaacgcaagctgcagccaggatatttcaagcttttagggtggagtcattccacagaaagaaggtggttgaatatggagatgatgattgtggattatcagatgagcgcactctttcacttgtatccattaaaaatgccaaacctggacagaacgacgggtcacattctgctgctgttcgtatccaaaataagtttagaggatggaaaggtagaaaggagtttatgattattcgacagaaaattgtcaagatacaggcccatgtacgaggacatcaagtaaggaaaagctatcggaggatagtctggtctgtaggcattgtggagaaaattatattgaggtggaggagaaagcgaaggggcctgcgtggtttccaaccggtaaaacagcttgaaggtccatcaccgatccaacagcttgaaggtccatcgcagatccaaccagcaaaggaagaggaagaggatgaatatgattacctcaaagatggcaggaagcaagccgaaggcagattacagagagcactagctcgtgtgaaatcgatgactcaatacccagaagcaagagaacagtacagtagaatcgcaaaccgtgttacagaactgcaggagcctcaggcgatgatgattcaggatgatatgcaaagtgatggagctattgctgatggaggcgacttcatggctgaactggaggagctatgcggggatggggacgcaccaatgcccaccattttgtga

SEQ ID NO: 11012 - DNA, 1482 bp, Oryza sativa
  Clone ID: TFbOSC415309j.C1.o12.fg
atggggctgcagcaatccaaggaggagctggtgtatcagcagtggatcgacaaggaagggaagacgcccctgatggtcgcgagcatgcggcctgatctgatcaatgtggttcaggtgctgattgaattgggtgcaaatgtgaacgcctaccgtcctgggtcatattgtgggactgcattgcaccatgctgccaagaaaggtcttgagcagactgtccatttgcttctatctcatggagctaatccgtttataacaaatgatgattgccacacggcacttgatttggctagagaaaagggtcatgtgaatgtcgtacgagccatagagggacgtatttctcttttttgtggatggatgagggagaactatggtcctggatttttggaagcatttgctccacaattcctgactaggaaaatttgggcggtgattttaccccgtgaagcacgaaatcaaactcggccactcaagcttgagctgacgatataccctgaattgcaggcttctaaaccacaagctgtaattaaactttggaaatgtcaacttgaggaaccaaagtttaatcaggccaatccttctgtgacaattttcgacaagggaacaagaactcgatacaagcttctaccggtgtgtgaaggtgacaaacagcagcttcaatggttttatagtgcatgttgtggcattccacaggttgccagcatggttcctgctcaaccagcgaatgccccactgccaaatccatcatcagcatcatcattaccttcagtgatatccacacccagcaaggaggatgctgagttagcaatggccatcaatgcctccatcctgtcagctatagccgagggagtgcccgatgttcagccaataacaacgactactgcgaccaatgattggggaaaccctccaagcaactccctcaatggatggggcccaccagatacttctgcgccttcaaagacaagtggccaagtaccagttgttacatcaagcagtagcacatacaatgggtgggacgtgcctggaacaagctctggccaaagttcgtccaaacacaacaaaagccagaacagcactttcgtggttccgcaggaggcgcttccatctcttccagtcccaactgcgcctccacttgccgtgggaaccttctacgatggtcctattcagtatccgtcaatagattccacgccagtcgacgtaaccatgccttctgctgacggtggtacagcggtaagctctgcaaaacctgcagagaacgaaggtgatgcaaaacctgcagaaagtgatgctaatgcaagcaacagcggtaacactccaccgggaacctgtgttatttgtttggatgctcctgtggaaggtgcctgcattccgtgtggtcacatggctggttgcatgtcctgcttgaaggatatagaatcaaagaaatggggatgccccatttgtcgagccaagattaaccagattatccgcctctatgcagtttga

SEQ ID NO: 11013 - DNA, 1320 bp, Oryza sativa
  Clone ID: TFbOSC401914j.C1.o20.fg
atgtcaaaaagaagaaaaaagaacgaaagggtggagttgagatttaaggcacccgattatgctacgtggaaaaaggaggcagctgcatgcgacaaagctaatggcaatggtaaagatggatcgattacatttatggatgaaaggaatatttcgattgccaagaccatagcaaatgacataatcatcccagaccctgctcccgagtggatgtgttataccttcttggacaaatatgaccaattggagcccatctttataaaggatagtgcacgttgcttcctccgattattcaagaactggaagggctataccatgtcatggaatctcaccatcaccgcacaaaccttaacctgcatggtcagtttcaattccctgcgatgcgcgaaagttgtattggagggcagggcacctgagctccttggggtgcatgccaatcccaactgcgtaaccaaatatggatacttcccgctccatgaagctgctgaaaggttctctattgagatgatcaagctgctcttacgccatggtgcatcagccaacgtacgcacggttggcgacgatgtcatcgatggcctactcctgctccatatcgcgattgagaacacttgcctgcataagtatcttgaggacaatctttctcccggccaggatcatctggattatatctacaagcttttccatctgctgtgtttacctgaaatgaagatcttcctggatacaactagactacttgcaggaaaaacaaataatctccttgaagagctctggaattatattgagaatggaaaacttatccagaccgcaattctactactggctgctcaggagcagatccgagggggatgttcctccaagataaatggcagtagaaagaaaaatgggtatgacattatgtacaagcgtatactgaggctttcatttgccttgagatgggggaaagtttcaaatggaatgacacagaagcttatgaaggaaaagagggcactcattgattgcatggggctgcttgttgatgcaatttcccatgctggtgaacctctttctgcatacattcaggctcattcagaggcgccacatgtggaggtcttggaacatgtttcaactatcctcaaggagtatggattttgccctactgaagaagtcatggacaccataaacctccaaccttatgactgcaaaatgtcagaaacaaaatcatgtagcaaagggtttacagatgcaaacacggcagttgcggaaatggctaatctgcatgctgcagacaaaaaggctcttgaagctgttgaagtaaagcacgagtacaaaaggttctatagttga

SEQ ID NO: 11014 - DNA, 1893 bp, Oryza sativa
  Clone ID: TFbOSC29958j.C1.o2.fg
atggatggatcaatccctccaaaaccaccgagttgccgccagcctcaaagggaaactcacaataactctgagaacacgggtgccactggtaacgatcaggctcaggatgagggttttctactccatgtcgtagcagccaatggggatggtgaaaactacaggaaatgcgcgacattgctctctgggatggataaaacacgtctcttcgcacgcaacagcgagaataagaccgctctagagtgtgcagcaaatgctgggtacaccaatatggtttttcatctccttgacatggagcgaaaacacaatttttgtggactgaacactaaaccaaatgagatcttgaagaagacaagtggacgctcagagacaccgttgcacgaggcagtgaggcagcgttgtgaacgtaagattgaagagttgaagggcaaggacagtggtttagcgcgtgtcccggacataaacggcatgtctccgctctacctcgccatccccttgggatacagagacatcgttgataagctaaccttaacctttggtgatgcgaatctgtcctacgatggaccaaatggacaaaatgtgctacatgctgcggctcttcagagtgcaggaaggagaggagatctcatgaataaagctgattggtctggaagtacacctcttcactttgcagcatcagtaggagttcagggcgtaacaactgcgctgcttgatggcatagaccaagatcgcagaacggactacacccaacggcccgacaacaatgggatgttccccatacacatagctgcttctgttggttcaatggacacaatcacctcattggtcaatgccgatcaagactgtgccactcttcgtgataatgttaaaggtagaacattgcttcatatcgccattgagaatcggaagtacaaagtagtcaaattggtgtgcaaagatccgaggttcaaggaaactctgaatttggaggacaacgacggtaatactgcattacatcttgctgtaaagaaaagagacgagtacatcttcacgtatctcctacagaataaggccgtggagctcaaccatgtcaacctagaaggctatacaccactcgatcttgcaaaagtgataaggatggaagactactttgcctctccccagaacccaacagaatggatggtgagggtattggctcattctggagccgtcttcagtcctcgtaggcgtgatgaactgatccgtggtggtagctctcaagaacaagaaaagcacgggaaaaccctttcagagtcgactgaaagcgtgttggtcgcatcggcgcttatcgcgacactgactttcgctgcagcattcaccatgccagggtcctacagaacgacaggcccaaaggaaggcacgccagcactgggtgccctctacggtttcaaggttttcctcgtcgccgacatcttggctttcttctgttccgttgcggccaccttcagccttgccgagtacgggaaccgcgggacggtggatccccttgtccgctgtcggtactcacagcgtgccgtgtggctcttccatgtcgccctcaggagcatcatagtagccttcgcgttcggggtctcggtggtgatgtggaacatttctctcagtgccatcagcatcggtggtgtagccactatcgctgtcgtgttctacgggaacgttcctcttggtcaagatttcaggcttatgttgctgatgcaccgcaggtttggcttctcacgttcttggaacctgtatccttctacggcctctcatctcaactggacatcctggcagctcaaaagcttttccgcgacgctggtttggaatctgatgaatcttttttggacttatgtcctcatatttgcacttgctggcttcgctcaactgaagcagaaacattaa

SEQ ID NO: 11015 - DNA, 897 bp, Oryza sativa
  Clone ID: TFbOSC18672j.C1.o1.fg
atgactgaaatgttactgaattggaacaaggacctcacagaacaagttgacaaaaatcgaagcacgccacttcacttcgctgcatcactttgtaaagacttcgctgcatcacttagtgaatatactgtaataacgtggatgtcacgcactccgctcattccagtactgctagccaacccagttcagttgtaccagcaagattctgaaggattgtatccgatacacgttgctgcatcctcaggtgccattcggactatcaaatatttaattgaggagcaacctgatgagatcgctggtcttgtagattttaaggggaggactttccttcatgtcgctgttgaaaggggcagaaggaatatagttgagtatgctcaccgtactcgatcattggctaggattttcaatatgcaagacaatgatggcaacaccgcaatgcatatagcagtgcggaatggaaataagtacattttttgtattttactaaggaacaggaaaaacccagaaaaattgatattgctggcattaacacattgcaatgcaagtggtggttgccgtcgggcagatcactttcagaaaaaacaggcagacgaagcgaaggaatcagagaaactgacaacttcaacacaaactctaggcatcggatcagtactaattgttactgtcacatttggcgcaattttagccatacctggaggatataaagccgacgaccattacaatggcggtacaccaacacttgctggaaggtatatattcgatgcattcaccatggccaacacaatagcattcatttgctcaactttagccatcatccacctcatgtactccggaatggctatggtatgtatttggtactggctccagtggctcgatggactgcaattgcaatctgtgtaa

SEQ ID NO: 11016 - DNA, 1164 bp, Oryza sativa
  Clone ID: TFbOSC900156j.C1.o1.fg
atgactgaaatgttactgaattggaacaaggacctcacagaacaagttgacaaaaatcgaagcacgccacttcacttcgctgcatcactttgtaaagacttcgctgcatcacttagtgaatatactgtaataacgtggatgtcacgcactccgctcattccagtactgctagccaacccagttcagttgtaccagcaagattctgaaggattgtatccgatacacgttgctgcatcctcaggtgccattcggactatcaaatatttaattgaggagcaacctgatgagatcgctggtcttgtagattttaaggggaggactttccttcatgtcgctgttgaaaggggcagaaggaatatagttgagtatgctcaccgtactcgatcattggctaggattttcaatatgcaagacaatgatggcaacaccgcaatgcatatagcagtgcggaatggaaataagtacattttttgtattttactaaggaacaggaaaaacccagaaaaattgatattgctggcattaacacattgcaatgcaagtggtggttgccgtcgggcagatcactttcagaaaaaacaggcagacgaagcgaaggaatcagagaaactgacaacttcaacacaaactctaggcatcggatcagtactaattgttactgtcacatttggcgcaattttagccatacctggaggatataaagccgacgaccattacaatggcggtacaccaacacttgctggaagttcggtgataagtttgggtgctgcttttatgctaggtatgtatttggtactggctccagtggctcgatggactgcaattgcaatctgtgtaatgatgatgattgcatctctatgcttattcacggagccattgcatgcaccccgtgttgcaatagcgatgtatgttaggaagggaaatcaggatatccaaagaacatatattattaactgtgggacaccaaataacatgcatggtaactatcgacaggtgatacttgtagaccgtatcctgagggcactagggcccctcaccaactcatccggccttcctcttttccctcaggcggtgacaacgacagccacggtgacgacgcgtagatccatcgctggccgtgatgacgatggcggcgacagtgcttggatctgctgccgaccgtaa

SEQ ID NO: 11017 - DNA, 2394 bp, Oryza sativa
  Clone ID: TFbOSC900138j.C1.o2.fg
atgtcgcggcgcagggcggccgctgtggcggcggcggcgcgggaggaggaggaggcgtcgcccgctcagcgtctcgtggaggctgccctacggggggacgtggtgaccatggaggcgtgcctggcggccgccgccgccgctgccgcagcggacgacgacacggacgatggcgtgcccgcggcgagccgcgtcggggtggcgcgcctgcgggtgaggtgcgctgaggtggccctccgcgaggaggcggccggggaggtgatcgtggagtcccgcgagctcaagaccgacgtctcgccgctttttgccgccgcgcacgccggtcatgccgaagttgttcgcaccctcctgagtggaggtggtggaaaggtggctggtgtatcaagttgtaaaaaagtatactgctcggtatttgaggttgctggagctgatgttaatcaaaagttatttctaggctatgcaacaacagctgccgcacgtgaaggaaacatccatattctagagatgcttctgcaggctggagtcactcgggaagcttgtgaagattccctatcagaggctgctctttttgctgaggctgaagccgttcggctattagtctgttcagagatgatacagcctgaagctgcagcacatgctttggtgactgcttcttcaagaggctttgatgatgttgtggtcatactactgcagaatggggttgacgttaattccatggctagggtcctcttgaggtctgttaagcctgcactacatgctaatgtgaattgcactccactggtggcagcagtaatgagccggcaaatttcaactgtgaaactcttgattgaggaaggctcttacttggactgtcttgtgcaagttggttcttggtgttgggactctgcaacgggtgaagaacttcgtgttggtgcatgccttggggaaaaatacaacgccatttggtgtgcagtagagtactacgaatgcagtggtgaaatcctcaaattgctgctcgataaagcaccatggttgctggaaaccccacgcaagggtcgaaatcttctttgccatgccatactctgtcagaacccgaatgcagtaagcgtgcttctaaatgctggtgccaatcccagatttcccataatgatgacaaacggcacacacgtctcctacccaatacattttgctgcaaggttgggtcatgcgcccgtactgaaacaactcatgttggatggggctaatatcaatgcgcagacttctactggggacactcctctgatggtctctgcgaggtgtggacactccgattgctttcttgaactgatcaaatcaggggcagaccttgggatagtgaacaatgcaggtgacacagcaataatgcttgctaagaaaagctcatttagctcaaccatcatcgacattctttccagagcattgagttgcggaggctgcatcacttcatcggatatcaccgtcttctctccgctgcacttcttcgctgcaagtgacagtgcagaagctcttctaatgacgctacactactcagcagcagatctgaacaggcctgatggttcagggctcactcctgttatggttgctgcagagtcaggccatgctgacattttcaggcttctagtgatggcgggggcagatatcgctgccacgagtgccgaagggaaatccgcgatgtcgatcatccgaagcagagctcctgaaaccagagatcggttcgaacagatcttactccaggcttcgctcgcggatgcgatcgcaggccagcagccatctttcagacccctgcactacgcggcccggatcggcgacacctcctccctgacgcagctcctgaagatgggccacgatcccaacgcgatggacgaggatggctacacgccgctgatgcacgcggccgccgcaggcaagctggaggcgtgcagggcgctggtgtcgcgcggcggcgccgccgacgcggggagcgagacggcgctgtcggtggcgaggaggagcggcaggtcgaacaaggcgacggaggagtggctgctggaccacgtggcgcgcgcccacgtgctcgccggggaggagctgacgaagcacacgcgcgggggccggggtccgccgcaccgcaaggcggtgcggatgatgcggtccggcgtgctgacgtggggggcgacccgccggaggaacgtggcctgcagggaggcccgggcggggcccagcgcggcgttcaggaggaacaggaggatcatcaggacgggcagcgaggagcagctgatcctaatggtggagacggtgaccgggagggagatccacttcgaggccacctccgcgtccagcgtcgagctatgggtcagaggcatcaatctcatcgtgcaagactgcgcgtggtcaaggccggatgaagctgagcaagcatag

SEQ ID NO: 11018 - DNA, 2379 bp, Oryza sativa
  Clone ID: TFbOSC900205j.C1.o26.fg
atgtcgcggcgcagggcggccgctgtggcggcggcggcgcgggaggaggaggaggcgtcgcccgctcagcgtctcgtggaggctgccctacggggggacgtggtgaccatggaggcgtgcctggcggccgccgccgccgctgccgcagcggacgacgacacggacgatggcgtgcccgcggcgagccgcgtcggggtggcgcgcctgcgggtgaggtgcgctgaggtggccctccgcgaggaggcggccggggaggtgatcgtggagtcccgcgagctcaagaccgacgtctcgccgctcttcgccgccgcgcacgccggtcatgccgaagttgttcgcaccctcctgagtggaggtggtggaaaggtggctggtgtatcaagttgtaaaaaagtatactgctcggtatttgaggttgctggagctgatgttaatcaaaagttatttctaggctatgcaacaacagctgccgcacgtgaaggaaacatccatattctagagatgcttctgcaggctggagtcactcgggaagcttgtgaagattccctatcagaggctgctctttttgctgaggctgaagccgttcggctattagtctgttcagagatgatacagcctgaagctgcagcacatgctttggtgactgcttcttcaagaggctttgatgatgttgtggtcatactactgcagaatggggttgacgttaattccatggctagggtcctcttgaggtctgttaagcctgcactacatgctaatgtgaattgcactccactggtggcagcagtaatgagccggcaaatttcaactgtgaaactcttgattgaggaaggctcttacttggactgtcttgtgcaagttggttcttggtgttgggactctgcaacgggtgaagaacttcgtgttggtgcatgccttggggaaaaatacaacgccatttggtgtgcagtagagtactacgaatgcagtggtgaaatcctcaaattgctgctcgataaagcaccatggttgctggaaaccccacgcaagggtcgaaatcttctttgccatgccatactctgtcagaacccgaatgcagtaagcgtgcttctaaatgctggtgccaatcccagatttcccataatgatgacaaacggcacacacgtctcctacccaatacattttgctgcaaggttgggtcatgcgcccgtactgaaacaactcatgttggatggggctaatatcaatgcgcagacttctactggggacactcctctgatggtctctgcgaggtgtggacactccgattgctttcttgaactgatcaaatcaggggcagaccttgggatagtgaacaatgcaggtgacacagcaataatgcttgctaagaaaagctcatttagctcaaccatcatcgacattctttccagagcattgagttgcggaggctgcatcacttcatcggatatcaccgtcttctctccgctgcacttcttcgctgcaagtgacagtgcagaagctcttctaatgacgctacactactcagcagcagatctgaacaggcctgatggttcagggctcactcctgttatggttgctgcagagtcaggccatgctgacattttcaggcttctagtgatggcgggggcagatatcgctgccacgagtgccgaagggaaatccgcgatgtcgatcatccgaagcagagctcctgaaaccagagatcggttcgaacagatcttactccaggcttcgctcgcggatgcgatcgcaggccagcagccatctttcagacccctgcactacgcggcccggatcggcgacacctcctccctgacgcagctcctgaagatgggccacgatcccaacgcgatggacgaggatggctacacgccgctgatgcacgcggccgccgcaggcaagctggaggcgtgcagggcgctggtgtcgcgcggcggcgccgccgacgcggggagcgagacggcgctgtcggtggcgaggaggagcggcaggtcgaacaaggcgacggaggagtggctgctggaccacgtggcgcgcgccccacgtgctcgccggggaggagctgacgaagcacacgcgcgggggccggggtccgccgcaccgcaaggcggtgcggatgatgcggtccggcgtgctgacgtggggggcgacccgccggaggaacgtggcctgcagggaggcccgggcggggcccagcgcggcgttcaggaggaacaggaggatcatcaggacgggcagcgaggagcagctgatcctaatggtggagacggtgaccgggagggagatccacttcgaggccacctccgcgtccagcgtcgagctatgggtcagaggcatcaatctcatcgtgcaagactgcgcgtggtcaaggccggatga

SEQ ID NO: 11019 - DNA, 546 bp, Oryza sativa
  Clone ID: TFbOSC26895j.C1.o1.gm
gagttcagggcgtaacaactgcgctgcttgatggcatagaccaagatcgcagaacggactacacccaacggcccgacaacaatgggatgttccccatacacatagctgcttctgttggttcaatggacacaatcacctcattggtcaatgccgatcaagactgtgccactcttcgtgataatgttaaaggtagaacattgcttcatatcgccattgagaatcggaagtacaaagtagtcaaattggtgtgcaaagatccgaggttcaaggaaactctgaatttggaggacaacgacggtaatactgcattacatcttgctgtaaagaaaagagacgagtacatcttcacgtatctcctacagaataaggccgtggagctcaaccatgtcaacctagaaggctatacaccactcgatcttgcaaaagtgataaggatggaagactactttgcctctccccagaacccaacagaatggatggtgagggtattggctcattctggagccgtcttcagtcctcgtaggcgtgatgaactgatccgtggtg

SEQ ID NO: 11020 - DNA, 824 bp, Oryza sativa
  Clone ID: TFbOSC418633j.C1.o14.gp
catcaaatccgttccctccttttctttccttttcccctcaatgtatctacaccacaacaaggatcttataacccagagtaacgtggtcactgatttgtgggcccgtgagtaatgacacgtcacgcttccatcgatctacaccggctatgcccgccgctatggtacaccgcaaaactcgcgcgcaaatgcggagttgaggagaaaacgtgcaacccttcactgccttgcctccgtgccgccgtcatcgccgccgccgccgacgacgaggtagagcttctgcccgtcgtggaccatgtcgacgtcgagcactctggcgccgtcctcgccgagcagccggagcccctcgccggagccggcgaggccgagcttctcctgcgccgagctgacgagcccctcgatggtgtgcgggatccacaccaccaccccttcccgccgccgctcgccgccgtcccacgggtgggggccggaacaccggagcaccgccgcgggtgcatcttgtcccgcacctcctcgccgcgctccgggtacctggagagctcgccggacttggccgcctccagcagctgcaccatcgtccggctcccgcacctgcgcccttcgtccagcggcgtcgtgccccaccggtcggtggcgaacacgctggcgccggcgtcgacgagcagcttcgccatcaggtagaggccctcggcggcggcgatgtggagcggcgcgcggtggtcgtagtccctcgcgttcgggtcgccgccgtaggcgagcgcccgccggacgaagtccgtgtcgcccctcgccaccgccgtgcacaggtggctcccggcgttctccag

SEQ ID NO: 11021 - DNA, 1254 bp, Oryza sativa
  Clone ID: TFbOSC401428j.C1.o1.fg
atgcgccacatagacatatacactctttgtttggaccggttcctctatcctaggaaaaccaggggagatagcttgactctgactggtatgttgatggatgctgatgaatcctcagcgtatcagcctgacgacaagggttctttccccatccatgtcgctgcagcagagggtaatgatggcacgatcaacatactgctcaataagagccccaattgtgccaccttgcgcaatgcccagggaagaacatttctgcatattgctgttgagaacggaagacacacaatcataatgtttgttcgcaggagaagaaggctggcagctaaaattatgaatttgcaggacaacgatggaaacaccgccctacacttggctatacaagatggggatctgcatgctgttttatgtctattgatgaacccagtagtaaaagttgattgtctgaacaaggagggtctaacacctctagatatatcaaggaagctgataccagaagggcttcttcatggatcgcatcaacgaatttggataaagaggtcactacatcttgcgaatgcacatcatgctaacccttcccttgaccatcgtcaagagaagtgcatttgccgaacggtccgtgaggaaagagattctaaaatagttgaaaaagatgacgatgaacaagaagattcaaagacaattacggagtctacacaagttatggccgtctgctccacactcattgcaactgtggcattcgcagcagcttttacattgcctggaggttatagagcagatgatcacaccaatggcggcacgccgacattcgtcggaagctacggtttcgatgcattcgtcttggccatcacatttgcattcgtctactccttgttggctacatttagcctcgtgtattcaggaatgaccaaagttgactacagcatccgcttggagcaccttaactcggccaatagcttggtctggctatcaatcaggtgcttgctagctgcatttgcattaggtttatacgttgtcctggcaccagttgctcacaagactgccttgcttatctgcctcatgtgttccgttgggttattgcacgggcatacgtcaatgaagacacagatccgcatggccgtgctcttacagggaaggattgggtttaaggtgtggtggattttgggcaggaagatacttcgaaactttctgcactcattttggcccttcctgattatctttggttgggcagcttatctgaaatggaggcaccaacagtag

SEQ ID NO: 11022 - DNA, 1173 bp, Oryza sativa
  Clone ID: TFbOSC900359j.C1.o1.fg
atgcgccacatagacatatacactctttgtttggaccggttcctctatcctaggaaaaccaggggagatagcttgactctgactggtatgttgatggatgctgatgaatcctcagcgtatcagcctgacgacaagggttctttccccatccatgtcgctgcagcagagggtaatgatggcacgatcaacatactgctcaataagagccccaattgtgccaccttgcgcaatgcccagggaagaacatttctgcatattgctgttgagaacggaagacacacaatcataatgtttgttcgcaggagaagaaggctggcagctaaaattatgaatttgcaggacaacgatggaaacaccgccctacacttggctatacaagatggggatctgcatgctgttttatgtctattgatgaacccagtagtaaaagttgattgtctgaacaaggagggtctaacacctctagatatatcaaggaagctgataccagaagggcttcttcatggatcgaagtgcatttgccgaacggtccgtgaggaaagagattctaaaatagttgaaaaagatgacgatgaacaagaagattcaaagacaattacggagtctacacaagttatggccgtctgctccacactcattgcaactgtggcattcgcagcagcttttacattgcctggaggttatagagcagatgatcacaccaatggcggcacgccgacattcgtcggaagctacggtttcgatgcattcgtcttggccatcacatttgcattcgtctactccttgttggctacatttagcctcgtgtattcaggaatgaccaaagttgactacagcatccgcttggagcaccttaactcggccaatagcttggtctggctatcaatcaggtgcttgctagctgcatttgcattaggtttatacgttgtcctggcaccagttgctcacaagactgccttgcttatctgcctcatgtgttccgttgggttattgcacgggcatacgtcaatgaagacacagatccgcatggccgtgctcttacagggaaggattgggtttaaggtgtggtggattttgggcaggaagatacttcgaaactttctgcactcattttggcccttcctgattatctttggttggccagcttatctgaaatggaggcaccaacagtag

SEQ ID NO: 11023 - DNA, 3717 bp, Oryza sativa
  Clone ID: TFbOSC401095j.C1.o7.fg
atggctcaggagtaccagacaatgccttcttctgctcacgacaagaggtactcaggactgtcgaatggtggtgacaaagaacaattgccatctcaaggtgtttgtgtcactctttcatgtttaacggttggaaaatcagaagttcctttgactactagatttgatgggaatgcaatgcaagtagatggactcctaaaaaatgtttctcccacaactaagattgtggtgaaaccaaatgaggagttgaagtcaccgttcttggtaaagcgccacctatttcttaagaggcctgatcctattatactagacgaattgtacagcttgactacaaaagtaaccgatgaagagtccagacagtctgtttgggtatcaggcaacctgccgatcaatttaaagcttgtagatatccaggaaacaataaaacctgaaggagtcatgggtataaattgcatggacttggctgttagaattatgtcaagacaggatgctgaaatttttaaaaacacaaaatgtctaggttggaggcattatgttgattcaaattggaagcaatatatcaatgatcccaacaatctgaggaacgagtattcccgtttgtctactatgtatgatccttcaggttcacatctggtattaatccctgtatcatctgatggccactggactctatatgctttcaacatgcatgataagaagctctgcattctggattctcgacgagataccagtgaaggcggtgatcaggatccagtgaagcgtcatgagaaaatccgaaaagaagtctgccatgctcttaacgaaaccatggatgttgatttcaattttctctcttggaagcatgagtttcccaaagtgcctaggcaacagaacagttgtgactgtggattctttgtattcaattttatgcgattatgggatggtcatcgactgattcggtggttttcaactgaaacaaaggagttgcggaagaactttctagcatacatactctccagtttggatgatcattcagtcctgcctactaatgtctctgagttgatcaaaaagctccctggggaaacaatgatgaatgttgagctattagaagctgcacgggcaggcaacgcaaatgcattttgtgaacttgttatagatcctgcaagaagtattaatcatgagcccttcagatctgcctcctgttcttgtcttctttttcggagcacatcatctggcagctattgtctctgttttgagtgcacatcctcacgcaattccgatcaagaaaagagtccaaacaagcataatgcattaacacgatcagatgcaccatcaacatttacgagagatacaagggacatgctacatgctattcagggtgtaacggttgaaggtgacggggtgctccacatcgctgcaagctttggtgttttggaacctgtgaaaaccgtcttggaagcgcagaatggagctttcgcaacggcgcttctgcaagcagagaacaacaaaggagacaggcccctgcactgcgcagccaccacagggagtatagttactgtcaaactcatcgttgatgaagctgagaaaattatgcgggcccaatccgatacctttgcctggtttctgcgtgcgaaaaatctcgatggccagacgtgcttgcacgaggctgtgcgccacggtcacgaagatgttgtgaaatatttggtttcgaaagatgcagatttgggggatgtcccgttgccgctggtgcagatagtggacaacgagggcacttctccgctctacttggcgaccacattacgcagagacagcattgttaaggtgctcacagaagcagcgccatcaggcatgcctagagccgcgtcctattctgggcctgcagggaaaacagctttacatgctgctgttctcttcagtgaagaactgagtagaacactggtgaattggaaccatagtctcattaagatccgggatgaatctgggagcaccccgcttcactatttggcagacgggaagtatactactgaacccagttgcatttctgttactgaacttctccttaagaaggatccatcgtcaggctactgtgaagattcagagggctcattgcccattcacattgctgctgcaaatggcacgcttggcatcattgatcagctgataaaattgtgtcctggctgtgagtcatcatgcaatgcttctggccagacaatcctccacatcgctgtccaaacggaaagccatgatgtggtgcgatttgtttgttcgaatgaaatgttcaaaatggttctgaatatgaaggattacgatgggaatacagcactccatttggctgtacagaagggacataacaagacctttggcattttgatgggatgcaagaatgtctctttaagtatcagaaacagaaatgggtatacgcctcttgatcatgccgtactgaacaaaacaagcggactgacgtatgccacatattggccaggtcaccagcgatgggtatgcaatagtttgctcgctgctggagctgattttggtactttccgtgcggaccatttgtccagcaagatcccagaacaagccaaggctgacagggaagcattctccgacacactgagcaaatctgccgcggtcatggccacatgcgcggctctgcttttcaatgcggcgcttaacatctttctgaatgtgcaagccatctaccacaacaataacaccagcaccaacaacaacaatgcaactcaaggaagcgatcagctcaagcaaattcagaaagttaagaaactcagtggagactcactgagcatctctgcatgtgccatccttttatttgcgattgctggatttcccatcttgcccggtgtcataggacgcacctttgctcttatcttgggactaggggtgctcattgggtcgtccatgattagcctgcaggcgttagcagcacggcttgatctagccaaggtttatggcacaggaatcggtgccttctgcgttatattttcgctgttgtgcgtaacgctgtgcaccaaccttttgcggaagatagtgcagcacgcgcgtccgctgtgggataggtgtggtgcccgtggattcttccgtagcattctgaatgtgcgcagagctcaaaactactctgccatcccgttgttgcaggttgttaatttgaaaacagtagaggagataactgaatgggagttgagaggagggaagggaaatggcagtacacgcatatggcgggatgagcctttttttttccttaatggagaagtggaaggaaagcgtatgtacacaaatggtctgatgggtggggagcagtggggatctagtaggttgatgggctttctaggcccgaatgccgtactattaagagggatcaacgccgaggtgtttgttgttggcctctatcggctagcacgacttgatctagccaaggtttatggcacaggaattggtgccttctgcgttatattttcactgttgtgcgtaacgttgtgcaccaacctattgcggaagatagtgcagcacgcgcgtccactgtgggctaggtgtggtgcccatggattcttctgtagcattctgaatgtgcgcagagctcagaactactctgccatcccgttgttgcaggttgtgatatctgtgcccagaaacggttgttttgtcttattgtgtgcagatggcttgaggtcagccttggttaatggtgaggaccgggactatgctcagagaggagtagaggtctag

SEQ ID NO: 11024 - DNA, 416 bp, Oryza sativa
  Clone ID: TFbOSC3151j.C1.o3.np
acaccgccagatatcaacatcagagattagcctagacaaacccaatccggtgcctatggtagccggtaagagggatctagcgctatctctgatctcgacgggttcatattcaaggaggaaaactaccccgtcatcgactacgagctgataaataaagagaaacaccggtttaggccaacaagatgtagggttattatctgtcagataagaggcccgaacctgcataaaaatccttgtctccatctcttttacctcaatctcgcatataccctggtaccaatgatccccataccatccaaataccgtagtcgcgatctcaaacgtcgacagcagctgcacaaggtggatgggtcggtggcggcgcgggcggagggcgtcggccgtcggccgcgacgacgaagactaccgcaggacga

SEQ ID NO: 11025 - DNA, 1128 bp, Oryza sativa
  Clone ID: TFbOSC3151j.C1.o6.fg
atggagaccccctccgctcccgctcccggggatggaaactcggctcccgcatcatctcgggtgacgtttgaggatatgcttcgcagctgcgatcagagttattatcaaatgctcgggttccctgacgctgcttcctacttcgaggcaaaggagcggaatttgttggctcagtactcgcgtcaggtattccctctgctatggcctatactggagaaggatagcctcacgcgcttcaatcgactttgccaagggtggtcgcgcttgatgggccttcgtggtttcatttacccggagattctcagctccattgtcgccaacaacgctttgcgctgtgccagagtggccctgcaaggcagctctccgttgcgcggacgtcgtgccgatcccaacggcctccatccttatggctacacggctctccacctggccgctgagacgttcagcgtcgaaatggtcaagctcctcctccgccacggtgcgtcagcaaaccaccgcactgagggcgactacgtcattgagggcctcctgcctcttcacgtcgctgttgagaatgccagcatgcacaaatacctggaggacaattgggctgatggccactctcctaacaacctcatatctctcctctgtctgccagagatgaagatgtatttggacacaactagattaattgcccaacatacgcataacattgtcgatgagttgtgggattacatcgataagaagaagtttgtccagttagcaattttgctgctggcttctcagaagcagctccatggccccataaataggagccgtggcaaggctaatctgaatgggtttgaatctattagacggcgcacttatgaagctatcagtggcctacatctccagatgatagctatggtgaatgaggggaaaaatggcagtgcgcttaagaagctgaaagagaagaaggaagcccttcttacagcagacgcactagttggtattatagacaaagctggtcaagatcttgaggattatattcagactaactcagagcccaccgtatgcaccaatatgtacaggcagaaatcacaatggatcctagacagaagtgattctgttctgcaaaataggggcaagaacgaaattatccctacaatttaa

SEQ ID NO: 11026 - DNA, 927 bp, Oryza sativa
  Clone ID: TFbOSC414138j.C1.o10.fg
atggccatggagacgccgccgccgttccaggagtccgcccactgcgacgtctgccgctgcaccttcaccaccttccgccgccgccatcactgccgcaactgcgggaggacgctctgccacgagcactcgtcgtaccatatggctctcccacagtacgggatatacacggacgtcagagtctgctatgattgcttcaacaaatcctccagtcgtggtggtgttggcaatgccggttcacctgggagtgtatctagtgcagctgactccttttcagggttaaacttgggggaagatgatgcttcatcacctatgaaaaattcagcgtttcacagtgcacctgctgttattgagtgcaaatgtggaatgcctttgtgtatatgcgaggctccgaaaccagaacctgtgcctgtaaagttttgtgtgcctccgcctaacgagcatatgcagcagagtatcagcacaacttcctcaagtgcacagtcgaatcctaggccaaaaaaatcttctaccaatcaacaatctgctgaatcaagtgtcaagaaggcttcggccacttcaagcagcaactcaagctcattcttaaatcttggcctgatgagcaatgatactaatgataagggtccttctgaatatgatgttactggggagggactgagggaagcaattaagagtggggatattaaagctgtcaagaaacttctcagccagggagtggattctaattactgcgataagcaaggatttgctttgctacatttggctgcactatttaaccagacagagattgctcttattctcatggataatggagcaaatattcagagcaaaaatggacaaggggaaactcctttggattgtgctccagccatgctgcaatacaagatgcgccagaggatggaagaacttgcggcatcacaacgaccctag

SEQ ID NO: 11027 - DNA, 576 bp, Oryza sativa
  Clone ID: TFbOSC100669j.C1.o3.fg
atgacgacgcagcaagcttctggtgcagatgcagagtcgggcatggatctggacggggtcaccactgaagggaacactgcactccatgttgtggccacctgcggtgatggcccgggctacttgaggagtgcaggcgtcatctacagcaggtcccaacatctcatgttagtgcagaacaacaacggtgacacacctctgcactgcgctgtccgggctggccattccaaaatggttgatcatctaattgatctggttgaaactaaggacaactcccctagcagcgcgagactggaggaactcctgagaaaggaaaactgccgtaaggagacggcctttcatgatgccgtctgcattggaaataaggatataatcaccaaccttcttaaatattattcagaattggccggcttccttatggatgcaacaggtacttcaccgttgtacctagctgtcttgcatcaacaggtcgacattgcaaagttattgcatcaaatgacagacgggaatctttcgtactctggcccaaatagacaaaatgcattgcacgcagccgttctacaagaccaaggtgtataa

SEQ ID NO: 11028 - DNA, 705 bp, Oryza sativa
  Clone ID: TFbOSC28292j.C1.o6.fg
atggatcccaagctgctcagagccgcaggccgcggcgactgcgcggtgcttgaggctctacttctgggcgccgccgccgccgccgccgcgacgccaaaccagcaagttgccatcgacgtcggctccgggcaacaatcgccgctcctcctggacgcggcgacgacaccacagggagactccgcgctacacgtggtggcggcctccggcgacggcgaagggtccctgcgctgcgcgcgcaccatctacagccacgccgcgcgcctcctggaccgccccaacgcgaggggcgacacgacgctgcactgcgccgccagggcgggcaacgcggcgatggtcaggtgcctcctcgacatggccagggaggaggagctcgccggcagcgcgggcagggtggccgaagtgatggagaggcagaacggccggcgggagacggccctgcacgacgcggtcaggctcggcgacaagcagctcgtcgaccatctgatttcggtgcatccccggcttgcccgtcttcccggcggcgacgggatgtcgccgttgtacctggcggtctcactgggccacgaccacatcgcagaggctctgcatcagcaaggggacgagctctcgtatgcaggaccggccggccaaactgccctgcacgctgctgtcctacgcggtgcagaattttcgttcatctatgccatccacgtcactcaagagtag

SEQ ID NO: 11029 - DNA, 1422 bp, Oryza sativa
  Clone ID: TFbOSC28292j.C1.o4.fg
atgacagaaaagatgctgcaatggaacgatggtctctccggcgaagccgacgcatccggcagcacagcgctccatttcgcagcctcagcggagggaccagagatcgagctcgagaagagctcactcctccggcggctcgccttgcgatggccgtgctcgcgcaatggccgccgccgccgccggacatcgactcaagttctcctgaaagccgacccgtccttagcctgccggccggacagcaacggcgagtaccccatacacgtcgccgcgtccatgggaaacctcaagctcgtggccctcctcctccacaggtgcccggagtgcgccggcctccgcgacgcccgcgggaggaccttcctccacgtcgccgtcgaccgggggagggaggagatcgtgggattcgccaccgacgacaggcggaggcgggacggctctcagctggcgacgcccatcctcaacgcgcaggacgacgacggcaacaccgcgctgcacctggcggtcgcgagcggtgtcctcaacgtgttctgctacctgctgcggaatcgcagggtttgcttggatcttgccaacaacgacggcctcactccggctgacctctcaaggtgtaccattcccgctgggcttaactacaaaacgaacgcacgaacgtggatactttggtccctggtggtagcgaaagccctcagcggcaacatccggcgcgatcacttccagcagcagtacgtacccaagctagacgagatcgccgagtccaagaaaatgacggagtcgacgcagatcctgggcgtcggctccgtcctcgtcgccactgtcgcgttcgcggcggctttctcgccgcccggtggctacgcggctggcgatggtaataataacaatggccgtggcaacgtcgtcgtcgtcgcgggctctccggcgctgtcggggaggtacgccttcgacgcgttcatgtacgccgtgacggtggccttcacctgctccatgctcgccacgttcagcctgatctacgccgggacggcggcggtggactggaagatccggcacaggtacttcaagcactccctgtcgtggatgcgcaagtcgacgaggagcttgctggtggccttcgcgctcggggtgtacctggtgctggccccggtgtcccgcgccacggcggtgggcgtctgcgtcttcaccaccggcacgctgctgttcaggaacagggaggtggtgcggatgctgatctgcgcgtacgtgctgcagaggaggatggggatcacggtgctcgcgaagattggggtccccatcaccgtcgacctggtgaagtccaatcttgtctacttggtcatcttcggtgggcccctttgcactccgctgtgcgttctgttctttgtttggaggctagcaccagtgattatgagatacgtccacagaaagttaatatga

SEQ ID NO: 11030 - DNA, 990 bp, Oryza sativa
  Clone ID: TFbOSC401769j.C1.o15.fg
atggaagaccagaagaaaaatgcaaaaccagaggggtcttctggctcgcaaaggggagctcccccggcacctgatgcaggccttcccaatccttttgatttttctcagtttagcaacttgctcaatgatccatctataaaggagatggcagagcagattgcaagcgaccctgtgttcacccagatggcagagcagctgcagaagagtgctcatgtgaccggggaacagggtggccctgcattggatcctcagcagtacatggaaacaatgacacaagtcatgcaaaaccctcaattcatgtcaatggcagaacgtcttgggaatactcttatgcaggatcctggaatgtccagtatgctcgagagtttgactagtccttctcataaggagctgcttgaagagcggatgtcccgtattaaagaagatccctctttgaaggggattcttgatgagatagagagtggtggtccatctgctatggtgaagtactggaatgaccctgaagttcttcaaaagattggtcaggctatgtcaattaattttccaggagatgctgctacttccactacattgtctggacctgaagaaactgaagaggatggtggagatgatgatgagtccattgtccatcatactgccagtgttggcgatgcggagggtctgaagaaagctttagaggatggagcagacatggatgaagaagacgctgagggaagaagggccttacattttgcgtgtggttacggtgagttgaaatgcgcagagatccttctggaggcaggtgctgctgtaaacgcactggataagaacaagaacaccccactgcattacgctgctggatatggtcggaaagaatgtgtggatcttctgctgaagcatggcgctgctgtcacgccccagaatctggacgggaagacccccatcgaggtggccaagctgaacaaccaggatgaggtcctcaaggtgctcgagatggacgctttcctataa

SEQ ID NO: 11031 - DNA, 525 bp, Oryza sativa
  Clone ID: TFbOSC400284j.C1.o44.fg
atgggcggcgacgcggcggccagcgttgtgaacgggaaggacgaggaggggtgggcgccgatccacacggcggcgagcagcggaaaagctgagatcatctccatcctgctcgatcaaggtgctaatgttgatttgacaaccgatgctggccggactgctcttcattatgctgccagtaaaggacggcttaatatagcagaaacactaatagcgcacagtgcaaatgtcaacaagaaagataagtttgggtgcacacccttacatagagctgccagtacaggaaatgctgaactgtgtgaattcctaattgaggagggggctgatgttgatgcagttgacaaaacaggacaaacaccactaatgcatgctgttatttctgaggacaaagcggttgctcttctgctagttagacatggtgctgatgttgccattgaggacaaggaaggctataccgtacttggtcgagcatctgatagctttagacctgcactaattgatgcagccaaggcaatgcttgaaggctga

SEQ ID NO: 11032 - DNA, 1251 bp, Oryza sativa
  Clone ID: TFbOSC34032j.C1.o41.fg
atggggaattcgcttggctgcgtggggcttggggagaggttggcggcggcggcgaaggacggcgacgcggcggaggcgcagcggctgctggcggcgaaccccgggctggctcggtgcaccaccttcggcaacctcaactcgccgctccatgtcgccgccgccaaaggccaccacgagataatttactgtaataatatgctcaatgatcaaatcacagacgagattgctgcattgctgctggagaatggagcagatgtgaatgcgaggaacatctatggacaggtgtggagggtggagaacctgagtgggcggacggcgctgcacatggcggcggccggcggacatgtcaagtgcgtcaggctgctggtggcggacgccgccggcgacagagacgggtacgtgaacaaggcggcgaacggcggcgtgacggcgctgcacctggcggcgctgcacgggcacgtcgagtgcgtccacctgctcatcgacgagcgcgccagcctcgccgcgcagacgctgccctgcgccgcgccgcccatggcatccatcggcgccggcagcacgccgctgcactacgccgcgtgcggcggcgaggtcaagtgctgtcagatactcgtgtcaagaggagcagacagaacagccatcaattgcaatgggattgtggtagtcaggtggctcccaatcgacgcagccagaatctggggctgcaactggcttgaacacgtcctctcccccaagtcgcatcttccgatccccaagttccctccttccggctacctctcccagccactccccagcctcatcgccattgcaagggagcaaggtctgaacttgtcttcggaggtttctgatggcttcgatgaaggagcagatgcctgcgccgtctgtcttgagaggccctgcactgtagctgctgaaggttgcgatcacgagctgtgcgtgaaatgcgcgatggatctctgctcggtgatcaaatcctacgactcggcggggatcgccggcgagatcccgtgcccgctctgccggaccgggatagcctccttccggacaaccgccgccccgccgccgccgagcctcgccgggtcgcccgcccgccgcagccgccgcaacaactccggcggcggcggcggcgagcacgaggcctccaactccggcggcagcgagaagggatacggcagcatcgaccccgacgccggcgccgtcgtccccctctactacgcgccgcccttcgcgccttctgccatcctgacctga

SEQ ID NO: 11033 - DNA, 2379 bp, Oryza sativa
  Clone ID: TFbOSC9742j.C1.o4.gm
atggatttcggaccttgcaacgagacgctcgacaccgaactgctacacgtgctgacctccggcgacgaggtccgcatggcggacctgctgggcagagaacgccgtggccatggccactccctgtcccaggtggcgatacgcgtcgacgacgacgacgacggccgcgcgccggcgggagcgagccgcctccttggcgtgacgacgggcaacggcaacacggcgctgcacgtggccgccacccgcgggcacgccgcgctcgcggcgctggtctgcgcgacggcgcccgcgctggccgccacgcgcaacaggttcctcgacacgcctctgcactgcgcggccaagtccgggcaccgcgacgtggcggcctgcctcctgtcagagatgctgcgagccggcggcgcggcgtcagcggcgctgccgctgcggcgggcgacgaactgcctgggcgccaccgccttgcacgaggccgtgcggaacggccacgccggggtggtggctctcctcatggcggaggctcccgagctggcctccgtggccaacgacggtggcgtctcgccgctgtacctggcggcgacggttggctccgtggacattgtccgggcgctgctccacccgttgcctgatggaacgccctcgccggcctcggccgctggtccggacggacggacagctttgcattctgcggcaactactagcaaagagccctccctagctctggtttgtgatatccaaggatcatttcctttgcatgttgctgctgtgatgggcagtgttaggatcgtcgttgagctcatacagaaatgccccaacaactacaacgatttggtcgatgatcgaggaagaaattttctgcattgtgctgttgaacataacaaggaaagcatagttcgctacatttgccgagatgacaggtttggtatcctgatgaatgcaatggacaatgaaggaaatactcccctccatttggccgccgagtatgggcacccaaggatggtcagtttactcttggagacgatgagcgtcgatgtagccattaccaacagggatggtctaactgctgctgaccttgcttatcgccatctgcaacctggtttgcactattttctgaatcctcgagccgtggtaaagaatctcttctactgcaccagagcaccggttaccctagaaggggatcatgctaggactggcatcccatcggccatggaggatgccgatgctcccaaggacagtggtggcgtgacatccaccggaacagtcgcgtccgtgctgatcgccacggtgacgttcgcggcggctctcaccgttccggggggctacgtcgccgacgaccacccgaacgccgggacggcggcgtcggccgggcggttcgccttcagggcgttcgcggtgtcggacaccatggcgttcctctgctccatcgtgggcacctgcctcctcgtcgtcggcgaggcgagggaggtccggccgagcaggggccgtctccgcgcctaccaggggtcggcgtgggcgctcgtgacggccggggcgcagttcatggtcgccgcgttcgcgttcgggctccaggtcgcgctcggcggcggcgcggacagccggtggctggtggtgttcgtccacgcgctgtgctcggcatcggtgctgctctgcttcccgggcatctgggcgccgttctgcctcgggaaggcttgcgtcgacctcgagccggccacgcgggcgtggaggtcgccgaagtgcgcggcggcatcagcgagaaaggaggcttgccatgcgggaacgcggaggtcgtataactggcggttcagcttcttccagcgcttccgctcggcctccacgtggctggctctgggcttgttgggacacggccgccgcccaccactgcctgctctgatcctcgccataggagccaccgctggcagtttgccgccttatcagcgactccccgtcgccaacgcgtccctccctcagttgccttcaccagcccagcgacaactccacggtggtagcttggtaggagggagagcaactgctaaagtgtcaaagctctccagggggtcgacggaggagtggaggaaggtgacatcggaggcacggaagttgtcgaagcacaacgtgttctgttgggcgtgcctcgtggacgacaaggccgtgccttggctgctatgcttcctctcctccaccaccgccgccatacaggataatgccgtggcgtcgctgctcaacctcttgaagcaccccgccgggcagatgaccatcatggaggtcggaggcgtcggcctcgttgtcgacgtgatcaacgtcgttgccaaggccgtggcgcagcataacgtagcggccatcctcttctacctctcgtcgaacaacccggatgcatcccggaggtga

SEQ ID NO: 11034 - DNA, 2358 bp, Oryza sativa
  Clone ID: TFbOSC400283j.C1.o61.gm
atggcagtgctgctgcggccggcggcggcgatcgccggcgggcggcaggtgtggccggtggcggaggaccaccaccggcagctgcgggacgaggcggaggcggaggccgcgtcgcagcggctggtggaggcggtggcgcgcggggacgcgagggaggccggggagctgctcgcgtccggccgcgcggacgtgaactacgccggggtggtgtggctcaaggcgcggcgggtggcggaggccgcgctgcgggacggcgccgccgctgagctgcgggcggcgcacgaggagatccgcgccgacgtgtcgccgctcttcctcgccgccggcaacggggacgccgcgctcgtccgtgcgctgcttgcagatgagctcgcacgggccacggccatgagggcctctgcgaagggggcggacgtgaacggcaaggtgttccgtgggtacccggcgacggccgcggcgcgggaggggcgcgcggaggtggcggcgttgctggtgcgcgccggggcgtcgcagccggcgtgcgaggaggccgtcgtggaggcggcgctgcaggggcaggccgccctcgccgtcatcttcatgggctccgacctcgtccgccctcgcgtcgctgtgcacgcgctcgtgtcggccgccgcccgcggcttcgtggacgtggtggactcgctcatcaagtgtggagctgacccaaatgctacttctcgggtgctcctgcgctctctgaagccttctctgcatgccaatgtcgactgcacggcactcttcgccgcgatcgtcagccggcaaatcgccgtcgttcgtcagctacttcaggccggagtaaagagggacaccaaggtgaggctgggagcgtggtcatgggacacggccaccggcgaggagctgcgcgtcggcgccggcctcgcggacccctacgacgcggtctggtgcgccgtggagtactacgagtccaccggcgccatcctccgcatgctcctccagaacgggtactcgtcgggcgccacccatctcggccggaatctcctccaccacgccgtcctctgcggcagcgccggcgcggtgcagacgctgctggcgtccggcgtggaccacgaggtggccgtgaagacgtccaggagctccaggtccaggcctgttcacatggccgcgcgcctcggccagccggagatcctggagatgctgataggcaagggatgcgacgtgaacgcgagggcggagggcggcgacgttgcggccatactcgccgcgcgccacaagcgcgaggattgcctgaggatcctcgtgtccgccggagcggacgtcgcgctgttgaactcggccggcgagtccgcggcttccgtcgcttgttccgggggctggaaggccggcttcgagcgcgccgttcttggcgtgattcggtccgggacgatccctcggtcgagcgaccggaacgtgttctcgccgatgatgttcacggcgcgctgcggtgacgccgccgcgatggaagttctcctggcccagccagacgtggacgtcgacgagcaggacgtggacgggtgctccccgataatggccgcggccaaggagggcaacgtcgacgccttccgcgcgctcgtgttcgccggcgccaacgtgaagctgagcaacaagcgcggcgagacggccatcgggctggcgcagcagagcaagaagagggacctgttcgagcaggtcatgctcgagttcgcgctggagaagggcatgccggggggcttctacgcgctccactgcgcgtcccggcgcggcgacaccgcggcggtgcgccacctggcgagcgcgggctgcgacgtcaacatcccggacggcgacggctacaccccgctcatgctggcggcgagggaagggcacgcggccgtgtgcgagctcctcatctcctacggcgcgcggtgcgacacccggaccccgcgcggcgagacggcgctctccctggcgagggccaccgcggcgttcaacaaggccgaggacgtgatcatggacgagctgggccgccagctcgtcctcgggggcgcccacgtcaagaagcacaccaagtgcgggcgcggcaagccgcacggcaagtccctgcggatggtcgccgcggcgggcgtgctccggtggggcgggtcggggcggcgcaacgtggtgtgccgggaggccgagctcggtggcagctcggcgttccagctgcaccggcagaggcggggctgcgacgcgtacgagcccgggctgttccgcgtggcgacggcgacggggagggaggtgcacttcgtgtgccagggcggcgaggaggaggcggagctgtgggtgaggggcatccgggcggtgaccagggcggtgtacggcaagagagggaaggagtga

SEQ ID NO: 11035 - DNA, 2088 bp, Oryza sativa
  Clone ID: TFbOSC900133j.C1.o13.fg
atggattccaagaagacgacgacgcagagcgagccgaacgatggggtgcaggcgccgcatcgtcccgagctgctcatggccgcccgccacggcgatcgcgaccggctgaaacgtcttcttggcacggtgtcgccgccggtggcattgccggttggggaggtcgtcctccatgtcgaggacgttgaaaccgtcggtgtgggtgtcgacgacgacgacgacgccgagcctacagctgcggtggtaacatcggcggaggcggtcaccgtcgcgctggactccgtcctccacgtggtggcgtccagcggcgacgagcccgcgttcctggagagcgcgacggcggtccacgccagggccagccacctcctcgacgccggcaacgggaagggcgacacgccgctgcactgcgccgccagggccggcatggtcaggatggtctcccatctcctggacctggcgaggaggggcggcggcggcggcgtcgcgggcgacgcggcggcgagggcgttcgcgaggaggcggaacagcaagggagagacagcgctccacgaggccgtccgtctgggcagcaaggcgatggtggaggcgctgatgtccgccgaccctgagctcgcccgcgtcgtggcggccgacggcggctcgccgttgtacctggccgtctcgctggggcgccgcgacgacattgcacggctgctgcatgagcacgacagggggctctcgtacgctggaccggacgggaataacgccttgcacgccgctgttcagaaaggcaaagaacgatatgagttcaatgatttatcgatttcagagacgacgaaaatgatactaggatggaacaaggatctcatcaagcaagccgaccggcacagagggagcacgcctctccacgtcgcggcgtcatgggggcaccacgacgtcatcagcttgctgctcgatgccgacccatcggcggcgtaccagcctgaccacgacggcgcgttcccgatccatgtcgccgcctacgacggccaggtcagggccgtctccatcctgctcgggctcgacaaccaccgcaagtgcgccgggctgtgctcgggggagcgcaggcgtcgagacctaagaggctgcgccgagctccgtgacggccgcgggcggagcttcctccacgtcgccgtcgaggagcagcggcagtccgtggtcgcgtacgcctgcaagctcgggaacctctcgccggcggtgatgaacatgcaggacgacgacggcaacacggcgctgcacctcgccgtcaaggccggcaacatgtggatcttcaaccctctcatggagagacgccaggtcgagctcaacttgacgaacaataagggagaaaccccgcttgatatttcttggatcgagaaaccagttggtgtttatttcggattgaatcaacgggtcaagatatacaagttgctgaaagatgccaacgccaagcaaggtaatcaccgatgggatctctttctcaaaaaacacaacaagaaggtagacgaggaggttgaagggaagaagctgacggaatccacccaaaccatcggcgtcggctcggtgctgatcgccacggtggcgttcgcggcggcgttcgcgccgccgggcgactacggcgacgatggcgcgccgaggctggccggccgctacgccttcgacgtgttcatcatcgccaacacgctggcgttcatctgcgcggggctgtccgtcatcagcctcacgtacgccggggtggccgccgtcgacatgcgcacccgcatgatctccttcgtcttctcggcgtcgttcatggcgtgctcggcgaggagcctcggcgtggcgttcgcgttcgggatgtacgtcgtgctggcccccgtggcacgcacgacggccatcgccgcctgcgtcatcacggggctcgcgctggccgacgtcgcgtggttcgtctttgtggtggccgccggcgaggtgatgctgctcaagaggctcgggattgcacgggcgtggtggcggctgccgttcgccatcatggccaccttgctgatgcaattctggccttacattgtgattgttgtcgtggtgttgtactccaagattaggggagtacattga

SEQ ID NO: 11036 - DNA, 2832 bp, Oryza sativa
  Clone ID: TFbOSC400795j.C1.o4.fg
atggcgaggtggggcgccgctcggatggcggcgtgcgggccgtggggccgcaaccggagggtcggcgccggcgacgcgttcgaggccagcgaggtgaggcgggacgggcgcagcaggatgatgcccgcgtgcgggccgtggggggcgggccatggcggcggggacccggcgctcgagagggagctgtcgcgggacggcagccactacagcatctccagcgccatcctcccgtcgctcggcgcgcggagcaaccgccgcatcaagctccgccgcttcatcatctccccctacgaccgccgatacagaatctgggagactttcctcatagttcttgtagtctactctgcgtgggtctcaccatttgaatttggcttcattccgaagcctacgggggctctagctacagccgacaatgtggtgaatgcattcttcgcggttgacatcattctgaccttctttgtggcttatttggataaaatgagctatatgcttgaagatgatccaaagaagatcgcatggcgttatagtaccacatggcttgttcttgacgtggcctccaccatcccatcagaatttgctcgcaggatactaccttcaaagcttaggtcatatggatttttcaacatgcttcgtctgtggcgtctccgcagagtcagctctctgttttctaggttggagaaggatagacacttcaattacttctgggttcgatgtgcaaagctcatttgtgtcacactttttgctgtgcactgtgcggcatgcttctactatcttcttgctgataggtaccccgtcccaacttctacgtggattggcaattacatggcagatttccatgaacggagcttatggattcgctacgtaacatcagtctattggtcaatcaccactcttaccaccgtgggctatggggatctacatgcagaaaatacaagggagatgatcttcaacattttctacatgctctttaaccttggtttgaccgcttatttgatcggtaacatgaccaatttggttgtccatggcactagtcgtactcgaaactatagggatacaatccaagcagcaacaagctttggagtaagaaatcagctaccacctcggctgcaagatcagatgatttcacatattagcttaaaatacaggacagattcagaaggtcttcaacaacaagagatccttgattcactgcctaaagctattaaatctagcatttctcaatatctgttcttccatctggttcaaaatgtttacctgtttcaaggagtctcaaatgatctgatttttcaactgttgcgtactgttacagaatatgcttatctggttcttttacttgatttcgtttttgaggtttcggagatgaaagctgaatattttccacctagggaggatgtgattttgcagaatgaagcacccactgacttctacatcttagtttctggtagtgtggtgatacaagtggctacgtcaggagaggttgttggagaaattggggttctttgctacagacctcagctattcacagttcgaacaagatccttgtgccagttgttgcgtttgaatcgtacagcttttctcagcattgttcaatccaatgttggggatggaactatcataatgaacaaccttattcagttccttaaagagcagaaggagaacagtgtaatggctggtgtcgtaaaggagatagagagtatgctagctcggggaaatctggatttgccaattacactctgttttgcagtaactagaggagatgattttttgttgcatcaacttcttaagcgtggtatggatccaaatgagtcagataatgacgggcataccgcactgcatatagctgcttccaaaggaaacgagcaatgcgtcaggcttctattagaatatggagctgatccaaatgccagagactcagaaggaaaagttccactgtgggaagcgctgtgtgagaagcacgccgccgtcgtgcaactattagtcgaaggcggcgcggatctgtcgtcgggtgacacgggcttatacgcttgcatcgccgtggaggagagcgacaccgagctgctcaacgacatcattcactacggaggcgacgtgaacagggctcgccgggacgggaccaccgccctgcaccgcgccgtctgcgacggcaacgtccagatggccgagctcttgctggaacacggagccgacatcgacaagcaggacggcaacggctggaccccgagagccctcgccgagcagcagggccacgacgacatccagctcctgttccggtcgcgcaaggcggcgacggcgagtggccaccatcacgtcccaagctccaccaccaccagggtggcgccggcggcggcggcggcatcactgatcgggaggttcaacagcgagcccatgatgaagaacatgatccacgaagacgccgacctgcccagccgggttctccccgagaagctccggaggaagcgggtcaccttccagaactccctcttcggggtcatctcgtcgtcgcaggcgcagcgggagaccgaccacccgctctcgaggggtggcctcgcggcgacgggctccccgaacccgagcagcggcagccgcaacgccgtcatcagggtgacgatcagctgccccgagaaagggaacaccgccgggaagctcgtgctcctgcctcagacgctggacatgctcctcgagctcggcgccaagaagttcgacttcgcgccaaccaaggttctcaccgtggagggcgccgaggttgacgaggtggagctcatcagagacggcgatcatcttgtgctcgtcagtaatgaatgggatgcagagaagatgaaaggcaagagctag

SEQ ID NO: 11037 - DNA, 2334 bp, Oryza sativa
  Clone ID: TFbOSC4903j.C1.o2.fg
atgtcgcggcgcagggcggccgctgtggcggcggcggcgcgggaggaggaggaggcgtcgcccgctcagcgtctcgtggaggctgccctacggggggacgtggtgaccatggaggcgtgcctggcggccgccgccgccgctgccgcagcggacgacgacacggacgatggcgtgcccgcggcgagccgcgtcggggtggcgcgcctgcgggtgaggtgcgctgaggtggccctccgcgaggaggcggccggggaggtgatcgtggagtcccgcgagctcaagaccgacgtctcgccgctcttcgccgccgcgcacgccggtcatgccgaagttgttcgcaccctcctgagtggaggtggtggaaaggtggctggtgtatcaagttgtaaaaaagtatactgctcggtatttgaggttgctggagctgatgttaatcaaaagttatttctaggctatgcaacaacagctgccgcacgtgaaggaaacatccatattctagagatgcttctgcaggctggagtcactcgggaagcttgtgaagattccctatcagaggctgctctttttgctgaggctgaagccgttcggctattagtctgttcagagatgatacagcctgaagctgcagcacatgctttggtgactgcttcttcaagaggctttgatgatgttgtggtcatactactgcagaatggggttgacgttaattccatggctagggtcctcttgaggtctgttaagcctgcactacatgctaatgtgaattgcactccactggtggcagcagtaatgagccggcaaatttcaactgtgaaactcttgattgaggaaggctcttacttggactgtcttgtgcaagttggttcttggtgttgggactctgcaacgggtgaagaacttcgtgttggtgcatgccttggggaaaaatacaacgccatttggtgtgcagtagagtactacgaatgcagtggtgaaatcctcaaattgctgctcgataaagcaccatggttgctggaaaccccacgcaagggtcgaaatcttctttgccatgccatactctgtcagaacccgaatgcagtaagcgtgcttctaaatgctggtgccaatcccagatttcccataatgatgacaaacggcacacacgtctcctacccaatacattttgctgcaaggttgggtcatgcgcccgtactgaaacaactcatgttggatggggctaatatcaatgcgcagacttctactggggacactcctctgatggtctctgcgaggtgtggacactccgattgctttcttgaactgatcaaatcaggggcagaccttgggatagtgaacaatgcaggtgacacagcaataatgcttgctaagaaaagctcatttagctcaaccatcatcgacattctttccagagcattgagttgcggaggctgcatcacttcatcggatatcaccgtcttctctccgctgcacttcttcgctgcaagtgacagtgcagaagctcttctaatgacgctacactactcagcagcagatctgaacaggcctgatggttcagggctcactcctgttatgatatcgctgccacgagtgccgaagggaaatccgcgatgtcgatcatccgaagcagagctcctgaaccaagatcggttcgaacagatcttactccaggcttcgctcgcggatgcgatcgcaggccagcagccatctttcagacccctgcactacgcggcccggatcggcgacacctcctccctgacgcagctcctgaagatgggccacgatcccaacgcgatggacgaggatggctacacgccgctgatgcacgcggccgccgcaggcaagctggaggcgtgcagggcgctggtgtcgcgcggcggcgccgccgacgcggggagcgagacggcgctgtcggtggcgaggaggagcggcaggtcgaacaaggcgacggaggagtggctgctggaccacgtggcgcgcgcccacgtgctcgccggggaggagctgacgaagcacacgcgcgggggccggggtccgccgcaccgcaaggcggtgcggatgatgcggtccggcgtgctgacgtggggggcgacccgccggaggaacgtggcctgcagggaggcccgggcggggcccagcgcggcgttcaggaggaacaggaggatcatcaggacgggcagcgaggagcagctgatcctaatggtggagacggtgaccgggagggagatccacttcgaggccacctccgcgtccagcgtcgagctatgggtcagaggcatcaatctcatcgtgcaagactgcgcgtggtcaaggccggatgaagctgagcaagcatag

SEQ ID NO: 11038 - DNA, 1206 bp, Oryza sativa
  Clone ID: TFbOSC406054j.C1.o11.fg
atgcggcaacaagaaggtggggatcaccggcatgtggcagctgatgatgaactcctcgcgcggctcagtagccagagggacaatgacaacgggagcacacctcttcacttggccgcatcaattaacgggttaccgtcggcactatatattcccatatgttctccgcgagttttggcgccgttgcggcggccaaagccggtggagctgctgctgaaagccaacgaattcgcggcgtaccagccggacaaccaagggatgtacccaatacacgccgccgcgtcggctggcagcctggagaccgtgaagatcctgcttgagaaacacccagactgcgccactctgcgagatgcgagaggaagaactttcctccacgctgctgttgagaagaagaggtttggagtggttaagtatgtatgccactggaagaggaaggaaagcatgatgcctctaaaatgttattatgcatgggatctaagagtccacatacgaacattgctattgaaattgggagctccatatggtgaaagtcagagccacatcttcaacaaaaaacgacacgccatcatcgtcgaccccaaatttaaaggaggcgaggaaaagatgttggagaatgtaacagctgcaacgcaagtcttggcccttttctccgtcctcatcacaaccgtgacatttgcgtcggttttcacgttgcccggaggctaccggtctgccggcgatggtggcagtgccgccggcacgccgttgcttgctgggcgtgggtgctacgctttcgatgcgtttatcctctctgacgctctagcattcgtttgctatttcatggctacgtccgtcctgctctatgccggggtgcctgcttataaactcgaggtccgcctccgccacattaattttgcatatagcctgatgatgaattctggaagaagcttggcggccgctgtagctttgggactctacgtggtgctgcttccaccggttggccgcaccattgcgatcgcgatcgctgccgcgatggtcatgcttgcacttctgctcagcaaggcatcagaaggcatcgagtctctcttcggcattgctattgcaagaaaccggaagctgtcaattcgagactctgtggtaggcttcactatatatgtgggggaacgctattggtccttcatcctaatcttcggcctcccagcaattcgtaagtgggcaagggcagggtaa

SEQ ID NO: 11039 - DNA, 1401 bp, Oryza sativa
  Clone ID: TFbOSC406019j.C1.o1.gm
atgttgtgctctgcttcggagcaagcacagctgttgctgaacgacaacctgaggagggtcctgctgcggattcccccgttgctgatgctgcaactggaggcgctgctgctgaaccttatgcgcgtcatgatgtggatccccccgctgcttttgctcacttaccaaataacggcgctcctcatggagaagaagaagaaggtcaagccactgatggcgcttctcattcacaacctcaaaccatcgacggcgctcatcatgcagaagatcaaaccgtctacgactttccaattgcacaagttgctatcaacgaagaagttggaggagctcaaaatattcaccgtgatccgcatgaaaataaggaaggagctcaaggccaagttggagccatcaacccccaacttcatcaccacaccatggcactttgtgcgaaaccgagtagcaatagcaaggagagaacagtacgagagcagaatagatgcggtcaccgccgaagggaacacggttcttcacattgctgcaagtagggggcacgcccatgcccctggtccagatgggacgagccaacaagaggacctgatcacagtgctctacaaggcgcgctggcacctcctttcttctctgaactcggagggagagacacccttgcaccgtgcagccagggcaggccacgtccacgccgttcagcgcatcattgccggagtgaaggaaaatctggaaaagttagcagaaaaccagctcatggacattattgcaacaaggaactgtgccggtgaaaatgctttgcatctagcggcaatgcacggcgatgcccaagttgtgacgacgttgttgaaatatgcgcgggatgcgcgtttgtcgtctgtgttgaccgaagccaataacgcatcggccctctacttagcggtcatgagtacatcgtggccaccgtcaaagcactattcgctcacgaatgcaatgatacgtcagctcaaggtccaaaagggcagaatgctctacatgctgccgcagttctccagaatagaggacagtgaaggaagcacagcgttacatatcgctgcgctgatgggccatgtcaatgttgttcgcttgctgataaaagccagccctgattctgctgatattcgtgacaaacaaggcagaacgttcctgcatattgcatgtgcagacgaaggatggcaacgacctactgttcgttacgttgttaaaaacccaatgctacatgaccttttgaattcacaagataaggaagggaatacgccgcttcatttagcagcgaatcatggaaagttcgtagatgtttatgctctgatatccagcggaaaagtgcatccagatattatgaatgcagagggagaaaccgcatttgatattgccaagaataccgttagcttcttcttcatg

SEQ ID NO: 11040 - DNA, 2199 bp, Oryza sativa
  Clone ID: TFbOSC400867j.C1.o7.fg
atgcttttcgccaagctcgatgactcgcccatgctccgcacgcagatacagtcactggaagaaagtgctgaaattctcagggagagatgtttgaagtttcataaaggttgccgcaagtatacggaaggattaggagaagcttatgatggagatattgcatttgcaagctcactcgaaacatttgggggaggccacaatgaccctataagtgttgcttttggtggacctgttatgaccaaatttacaattgccttgagagaactaggcacatacaaggaagtcctccgctcccaggttgagcacatgctaaatgacagattgctgaattttgtggacattgatttgcatgatgttaaggatgcacggaagcgtttcgacaaggctagcctcttgtatgaccaggttcgtgataagtacctgtcactgaagaaaggcacacgagctgacataacaactgccattgaagatggatacgacctattgcatcagatggagccatatattaatcaggttcttgcttatgcacaacaatcaagagaaagggcaaacaaggagcaagcctctcttgtagagagaatgcatgaatacaaaaagcagatagatcgggaaattcgtttatcaaatggtttgactgatgcccataatggtgatggaattcaaacgattgctagaagttcacataaaatgattgaggcagtgatgcagtcggcctcaaaaggcaaggtccagaccattcgtcaaggttacctctcgaaaagatcttcaaacttgagagctgattggaaaagaaggttttttgtccttgatagtcgaggaatgctgtactactatcgcaagcaaattaataggacacctggtggttgttccagtcacccaagaagcattggcaaccccactgaacatggttctgggttgctgagcagactattctcatctcattaccatggcattatacatgatgagaaatctgttgcacggcatactgtaaatttgctgacatcaaccattaaagtggatgcagaacaatcagatctgaggttctgcttcagaataatttcacccacaaaggtctacacactacaggcagagagtgcaatagatcaaatggattggattgaaaagattactggtgtcattgcatctttgcttagctcacaatccccagaacagtgttttctgctaagccctaagagctgtggccatgatggcagtgccagtgaaagtagctcctttactagccaggatctggaaccttccatgtatgatgacttaacattggaaaagaacactggaaatgggcaacatgatgtcagaggcacacattatcacaagactaacatgaaacctgaaaaaccaattgatttgcttaggaaagttgatggcaatatcatttgtgttgattgtggttctatggaacctgattgggcatcattaaaccttggtgcacttctgtgcatagagtgctctggggtacacagaaatctcggagtgcatatatcaaagttaatcagcactacattgttccgcagcgctcatggattagatacggcatggcacttcactgtcagcaagcctaaacactcagatcctttctctgccaaagagaagtttatccatgccaagtatgctgacaaggaatttgtacgaaagtatagcatggatgagattcagctagctcagcagatgtgggataatgtaactgcaaatgacaagagagctgtatacagtctcatcgtgcaatcccgcgccaatgtaaatttagtttatggagagatgtcctatagttcacgttcgactactggaagatcatctcagcaagagcactcttcctcaccatctgatggaagccctgtatttttcgattgccattcacatgaaaaagtttctcctagagagcccctttctcctgccagcacaagttcacgtgtagatgatggggaagaaagatgcgaagatgttggaatggttgaattacttttgcagtacggagctaatgtaaatgcaattgattcaagaggccggacaccccttcatcagtgtatattgaaaggaagacacatacatgctaagcttctactctccaggggggctaatccacaagttgcggaccaagatggcaggacggcattacagtgtgccatcgacggtggaacaagcgacgacgagattcttgtgttgttagaagattatactagataa

SEQ ID NO: 11041 - DNA, 1248 bp, Oryza sativa
  Clone ID: TFbOSC401493j.C1.o1.fg
atgtgtgataagaagctcagtattctggactctctaccagatgccagtgaaggtggtcaggatagtctgaagcgtcatgaggaaatcagaaaaattgtatgtggtgctcttaacaaaaccatggatgttgcgttctgttttttctcttgggagtacgagtttccaaaagtgcctaggcaacagaacagttatgacggtgggttctttgtattcaattttatgcgattatgggatggccatcgactgattcgctggttttcaactgaaacgatggacatgcggaagagctttctagcatgcatactctccagcaaaaataatgatgccaccatgcctactaatgtttctgagttgatcaaaacgctcccaggggaggccatgatgactcctgaattggtacaggctacgagacagggcaatacaaatgcatttagggaacttagatgtcctgcacgaagggagggttcatatggaggccatacctcaataagtattaatagagccgcttgctgttcttgtgttttttttgagagcacatcatcccgccgttcttgtttccgtttagattgcaagtcctcatgccgttctgatgagcaagagaatcagattatgcggagtccattgcgcttagatgcaacatcaacagttactagtgatagaggtccacctgagccatactctatccggggtgtgacggttgacggggacggggtgctccacattgctgcaagcttttgccatttcgagcttgccaaatccatcttggaagggcaggaggacaaagccctcatagttatgctactacaacaagagaacaagagaggagataggcccctgcactgtgcagctgccacggagagtaaagaaatggttcaactcattgtggaaagagcgaaatgtatcacagagccgtccaattttactaccaatctgctgcgtgcgagaaatttggagggccaaacatgcttgcataaggccattctactcggtcacacggagatcgtcaagtatttggtttcgcaagatgaaggattggcgcaaatagtagacaacgaggatatttctcccctctatttggccatcgcattacgaagaggtgacattgtccaagaactgacaataaaagcatcgtgtgggcctgcaggtgccgtgtcgtattgtgggcccgcagggaaaacagttttacatgctgctgttctcttcagtgaaggtacagacgcaatctcaagttttgttgtcaagttttga

SEQ ID NO: 11042 - DNA, 879 bp, Oryza sativa
  Clone ID: TFbOSC900166j.C1.o2.fg
atggcaggtatgacacctttggcttgtgcggtgtccaagggaaaagcaattgctgtgaggtattttcttgacaaaggtgctgatccaaataagcaagacaacatcggttttactcctctgcactatgctacaaaagaagggtatgatggactggcacgactactgctgtctaaaggggctagtgttgatgttatttcttctaaaggcacagccctgcatcttgctgcctccagttggaagtctggcatcatgaagattctattggagcacaatgcagatccaaacaaggtctccgcagattcagagacaccattagctgcaacacttattgcttctgatggactgaatgaacctgctgtgctgaagtgcataaagcttcttgttaaggctggtgctaatttgaaccgcgctattcctgatacaccactggtgatagcaactaacaaagactttgttgaatgtgttgagtacttgttggaggctggtgcaaacgccaatattccaactaataacggtggtaagacaccaatagaaatagccgcgaagtctggaagaaggaagcttgtggagattctatttccttgcacgttgccaattaaaggtgtgtcaaactggactgttgaaggaatcatcacccatgtgaaatcaaaaaaatcaaagaagaaagcatgcgctcaggataaggaaagtggtacagacaaaaaggctcagttgaaatcattgggtgcaagtgcagttcaggggaaggactatgttggtgcatccaaattctacagtgagatgagggtgagaggagtagcaactggcatttccttggtgaggttaaacatggaagaggatgaaaaagtgcctggaagttctaataccagttacatttag

SEQ ID NO: 11043 - DNA, 1461 bp, Oryza sativa
  Clone ID: TFbOSC400090j.C1.o61.fg
atggtgatcttggatagatattgtgaagcggtggaatatttagtgaagaatctggatcattcaatgccaatgcaaacaaccgacaaaactgatgctgtgaaatctatgctttccggagagaatagtgaaggctcagatggatcaaagtcatcggacacagttgagtgggacccatgggaccctccgcatcctccttgtcctactttgccacccacagcaagccttatgagccaagtggaaatggtcaaacagcatcattttcaagtactggccgtacttgctgcttccagggccacaaatataattgccccagaccgtactcctcaggaggtgcgccgtaaatttgctgaaatatgcagtgaactggcggacatccttgaaaaggacagtgttcggagattcctcaacttgtacagaagaaatatgcgtatcatgggttggggtctggtcatcacatctcaaacaatggacttcattgtttcattcaatgccctgcgttgtgctaaggttgtcttggagggcaaggcacctaagctttgtcagatccgtgccaaccccaactacatgactagctatgggtacttccccctccacaaagctgctgaaaaattctcagttgacatgattaagttgctgctttgttatggtgcatcggcgaatttacgcacatcaggccaaaaggtcatcgagggcctcctcccactccatgttgccattgagaacacttgcatgcacaagtatctggaggacaatctattaactgaccggaagctcaagcaagtggatcttgacttcatctacaagctcatccatctgctttgtctgcctgagatgaagattttcttggacacgacaagactgcttgcagataacacagataatattgttgatgagctatggaactacatcaaggaggggaggcttgtccatgctgctattttgctccttgcagctcaacgaaaaattcgtacctgtgcttcctctaatagaaacatcagctgtaacctgaatggatttgatattatcagggatcgtgttatgggatccatagtttccatagaaagggaagggcgtggattaacaagtggtaaaaatagcaaggcacataagcagctggaggagaagcggaaattttttcataattcattgatgctcatttttgtaatttcgaaaaccggtgaagctcttgatgagtatatccagtctcattcagaggtctctcatcaggaggtgcttgagggtgtttcatcaattctcgatgatcatggttttgctcctactggaaaagggatcagcataggagacctggaatgccgtccctatgactgcaatgcgtcgaatagtgtgccgaagtgcaactatgaagattctggtacgaccaaggcagttggagaatctcctaatctgaatgttaaagctaaaaaatctgcaccagtagttatgctttatggatttggctga

SEQ ID NO: 11044 - DNA, 2250 bp, Oryza sativa
  Clone ID: TFbOSC402265j.C1.o11.fg
atggagaagccggcgtcgtgctgctgctacttcccgctgcggtgggagagcaccggcgaccagtggtggtacgcgtcgccgatcgactgggcggcggcggacggccactacgacatcgtccggcagctgctgcacctcgacccgaacctcctcatcaagctcacctcgctccgccggatccgcaggctcgaggcgctctgggacgacgacgcgcgcttcgccggcgcggcggggcaccgcgcgggcgtcgcccggagcctcctgctggagtgcgagtgcagcaagaacgggggcgccgccgccgccgccgagaacacgctgctccgggcggggtacggcgggtggctgctctactcggcggcgtcggcgggggacatggcgttcgtgcaggagctcatggagagggaccccttgctggtgttcggcgagggcgagtacggcgtcacggacatgttctacgccgccgcgaggggcgggaacgccgaggtgttcaggctgctgctggaccacgccatgtcgccgaggtgctcgacgaattgccccaacggcggggaaggcgcgcgcggcggtggcggtggccgctcctcggtgttccggctggagatgatgagcagggcggtccacgccgccgcgaggggcggcagcgtggagatgctgagggagctcatcgagcgccgctccgacgtgtcggagtatctcgacttccgtggatccaccgtgctgcatgctgctgcagggagagggcagctagaggtgaggcatctacttcttggccattgcttacttcactacttctgcaaaatgcaccatagtgaacttctgtttgtgccaatatgcatggatgacaaggttgtcaagtaccttatggccactttcgacattgtcgattcgactgataatcaagggaacacggcattacatgtagcggcctaccgagggcatctgcctgttgtagaggcattggttgctgcatctccatcaaccatttcagctgtcaacagagctggtgatactttccttcattcagcaattgcaggtttcagaaccccaggcttccgacggcttgaccgccaaatggagcttatgagacacctgatacgtggaagaacatcaaatatccaaaagattatcaacctgaagaatgatgcaggcctcacagtccttcacatggctgtggttggttgtgttcatccagacctcgtcgaactcctgatgacaaccccatcgatcgacctcaatgctgaagatgccaatggcatgactccactggcattgctgaaacagcagctgcgctcttcaacatctgacaagctcatcaggcagatagtttccgcaggaggggtgctgaattcgactgttctgcgaactcggtcagcgatcgtttcgcagataaagatgcagggagggattgcaagcagccccggtacaactttcaagatatcagatgcagagatcttcctctactccgggatcggaaccgcggagtcccgacgccctagctcatgctctagcaatggcaagtgtgaccatgcccatcatggagatgcaaaatgcggaaatgctgaaaaccatggatcttcagagaagaggctgagctctgccagccgtgccaaggaccgtctcaagctgatgctgaaatggcctcgtcagaagatgtccagaggacacaagaaatccgacgatggcgacgccatggattccatcaagaagctgagcgagcaggccgtcgagaccccggccccgctcaggcagacattcaccaagacgacggcgctgaacaacaagaggaccctcgcggtgaagacctcgactcccagctcggccaccaagaagaagctcaacagcaagctcatccacggcatcatggaggccatgccgcacctggcgtcctcgtctccggcgtccgccttcccgaggtcctccaccccgccgccgccgcagtccggcaagatgaagggcgtctgcctggaactggacgacgagaactcgatgacgacgccggtgttcggcaagctgaaggacatcgtgctgaacaacgacgacgatgatgacgccatgggcgagccgtcgagctcggggtcgtccgtgaacgacgacgcgtcggcggagatgccggcgcggcggcacgggtgcggcaacgggaggctgatcaacatctgcttcggcgcgcagggcctcaccgtggaggactcggccagcgggcagcagaccagcaagatgttcaagcagcagtgcctcagggtgtcctga

SEQ ID NO: 11045 - DNA, 1719 bp, Oryza sativa
  Clone ID: TFbOSC407936j.C1.o23.fg
atggccgacgccaccgccgccctctcagagctcgctgcggcgctcgacgaggagggcaagggcgtcgccgccgtcgctgctgccgtcaaggacgccaacaagcgcaccgccctgcacttcgccgcccgcgagggccgcacccacgtctgtcacttcctcatctccgacctcgccctccccgtcgaccccaaggacgacgatgggaacctggaccttatgaaactatttctctccaagggggttgatgttgaatcagaaagcgatgccggcacacccctcatatgggctgctggtcatggacagcaagaggcagtcaaacttttgcttcaacacgatgctaaggcttctctttgtttagcactcaaccacctttcaatcagccgttcatgtggcctttccttaacttttttactgaagctagttattgcttggcagccaaatactgaaaacgatgatggtattacgcctttgttgtctgctgttgcagcgggttccctcccatgcttggatattctaattcaggcaggtgcacatccgaatatcagagctggtggagcaaccccattacatattgctgcagatggtggaaacatggaaataataaattgtttacttaaagctggaagtgaccccaatgcatgtgatgatgatggactaaagccaatacaggttgctgctttgaggaataaccgtgaagttgtggaacttcttttacctttgacatcaccaattccaggtgtttcgagttggagtattgatggaattatagaatacactaaatcagtcgaggaaaaggcacaggtaaaggaagctacaactcagaaagcagacagattacaagtaccacaacttgttgaggtgtcatctgaggcaaaagagagatcattggaggcaaaatcgagaggtgatgatgccttcagaaataaagactacctagtagcagtagatgcctacacacaggctattgagttaaatccaaacgacgccacgttgcattcaaacagaagcctttgctggctacgggcagggcaagctgaacgtgctctggaggatgcaagagcatgtcgagcgctgaggccagactgggcgaaagcttgctacagggaaggcgcggcactgcgcctgctgcagaggttcgaagaagccgcgaatgccttctatgagggggtgcagcttgagccagagaacggcgagcttattagcaccaagctaatcgaccagcttgctcgtgatgacgagaagatcaaaaagaaaaccaggaaacccaagcctaagaagactgtcaaacaacatcaacaagagccccaggacaactcaagggaactcccagcttctgaacccaaggctcctcctggctggccactgcagcctcccatgtatctccccgtaacccctgctcctccaccacccccacctgctttttcagagctggaagccatccgtgccgttctggaagagagcgaaaaggttcaggagaagctggataagcagcatgctgggatgcgtgatgaactcatcaagaaatcaaaagacctgcgtgacaaggagttcaagctgccgtaccaaaaccccacgccatgcactgaggagaggtcaaactgccgccagtgttacgtgagcaatgcacaggacccactcaagtgtgctgaggcagtcaagagatttgaagcatgtgttcgcctggcgaggcaaaggggcaacacaaaagttgctcagtag

SEQ ID NO: 11046 - DNA, 1332 bp, Oryza sativa
  Clone ID: TFbOSC409221j.C1.o5.fg
atggcggaggagctccccttccccgctaacatcgaagtgatgcgccacacgccgcggttcaagctcatgcaggcggcattccacggcgacctccgcggcttgaagcggcaggcgaagattctggatatggggaggggccgcctgaggaaggccgtagaggatgtgagggtggaaggcgtgccgggcgaggaaggtacaggggtgctgcatatggctgcctcccatggccacatggagatgtgcaagtacctggtcgaaacgcttcaggtggatgtggatgatgcggatgacaaagaaaattttaaaatagactctcttgtcagctgtttttttaacaaaaggttttggccaaatgcccaaacccataagggtggtttggcaaggcaatccacaccaggtagaacatctctacttaaggcggtacattctgggcatcggggaattgccaagtatcttcttaatcatgacgccaatccagacctagccatgtgctgtgggcttacccctctacattctgccgctggattaggtgattgtgagtccgtaaaactattgcttgcaaaaggagcttatgttgacccaatgtctacttttgggacaccacttcatcttgctgctaaagaagggcaggatggcaccatgaagatattgttggacaacaatgcagattgcaacaagatggtaaacggtataacacctctcctccttgctatgaaagctgcatcagcaaaatgtatggagctgctggttgaggctggagctgatgctacttactctgatgtcatctggaattatatgtcaactacttttatggatgatgaagatagtggttcatctgtgttctcggattctgaaccagaagagattgatgccaatcaccatattcccgtcaatgacaaacctgtgaatcgaaggaaaattgcagagtttaagtcgttagggcttgaggcagttgagaagaaggattatctttctgcagcaggattctacagtgaggccatggaccttgaccctgatgatgcaaccctgctgtccaataggagcctttgctggctttatctgggtgaaggaggcaaggctttggtggatgctcataaatgcagaaaaatgcggcctgactggccaaaggcctgctaccgtcagggtgcagctttaatgttactgaagatggttttcaatgttagcttgatttttttttggcaggactatgtgagcgcgtgtgaagcactttttgatggattcaagttggatcctgaggacgttgagattgaaaatgcattacgggaagctctagagttcttgaaggtgtctcaaagcacttcggctaactga

SEQ ID NO: 11047 - DNA, 330 bp, Oryza sativa
  Clone ID: TFbOSC421294j.C1.o1.fg
atggcgacgttgctggatgatgggaggggtcgaatcggggaggcggtgcaggcggccagggtgagaggtgcgccgatgggcgggatgggggcgctgcacctcgccgccggcaaagggaggctggaggtgtgccgctacctcgtcgaggagctgcggctggacgtggatgacgctgaccaggaaggtagaactgctctgattattgcaacactttgtaaacatttaagcactgtcaagtatcttcttgatcatggtgccgacgtaaacaaagccagccatgatgggcgcacccctctacattacgccactcatttaggtgcccctctataa

SEQ ID NO: 11048 - DNA, 1341 bp, Oryza sativa
  Clone ID: TFbOSC401721j.C1.o26.fg
atggggcacggcctgagctgcagccgcgacaccgacgagtacgacctgttccgcgcggcgcagctgggcgacatccacgccctctccgccctcctcgccgccgaccccgcgctcgcccgccgcgccacagtctacgaccgcttcaccgctcttcacatcgccgccgccaacggccgcctccaggtactgtccatgttgctggatcgcgacggcgacgtggacgtcctgagccgcaagaagcagacgccgctgatggtggcggccatgcgtggcaacaccgagtgcgtggtcaggctcctccgcggcggcgccaacgtcctgaccttcgactcgccgcgcgccaggacgtgcctccaccacgccgcctactacggccacgccgagtgcctgcaggccatcctcggcgccgcggcgcaggcgcagggccccgtggccgcctcctggggtttcgcgcgcttcgtcaacgtgagggacgagcggggcgccacgccgctgcacctggctgcgaggcacgcccgcgcgtcctgcgtgcgcctgctgctcgacaagggcgccatcgtgtcggcgccaaccgccgtctacggattccccgggagcacggctctgcacctggcggcacgcgccggcagcatggagtgcatcagggagctgctggcctggggggcggaccggctccagagggactcggcggggcggatcgcgtacgcggtggcgatgaggcgggggcacagggcgtgcgcggcgctgctgaacccggcggcggcggagcccatagtgtggccgtccccgctcaagttcatcggcgagctggaggcggacgccaaggcacttctggaggcggcgctgatggaggccaacagggagagggagaagaggatcctgcacggcagcgacatcaacatcaagggcggcgacgaggaggaggagagcgaggatgaggaggaggcgtgcaacatctgcttcgagcaggcgtgcagcatggaggtgaaggagtgcgggcaccagatgtgcgcggcgtgcacgctggccatctgctgccacagcaagcccaaccccaagaccctcctcctccacccgcccgcctgccccttctgccgcaccaccatctcccgcctcgtcgtcgccaccaccaactccaacaagaccaacagccgccgccggtcgaggagcagaagcagcagcttcaagggggggctctcgtcggccatggggtcgttttccaggataggccgcggctccgggagattggtggtggacggcagcagcgtaggagagctcgccgacaagcctgaccacgacttctcttctgtcgccgccgctgctgctatttgtgacacatga

SEQ ID NO: 11049 - DNA, 1050 bp, Oryza sativa
  Clone ID: TFbOSC18816j.C1.o2.fg
atgacaagctttcaacactacaaatgccaaaaattaatttgcacggattttgttgccatctccaccgatgttatatgcaattggggaaaaaagcgctcaccaaacaccgtaccgacgcctgaagggaggaggccacacgatgacgtggaacaatggagagaagccgcgcataccgccgcggcggcggcggcggcgacggcaaatgaggccgtgccgtcgtcggctaccaccgagcagcaggaggcgcgtccggatgatgagcgggcgccaaaggatcacaccggctgcgaatgcaagcccaaggtggtaatgctcccggagctactacgagccgccagtcatggcgatctccagaggctgcgcgttctcctaggtgtcctacacgacgatgagtcgccggcaccgacgacgacgacgacgacgaccagccaagacgacgacgctgtcgtcctggaggtttatcgctctgcacccctactaccaccaccctctactactgcaggtgaaggtgaagatgaagggacgttgtccctcctggagggaaccacgtttcagggggactccgcgctgcatgtggtggcgagcagcggagacgacggcgacttcttgaagagcgcaaggctgatctatggcaaggccaggcacctcctcgaggcgaccaacaacaatggcgatacgcccctccactgcgctgccagagctgggaatgttaagatggtcacgcatctcctcgagctggctggaggcgatggcgccggcgatcaacggaagaagctgatcctgaggaaaaaaaaccaccagcatgagacggtgttgcacgaggcagtccgcctcggcaacaaagatttgatcgacaagctgatgacggaagatccagagctagctcgtcatccaagcaacggcgccacttcaccgttgtatctggctgtgatcttgccaaatccacaagttgcgatgcagctgcatgggtatgataaaatgctgtcctactcgggacctgacggacaaaatgtcttgcacgctgctgttcttcgacaaagaggtacgtaa

SEQ ID NO: 11050 - DNA, 2151 bp, Oryza sativa
  Clone ID: TFbOSC900348j.C1.o4.gm
atggtggatactaaggctagagttcaatgcacgtggaaggtgaaggacaccagcggtcagaccggcgacataagggcggtcagaccggcagcggcagccaggcagcagcaggagtacataaaatttgagatgaaaccaggagaagctttggatgattatcttggtagatataataaaattttgagtgatcttagatctgttgattcttcttatgatgttaattatacacaatatgaggtttctcgccactttttgaatggtcttgacatgatggaagataagggtgatgagaagaccaacgacaacaagccgaatagtatagttaaaggagggaagaagatcagggagactctcaagaaggcttttgatcaagtctatgccccgtttgggccactaagcgatgtagatgatgagagtggagatgaagataagggaaagaacatctccgtggatcccacggtcggaccggcgaccggtcagaccggcagcagcgcctcggtcagaccggcccctggtcagaccagctcctatgttgcgtactatggcttcgacttctgcttgtgtgtagactttggtggcgaggaaggagagcatgtggatcatggattccggttgttcgcggcacatgactggtacattgtcacaggttcaggggaggatggtcgtatttttgaagacgagagcgacgacgacgacgacggcgaggtcggctcggccgtgagggtacagaacgtgaaacaacttcagaagtcgctgctactttgcacattcaacgatgacatccgccggaacaaattattggtggagggtttggagtttgatgaaacttttggtcctgttgctagaattgaagcaattagacttttgttgacttttgctcaaggttttgaagcaatcagaccggcgcagaccgcgtccaaccggcaggacaccaatggtcagaccggcggcatcgcagcagtcagaccggcggccaccgtaccgacgcctgaagggaggaggccacacgatgacgtggaacaatggagagaagccgcgcataccgccgcggcggcggcggcggcgacggcaaatgaggccgtgccgtcgtcggctaccaccgagcagcaggaggcgcgtccggatgatgagcgggcgccaaaggatcacaccggctgcgaatgcaagcccaaggtggtaatgctcccggagctactacgagccgccagtcatggcgatctccagaggctgcgcgttctcctaggtgtcctacacgacgatgagtcgccggcaccgacgacgacgacgacgacgaccagccaagacgacgacgctgtcgtcctggaggtttatcgctctgcacccctactaccaccaccctctactactgcaggtgaaggtgaagatgaagggacgttgtccctcctggagggaaccacgtttcagggggactccgcgctgcatgtggtggcgagcagcggagacgacggcgacttcttgaagagcgcaaggctgatctatggcaaggccaggcacctcctcgaggcgaccaacaacaatggcgatacgcccctccactgcgctgccagagctgggaatgttaagatggtcacgcatctcctcgagctggctggaggcgatggcgccggcgatcaacggaagaagctgatcctgaggaaaaaaaaccaccagcatgagacggtgttgcacgaggcagtccgcctcggcaacaaagatttgatcgacaagctgatgacggaagatccagagctagctcgtcatccaagcaacggcgccacttcaccgttgtatctggctgtgatcttgccaaatccacaagttgcgatgcagctgcatgggtatgataaaatgctgtcctactcgggacctgacggacaaaatgtcttgcacgctgctgttcttcgacaaagaggcgtggcggtggctggcaacggcgcgccctcccctccgccggatctagctggaggggaggtggtggaccttggggacggccgggcggtggtccggtggaggcggttgcggcggccgcgccctcccctccgccaaatccggccggagaggaggcagcggacctcggcggaggcggcacagcggctggcggcggacctcggcggaggcggctggcggcggccgtgccctcccctccgctag

SEQ ID NO: 11051 - DNA, 1320 bp, Oryza sativa
  Clone ID: TFbOSC9745j.C1.o1.fg
atggcggcagcttcagcagcaaccgtggaattcgggcctcaaatactgtggctcgacaaggagctgttgcaagtgcttgccgccggcaacaaggtcctcttggaggagcttctgagaggagagggcggtacacacccgcctcgcacaaacggccaggtcgcgataagcttccatggcacgagtgagccggcggcgcggcgcggaacaagccgccttctcggcgtgacgagcaacgggagcacggcgctgcatgtcgtcgccagccacggccacgccgagctcgcggcgctcatctgcgagagggcgccctcgctggccgccacgcgcaacaggtccctcggcacgccgctgcactgcgcgtcgaaggccgggcaccgcgacgtggcggcctgcctcctgcgggtgatggatcaggcgacaccgcggtcgaggaacctgacgggcgccaccgcgctgcacgaggctgttcggcacggccatgttgaggtggttgatctgctgatgacgacggatccctggctggcctcggtgacaaccaacggcggtgtttcgccactgtacatggcgttccgatcattgaactcagtaaatttcaactgtaaaccagaaatagctcaggagatactgaactggccagaaggtccatctttgctaaccagagccgattcgtcagggaggacacctcttcattttgccgtaatctatggaaggcttgacacagttaagctattcctaggtggtgatgctgcttctccaaggctgactagcatttctgacagcgatggttcatatcccgtgcatgctgctgctatgttcggaagaaccaagattattgatgagctcgtgaagaaatgtcccaactactatgaactggttgacgataaagggagaaatcttctgcatattgcagttgagagcgagcaggaaatggtggttcgccacatttgcggaaatgatatgttcgcgatgctgctgaatgcgacggattatgatggaaatacccctctccaccttgctgtgaaacaaggatatccacggattttcggtctgctactggggacaagaggtgttgatatgtgcattatgaacaaggatggccatactgctagagatatttcttgctgtgcctcaacgttagagcacggccgattgcgctattttctgcttttcgtggggagtcgcaaccaggcgacgcgttgggagcttggggcgcccgtggacacggctaccgcacctacgatttccccttctaccctcgacctcgtcactgggaggaggccgacggcagtagtgaggagcctgaggcggcgaggaggttga

SEQ ID NO: 11052 - DNA, 1216 bp, Oryza sativa
  Clone ID: TFbOSC900351j.C1.o6.np
gatgaacccaatcccctccggtgaccgttttacctgggtataattatcccttggtgccgaacgaggcctgagtttaaatgctgattgtgcttctccgatcgatgctcacccgttgatatagagatggcgcgagggctggacaccgggcagggcgaggcggctgtcgtggcggcggtggagggcagcggcttcgggcaccgcgctctgcacatggcggcctctggagggagcgtggacgtcctcaggtacctcgtggaggacctctgcctcggcgtcaaccagtcatgtttttcttggcaggtcaaacaccactgttcctgtcttcaattcatgggagagctgctgctacaagatatcttctcgatcatggttccaatcctgcgattgataaaatagtgttacctcttcatggtgctgcagtgaaaggacactgcgaaatagtagagttgtttctttcaaaaggagttgatgtggatttatattctatcgctgggaccccattgctggcagctgcgattagtggccaacatagcacgatgaagatcttattggagcatcatgctgatcctaacagggttttcaatcttgatggtaccccgttgattatgtccatagtttctggatcattggaatgcgtgaagctattaatcaaagttggtgctgacatgaattttagagactccaatggcgttacttgtgtaatggttgcagcaaatcatggctcttctgtcatcatgaagtgcttactagatgctggtgctaatccaaacattccagatgaacagttcaatacgactccaattgaagttgccgctaatcatggcagaagggacattgttgaaatgttgtttcctttaacctcaccaatttcaacactgtcagattggagtatcgatggaattatttctcacgtggaaaattttggtttgaagccaagggtatttgttcctttatctgcccacttgcaattgcatatcattgtttatcatcattattagtttcccttactaccccaccttactaggctcagggaaatacggccgcgaggctcgccacctggaaggcgcccgggccgagcgcgcagcgatggcagcgcgggcgtccgagctggaggttagggagaaggcgctggcgtcgcgcgagcagcgcagtgacaccgatctagctgaccggctcgccacggctcaggacgcactcgccgctctggaacgcctga

SEQ ID NO: 11053 - DNA, 2790 bp, Oryza sativa
  Clone ID: TFbOSC400431j.C1.o4.np
atgcctataaagagacttgagattgagaaagtaaaggcccaggatgcagtcttagcttttaaaaatgatggaatcgggttgctgcacgctgcggcttgccagggccaactgaatgtttgcaagttcttggtggaggaattggggggtgacgtgaatattgctggagcacaaggtttaacaccgtttatggcagctgctgagtctgatgatgttcctactgtaaaatattttcttgatcatggtggtgatgtaacaaaagcagatgttagaggatgcacagttctccaccatgctgctggcacaggatgctgtaaggtaacagagttcttgctttcaaaaggaatacctgttgacatagactgtggccttggaacaccactcttgcatgctgctaacgatgacaaggataagacactgaagattttgttggatcacaaggcagatgctggtgctgatgttaatggcaagggagcacttgtgtctcccttgatgtttgctgcatcacaaggatgctatactaacttcattaagtttctcctgaaggctggagcaaaccctaatatacctgatgatttgggttggttgcctgtggagcatgctgcattacgtgattgcagggaagatgttgaaaggctatttccattgacttccccaattccaaatgtcccggagtggagtgtcaatggaataatctctcatgcgaaagtcaaagatataaggccaatgacaatagatcatgggccaaccacagttctgtacacaaacaggagcatttgtagattgctcatgggtgatggtgaagatgctcaatctgatggtaacagatcccgaatgatgcggcctaactgggaaaaagcttgttatcgttggagtgcaggtcacatgctactcaaggagtacaaacaactgtgggatgctctcatggatgcacaaaaattggatcctgggagcgttgaaattgagaaggaacaaagggaatatgatatccaagaaagtaaagatgttgtggagtcgaaggttggcctttatgataaacccactgcatcttatggggtcaaacctccaaatgtttcatctgttatgggaaaaacacaaattgatacatgcaaagatgtggtcttcttaaaagaagaggtagagaaaaggatgaggctggatgtttctggatccttcttcgtgtaccagatgagcacgttagaagcaggaataccattatcatcgtatgctggaaagacatggaatgggaacattgacatggatggtttgattgttgttcatgggagagtcagaatcaagaaaaagccatggaaaggcctcaactcaagcaagatgaacagtgactgcaccaagttgacttcgatgataagagaaatgtttgtcaaaaaaaatgttcatcctccgtacttgaagcaccttcttggaaagttagaagctttagctgtcgatgttttcacagtgcgtcagcagcttgcttttgactatcatatctctttgataccttctctgaaccgagtaaatttggtgtatcaaattaagagatgctatgatggctgggatgacagagagaaaatgtacttcagatttgttgcagacaattgcacagtcccagaagattggtgcaatactttgatgtctaagcatttgtttcgcctagtgattttggaaggacagaagaggaacatcatatacggctccaatggcatgagtgcatttcatttggtgagaaattacaatactcatgcaccagaacattcctggattcatgtgttcgtggattccaaaatagaacattaccaatggtttcaatgtgatagtggtattgagctaatggtcccaaaatatctaggagactttcttgcagaagctgtatttaagtttattgaagatgagtttgatttaactcatgtgaaaccaaatataaccaaatgcaattcaggtattccaacactgctacgacacaacttccatgaaggatctgaatgtaacagccatgacaagctgtcaagtccatttgatgggatgggacaaaaagtaatgcccagcgagacgttcgatcgttcggttgtctacgtggcaattatctatggcgaggctctcgatcggcttgctagctcctcggccatgtgctctaatggcgatttctcggtttgttcgcaggtaacccgtataaatgagtttatggatcgacccacttgcatctctaagtgcggcaaatcggaccacgacgtgaaaacacacgggttatcacttattttacatataaatgccgtcttagctcttaacaagcatgggattggggtgctgcacgccgcggcatgccagggccatctgaatgtttgcaagttcttggtggaggaattggggggtgacgtgaatattgctggaaaagaagatataacaccgtttatggccgctgctgagtctggtgatgttcctacggtggagtattttcttgatcatagtggtgatgtaacaaaagcagatgttagaggatgcacagttctccaccatgctgctggcacagatttatggcccatctcattcattgcaggatgctgtaagtctaacgtaattgtcaataatggagccggtagtcccctgatgagttcccttatctaccgatcattgaagtgtatgaagctactcataaaggctggtgctgatgttaatggcaagggtacagttgtaacccctttgatgcttgctgcgtcgcaaggaggctatactaacttcattcagtttcttctgaaggctggagcaaaccctaatattcctgatgatgtatgtttt

SEQ ID NO: 11054 - DNA, 1839 bp, Oryza sativa
  Clone ID: TFbOSC28294j.C1.o1.gm
atggcgatgctggctctgccaccggccggtcacacccggcacacgggatgcaatgcaagacaagaccccgtatcgatggatcgcaggctgctcagagccgcacgcggcggccaccgcgagtggctggaggctgtacttctgggggccgctccggcgccaaaccacgtcaccgtccacgtcgccgcggccggggagccacagccacccaccgcggcggcgctgctcctggacgtggcgacgacgccgcagggagactccgcgctgcacgtcgtggcggcctccggcgacagcgaagcgttcctgagctgcgcgcgcaccatctaccgcagcgccatggccctcctggatcgcgccaacgcgaggggcgacacgccgctgcactgcgccgccagggcggggaacgcggcgatggtcaggtgcctcctcgacatggcgatggaggaggacgaggagcgcggcggcgcgaggttcagggtggccgacgtgctggagaagcagaacggccggcgtgagacggccctgcacgacgccgtcaggctcggcgacgagcgcctcgtcggccacctgatggccgtgcatccgcggctcgcccgtctccccggcggcgacgggatgtcgccgttgtaccaggcgatctcactggggcacgaccgcatcgcggagctcctgcatcagcaagggggcgacgagctctcgtattctggaccggccggccaaactgccctgcacgctgctgtcctacgcggcgcagaaatgacagaaaagataatgcaatggaacgccgggctctccggcgaagccgacgcgtccggcagcacagcgctccacttcgccgcctcggcggacggaccaaagatcgacatcgagaacagctcactcctccggtggctcctcttgccgtgcccgttccaatgccgccggacaccaaccgaacttctcctggagaccgacccgtccttggcctgccagccggacggcgacggcgactaccccatccacgtcgccgcgtccgccggcaacctgaggctcgtcgccctcttgctcgacaagtgccccgagtgcgccggcctccgcgacgcccgcgggaggaccttcctccacgtcgccgtcgaccggaggaggcaggaggtcgtgggattcgcctccgacgtcgatggacgggccaacgccctcagcggcggaaacatcaggcgcgatcacttcctgcagcggcacgtacccaagctcgacgagagcgccgagtccaagaaaatgacggagtcggcccaggtcctgggcgtcggctccgtgctcgtcgccaccgtggctttcgccgtggccttctcccccccgggaggctacgtcgcagccggcgcgccggcgctggcggggcggtacgccttcgacgcgttcatgtacgccgtggcgctggccttcacctgctccatgctcgccacgctcagcctgatgtacgccggcacggcggcggtggagatgaatgtccggcacaggtacttcaagaattccgtgtggtggatgcgcttgtcgatgaggagcctgctggtggccttcgcgctgggggtgtacctggtgctggctccggtgtcccgcgccaccgccgccggcgtctgcgccctcgccgccggcacgatgctgttcaggaacagggagctggtgctgatggtgagctgcgcgcacgtggtgcgcaggaggatggggatcagggtcgtgctcaggattggagccccgatcggcatcgacctgctcatctccaacattgtctacttgatcatcttcggtgcacccttctgcactccgctgtgcgttctaattctcttttggagggtagcgccaacagag

SEQ ID NO: 11055 - DNA, 612 bp, Oryza sativa
  Clone ID: TFbOSC400151j.C1.o24.fg
atggcggcgccgttcgtctactgccgccccaccgacgacggcaccagtgagagcgctctcctgagggcggccttcgacgggaacctcggacgcctcaaaggtattttaaagagccttgggatcgagaaaggaaagacccagtatgcagtcttagctcttaacaagcatgggattgggatgctgcacgccgtggcatgccagggccatctgaatgtttgcaagttcttggtggaggaattggggggtgacgtgaatattgctggaaaagaagatataacaccgtttatggccgctgctgagtctggtgatgttcctacggtgcagtattttcttgatcatggtggtgatgtaacaaaagcagatgttagaggatgcacagttctccaccatgctgctggcacaggatgctgtaaggtaacagagttcttgctttcaaaagggatacctgttgacatagactgtggccttggaacaccactctttcatgctgctaacaatggcaaggataagacactgaagattttgttggatcacaaggcagattggcggagccaggataaaattatagtgggggctcctcagacttttgggccttctaacaatctcagataa

SEQ ID NO: 11056 - DNA, 4982 bp, Oryza sativa
  Clone ID: TFbOSC418872j.C1.o2.fg
ccaccgtcgggtgccactccgtctccgcgctgcggaagaacttccccatcctctcgctgctgtcgtcgtccccgtcgtcgccctcgttcctccactccgactccggcggctcttcctccgacggctccgacgacgacgacgacgacttcttcggccggcccagccgccgatcctccgccgcgggggcgggggcgggggcggcggcgccgtcgctgcagcccgcgggctgcgcctcgttcgacctcgcctcgcatccggacctcaagctcgcccgccgcatcgggagcgggccgccgggccccgcggggcaggaggtgtggtccggcacgctgtctcgtggtggtgggggaggtggggccaagaggtgtaagcatccggtggcggtgaagagggtgcccgtgaccgcgggggatgtgcttgagggcgttcaggaggaggtggagcggctgaggcgcgccgcgacgtggtgccggaatgttaccacgttccatggtgctgtgagggtcggcgggcacctctgcttcgtgatggatcggtacgcggggtctgtgcagacagaaatgcggcagaatggcggtcgcctaacgttggagcagatcctcagatatggagcagatattgctcgtggagtagcagaactccatgcagcaggtattgtttgtatgagtataaagccgtcaaatatccttttggatacaaatgggcatgcagttgtttccgactatggtctttcggccattcttaagaacctcactagtcgtagagtgtctgatgattccaacatggttggcttggatgctacacttcttagccccaattatacagctcctgaggcttgggtgccattgaagaagtcaatgaatctgttttgggatagtgcaaatggaatattaccagagtcagatgcatggagttttggatgtacacttgtggaaatgtgtactggtgctgttccatgggctgggctaagtgcagaggaaatttgtaagtctgttgtaaaagagaggaagccaccgcctcaatattcaagggtagtcggtgtaggacttcctggggagctctggaagatgattggtgactgtttgcagttcaaaccttcaagaagaccatctttccaggacatgctaaaaacttttctgaggcatcttctagatataccaaggagcccacctgcaagtcctgaaaatgatttcacaaatgcaagcatgcccaacggtacggatgtgccaccagcctcagttctggacatggtccaggacaatccaaatgctttgcatcatcttgtatgtgaaggagatgctgctggtgttaggaatcttcttgcagaagctgcctcagatggaaatggccgtttaattcgttcgctcttggaagcacagaatgcagatggatatactgccctacatttagcatgccgaagaggctcagcagaaattgttgaagctattgtggcttatcaagagaatgtggacttgttagataagaatgaaaatcctccaataatatttgctatggctgctggctctccacagtgtgttcgcgcacttgtaaggagatcttctgatgttaattcgaggcttagagaaggtcttggtcctactcttgctcatgtttgtgctcatcatggccaaccagagtgcatgcgggaattgctcatggctggagctgatcctaatgcaatagacggagaaggcgaatctatcctgcatattgctgtggccaagagatatactgattgtgctatcgtcttattggaaaatggtggttgcaggtctatgggcataccaaattctgtgaataaaacgccattgcatttatgtattaaaacatggaatgcggatgtggtgaaaagatgggttgaagttgcatctgaagaggagatagctgaagcaattgatgtacctagccctgttgggactgctttgtgcatggcagctgctcttaaaaaagagcacgagaaagagggtcgagagttagtacgggtattgctttctgctggtgctgatcccacagcacaagatgacccacactgtcgaactgcactgcatactgcagcaatgatcaatgatgcagaattggttaagattattttggaagctggagttgatgtaaatataagaaatgctcagaacacaacaccacttctcgttgcactgaacagaggtgcaaactcctgtgttggtttgcttttagctgctggagcaaactgcaatctacaggatgacgacggcgataacgctttccacatagctgctgatgcggctaaaatgatacgtgaaaacctctcatggattgttcaaatgttacaacagccatcgccggctgttgatgtgagaaaccacaggcaagtttatgatgtatctggtgttaagctaaacttacttcaatacaacgtgatgcaaagtaaaagaggctggacattgcgagattttctggagaggctcccacgagaatggatttctgaagaactgatggaaactttagaagaaaaaggagttcatctcaccccaaccatatatgagttcgcagattgggtgaaatttagaagaacagttactgaaccagcttttggctggcaagcccatgctaggtttcgctctgtgctgatcatgattgttttaaaagtttacactgatgtactggatgttgtcaaaaatgatggcatcctggtcgtcccaaagaaagaaaatgatgctcgctgcaaatgttgctcttctgcctactgcaaaaaggcaaactttaaaaatctgataataggagccactgttctgattttcatgtcaatgttaatgagaattccttccatcaatatactaaccgaagatttgtggagaatgtctcatggatcaaataacaaattcactcatcttagtagatttggatggcgtggtcagtcacgagatagcattgggacagttctctgtgttgatgatgatggaatcttgagggttggttttccaggagcttctaggggatggagagctgatcctgctgaaattgtaagggttgaagaatataaggttggtaactgggttcggattcgtccctcattaacggttgctgtacatggcatggaatctattactcctggaagtgttggtattgtctactcaatcaggccagacagcagtcttctattgggactttgctatttgtcaagtccatggctttgtgaaccagaggaggttgaacatgttgatcccttcaagtgtgaagctcatgtttcttcaaatttccagattggtgaccaagtatgcgtaaaaaggtctgttgcagagcctagatatgcctggggtggtgaaacccatcacagcgtgggaaaaataattgacatcgagagtgatgggctactcataattgatattcctaaccgggctgtacattggcaggcagatccatcagacatggaaaagatagaaaagtttaaggtcggtgattgggttagagtgaaggcagcagtaccatcccctaaatatggctgggaggatgtgactcgtagcagtattggggtggttcatagtctagaagaagatggagatatgggtgttgctttctgcttcagaagcaagcctttttcttgctcagttgcagatgtggagaaggcacagccttttgaggtaggagaaaaaattcatgtgttaccttcaatatctcagcctcgccttggatggtcaaatgaaactgcagcaaccatcggggctatctcaaggatagacatggatgggactctaaatgtcaaggtgtctggcagaaatagcttgtggaaggtagctccaggtgatgctgagaggctttcggcttttgaggttggagactgggtgcggttgaaatctagtattgggagcaggcctacttatgactggagtgttgggaaaataagtattgcagtagttcatagcattcaagactctggttacctggagttggctggttgtttcaggaaagggaaatggttaactcataacacagaaattgataaagtagagcctctcaagattggtcatcatgttcggttccgtgctggaattacagagcccagatggggatggagagatgcaaagcctgattccagaggcataattgctggtgtccatgctgatggagaagtaagagtagccttctttggtgtgcctgggctgtggaaaggtgatcctgcagatcttgagattgagcaagtttatgaggtgggtgaatgggttaggctgagaaataatgcagatgattggaagtcgctcaaaccaggtagcattggcgtggtacatgggattggatatgaagatgatgtctgggatggaaccattcatgtggcattttgtggtgagcaggaaaggtggatagggccttcaagccagcttgaaggagtcagcaagtttgtcgttgggcagcgcgtgcgggtcaaactctgtatccaccagccaagatttggctggtctaatcataatcattctagtatagggaccatctcatctattgatgctgatgggaagcttaggattcatacacccgctggtgcgagagcttggttgatagacccagcggaggttgaaaaggtggaggaagaggaagaagtctgtgtcggggactgggtaaaggttaaggattgtgttgcgacccccacatatcagtggggtgacgtgaaccataatagcataggggtaatccaccgggccgaggatggtgaactttgggttgccttctgtttctgtgaaagacaatggttgtgcaaaaggtgggaagtggagaaggtgaggccattccgattaggggacagagtacggatacgacctggccttgtaaccccacgttggggatggggggaggagacatatgagagtaaaggtgaggttgtaggcgttgatgcaaatgggaaactgaggatcaagttcagatggagggatgggctttggattggagatcctgccgatatcgttcttgatgatatcccatcactgacagaggcttctaatggcttttgttcatag

SEQ ID NO: 11057 - DNA, 1080 bp, Oryza sativa
  Clone ID: TFbOSC401048j.C1.o4.gm
atgacccttacaacggcggcaccactggaggcgcggcagagtgccgttggaagcggagacaggcttcatgacatacagatccacggcgccggcgagggcagggcgcggtggccgcggtggagtgtctcagcggcggggaggcacggagcacgctggagtgaggagttgcggatcaagggaaggaggagcatcccggagtcatcgcgcgggggatggggccgaggtcggctccggtcgcggcggtggacctcgtcgtcggtgctggcggatggtgccgaggttggaaccggccgcggcggctccggtggcggggaagaagcaccggctccggcggcggggatgcagtggcagtccacgcggggaagaagcactggctccggtggcggggaagaagaagaatcagaggctccggcagcggcagtccacgcggggaggatatccagcgaggatgcggcggcgcggcggcagaacatccggggaggaggaggagctagcgaggaggagaagcgaagtcttcgcgatgggtggacaccgttgcatttagctatacagagtagaaatagagatataacaatgatattgcttgtcaatggtgcagatgagacaagaagaaacaaggagctcagcttggcagttactgatgttttaacttgtgcatatgcagtgctgctaagctcacttcgaagatcatggtcacgcggcatctgctaccaaatttcaaaatctagagtagggggtgccgacacacggtccccatccgtcggtgacatagcaccaggtccactgtggaccgggaccaccgtggtggtccaccaccggtccacgggtactggagcgcagctcgggacaagccggcccgatgacggcgagcggcggcacggcaaggagagggaggaggaaaagaggagggcctcaccgacgacgacggcgaccagcacggggaggacgacaacgatggcggcaaggggtgtacaggctccagaacgacctagggaagaagatcagaggggtttgagaggccacggcggcaaccattgccgaccggaggcggtggatatggagggctcaccggcgaactga

SEQ ID NO: 11058 - DNA, 1836 bp, Oryza sativa
  Clone ID: TFbOSC900035j.C1.o5.fg
atggaacgagcacaaccagatcagccggtagcagcagctgctccgggtcatgttgtgctctgcttcggagcaagcacagctgttgctgaacgacaacctgaggagggtcctgctgcggattcccccgttgctgatgctgcaactggaggcgctgctgctgaaccttatgcgcgtcatgatgtggatccccccgctgcttttgctcacgttcatgctctggaccatcccgcagcttcaattgatgctgctttgccgcctcgcatgccgaaacatctttatctcgccgtattcaacggtgaaaaagcaaatgtcatcgagatgttacagttaccaaataacggcgctcctcatggagaagaagaagaaggtcaagccactgatggcgcttctcattcacaacctcaaaccatcgacggcgctcatcatgcagaagatcaaaccgtctacgactttccaattgcacaagttgctatcaacgaagaagttggaggagctcaaaatattcaccgtgatccgcatgaaaataaggaaggagctcaaggccaagggcactttgtgcgaaaccgagtagcaatagcaaggagagaacagtacgagagcagaatagatgcggtcaccgccgaagggaacacggttcttcacattgctgcaagtagggggcacgcccatgcccctggtccagatgggacgagccaacaagaggacctgatcacagtgctctacaaggcgcgctggcacctcctttcttctctgaactcggagggagagacacccttgcaccgtgcagccagggcaggccacgtccacgccgttcagcgcatcattgccggagtgaaggaaaatctggaaaagttagcagaaaaccagctcatggacattattgcaacaaggaactgtgccggtgaaaatgctttgcatctagcggcaatgcacggcgatgcccaagttgtgacgacgttgttgaaatatgcgcgggatgcgcgtttgtcgtctgtgttgaccgaagccaataacgcatcggccctctacttagcggtcatgagtacatcggtggccaccgtcaaagcactattggctcacgaatgcaatgatacgtcagctcaaggtccaaaagggcagaatgctctacatgctgccgcagttctccagaatagagaaatggtcaatatattattagaaaagaaaccagagctggcaagcggggtcgacgacatgaaaagcacaccactacacttcgcttcgtccgatggtgcctactcaattgtacatgccatcctatatccaaaatcgaaatcattatttggtgatccagcaggacagagtcttgttgccatgcaggacagtgaaggaagcacagcgttacatatcgctgcgctgatgggccatgtcaatgttgttcgcttgctgataaaagccagccctgattctgctgatattcgtgacaaacaaggcagaacgttcctgcatattgcatgtgcagacgaaggatggcaacgacctactgttcgttacgttgttaaaaacccaatgctacatgaccttttgaattcacaagataaggaagggaatacgccgcttcatttagcagcgaatcatggaaagttcgtagatgtttatgctctgatatccagcggaaaagtgcatccagatattatgaatgcagagggagaaaccgcatttgatattgccaagaataccgttagcttcttcttcatgctccatgatccatataccccagcgacctacaatgaccaattaggttttagtgttgaggtacggttgatggagggaggggtggagagttccttgcactacactggtcaaggtcacctgtga

SEQ ID NO: 11059 - DNA, 3150 bp, Oryza sativa
  Clone ID: TFbOSC401685j.C1.o224.np
atggtgtcgccgactctcttcctcccggtccactggtgccggcttccggccgccacacggcgcgtcgagttcaacacgcggtcgggcaccttcccgcacatgccgcgccgccgccatccgcttggcgctgatgaagaccgcgcgtggcgtggtcaccacgacgcgtacgccgacgggcaggccatcgtacggtgggaggcgcaacgcaagcgcgatgggctacggcttctccaccaagctcacggccttcttctggccatggcgcttctcgccgtggcgcttctcgccgccgccctccacgccgatgccgcgcccgcatctgccgcccccgggagctccttccccgacgcctatggcgaccgcgcccgcgctgcacaacttcccccacgcaagcagcagccgcaggtcgcctacgctctgcgacgggcttccgctacctcatcggcacatctccacggcgccacctcccggtccttcaccggcgtcgccaccgaagacctagtagcgcggcacggcggggttggggaagccggcctccgagaggagaatggtgaccgcagcagtgtggaggcgtcaggcggtggccactggccaaccattgtcaagctcgcatcatctattggcacggtggtccctgtggctttatctatagtaccatatttctaccaagtctacacaggaaattttgagaggacaatagaagtgtatggtgcccccgccatgttggctggatcaattaacagcataatttggttgacgtattcaataatggccagcaaaaaggatcttaaccttgctcttatcctgatgcatgcattactttgcatgtcgacattcacttacttgatgtgtatctgtgcttgtaaaagagccactaaagaggggagtgttcccaaaagatctcagaaagttgctactggatttgaccttattctaagttgtataacgaacttggtgactttcatcataacttttcatgatcatcctgagcacactacttctctgatcacttctggagtagggtttgtcctcaatgttgtggagatcgtacttcttgtcatagtaacaattatggttcgaggtctcttacctgattttgcaatgctatttgtagaagtaattcaaaggacaatgatgcggattgagcgtgaccactacattcaaattcttttacaagcctcggggatagctggtcaggagcctgacgcgtcgccgtcgatccgcgggaggaagagaggcggcagcgtaccactactagtctactaccgctgcgctgccgtcctcgacgtcgacaccgcgcgcgcgcaagcaggtgagacgccgctgctcctggtggccacgttcggccacaccgcgagacgcggcggccggcctacctacctcctggagcgcgccgccggcccgtccacgcctgaccccgacgtacggcggcgacatcacaacgccgccgccgcctcctgtctcgctctccaggcgcctagcaagcaagccatgtcgcccatggccatgccggctgccaatctgcccggcgccccacggcgcgtcgtcagcgagtcggcggctcggcgccgtgctggcttgggcatgggctgtcggaccagagagaacggtttgcataattgcattgtcgtgtactcgttcgtatcgggtgagaatgtcaccaatggaagcagttcgtcggagatgaacgtgctctgcccgtcctcgtcggcggcgactcctcctcctccggcgccggccgccggcgcaccaggcgtcggcgtcgccgtcggcggcgaagcgcgggaggaagagaggcggcggcaatgttactactaccgctgcgccggcgcgctcctccgcgccgccgtcctcggcgacctccaccacctcgctaggatggcggcggaggtggacgcggcggcgcctggcggcggcgagggtgccggcggagtccgatcgcggtgcggccgcggggcgctgcacctggccgcggccaacggccgcacgcacgtctgccgcttcctgctcgagggcctcggcctccccgtcgacgcgctctccgcctcaggtgcgcccccctcccggccggcggccgccgctcgttcctcgcacgtctcgtctatgctcgcggagcgcctgatttcgtgcttcgtgttcgacgccgcggcgcacgcaggtgagacgccgctgctgctggcggccacgttcgggcacacctcaacggcggcctacctcctggaccgcggcgccgacccgtccacgccggaccccaacggcggcgacaccccgctccactgggccgcctacaacggggatcgcgagctggcgaagctgctgctgctcaggggagccgacgtgggcgcggcgaacccccgcggcacggcgctgcatgtcgccgctgcacgggggcacgccgccgtcgtcagcgtcttgctgaaccacggcgctgatgtacgcggacgcgcccaacaagattgccaatatcgtcttcacaccgttggtttcttcacttttggggggatcattggaatgcatgaagttgctcattcagcatgtagtcgtaccgggtccattggattcatcaagtgcttggtggaatctggggcagatccaaacattccagacgaacttgataggttaccaatagaaattgctgcaatccatgccgaacgggaagtcattgaggttctattgccattgacccaccaagtacctactcttctagattggagtgttggtgggatcatcagatatgtaaaatatcctgcttacaaggaatgggcaagaaatgcatcatgtaaaaggaaggatgaactcaaactacaaggcaactcctctttcaacaacgaggactacgatgctgcaatactgctatacagcatggtaacaacttttgctcattcccgatttttcatgctcatgtttggttgcaaatgttttttcagttcaaaaggtgcaaaatactgctttgcaatgaagttcgacaacaccgacgcaaagttatattcaaacaggagtgcttgctggttaaaccttggcataggcgatgaggcactctcagatgctcagatctgcagcaagatgcaaccggactgggcgaaaggctattaccgtcaaggaatggccttctctttgctacaggtgaccatcatgtaccatccatgttca

SEQ ID NO: 11060 - DNA, 603 bp, Oryza sativa
  Clone ID: TFbOSC12692j.C1.o1.hg
gtcgactctagaggatcccctggtgggcccacctgccatgtcacagaggcgcgccttacccgtgtctccggagagtggagtggagaagaagaactgaagaagccgttcgttctggagcgcgccgccatccgctcgaacctttcccctctttgccttgcgcaccaaattgagcaggagaagagccgcggccggtgtggatttttgtgttggtcggtcgcgaggatcgatggcggcgggggaaggagacgtggggatggaggtggagacgaaggcgccagcgatgccgccgccgccgccggcgtcgtcgaggagtttgttctctgttgcaaatttgcaaggcagacagaaccatcaaaggttttagctgggcaaagcagagtcgacgttgacgcggccaggaagaagaagcaagctcgcgcgaagaacggcgacacgcctgagcctgacgccgccggcggtgcccgtgcccgggcgtctcggcgagcgaaacggggaccgggcagctaccgcggcgtgcggcagcgccggtggggcaagtgggtctcggagatccgcgagcccaaccgcgggaagcggcactggctgggcaccttcggcagcgcc

SEQ ID NO: 11061 - DNA, 486 bp, Oryza sativa
  Clone ID: TFbOSC900276j.C1.o6.gm
atggtggggggagaggtcatgtgcgaggcggcggcgccgaggtacaggggggtgaggaagcggccgtgggggaggttcgcggcggagatccgggacccggcgaacgggcgcgcaaccaacttcccgctcgtctcctccctcccgctcccgtcgccccactaccacctccccgggaaggcggcggcggcggcgccgccggtggccggccccgcgtgcagcgcgagctccaccgtcgagtcctcgagcgggcctcgcgggcccagaccggcggccacggcggcggcggtgccccggaggcgggtcccgcggcccgcgccaccggcgcccgacgccggctgccacagcgactgcgcctcgtcggcctccgtcgtggacgacgccgacgacgcctccaccgttcggtcccgcgtggcggcgttcgacctcaacctcccgccgccgctggaccgggaccacgtcgacctgtgcacggacctgcggctctga

SEQ ID NO: 11062 - DNA, 3375 bp, Oryza sativa
  Clone ID: TFbOSC401273j.C1.o2.fg
atggcgaggtaccccgctccgacgagctctcgtgcaatcggagcccccatccagcccacggagcctcacgcgccactgccgaacaccgggggagaaggagcaccaccaccagcacgcaccatgccaccgccatcctctcaggccgcgacctccactcctcccgccgccgcgacgccactgcagcggccgccggcgcaagccaccgctcagccgtcgacacagagatactacgtcggcgtgcagcgagacaagggcacgggcaaatgggcggcatgcgtggtcgacccgtccaacccgaccaagcaccgcctcgtgggcgccttcccggacgagcacgcggcggcgctggcgcacgaccgcctcgacctcgcgttccgcggcggcggccaccgcggcgccggcgacaacttccgcccggcgttccacgccgtggagctggagttcctcaggctgtgcgcggccacctcgtcgccgggctcccactgcggcctcgtcgccggcggcgacaagtacgacgagaagtactccgaattcctgcgcaaaatctaccacggggtgatggacaactccccctcctacaagaaattcttcgacgtgatcctggatttcttcatcgctcgggcgagagagatcgggcgggaggccctcgaggacggcggggatatgctggtggagaggttcgtcgcgatgcacaagaacaaggccgtgacgccgaggtggcgtgcgtggtaccggagcgattctcgcaaggttcttcagattcctctgtccctccgagggggaggaggagagatcgatcactcaacccagaaggaagctaggatggattctgatagctgcaaaaggcggaagcatgaaagcggtcacgatagctcttcacgggtccagtcccagtcaagcatccttagtcgtaacagaattttgtgtcatcagttgcttgaacaatgcgatgacttgaagtatgggagctccacgaatgattacaaggcaatcagtatgaagcggcttgaacttatcagcatcctacaaaagctgcaagaagtacctatccagttgccatatgccagtccactcaagtcatcagaaacaaatcgccttgtgcaagatggaagaaactctagttgtcgtaatataattgacttggattcagacaatgatgaagattatacttttgctaatgtggacaatattggtgctaacacaacagttgttttagttgattctgatgacggggacagtgttgcatcctttgtagatgaaaaatcatctgattccaagcaaaatgcgaattatattgaagaaagcgttctgcctgagcagcatgcccaacaacaggaaatctccatgctggataatgaaaacatcagttctgaagcacaagcagttaagaaaggaaaggatagtatggacatcaacgatgttatttacaacaagagtggtcatgaggagataggggaagaggaagcacaagctgaaaatgtccagataaaagggaacttaaagaaagagatcatctctgttgcttctgatgaactagcttgtgaagttatgcgcagtcagtcaccaaccaatggaaattttgatcaatatgacaacagcagcccagttgatgagctggaaggactttggatggacatgtaccttgcaatggcatgttcaaagactgttggaagcgatcataacattgtcccatcagagaattcttgtgaacaagcagaggatgaatgccagcacgatttcctgatgaaagatgatttgggcattgtctgtcgtgtttgtggtctgatccagcaacgtattgaaaatatttttgagtaccagtggaaaaagcggaagcaatcgtacagagcacgtccctcagaacacagaaattctagtgatgcagatgcaattgacaaaacttcaggagctattctcgaagtggtccctgatgctctatgcctccaccctcaacattcacagcatatgaaacctcaccaagtggaaggtttcaatttcctggtcaagaacttggcagatgagaacaaccctggtggctgtattctggcacatgcaccaggttctgggaagacttttttgataattagttttgtccacagcttcctagccaaataccctgctggaaggccattgattattctcccaaagggaattctatcaacatggagaaccgaatttcttcattggcaagttgatgatattcctttgtatgacttctactcctccaaagctgacaaacggtctgaacaactcaaagttttgaacttgtgggaggagagcagaagtatcctgttgttgggctatcaacagtttgcatgcatagtttctgatcacacttctgatacagaagccatcatgtgccaggagaagttactgaaggtcccgagccttgtcattctagatgaaggacacactccaagaaacgaggaaacagacttgctcacttcactggaaaacatccgaactcctcgtaaagtagtcctctcaggaaccttgttccagaaccatgtgagggaggttttcaacattttgaaacttgtccgatccaaattcttgaagatggacaaatctcgtgctattgttaactgcatactaagcaaggtggacttgatggggaagagtgcacgatcaaagaatatctcagataaggacttctttgatttggttcaagaacaccttcagaaagatggaaatgacaagatgagagcggtgattatccaaaatcttcgtgagctaactgcagatgtgcttcactattaccaaggcaagcttttggatgagctacctggaattgtggactttacagtttttttcaatatgagtatgatgccacgggaagggaaggtactcgtgttcagccagtatgtgcgctctttgattttcttggaaaagctggtcagtagaatgaaaggatggaaatcagaggtacatattttcagggttactggtggctcaactcaggatcagcgtgagcaagcagtccatagattcaacaactcaccagatgctagagtcttctttggctccatcaaggcatgtggcgagggcatctccctcgttggcgcgtctcgtatagtgatcttggatgtccatgagaacccttcagtgatgcgccaggcgattggccgtgcctataggccaggacagtctaaaatggtgtattgctaccgcctcgtcgctgctgattcgcctgaggaggatgatcaccacaccgccttcaagaaagaacgagtgtcgaagctgtggttcgagtggaatgagctctgcagcagtgatgattttgagctcgcaacggtggatgtttcagatagcgaggacaggttccttgaaagctctgcattgaaacaagatatcaaagccctattaaaaaggtga

SEQ ID NO: 11063 - DNA, 3594 bp, Oryza sativa
  Clone ID: TFbOSC410066j.C1.o4.fg
atggcgaggtaccccgctccgacgagctctcgtgcaatcggagcccccatccagcccacggagcctcacgcgccactgccgaacaccgggggagaaggagcaccaccaccagcacgcaccatgccaccgccatcctctcaggccgcgacctccactcctcccgccgccgcgacgccactgcagcggccgccggcgcaagccaccgctcagccgtcgacacagagatactacgtcggcgtgcagcgagacaagggcacgggcaaatgggcggcatgcgtggtcgacccgtccaacccgaccaagcaccgcctcgtgggcgccttcccggacgagcacgcggcggcgctggcgcacgaccgcctcgacctcgcgttccgcggcggcggccaccgcggcgccggcgacaacttccgcccggcgttccacgccgtggagctggagttcctcaggctgtgcgcggccacctcgtcgccgggctcccactgcggcctcgtcgccggcggcgacaagtacgacgagaagtactccgaattcctgcgcaaaatctaccacggggtgatggacaactccccctcctacaagaaattcttcgacgtgatcctggatttcttcatcgctcgggcgagagagatcgggcgggaggccctcgaggacggcggggatatgctggtggagaggttcgtcgcgatgcacaagaacaaggccgtgacgccgaggtggcgtgcgtggtaccggagcgattctcgcaaggttcttcagattcctctgtccctccgagggggaggaggagagatcgatcactcaacccagaaggaagctaggatggattctgatagctgcaaaaggcggaagcatgaaagcggtcacgatagctcttcacgggtccagtcccagtcaagcatccttagtcgtaacagaattttgtgtcatcagttgcttgaacaatgcgatgacttgaagtatgggagctccacgaatgattacaaggcaatcagtatgaagcggcttgaacttatcagcatcctacaaaagctgcaagaagtacctatccagttgccatatgccagtccactcaagtcatcagaaacaaatcgccttgtgcaagatggaagaaactctagttgtcgtaatataattgacttggattcagacaatgatgaagattatacttttgctaatgtggacaatattggtgctaacacaacagttgttttagttgattctgatgacggggacagtgttgcatcctttgtagatgaaaaatcatctgattccaagcaaaatgcgaattatattgaagaaagcgttctgcctgagcagcatgcccaacaacaggaaatctccatgctggataatgaaaacatcagttctgaagcacaagcagttaagaaaggaaaggatagtatggacatcaacgatgttatttacaacaagagtggtcatgaggagataggggaagaggaagcacaagctgaaaatgtccagataaaagggaacttaaagaaagagatcatctctgttgcttctgatgaactagcttgtgaagttatgcgcagtcagtcaccaaccaatggaaattttgatcaatatgacaacagcagcccagttgatgagctggaaggactttggatggacatgtaccttgcaatggcatgttcaaagactgttggaagcgatcataacattgtcccatcagagaattcttgtgaacaagcagaggatgaatgccagcacgatttcctgatgaaagatgatttgggcattgtctgtcgtgtttgtggtctgatccagcaacgtattgaaaatatttttgagtaccagtggaaaaagcggaagcaatcgtacagagcacgtccctcagaacacagaaattctagtgatgcagatgcaattgacaaaacttcaggagctattctcgaagtggtccctgatgctctatgcctccaccctcaacattcacagcatatgaaacctcaccaagtggaaggtttcaatttcctggtcaagaacttggcagatgagaacaaccctggtggctgtattctggcacatgcaccaggttctgggaagacttttttgataattagttttgtccacagcttcctagccaaataccctgctggaaggccattgattattctcccaaagggaattctatcaacatggagaaccgaatttcttcattggcaagttgatgatattcctttgtatgacttctactcctccaaagctgacaaacggtctgaacaactcaaagttttgaacttgtgggaggagagcagaagtatcctgttgttgggctatcaacagtttgcatgcatagtttctgatcacacttctgatacagaagccatcatgtgccaggagaagttactgaaggtcccgagccttgtcattctagatgaaggacacactccaagaaacgaggaaacagacttgctcacttcactggaaaacatccgaactcctcgtaaagtagtcctctcaggaaccttgttccagaaccatgtgagggaggttttcaacattttgaaacttgtccgatccaaattcttgaagatggacaaatctcgtgctattgttaactgcatactaagcaaggtggacttgatggggaagagtgcacgatcaaagaatatctcagataaggacttctttgatttggttcaagaacaccttcagaaagatggaaatgacaagatgagagcggtgattatccaaaatcttcgtgagctaactgcagatgtgcttcactattaccaaggcaagcttttggatgagctacctggaattgtggactttacagtttttctcaatatgagtagcaaacaggaacatattattaagggcttggatggaataaataaatttgcgaaacgctcgagatgcaatgccgtttctcttcatccatgcttgaagaatgccaataaagctgatgcagatgatggaaatgtcaccaataggaagatcggttccatcatatccggaattgatatcaacgacggggtgaaggccaagtttgtacacaatctgttgtctctttcagaagccacgggagggaaggtactcgtgttcagccagtatgtgcgctctttgattttcttggaaaagctggtcagtagaatgaaaggatggaaatcagaggtacatattttcagggttactggtggctcaactcaggatcagcgtgagcaagcagtccatagattcaacaactcaccagatgctagagtcttctttggctccatcaaggcatgtggcgagggcatctccctcgttggcgcgtctcgtatagtgatcttggatgtccatgagaacccttcagtgatgcgccaggcgattggccgtgcctataggccaggacagtctaaaatggtgtattgctaccgcctcgtcgctgctgattcgcctgaggaggatgatcaccacaccgccttcaagaaagaacgagtgtcgaagctgtggttcgagtggaatgagctctgcagcagtgatgattttgagctcgcaacggtggatgtttcagatagcgaggacaggttccttgaaagctctgcattgaaacaagatatcaaagccctattaaaaaggtga

SEQ ID NO: 11064 - DNA, 834 bp, Oryza sativa
  Clone ID: TFbOSC900257j.C1.o13.fg
atgtctgagctggcttattcacccacacaggaggtgaaagtgaattccttgttttgcaatggcataacagaacggtcaagccgattctcaccctccatttggttagctcctgacatcacagagggctatcgcaaatgtcagcgtcaagtgttctggtattcttttctgaagctacacgtaactctagaagtatttcagcaagaagggtggaaagattcgttaccggttgattttccaaagcctagtgacaatgaaaattctgtggaagttgcacaccctaacataaagccattcagtgtgcacccgctgcccctgactaaaaattctgatgtacttctggaatcttcaaatgggtctgattctttaaaggaagagaaaaaccattactatccaggcaaggaaatcaagcgcagaaaacgacatagaagaaagcagtatgtggaccaagaaccatgcataatgagaggggtctacttcaaaaacatgaaatggcaagctgctataaaagttgacaagaaacaaatccacttaggtactgtcgggacacaggaggaagcagcccgactatatgatagggctgcttttatgtgtggaagggagccaaactttgaactttctgaggaagagaagaaagaactacagaattacacctggaaggacttcttggatatgactcgagacaccataaccagcaaaaaacaaaggaaagttggattaataaggcgcaataagacggactcgctggtaggacagagtgatggtgatactgagatgatcaatggtggcggctcatcgcactcggaagatggagatgctgagacctcagcatcttaa

SEQ ID NO: 11065 - DNA, 249 bp, Oryza sativa
  Clone ID: TFbOSC400795j.C1.o54.gm
atggcaatgatgcgtcgtggcgggctcacctccccagatcgtgcacgagatccacatcgcgcagtagctggcaggtgtgcgggtgcggatgtggtgccagaaaggaagttccgcggggtgaggaagcagccgtggaggaagtacggggcagagatccacatctcgcagcagagcgtgcgcatgtggcttggcgtgttcgacaccaccgaggaggccacgcgggataaaaccgggatcaaaactgcctaa

SEQ ID NO: 11066 - DNA, 684 bp, Oryza sativa
  Clone ID: TFbOSC400138j.C1.o12.fg
atggccggcgatggcaccggagacgacgacgacgtgcatgcacgggtgaagtacaagggcgtggcgaggacggcggacgggcggtggcgagggttcatcaccaacaagttcgggaggcggtacggcgtcggcgaccacggcacgccggaggaggcggcgctggcgcacgaccgcgccatcctcgccatcctgggcgcgcacgcttcgccggcggcgctcaacttccgcgccgcgttcagcgacacggagctccggttcctccgcgggccgcacgcgccgtcgcgccgcgccgcgggcgtcgtcgccgcggtcatgcgcggcgccgcgttcgacgccgcgctcgagcggttcgcggcgcgcgcctacgacgcgcacaccgacccggagctcgcgctcgacgtcgccgcgttccgcctcgccacccgcgacgccggcacgccgctggcgcagccggacgccgagagggcggcgttcgtggcggcggcgaggaacaaggtgcacgacgcggcgtggctgaggagctacctgcggcggcggcggctggtcggcgcgacgttcgaggacgagaacaggtggccgcccgtggtgccgccggcggtggccgacgtcggcgacggcttcgccggcaacgagctggtgtacctcccctatggcagctgccatgtggacgagatgatgatctga

SEQ ID NO: 11067 - DNA, 571 bp, Oryza sativa
  Clone ID: TFbOSC19001j.C1.o5.np
gctctcccgggcagccgcggcgaacgcctgtgggtcggcacgttcgacaccatcgaggaagacgcgcacgcgcacgacgctgccatgctcgccctgtgcggtgcctccgccagcctcaacttctccaactccgcctggctgctccacatcccgcgcgcccccgccccccgtcgtctccggccattagctgcccgacatgcagcgcgccgccagcgaggccgtcgccgagttccagcgccggggaagtaccgccacctccggcgacgctgcatcgaccgcccctccgccgacacccgttctccaaaccaaacaatgcgacttcatctctgtttcttcactagattgttggatgttaatgtcaaagcatatcagtagtagcatagcgaaaggatcgttgtgcctgcaaaaaaatcccatttcattttgcatggttacaaattcttacccttctcttttgctcgaatacattatattgcagatgaattccttcgtgttgtgtatttctagattacagagataaaccttatcaatactaactaacacaacaaactcaatccatacctatagttac

SEQ ID NO: 11068 - DNA, 939 bp, Oryza sativa
  Clone ID: TFbOSC900259j.C1.o16.fg
atggtggccttccggaggatccggatctcctactccgacccggacgccaccgactccgactccgactcggactccgccgacgccggcgaccacgatatcagcagccgaagcagcaggaccaacgccgccgcacgccggaaggtgatcgtcatctcgctgtccaggaagaagggaagatcgttatcgcagtccggtcgtcattatcgtcgtcgtcgttccgaaattccggcggccgcggcgaaggcggtggaggcggaagattggccgtcgtcgagcgacgggatgcgtcgtggcgccgtagcggcggcgaggtcggcgtcggcggccgccaagaagggttcccgcggcggcgtgtaccagcgccagcccgggcggtgggcggtggacttccgggacagccagctcaaggtccggcaatggctcggcacgttcccctccgaggaggaggccagggccgcctacgacgccttcgaggtgcaggtccgcgcctccctgtcccgcggcggcgccggcgcctcctcccccgccgtcgccatcgcgccgtcacctgcccgcgtcaagatccaactaccggcgccgcggcgtgcatctggccgccggaagaagacgcagacgacggcgacggtgacgacaacgacgacgacggaatcattatcgcaagtgacggcctcatcagcgtccccgtcgtccaaggaggcgccgccgccgtcgtcgtcagcttctgccgcgacgccgccgccgctgaatccgccgccgttcgtcgtcgatacattcctgggggaggatgaccacctcgccgccgacgaggatgaccgcttcggcttcggcctcgccgatcttgggcacctcccgctgccgttcttggatgacaacgacatggacttcaagctcagcgacagcgacgatctctccttcctcttcgatatcggcttcatgtga

SEQ ID NO: 11069 - DNA, 333 bp, Oryza sativa
  Clone ID: TFbOSC1021j.C1.o1.fg
ctggaggaatatgagaaggagaggtcggagatggagggtgtgtcgagggaggagtacctggcctccctccgccgccggagcagcggtttctccaggggtgtctccaagtacagaggcgttgccaggcatcaccacaatgggcggtgggaggcacggatagggcgggtcctggggaacaagtacctctacctgggtactttcgatattttgtacaatctatcacaaaactacagatttaagaacttgttttacaaaaatacagattcagtggcttcgtttatcacaaaactacagttttgtgatagattgtacaaactacctgtagttttgtga

SEQ ID NO: 11070 - DNA, 543 bp, Oryza sativa
  Clone ID: TFbOSC400824j.C1.o4.fg
atgtcagcgtgccacgtcaacccccctctccccctcttttcttcctttctcccatctctctctctcactcttctctcgcaggccggccggcgaagcagagacgcggagcggcggtggcggcaggcgggcacgcgcgcggcggctggcggaggtggtggccccctagcagcgggcatggttgtcgtcggcgccctttcccgacgccggccgtactgcgcagcgctcgcccacgccgcgccgccgcggtggggcatggtggtgaggcgggcgacgcgacgcccaatccgacgcgggccgcggtcgcgcagctcgcagtactgcggcgtcaagttctaccgccgcaccgggcgatgggaatcgcacatatggacgtacgatctagcggcgatcaagttccgcggcgtggagggctggaggccgacatcaatttcagcttggaggattatgggggatgatctgaagcaggtgagaacaagtttaacgagatcattgtggatgagcaatctgaccaaggaggagttcgtccacgtgctccggcggtag

SEQ ID NO: 11071 - DNA, 471 bp, Oryza sativa
  Clone ID: TFbOSC411132j.C1.o6.fg
atggatgtgaacggcatcatcactgtcctcatcacgtacgagctattggttagaagagtatcccaccgcccacactacccagatatcgccggcacaacgttccatcctcgcgtcgctggccatgccgcccgttgcctcctcctccgactacggccaccgctcaccagtgctggccggaatggacagccacggtgctcgtccctgcaatacccaaacggcctagtgcctccttcgcactcggatctggtggccccagtcctcatcaccgctggactgatcgatgcaatgaaggggattggaaaggaggagaacggatgttgcagtagtcagggatcagagcccgggaagaagacgcagatctggctgaggaccttcgagtcaccgaagatggctgctgtggcgaactatgtggcgtcactccgcctccacggattggagccgaggctcaacttcctggcactcatcatctga

SEQ ID NO: 11072 - DNA, 731 bp, Oryza sativa
  Clone ID: TFbOSC1032j.C1.o1.hg
ttctcatttcaacaaacgtacctctttttacagatactcaagaggaggcagccaaggcctatgatcttgctgcaattgaataccgaggtgccaatgcggtaaccaacttcgacatcagctgctacctggaccagccacagttactggcacagctgcaacaggaaccacagttactggcacaactgcaacaagagctacaggtggtgccagcattacatgaagagcctcaagatgatgaccgaagtgagaatgcagtccaagagctcagttccagtgaagcaaatacatcaagtgacaacaatgagccacttgcagccgatgacagcgctgaatgcatgaatgaaccccttccaattgttgatggcattgaagaaagcctctggagcccttgcttggattatgaattggatacaatgcctggggcttacttcagcaactcgatgaatttcagtgaatggttcaatgatgaggctttcgaaggcggcatggagtacctatttgaagggtgctccagtataactgaaggcggcaacagcatggataactcaggtgtgacagaatacaatttgtttgaggaatgcaatatgttggagaaggacatttcagattttttagacaaggacatttcagattttttagataaggacatttcaatttcagatagggagcgaatatctcctcaagcaaacaatatctcctgccctcaaaaaatgatcagtgtgtgcaactga

SEQ ID NO: 11073 - DNA, 959 bp, Oryza sativa
  Clone ID: TFbOSC1342j.C1.o1.gp
ttttaacagcgacgctaaataataataatagtagtagtagaggtaattcacattacaagttcttataacacgctaataatattacaagacataataataataataatgctactactactgtttacaacctgtaagatcagcagtagaaggtaataacagacttaaagagcaatggacgccacggccggagtaaccgaccaagtgaccggcccaccggagacgcacgccggacacaaaaacgccggctgccggtagcatcggcgtctccggttgaggaagaacaccaaccaaccctagcatctacagaggaaacaagtccggagagagatcgatctacgtacacaaacgaaccaaaccaaaaggattagggactataaaactgctaatccatgcccgtccgtgcggtgcaaaatgtctaaaatcccatctgcacggcggcggcggcggcgacgattaggctaacgacggcgtgagtactagccaagaagtggtggtggtgttaattggcggcgaggagggagtcccagtcgatctcgtaggacgggtacttggtgagggcgaaggcggcggcctcgtcccacggcgcctcgctgaagtcgagctgctgcatctccggcacggtcgccggcgtctcggccgtggtggcggcggaggacggcgacagggagggcgacgagtcggcggactccaggcaggacgacgcgtcgtcggaggacggcgacgagcagttgctggtgggcgcggaggatgttgcggcggcggaggcggagacagaggacttcttggcgttcttggcggcggcgatgttctggcagagcgtctggagcttggcgtcgacggaggcgtggagcgggccgcgggaggcgcgttgtcggggaagttgagccgcccgcgtcgccgcggaggcggtacgccgcctggttgtaggccagcgccgcctcctcggctgtgttgaaggt

SEQ ID NO: 11074 - DNA, 307 bp, Oryza sativa
  Clone ID: TFbOSC31818j.C1.o1.np
ataaaaaaataaactcaaacggacgaaatatgtggcatgtggaactttccaaagctctaccaaaaaacttctctcctcgagaacacaatcttgcaagcggaatttggaggttttaatatcgccgaacccggtgaagttggggagaatcggatgtaactttttatgtacatgtccgtggatatattatttgcctgattctgagtccggcggcgccagccatgctggtaccctcctcctgccatgtcggttcgcgtgtgccatggtggcaggaggacggcgccagagaggctagcgccggtaccgcgcc

SEQ ID NO: 11075 - DNA, 1140 bp, Oryza sativa
  Clone ID: TFbOSC29687j.C1.o13.gm
atggtgggcccatgtggacctctacttctaggggaaggacccctgggcggcgagtccaccgacgccggctaccgcggctcgttccacggcacgtgggagttcgccagcgccggcaagctcggcctcgaccgcccccgcgtcctggtcaccacggcggatcactactggttcgtggagagggcacgctcgtacgcggaggggatcaagaagtgcgagtgggacggcgagctggagttccacgagaccgagggcgagggccattcccagacagagtcccacaggcgcactcctcacctcctcatcggccggcgccgccgccggcgtgccctgtcggcgccgccgcggggccaagccgtcgtcgcctcctcgctgcggggccaagccgccgccgccgtcgggaccaatcgcctcctcgcccagtcgccacatcgccgccgtcggagcaaccaacgccggctctgccgcgccccatcgcctcctcgcgccgtcacgcgccacatcaccgccgccgggccaagccaacgccgccgccgcggcgccccatcgcctcctcgcctgccgagccctctggcttgccacatcgccgccgcaggggcaaggcgacgccgccgccgggccaagccaacgtcgccgccttcttcgttgtctgacttaccaaaaaaatgtgaaaggtcgacggccgctcctctaccacccggcaaggtcgacggccgcgacgatgtccgctcacccccgcttcgccgcccctctggcctgctcgagcggtcgccggcgagcgcgatagatgtgcgcggggcggtgggtgtgcgaggtccgcgtgctggggcgccgcggctgcaggctctggctcggcagttcgacggcgccgacaccgtcacgcgcgcgcacgacgccgccatgcccgctctccgcggccgtgcagcgtgcctcaacttctccaactccgcgtggctgctcgcctacgccgcgctgtacgcggcgctcctgtcggggggcggcgccgaccatgcccgccgccgctgccggagctcgcctgctgcgccgcccacccgcgccgtccgctgtccaggaaggagagaggggaaaggaaaggagagaggagtgaggctgacatggggcccgtatatatttgtcacgtaa

SEQ ID NO: 11076 - DNA, 1140 bp, Oryza sativa; identical to SEQ ID NO: 11075
  Clone ID: TFbOSC400151j.C1.o86.gm

SEQ ID NO: 11077 - DNA, 429 bp, Oryza sativa
  Clone ID: TFbOSC401865j.C1.o18.fg
atggccgcgcgcgcgcacgacgttgccgcgctcgccatcaagggccgcgccgcgcacctcaacttcccggacctcgcccacgagctgccgcgcccggccaccgcggcgcccaaggacgtccaggccgcagccgcgctcgccgccgccgccgacttcccggcctcctccgccaatgcgggcgccagcaataaccccgacggatcggacgacgcgagcgccgggtccgcctcgccgcccccgccgccggacgccgctgacgacgcgctgttcgacctccccgacctcctcctcgacctcagatacggcccgcccagctcgggcctctcgtgcgcgtcgtcttgggaagacgaagtgggcttaatctccggcgccggtgccgccgccgccggcgtgttccgcctggaggagccacttctgtgggagtactaa

SEQ ID NO: 11078 - DNA, 762 bp, Oryza sativa
  Clone ID: TFbOSC100569j.C1.o2.fg
atggccgcctgcgcctacgacgtcgccgcgcgcgccatgcgcggcaccagggcgcgcaccaacttccccgtccccgccgccgccggcttcccggggggaggcggcggcgggtgctggccgtgggttaacatcccgccgcagggcgcggcggcggcggcgtcgcaccagcagccgctcaacacgctcctcctccacaacctcctcatgagctcctccccccacggctgcctcctcctgcaccacgccggccacggccacggccacgcccattcccattcccactcccacagccgcgcacacaaccccagtactcgcccacccacctccgcgccgccgccgcctccacctgccgccgcctcatccgccacgaccgcgccggccaccacgacaggcgccgcagcgacgtccgcgccgggagcggacgacgacgcgtggggcttcctcctgcgacgtgagccgccggaggcggggctcctgcaagacgtcctgcacgggttctacccgaccaggcggccgcacgacgacgcggggccggcgccgaagctggagcggccgtacgaggcgacgtcgtcgtaccgcgtgtcctccccctggggcgccgtcgaggactgcgacgacggcgacggcgacggcgacgacgactaccgcgggttcccgatgatgccgcaggggctcctcgaggacgtgatccagtgcccgccctacatggaggtcttggcggcgccgtcggccgccgtcggccgcgtcagccgcaggggctga

SEQ ID NO: 11079 - DNA, 471 bp, Oryza sativa
  Clone ID: TFbOSC401894j.C1.o11.fg
atggccgccgtcgcctacgacgtggcggcgcgcgcgctgcgtgggcccgacgcggcgctcaacttccccgatctggccgcctcgcgcaccgcgccacccgcgtccagctcagcggacgacatccgcgcagcggctgccgccgcggccgcctcgctgcagcacgaccgtgccggcggcggcattgcccctgccgcctctggatcagcgcaccagcagcgcggcgggagcagtgccgccgcgcgcaccacggcgggcagcggcggcgcgcagcaggaaggcagcagcggcgccggcgccgggagccaccagtatttcttggacgaggaggccctcttcgagacgccgcagttcctgcggaacatggccgccgggatgatgatgagccccccgaggctcagccccagctcctccgacgattcgccggacccgtcggaggccgggggcagcctctggagctaccgtgacccatag

SEQ ID NO: 11080 - DNA, 493 bp, Oryza sativa
  Clone ID: TFbOSC12713j.C1.o1.gm
cgccgtcgacgccgccctcgcctacgacaaggccgccgcgtccatcctcggtccccgcgcggtcctcaacttcccggcattcagccctcctgccgccgccatcgccgcgccggagcaatgcgaacccccgttctgttctcctgccaccaccgccgccgccactgcgccggagcaacgccaaaccccgggctgttctcctgcagccgtcgccggcagcggcggcggcgcagtgttcgaggagcgtgacgtgaagccggtggtgttgccgttgccgttgccggccatactccaggatggcggcggcacggaggcaatggcgcagcattgggattgggagtgggacgcgtcttggcctgagctggagatgttcgagtgtctggatgacatcgccatgtacctcgacgtcgacgctgtgatgacgactcgggattgcaaggttgaggagctcgacgccgacatcgtcgactcgccgctgtggacactgtcggactga

SEQ ID NO: 11081 - DNA, 726 bp, Oryza sativa
  Clone ID: TFbOSC900118j.C1.o25.fg
atgggtacaaaccctagcctgcacgagctggcggcgggggcggcgccgcggggacgcgtggtgcgtatcctcgtgcgcgacgccgacgccaccgactcgtcctccagcgaggacgaggcggttgcggtggcgcagcctcggccgcggcggaggggtaaggtgggtggtggtggtggtggtggtgggggcgtgaagcgccgcgtgatggaggcgggggcgggggaggcgaggccgaccgcgcggttccgcggcgtgcggcagcggccgtgggggaggttcgcggcggagatccgcgaccctcacctccgccgccgcctgtggctcggcaccttcgacaccgccgaggaggccgccgccgcatacgacgccgccagcgtccgcctccgcggttccagcgccgccaccaacttcgcctccgtccgctgctactcgctgccgccggagctacccaagccaactatttcaccgcctgaagcagctgtgaggccaatcaccttgccaattgggacagctaagccgacccttcttccacgggtgaaggaggaaggtgagagctgtggcggtcgggtcaaggaggaggccagtagctgtgaggtccaggtgcttgctccggagccaatgtggacgatgatttcaggcaagcgtaagaagcgatcgggctgtggaacccgtgtccgtgccttccatgctgtgtccgcctgtgtggaagaagttggcggggcctga

SEQ ID NO: 11082 - DNA, 1497 bp, Oryza sativa
  Clone ID: TFbOSC400325j.C1.o3.fg
atggacatggacacctcgcaccactatccatggctcaacttctccctcgcccaccactgtgaaatggaggaggaggagaggggcgcggcggccgagctggccgcgatagccggggcggctccgccgccgaaactggaggacttcctcggcggcggctgcaacgggggatcaagcggtggcgcttgcccgccggtccagacgacggcgccgacggccgccgagctgtacgagtcggagctcaagtttctcgccgccggcttccagctgagcggcgcggctggggcggcgccgccggtgcccgcgctgttgccggcggctgctctagagcagaccgacgagacgaagcagctggccttgccgccgcaggccgcggtggcgccgccgccggagcagaagaaggcggtggactcgttcgggcagagaacgtctatctaccgcggcgtcacacggcatcggtggaccggaaggtacgaggcgcatctgtgggataacagctgccggcgtgagggccagagccgcaagggacgccaaggtggctatgataaggaggagaaagcggcgagggcgtatgatcttgccgcgttgaagtactggggtcctagcaccacaaccaactttccggttgccgagtacgaaaaggagcttgaggagatgaagcatatgacacgccaggagtttgtagcttcacttaggaggaagagcagtggattctctcgtggtgcttctatatacaggggtgttacaagcctagctagccatgtttggcctcttgcacgtaagtctcaggtcaaaaacatctactttgaccaagatctgattgttgcttgcttccttctttcaggcactgaggaggaagctgcagaagcttatgacatcgcggcgatcaagttccgtggcctgaatgctgtcaccaactttgagatcggccggtataacgtggagagcataatcagtagcaaccttccaatcgggagcatggccggcaaccggagcaccaaggccggcctagagctcgctccgtcgagctccgccgacgccatcgccgccaccgaagcgaaccacaccggcgtcgcgccaccgtcgacgcttgcgttcacagctcttccaatgaagtatgatcaggcagattacctgtcatacctcgcattgcagcatcaccagcaaggaaaccttcaggggctaggcttcggtctctacagctcaggtgtaaacctggatttcgcaaatgccaatggcaatggagccatgtcaaattgctacaccaatgtctcattacatgagcagcagcagcaacatcagcaccagcatcagcaggagcagcagcaagatcaacaggatgatcagtcacaaagctccaacaacagctgcggctccattccgtttgcaacacccatagctttcagtgggtcatatgaaagctccatgacagcagcaggcacctttggatactacccaaatgttgcagcctttcagacaccaatctttgggatggaatga

SEQ ID NO: 11083 - DNA, 993 bp, Oryza sativa
  Clone ID: TFbOSC401715j.C1.o5.gm
atggcgacggcgcgcggcacagcaggcggcagcggcgcagcgcggggcgcaaggcgcgggctcgcggcgcgaggcgacgagacggcgcgcggcgcggcagcggcgatgggacgcgcgcggcggcgggacgtcgatggcgacggcgacagcgccgtcctagcccgtctctcccttgtgccgcaccagttcccaccccacgatgagaacgtgccccgcgagcccagcagccgtcgtctccgtgtgcgtctcgctggagatgcaccgtttcgcaccaccatggtgccgagggtggagcgcggcggcggcgggttccatctccccaacagcgagcgggaggactcgctgttcatccgcgcgctcatctccgtcgtgtccggtgacaccacggtgccgacgctgctgccggagccgacgatggcgaccgtggttgccggtgcggctaccgacgaggaggatgagggggagtgcaccacgggcgcggtggccagcggcggcgtgacgggcggcgtgggcaagaggaggccgcggaggcggagcggcggcgaggggagcaggtacaggggcgtgcggcgtcggccgtgggggaagtgggcggcggagatccgcgacccgcgccgcgccgtctgcaagtggctcggcacgttcgacaccgccgaggacgccgcgcgcgcctacgacgtcgccgcgctcgagttccgcggccagcgcgccaagctcaacttcccggcgtccacggccgcgcagcagccacgtccactcctccatcacaacctccgtgagaactgcggctcgaacgcgtcgtcgccggtgcacgcgccagagcacgcgaggacggcggcggcggcgaaggaccaggagatctgggacggcctacgggagatcatgatgctcgacgacggcagcttctgcgtccagcgcgacggcatggcggcgagcctgtacgccacggcatcgtctatcccgtgcggccacgttgccgtggccgccgtctag

SEQ ID NO: 11084 - DNA, 855 bp, Oryza sativa
  Clone ID: TFbOSC418226j.C1.o6.fg
atggaagcagacgcgagccatacacccaccacctcctcctccgtctccgtctccttctcctcctcgtcgctgtccacttcctcctccacctcctccctcgtcgacaatggcgcgcaagaccggcccaagagctccaagcccaaacacgccgccaagaagcgcaagagagcggccgcggaggaacctgccaatgccgcccacggcgcaggggaggataccagcagctgcagcaccgacgacaacgcggcggcgagcggcaaggcgcaggcgggcggcggcggcggcggcgtcgacagcagcagcacctgcaccgccgcctcggcgccgaggagcggcttcaagcacccgtcgtaccgcggcgtgcgccgccggagctgggggaagtgggtgtcggagatccgggagccccgcaagaagtcgcgcatctggctgggtaccttccccaccgcggagatggcggcgcgcgcccacgacgtggccgcgctcgccatcaagggccggaacgcgcacctcaacttcccggacagcgcccacgagctgccccgcccggagtccacctccccggcagacatccaggccgccgccgccaaggctgccgccgaggtgcggtgcgaggaggagtcgtcgccgtcgtcgtcgcccaccgccgagcaacccgaggaggaagccgcctgccctgacacggtgcacgccgacggcggccaggacaatgctctcttcgacctacccgaccttcttctcgacctacgggacgggctctggtggtcgccggtgtggccggcggcactggcggccgaggagtacgacggcggcgacgccgtcgtgctcaatgagccactcttgtgggccgagtag

SEQ ID NO: 11085 - DNA, 1335 bp, Oryza sativa
  Clone ID: TFbOSC400851j.C1.o68.fg
atggccccttccaagcagcagcagatgctcctcaagaaggtgatggcgaagaagcccaagacgaagaggctatccgggtttggccttaaaccctctgctgctttctccaggccccatgtgccgtcggcggcggcctccctgcagccaagccgtcgcgtccgcgtcgtgttcgaggaccctgacgcgacggactccgactctgacgacgacgaggacgccggcgccgcctcaaagaagcgctactttgagctcttcattggcaagccagcttcgtcgacgaagcaggcctctccggcgtccaccgtcgctgcctacgccaacatcggcaaggttgggagcacctgctaccgtggtgtgcgcctccggaagtggggcaagtgggcggcggagatccgcaaccccttcaccggccatagggagtggcttggcacctttgacactgctgatgcggcctccgccgcctaccagtctgcctcccgcaacttcgccgaagagaagcgccgccgtggtgtggcctcctctgcctcacctgctagttcggcgacccctactccgactgcgtcctcgtcgtcctcgacttctgccgcgccattcgcccacccttcgccgtcgtctgtgctcgaagccaccaagccagctccaaagccagagtcgccgccgctgccggagcaagctgcaactcccctcctggtggaggctaccaacgagaccgccgagctgccggatgacccagagttctacaaggatatactgcgcggtctacagctgccggacattgacccgatggatttccgagctgggctggatgctctggatatctccgatgtgccggcttacatgaatggcgaacaagacgtactcttcactgaggacatgctgcttggagacttcgctgaagaagatgacctcgacctcgacgacatcggtgatgacttctgcgaggatttcccagagatacccagcggctacgacttcggccgtggtgatatgttccggcaggactcgcacgcatcggcacacttgggacggggtacggcacagctggaagccacgctgcgaaggtggagtgagatccggatctacactaatcctgctcgagttttgacaggatctatgcttcgtgttgccgatcaggagtatactactgctactatccctctggctattgccgcttacggcgaagacaaaacatcaaaatcgcaaacgtgtccatatactactactgctggtgacaagtccgtcctcctgcgagaagatccaaagctgccgcgtctgaccgaccagctgccggtcgacatggtgagctccgcccccgatttctcaacgttttcctga

SEQ ID NO: 11086 - DNA, 675 bp, Oryza sativa
  Clone ID: TFbOSC900408j.C1.o14.fg
atggacgtttctgctgcgctcagcagcgactactcgtcggggacgccgtcgccggtggcggccgacgccgacgacggctcctccgcctacatgacggtgtcgtcggcgccgcccaagcggcgagcggggcggaccaagttcaaggagacgcggcaccccgtgttcaagggcgtgcgccggaggaaccccgggaggtgggtgtgcgaggtgcgcgagccgcacggcaagcagcggatatggctcgggacgttcgagacagcagagatggcggcgcgcgcgcacgacgtcgccgcgctcgcgctccgcggccgcgccgcctgcctcaacttcgccgactcgccgaggcgcctccgcgtcccgcccatcggcgcaagccacgacgacatacggagggcggcggctgaggcggccgaggcattccggccgccaccagatgagagcaatgcggccaccgaggtggcagccgccgcatcgggcgccactaattcgaacgccgaacagttcgcctcccacccgtactacgaggtcatggacgatgggctggacttggggatgcagggctatctcgacatggcgcaagggatgctcattgacccgcctccaatggccggtgatcctgccgtaggtagcggcgaagacgacaacgatggcgaggtccagctatggagctactga

SEQ ID NO: 11087 - DNA, 577 bp, Oryza sativa
  Clone ID: TFbOSC900408j.C1.o23.gp
ccccaagtccagcccatcgtccatgacctcgtagtacgggtgggaggcgaactgttcggcgttcgaattagtggcgcccgatgcggcggctgccacctcggtggccgcattgctctcatctggtggcggccggaatgcctcggccgcctcagccgccgccctccgtatgtcgtcgtggcttgcgccgatgggcgggacgcggaggcgcctcggcgagtcggcgaagttgaggcaggcggcgcggccgcggagcgcgagcgcggcgacgtcgtgcgcgcgcgccgccatctctgctgtctcgaacgtcccgagccatatccgctgcttgccgtgcggctcgcgcacctcgcacacccacctcccggggttcctccggcgcacgcccttgaacacggggtgccgcgtctccttgaacttggtccgccccgctcgccgcttgggcggcgccgacgacaccgtcatgtaggcggaggagccgtcgtcggcgtcggccgccaccggcgacggcgtccccgacgagtagtcgctgctgagcgcagcagaaacgtccatgcctaaacacgagtaagcgagcgag

SEQ ID NO: 11088 - DNA, 600 bp, Oryza sativa
  Clone ID: TFbOSC102044j.C1.o3.fg
atgcgtcgcggcggcgcggcggaggaggacgcggaggcggcgaggttccgcggggtgcggaagcggccgtgggggaggtacgcggcggagatccgcgacccggcgaagaaggcgcgggtgtggctggggacctacgactccgccgaggacgccgcgcgcgcctacgacgcggcggcgcgggcgctgcgcggggccaaggccaagaccaacttccccctctccctcccccacgcccaaccccagctccaccaccaccaccaccaccacctcacctaccccgccgccgctgttgtcgccgctaggccggccactagcagcctcagctccaccgtcgagtcgttcggcacccggccgcggccggtgctcccgccgcggccgcccccgccgccgccgatccccgacggtgactgccgcagcgactgcgggtcgtcggcgtcggtggtggacgacgactgcgcggacgccgccgcctcgccctcgtgccggctcccgttccagttcgacctcaacctgcctcctggtggaggcggcggcggcggcggcggctttggctgtgcctacgacgacgaggagctgaggctgacggcgctgcggctctga

SEQ ID NO: 11089 - DNA, 768 bp, Oryza sativa
  Clone ID: TFbOSC400075j.C1.o16.fg
atgtgtggaggagcactgatcccgaacgactatggcgacaagccgccgccgccgccgtcggagtcgtcggagtgggacgccacaacgaagatgaagaagaagaagaagcgtggtggcggcggcgacgacgactgggaggccgccttccgggagttcatcgctggcgacgacgacgacgacgacggcggcgtttccatgttcccttctggtgcagggacgatggagacgaccacagaggtggcgccggcggcggcggtggtggagaggccgcggcggcggcgaagggtgaggcggagctacccgtaccgcggcgtccggcagcggccgtgggggcggtgggcgtcggagatccgcgaccccgtcaagggcgcccgcgtctggctcggcaccttcgacaccgccgtcgaggccgcgcgcgcctacgacgccgaggcgcgccgcatccacggccacaaggcaaggaccaacttcccgcccgacgagcctccgctgccggcgccatcgcaggcgccgttctgcttcctgctcgacgacgacgacgacgacgacggcgtggcccgtggaaacagcccggcgtcgtcgtcggcgccggacagagcctccgcttgcacgacgtcgtcgacggtggcgtccggcgagcgaggcgatgagctcatactgctggagtgctgctccgacgacgtgatggacagcctcctcgccggcttcgacgtgtccagcgaaccacgcaggttttgggaatggttaattagcagcgcgcacgcctga

SEQ ID NO: 11090 - DNA, 1094 bp, Oryza sativa
  Clone ID: TFbOSC400766j.C1.o23.gp
tttttaagaacaaaataacgtaaatttctcattaatcagagattgatgatcaatatgttacatcgaacaacaaaatgttttctttttcttttcttgtttttttccttctttctttaaaggaactgtaacaccgggagtagtagccttttcctcatacctatctccccgtgcaaaaaggacacgatctatgtacacctagttgatcaatcctggcaattaaacggacgattaacctcttactattacacgtcgctctagacttttctacgagggatttgtgggggggtcttgtcgtcgtcatcgggcgctgcaacctacgcctcctcgatcggcggcggcaggttcaggtcgagccccacgccgacggccggcgaggcgtccaccacggatgacgacgagccggtgtcgctctgctcgtccaggcgagctacctccttcttgacgctgacgacggccggccggcgaggcaccggtgccgcgacggccacggtcaccgcgaccctggggtcgaggaacaggaacggctgggcggccaccatggccgacatcccgaggctcagatcgagcgaaggcgaggcgggcacctgggccttggccgcggccgccaccggggcggcggcgggcgtgtcccgggaggacgactcgaccgtgctgctggtcgggctgacgacggccagcgccgccgccttgggcagcggcggcggcggggcgtggtggtgggcgtgcgcgaaggcgacggggaagttggtcttggccttgggcccgcggaagtggagcgcggcgctgtcgtaggcgcgcgccgcggcctcggcggtgtcgaaggtgccgagccacacccgcgccttcctggccgggtcgcggatctccgccgcgtacctgccccacgggcgcttcctcacgccgcggaacctgggctccatgccggctcctccgccctccgccacggcgacggcgacggcctcggcggcgttcctgggagccatgtccgttcttgttcgggtcgagcaccacgagcagagcgagctaaggcgggcgagagcgccaagtgttcgaccggtggatggtgggtggttggtttggcgccggtggtgcgt

SEQ ID NO: 11091 - DNA, 711 bp, Oryza sativa
  Clone ID: TFbOSC416364j.C1.o3.fg
atggcgccgagaacgtcggacaagactatgtcaccggcggccgcggccaccggactcgcgcttggcgtgggcggtgtcgccggagccgccgccgtgggcaccggccagcacttccgtggcgtgaggaagcggccgtggggccgttacgcggcggagatccgcgacccggccaagaagagccgcgtgtggctcggcacgttcgacacggccgaggaggccgcgcgcgcctacgacgccgcggcgcgcgagtaccgcggtgccaaggccaagaccaacttcccctaccctaacggcgcgcccgccgccggtgtgaacagcggcagcagcaacagcagcaccgtcgagtcgttcggcagcgacgtgcaggcgcccatgaaggccatgccgatcccgccgtcgctcgagctcgacctgttccaccgcgccgcagcggccgcggccgccggcgcaggcggcatgcgtttccctttcgagggctaccccgtatcgcacccttactacttctttggacaagcggccgccgccgccgccgcctctggttgccgcatgctcaagattgcgccggcgccggtcaccgtggccgccttggcacagagcgactccgactcctcgtcgatcgtggatctggcaccatcaccgcccgccgcgttggcgaagaaagccatcgcttttgatcttgatctgaactgtccgccgccgatggaggtctag

SEQ ID NO: 11092 - DNA, 753 bp, Oryza sativa
  Clone ID: TFbOSC900129j.C1.o28.fg
atgtgtggaggagcactgatcccgaacgactatggcgacaagccgccgccgccgccgtcggagtcgtcggagtgggacgccacaacgaagatgaagaagaagaagaagcgtggtggcggcggcgacgacgactgggaggccgccttccgggagttcatcgctggcgacgacgacgacgacgacggcggcgtttccatgttcccttctggtgcagggacgatggagacgaccacagaggtggcgccggcggcggcggtggtggagaggccgcggcggcggcgaagggtgaggcggagctacccgtaccgcggcgtccggcagcggccgtgggggcggtgggcgtcggagatccgcgaccccgtcaagggcgcccgcgtctggctcggcaccttcgacaccgccgtcgaggccgcgcgcgcctacgacgccgaggcgcgccgcatccacggccacaaggcaaggaccaacttcccgcccgacgagcctccgctgccggcgccatcgcaggcgccgttctgcttcctgctcgacgacgacgacgacgacgacggcgtggcccgtggaaacagcccggcgtcgtcgtcggcgccggacagagcctccgcttgcacgacgtcgtcgacggtggcgtccggcgagcgaggcgatgagctcatactgctggagtgctgctccgacgacgtgatggacagcctcctcgccggcttcgacgtgtccagcgaaccacgcagtgttttgggaatggttaattag

SEQ ID NO: 11093 - DNA, 1401 bp, Oryza sativa
  Clone ID: TFbOSC400220j.C1.o29.fg
atggacgctccgagcggcgagagcggcggcggcggcggcggcggtggtggcaggaggtggaaggggaagggggtgacgcccatacagccgcggcggcagctggggacggttttggaggactcgtcggcggcattgctgcggccgctcaagaagattgggcggagccccgaccgcctcctccgctccgcatcgtcgctctccacgtcctcgtcggctccgccttcgcctcgctcttcttcggcttccgatgctccagtccgcgtcatctcgtcgtcgccgtcgtcgccctcgccaccgtcggcgcgacacatcttccccttcgcgtacgaggcctccacgacgacggtgggtgggagcccaaggctccacccgctgtcgtggcagcaatccagcatgtcccagcccgcgtcgccacagcaacagcagcagcagccgttgcagcaccagcagatgatatcgttcggcgcgtcgcctccgtgctcgacgacgcagttcgtcgtcccggagaacgcgcagcagcagcagatgctgctgcggtactggagcgaggcgctgaacctgagcccgcgcggtggccccggtggcgtgccaccgtggctgtaccagcagctgctccgggtcccgccaccgccgcagaagctttaccgcggcgtgcggcagaggcactgggggaagtgggtcgcggagatccgcctgccacggaaccgcacgcggctgtggcttggcaccttcgacaccgccgaggacgccgccatggcgtacgaccgcgaggccttcaagctccgcggcgagaacgcgcggctcaactttccggaccggttccttgggaagggccgcgccggcgggaaaggccgcaccagcgtaagctcctcggccgctgccgccgcgtcgtgctcgtcgtcgtcgctatcgccaccggagacacctgacgacgcaaacacgcagcaacaagctcctcagcagcgagaacagcgggacacggcaggagtgtccatggagaagaaacaaccacagcctccagctccaacctctcgtcaagaagggtgctctggcggcgacgcagctgcgccgtacccggccgaaatgcttcacgcgccggcggcgtgcggcggcatgtgggttgctcccgacgagtcatggttcagcacgtggggccctggcagctccttctgggacgactacgacatggacagcgctcgcggcctcttcctccaccctcgcttcaccggtgacgaaactagcatggatcattccggcacgcaagcaaccgtgccggcagtggcagcaacagcggcagggatgagcatgccatgcgatgatgttccggtaacctcttcttcttcagatctccctccccaagggacacctcagactcctaccttcatgtggaaggaggactaa

SEQ ID NO: 11094 - DNA, 577 bp, Oryza sativa
  Clone ID: TFbOSC20641j.C1.o1.hg
cgacaccgccgaggccgccgccgccgcctacgacgacgcctgcctccgcctccgcggccccggcgccgccctcaacctcccctcccgccgctgcgtcgctcccgctccgcctccaccgcctcctccgccgccgccgacggccgaggagaagaagctgctgctgttcccgccgccgctgcctccgaggaagaaggcgatgctattcccgctgccgctgccgccgaggaagaagccgctgctgtacccgccgccgctgccgccgaagaagaagccgctaccaccaccatcaccaccgccacagccgccgctgccggagaaggagaacaccccgctcccgccgctgctgctgcctccaaagaagaagccgcttccgccgccgtcaccgacagcggcagcgaaggaggagcccatcgagctcgagcatgcggcgccgccgccgcctttcgtgccccggccggtgtggcccctcctggccagcggcggcggcgggaagcggaagaagcagtcgggctgcggcggccgcatccccgccctcaacaccgccgccgccgccgtcgaggagaccggccgcgcctga

SEQ ID NO: 11095 - DNA, 4422 bp, Oryza sativa
  Clone ID: TFbOSC407093j.C1.o8.fg
atggatccggaggagagagtagcggaggcgatgaaaggcttgctggtggagtactcccagcagtcggcgcgcctcgccgtgcaggtacgggggaacgagtaccgccgcgccgccgccgcgggcggcggcggcggatttctgctgtcgcccggggagagggagaggttgagggccggttccgggttggagctcgtgattgtgcccgtcatggagggggatcaggtggtgtcgtcgtcggcgtcggcggaggttttggtttcgccgttggtggagggcgaggttcgcgtcgtccccgccgtggagcggcggcgctggcgtcgtcaggcggcggcggaggagtgggaggagattgacccggagacgaagtatcgtggggtgagggtgaggtttgggacgaggtatgtcgccgagatccacaacccgacgggggccgggcggctgtggctggggacgttcgacacggcggagcagggggcgtgggcgtacgacgcggcggcgcgggtgctgcgcggggaggcggcggcgaccaacttcggcgatcccgcgcagacgccgtcgccgctttcggcggagatgcggtccatgctagcgttcttcgaccgagctcgagctcgccgcgagcgtgtggtggaggaacgtggggcggcggcggcagaggcggaggcgagcgaggctcctgctcctgctcctctcctgttgctgcctgcgccgccgccttcgtctgatgtgtctccggtgacggtgcaggtggcagcgcctccgtcgtcatctgatgcagctcctgtgccagcgacgctgttatctgatgcatctccggtgattgtgcaggtgcccgtgccgccgtcatctgatgcagctccggtgccagcgccgacgttatctgatgcatctccggtgccggtgcaggtgcccgcgccgccgtcatctgatgttgctctggtgccggtgccggtgcaggtgccagctccgacgtcatctggatctgatgaagctgcatttgttggtggacggggacgcggcgccggtgccggtgttggtggcggccgtggacttgggcgcggtggcggtggcgggcgtgggcgcggaggcaaacgcgctccgacgacggcggtgaccgtggttgctccaccgccgccggtgcccacacctgctgcaggtgcagcagccccgacgctggcgcctgcatcagcagctgcacatgcacctgcgctgtcggtggagccggatgctctcgtttctccagcgtcaatcgcgcccgcttatgctgcgccggcgccggctccagcaccggcggctcttgaagcgctcgcgccgccgccacctgctgcacctgcatccctctccgcaagcggcggagagcgcggatgtgttgccatcgcgaacgctgcggtcgccggccgcggccgtgggcgtgggagcggagccaaacgcgctccgacggcggtgaccgtgggtgctccaccgccgcaggcgcgcacacctgctgcagctccggcgaaggcgttcgtatcagcacctgcacctgcaccgagttctgtgatctcgccggtactcgcagccagcgcctctgctgcagctgcatttgcaccggcgccagcgccggcggcagctgaagtgatcccgccgccgccattgcctgctgcggcaagcacagctgctgcacctgcagctgaaaggaaaaggaagctcctgactgcctcaagcctctcctcaagcggtggagagcgcggacgtggacgtgcacgcggccgcggacgtgttgccgatgccgccattgccggtggcagccgtgggcgtgggcgcggatgcggactaactccagcggtggtgaccgtgggtgctccaccgccgccttctgcagctccagcaccggcgcctgcatcagcaccatcactggagccgaatgacattattgcgccggtcgtgtcatccacactcgcgccaggcgcctctgctgcagctgcagctgcaccggcggtggcaccgccggcggcggcgcttgaagcgatcttgatcccgatgccgccgcctgcagccgcagccgcagctgctgcacctgtacccaagaagaggaaggtccggacagcctcaaccctctccggaagtggtggaccaggacgaggacgcgggcgtgttgccgaggcaacctttgtcggtcgtggccgtggagtttggagtgtgcgcgggcgcggacgcggacgcattccgactgaggtgaccgtgggtactccatcgccgtcggcgcccacacctgcaccagcatcagcaactgcaccgttaatacagtcaaatgttgtgatttcaccggtgccgcccacacttgctgcctctggcgtagctgcatggccaccggtgccggcgatacctgagctcacaaccgcagcagcggcgcctttaccggaaaagccggtgctgacagcccatgacgttgtcatggcaacactcttccccaacggtgtcttctcctacactgccgggtcatcacatgcgccgccaccgccggtggctagcggttccttcttccaggaggtgatccctcccggcggtgtgccgacaaactacgccatacatgaggctccggactttgacccaaacgtcttcttcgccgatgtgcccgacggggagcaggacgagctcgtgttgctgagcttgacatcgacgctccttgacattgacaactcattgactctggttgccgacgatgcagcctcgtcggctcaggcagccgttgacgtcgcatcatcgtcagctcaggctgccatcgatgtcccttcctcgtcggttctggctgtcgtcgacatcccctcctcatcggctcaggctgccattgacgttcccgcctcattggctcaggctgccactgatgttgcatcctcgtcgacccaaggtgcatttgttggtggaaggggaagcgggcgcggcgccagtgtcggtgttggtggtgggcgtggacttctccgcggtgtcggtaccggacatgggcgcggtggcggtggtgggcgtgggcgcggaggcaaatgcgctccgacggcggtgaccgtggttgctccaccgctgccggtgcccacacctgctgtgcatgcacctgcgccgccggtggagccgaatgctgtcatttctccgccgtcatccgcactcgcgcccgcttatgctgtaccggcaccggctccatcgctggcggctcttgaagcgctcgcaccaccgcctgctacacccgcaactctctctgcaagcagcagagagcacggacttggacggggacgcggatgtgttgccatcgccaacgctgccggtcgtggccatgggcgtgggtccgaaaccaaatgcgctccgacggtggtgatcgtgggtgctccaccgccgccggcgcccatacctgctgccactccggcgaaggcacttgtatcagcacctgcacctgcaccgatctcgacggtgtcgtccacactcgcagccagcgcttctgctgcagccgcatttgcaccggcgccggtggcagctgaagcgatcccgccgccaccgccgccactgcctgcagcggcaaccgcagttgctgcacctgcacccgataggaaaaggaagctccagacagcctcaaccctcttcgcaagcggtggagagcgcggccgtggacgtgcacgtggtcgcggacgtgttgccgatgccgccgttgcgggtggaaaccgtgggcgtgggcgtggatgcggacttacttcggcggtggtgaccgcaggtgctccactgccaccttctgcagctccagtgccggtgcctgcatcagcaccaacaatggagccgaatgccactatttcgccggggtcatccacactcgcgccaggcgcctctgctgctgcaccggcggtggcaccgccgacggcggtgcctgaagccatcctggtcccgatgccgccgcctgcagttgcagccgcagctgctgcacctgtacccaagaagaggaagctccaaacagcctcaaccctctccaaaagcggtggaccggaacgcggacgcgggcgtgttgctgaggcaacctttgctagtcgtggccgtggagtttggaatgggcgcgggcgcggacgcggacgcattccgactgcggtgaccgtgggtactccatcgccgtcggcacccacacctgctacagaaccggcattggtgcctgcatctgcatcagcactagcaactgcaccgttaatgcaaccaaatgttgtgatttcgccggtgccttctacactcgctgcctctggcgcagctgcaccgccaccggttccagcaaaacttgagctcgcaaccgcagcagctacgactttaccggaaaagccggttctgacagcccatgaagttgtcatggcaactctcttccccaacggtgtcttctcctacatcgccatcgcatgcgccaccgccaccgccggcggctag

SEQ ID NO: 11096 - DNA, 1491 bp, Oryza sativa
  Clone ID: TFbOSC900368j.C1.o22.gm
atgagcttccaggacctgctccgcgacatggaggccggcgtgctgcagccggcggcgccgccggcgcaggaggtggcgcacggcgtgttccagctcaacaccaaggtggaggccctccggtacatggccggcgcgctcggcacgcccagggacacgccctccctccgcggccgcctccgcggcacgcgcgccgggatcaagcggctggcgacgagcacgtcccaggcgctcaggcaggccgccgccgccgccgacgacgacgagtcggtatcctcctgctccaagctggccatggacttcgaggccgccgtgaacgagtaccagaagatcgagcgacgcattgcggcggtcgagcggcaagaaaccgccgccgccgctcgccgctcgccgccgccaccaactccgggcttcaatcacataaacaacaatggcgatcacacattccccgaacagaagcagacgcagctcgccgtgctacgagacatcaacctgctcgacagcgagatcgagctccacgaagccatcatcgcggagagggagcaggggatactggaggtgcagcaggagatcgccgacatccacgagatcttcagggacctcgcggtgctcgtccacgaccagggtgagtgcatcgagatcgtcaccgccaacatcgagatgaccgaggcggcgacgagccaggcggaggtgcagatctccaaagccgcggggattcgaggggagaaggaggagctcctgaccggcgcaggaaccgaggacaactcgccgtcgaaatgcttgctgctggctgttcttggattgtttctcttcatagttggacgccgtaagctctacagctcgggctgtccatcaaaacgtgggattactgacaaccagaccaagaatacggcggcgccggcgccggagaagaagtacaagggcgtgcggctgcggcaatgggggaagtgggtggcggagatccggctgcccaacagccgcgagagggtgtggctgggatcctacgacacgccggagaaggcggcgcgggcattcgacgctgccttcgtcttcctccgcggcgccggagccgccgacgccgcggggctcaacttccccgactcgccgctgccagttgtcgcgcgcactagagatctgcgcgaggtgtatgccttcgcggtctcgcatgccaacaggccgccgccggtggctggagaaacggctgccacggctctggctgcgatggcggcgctggagcacaatgaggtcagggaaaatattgcgccgtcgtcgccgctgtcggcagtgcaggtggcggcgccgccagctgggagctttgattggtcgcagctgatggcgaactcgccgccgctctactcgccaatagtgataggaagccatgcgtacgacgacctggcggtgtggcccacgacgcagccggtggaggaattcagtgaggaggataacgaaaatgaaggtgctacgagtgatgagctttggagcttcgatgtctga

SEQ ID NO: 11097 - DNA, 948 bp, Oryza sativa
  Clone ID: TFbOSC400585j.C1.o9.fg
atggagctcaacttccaagtgcaacctccagtgttccagctgcaagactactgctactactacagccaagaggtggcggcggcggcgtcgccggcggcgaagccgacgaagccgcgggggaggaagaagggcagcacgagccacagcaagttcgtcggcgtccggcagcggccgtcggggcggtgggtggcggagatcaaggacacgacgcagaagatccgcatgtggctcggcaccttcgagaccgccgacgccgccgcgcgcgcctacgacgaggccgcgcgcctcctccgcggcgccgaggcgcgcaccaacttcgcgccacgcatctcgccggactgcccgctcgccgtccgcatccgcggaatcctccaccacaagaagctcaagaaggccaggtccgccgccgcggccacggccggctcccccggcgccgcatccaagaagaggtccaccacggcggcggcggcggcggccactccgacgatcacaaccacaagcaatagcaatagcgatggtgcgggtagtgcttgtggtggctcgagcagcagcagcagcagcacggacagctgcgacggcgccgtgaagcaaggcggcggcggcggcggcgcaccaacggacgccagcgaggtgtaccggccggacttcgtccacgcgggcgccgaggagttcgattcttggatgttcgacacggcgttcggcccgttcccagagctggacagcttcgccgccgtcgacgccgtcacgccaccgccagcaacggcgtcgccggaggagtcaagcgccggcacgccgccggtcgagatggcggagttcgagcggataaaggtggagcggcggatctcggcgtccctgtacgccatgaacggcctgcaggagtacttcgacaaggtgttcgacgcgtccgcctgcgacccgttctgggatttctcgccactgtgccattag

SEQ ID NO: 11098 - DNA, 438 bp, Oryza sativa
  Clone ID: TFbOSC102007j.C1.o2.fg
atgagcaccaccaacagctcatcctctgtctctgtcccagccatggacgcccatggacaggaggaggaggaggagccgatgcaggtgcagcaacagcaggcgttccgcggggtgcgcaagcggccatggggcaagtttgcggcggagatccgcgactcgacgcgcaacggcgtgcgcgtgtggctgggcacgttcgacagcgcggaggaggcggcgctggcctacgaccaggcggcgttcgccatgcgcgggtcggcggcggtgctcaacttccccatggagcaggtgaggcgttccatggacatgtccctcctgcaggaaggggcgtcgccggtggtggcgctgaagcggcggcactccatgcgagcggcagcagcggggcggcggcgcaagagcgctgcacctgaccggcggatcaggaaggcggaggaggggtga

SEQ ID NO: 11099 - DNA, 501 bp, Oryza sativa
  Clone ID: TFbOSC401268j.C1.o16.fg
atggacgcccatggacaggaggaggaggaggagccgatgcaggtgcagcaacagcaggcgttccgcggggtgcgcaagcggccatggggcaagtttgcggcggagatccgcgactcgacgcgcaacggcgtgcgcgtgtggctgggcacgttcgacagcgcggaggaggcggcgctggcctacgaccaggcggcgttcgccatgcgcgggtcggcggcggtgctcaacttccccatggagcaggtgaggcgttccatggacatgtccctcctgcaggaaggggcgtcgccggtggtggcgctgaagcggcggcactccatgcgagcggcagcagcggggcggcggcgcaagagcgctgcacctgcaccggcggatcaggaaggcggaggaggggtgatggagctggaggacctgggacctgactacctggaggagctgctagccgcctctcagcccatcgatatcacctgctgcacaagcccaagccaccactccatctga

SEQ ID NO: 11100 - DNA, 894 bp, Oryza sativa
  Clone ID: TFbOSC410211j.C1.o10.fg
atggcgacgacagtggattggtgtggccgtggcagcaatcttcctgctgcgatgtatgacatggtggtggatagcaaggagctaatgggcgcgcttgctccgtccatggtgtccttctcctacccgtgttccgagcagagcgcgagctcgcttcttgctggcgccaactacctgactcccgcgcaggtgctccatgtccaggcgcagctacagcgcctgcgccgcccgggcgcggcgagcggctgcctcgccgcggcgccgccgctgccgatgaagcggcatggcgcggtggcggtggcggcggcggcggcggcgcgggcgccggtcaagctgtaccgcggcgtcaggcagcggcattggggcaagtgggtggcggagatccgcctgccgcgcaaccgcacccgcctctggctgggcaccttcgacaccgccgaggaggccgcgctggcgtacgacagcgccgcgttccgcctccgcggcgagtccgcgaggctcaacttccccgagctccgccgcggcggcgcccacctcggcccgccgctccacgccgcggtcgacgccaagctccacgccatctgccacgggatggacctgccccaaccccaaccccaaacccagagcaatgcgacgacgacgacgatgtcgacgacggcgacgaacaccccaagccccttcttctcctcggagagcccggtggtcaagagcgagcccgtctgctccgcctccgagagctcttcctcggccgacggcgacgtgtcatcgacgggctcctccgacgtcgtcccggagatgcagctgctcgacttctcggaggcgccatgggacgagtccgagagcttcctgctgcacaagtacccgtcgctggagatcgactgggacgcgatcctttcctga

SEQ ID NO: 11101 - DNA, 1200 bp, Oryza sativa
  Clone ID: TFbOSC21837j.C1.o4.fg
atggagacgtacggtttggtgaaggatgagctgcttcacggcatcggaggagggcaggggcgcctgtactgcgaggttaagccgacagcagcgccggcggtgatcacagctgccggtggcggcgctaagagcgtgaagagaaggaagagagagccatcggcggcggcgatgtcggctgtgacagtggccggcaatggcaaagaggccggcggtagcaatgcggctaacaagagaagctcaaggtttaggggtgtgagcaggcaccgttggacaggcagatttgaggcacacctgtgggacaaagggacatggaacccaacgcagaagaagaaagggaaacaagtttatctcggggcgtacaacgaggaagatgcggcagcgagagcttacgatctggcggcgctcaagtactggggacctaccacctacacaaacttccctgtcgctgactatgaaaaagagctgaaactgatgcagggtgtatccaaggaggagtacctagcctcaataagaaggaagagcaatggcttctctcgtggagtttccaagtacagaggcgttgcacggcaccaccacaacggcaggtgggaggcccggatcggcagggtgttcggcaacaagtacctctacctgggcacctactccacccaggaggaggccgcccgcgcctacgacatcgccgccatcgagtaccgcggcatcaacgccgtcaccaacttcgatctcagcacctacatccgctggctcaagcccccctcctcctcctccgccgccggcacgccccaccaccacggcggtggcatggtcgtcggcgccgaccgcgtgctcgccccggcgcagagctacccgatcagcgccgccgccgacgacgacgtggccggctgctggcggccgttgccgtcgccgtcgtcgtcgacgaccacggcgctcagcctgctgctccggtcgtcgatgttccaggagctcgtggcgcggcagcccgtcgtggaaggcgacgacggacagttggcggtggtgtcgggcgacgacgccgacgccgacgccgactccgacgtgaaggagccgccgccggagagcgagtacggcgaagtgttcgccagcgacgaggcggcggcggcggcggcgtacgggtgctccatgtacgagctggacgacagcttcgccctcatcgatgactcggtgtggaactgcttgatctga

SEQ ID NO: 11102 - DNA, 1806 bp, Oryza sativa
  Clone ID: TFbOSC401520j.C1.o13.fg
atggtgaagagtgggcaggaggcggcgccggggagcggcggcaatgcggcggcggctgcggcgaggcagggcggaggaggaggagggagagggaggcagtacaagggggtgaggatgcggagctgggggtcgtgggtgtcggagatcagggcgcccaaccagaagacgcggatatggctcgggtcctactccaccgccgaggcggcggcgcgcgcctacgacgccgcgctgctctgcctcaagggctccgccgccgacctcaacttcccggtgcacctccccttccacatccccgccgccgcgatgtcccccaagtccatccagcgcgtcgccgccgccgccgccgccaatgccaccagccccctccagcaccacagcggcgccccctccttcgccaccgccaccggcggctacaaccccgcggccgcgcccaccacgccgccgtgcagctacggcgacatgtcgtcgtgctcggccgtcagctcgccggagaccgccaactactacggcgccgaccacgacatggtggcgcgcgaggacgacgtggactacgccgcgctcgccgacatcgacgccttcttccagtcgcccaagtgcatggactactccatgatggacccatgcagcacgttcttctcgccggcgccggagtccctcgccgccgagtgggaggacgaagcctcgcatccgaacccgagaggccgagacagcctcgcctttgccctactcgtctccttccttccttccgccgccgccgccgccgccgcgagggccatggggtacaccaaggagcagctcctcgcgcgactccaggagctcaacattgaattctcgtgctacgatcacccggttgtgttgacggtggaggaacaggccaaacatgttgggcatttaggaggtgctttgagtaaaaatttgctactgaaggacaaaaagcataggctgtacgttgtttctgcccttgctggcaccaaagttgacatgaaaattttatcacagcgtcttggtttgggaaaaggtggtctgcggatggctcctgaggaaaatttgcttgaagtgcttcaggtacccttaggctgtgttactccatttgcactacttaatgagtctgcaagtttttttcatggttatgctattgcctttttaactgattcatataactgtgtatttgcaagcagtgctgtctcactactactggaccaaggtttcaagtcaaaacagagctgctacttccatccactgacaaatgatgtgacaatcgctctcagctcaagcaatctggacaagtttctcatgtccattgggaggcaaccagcttatgtagacttagaggcttcaccagttgtaggcaaggataatcctcctgatctagcagattttgtaccatcaggtgtcccaaattctgcagaaccaattgagaaggtcacacctacaaatgttcctcgtcaaaatgatgtgcccaaagagaaaacatgtcttcctgaagtgaaggctaagcctaaagttcagaacaagggtgcagaaaagacgcagagcaagatacctacaaacggagctaatgttgagaaatttgtaaatgatgtatttgacatcatgtccccgttgttcctttctgaggtatcaaagaaactgaatgttaagcaggaagaactttcttctatatttgatggctttaaagaacaagccactattgatttggagagtgtaacgacgagtctgaagaatgcagcatacaccgctggatttgaggctggcttcgagactatgctcaattcaggtttaaaaggacaggcttctcggaagtaa

SEQ ID NO: 11103 - DNA, 1214 bp, Oryza sativa
  Clone ID: TFbOSC403248j.C1.o1.fg
atggccaccatgaacaactggctggccttctccctctccccgcaggatcagctcccgccgtctcagaccaactccactctcatctccgccgccgccaccaccaccaccgccggcgactcctccaccggcgacgtctgcttcaacatcccccaagattggagcatgaggggatcggagctctcggcgctcgtcgccgagccgaagctggaggacttcctcggcggcatctccttctcggagcagcagcatcatcacggcggcaagggcggcgtgatcccgagcagcgccgccgcttgctacgcgagctccggcagcagcgtcggctacctgtaccctcctccaagctcatcctcgctccagttcgccgactccgtcatggtggccacctcctcgcccgtcgtcgcccacgacggcgtcagcggcggcggcgaggaagtccgtcgacacgttcggccagagaacatcgatctaccgcggcgtgacaagatttgtaggatttatcattatgtcattattatgtgggacatgattgttgtgattaacaaagttgtaatatcttttggtttggttataggcatagatggacagggaggtggttatgacaaagaggaaaaagctgctagagcttatgatttggctgctctcaaatactggggcccgacgacgacgacaaattttccggtaaataactatgaaaaggagctggaggagatgaagcacatgacaaggcaggagttcgtagcctctttgagaaggaagagcagtggtttctccagaggtgcatccatttaccgtggagtaactaggcatcaccagcatgggagatggcaagcaaggataggaagagttgcagggaacaaggacctctacttgggcaccttcagcacgcaggaggaggcggcggaggcgtacgacatcgcggcgatcaagttccgggggctcaacgccgtcaccaacttcgacatgagccgctacgacgtcaagagcatcctcgacagcgctgccctccccgtcggcaccgccgccaagcgcctcaaggacgccgaggccgccgccgcctacgacgtcggccgcatcgcctcgcacctcggcggcgacggcgcctacgccgcgcattacggccaccaccaccactcggccgccgccgcctggccgaccatcgcgttccaggcggcggcggcgccgccgccgcacgccgccgggctttaccaccc

SEQ ID NO: 11104 - DNA, 708 bp, Oryza sativa
  Clone ID: TFbOSC400993j.C1.o33.fg
atggcgcccagagcagctacggtggagaaggttgctgtggcgccacccaccgggcttggtcttggcgtcggcggaggtgtcggagccgggggtcctcactacaggggcgtccgcaagcgcccgtgggggcgttacgcagcggagatccgtgaccctgccaagaagagccgggtgtggctcggtacctacgacacggcagaggaggccgcccgcgcctacgacgccgccgctcgagagttccggggtgccaaggcaaaaacaaactttccgtttgcatcacagtcgatggtcggctgtggcggcagccccagcagcaatagcacggtagacaccggtggcggcggggttcagacgcctatgcgggccatgcctctgccgccgactctggacttggatttgttccaccgcgcggctgctgtgactgcagtcgccggcaccggcgttcgctttcctttcagaggatatcccgttgcacgtccagcaacgcatccttactttttctatgagcaggctgcagcggctgccgcagctgaggctggataccgtatgatgaagcttgcaccgccggtcaccgtggcggcggttgcacaaagtgactccgactcctcgtcggtggttgatctcgcgccgtcacctccagcggttacggcgaacaaggcggcagctttcgatctggatctgaaccggccgccgccggtagagaactag

SEQ ID NO: 11105 - DNA, 1090 bp, Oryza sativa
  Clone ID: TFbOSC400993j.C1.o38.gp
aaacgtcaatcaaactcagtgtgcacagatatttttgtgactttctgaataatttcttcatactaatataaaggaatacatacactccacggtttagtccatctcatcgccggcatgatctgttctaattaacagatcccaagatgaatttcgccctcggcagaaaaactatttacaaggctcttccgtctctcacaggctactaaacaaaaacacagaggaccaaaacatcggagagaaatatccatcaaagaagaaaataagagagaaactacaaagtcgtcagctaacccatcctgagctagttctctaccggcggcggccggttcagatccagatcgaaagctgccgccttgttcgccgtaaccgctggaggtgacggcgcgagatcaaccaccgacgaggagtcggagtcactttgtgcaaccgccgccacggtgaccggcggtgcaagcttcatcatacggtatccagcctcagctgcggcagccgctgcagcctgctcatagaaaaagtaaggatgcgttgctggacgtgcaacgggatatcctctgaaaggaaagcgaacgccggtgccggcgactgcagtcacagcagccgcgcggtggaacaaatccaagtccagagtcggcggcagaggcatggcccgcataggcgtctgaaccccgccgccaccggtgtctaccgtgctattgctgctggggctgccgccacagccgaccatcgactgtgatgcaaacggaaagtttgtttttgccttggcaccccggaactctcgagcggcggcgtcgtaggcgcgggcggcctcctctgccgtgtcgtaggtaccgagccacacccggctcttcttggcagggtcacggatctccgctgcgtaacgcccccacgggcgcttgcggacgcccctgtagtgaggacccccggctccgacacctccgccgacgccaagaccaagcccggtgggtggcgccacagcaaccttctccaccgtagctgctctgggcgccatgggtgcagcaggtttacaagtggcgggcgcggatctctggtaaaccgggtgggtgttttgggaggttgggtttgggtgtgt

SEQ ID NO: 11106 - DNA, 870 bp, Oryza sativa
  Clone ID: TFbOSC422332j.C1.o15.fg
atggccatggcgaaggagctccaagaaacctcctcgtcttcgtcctcctcggctgcctccacgtcctcctgctcctccgccgtcacggacgcgtggtcgtcgccggccagacccaatgctgtggccggggggaagaggaagaaggaggtggtaggagaggctgatgaggctgcaggcggcggcgcaggagaggaggaagaggaggaggcggaggcggcggcggcggggaagtcgtcggcggcgacgaagaagaggaagcggagcagcgacgggaagcacccggtgtaccgcggcgtgcggatgcgggcgtgggggaagtgggtgtcggagatccgcgagccgcggaagaagtcgcgcatctggctcggcacgttccccaccgccgacatggccgcgcgcgcccacgacgtcgccgcgctcgccatcaagggccgcgccgcgcacctcaacttcccggacctcgccggcgtcctcccgcgcgccgcctccgcctcgcccaaggacgtccaggccgccgccgcattggccgccgcgttcaccacgtccccgtcctcgtcgccctcctcctccttgtcggccgacgacgtcgcgccatgcgtcgtccacgccgacgccgacgagcagcctgccgctgccgccaagaacgacgacgacgacggctcaaccaccgcgccggtggcggcggcggcggcggcggcggcggcggatgagcagcagctgttcgacctgccggacttgctgttcgacatccaggacgggccgttcgggttcccggcgatgtgggcgccgctcgccgacgtcgacgaggtcaatgcggagctccggcttgaggagccattgctttgggacttgggagtaacagatgcttaa

SEQ ID NO: 11107 - DNA, 1134 bp, Oryza sativa
  Clone ID: TFbOSC400789j.C1.o4.gm
atggcgggcggcggcgggcaggcggccggaggtgccgcgcgcggcaggggccggcgggggcgcgcgtggcggcggccggcggggaagcttctggcggcggccgtgccctctcagcggtccatgtgctgtaccggcgacgaggtggcgggacccggagagcagcggcggcggccgctcgacgccgacgccggcggcgacaagggcgcggtggcgacgacgtcgtcgtcgttgttggcggcgccgatgctgtcgcggcggaggcaggcggaggagatggcggcgatggtgtcggcgctggcgagtgtcgtggccggcggcggcggcacgtcgttgccggcgaagaggccagccgagagagagcccgaggagggcgccgccgtggagggggtgtggtggtcgtactgcagtgagctcgccgccgccgccgccgcgccgtcgccggcggctccatttccggccggctacgtgccatcgccggggcaacactcgcctgcgtcggcggcggccggcgacgaggaggagctcccgtcgccgtcctcggccgactccagcggcggcacggcgaggaagcggtacagaggggtgcggcagcggccgtgggggaagtgggcggcggagatccgggacccgcacaaggcggcgcgcgtgtggctcggcaccttcgacaccgccgaggacgccgcccgcgcctacgacggcgccgccctccgcttccgcggcagccgcgccaagctcaacttccccgagcacgccaccctcccaccgccgccgacgacgacgacggccgccgctcaccggtgcccgccaccgccgcggacggacgcgctgctggagtcgcaggagctctctcccggcgccggcggcggtgacccgtactctcagtacgcgaggttcttgcagggctccggcggcgacggtggcgaggcggcggcgcggcccggcggtggcgcctcgcaaagaacgccacccgccactacactgctctacagcttcgagggagacgctgcttccgccgcctgcctctggcagccggagagcggcggcggcgggatggggtggccggcgacttcgccggcggcgtggttggagtacggtttctacccgccgccggagcggcgcgacacggacacgtag

SEQ ID NO: 11108 - DNA, 504 bp, Oryza sativa
  Clone ID: TFbOSC4060j.C1.o1.fg
atggacgactcgtcgttcggttccgagccgaccacgtcctcctcgggcggggaggcgccggcctccccgccgtccaccgcgtcgtcgtcctcagacggcgccggcggcaagaagaagcggccgcgcaaggacgggcaccacccgacgtaccgcggggtgcgcatgcggagctggggcaagtgggtgtcggagatcagggagccgcggaagaagtcgcgcatctggctgggcaccttcgccaccgccgagatggccgcgcgcgcgcacgacgttgccgcgctcgccatcaagggccgggccgcgcacctcaactttccggacctcgcccacgagctgccgcgcccggccaccgcggcgcccaaggacgtccaggccgcagccgcgctcgccgccgccgccgcttcccggcctcctccgccaatgcgggcgccagcaataaccccgacggatcggacgacgcgagcgccggtccgcctcgccgcccccgccgccggacgccgctga

SEQ ID NO: 11109 - DNA, 654 bp, Oryza sativa
  Clone ID: TFbOSC418226j.C1.o2.fg
atggacgactcccacgacctggcctccccgacctcccctgacacggcgtcctcgtcgtcttcgtctacgtcgacatcatcgtcctccgccaccgtcgccccgaagaagcggccgcgcaacgacggccggcacccgacgtaccgcggcgtgcgcatgcggagctgggggaagtgggtgtccgagatcagggagccccgcaagaagtcgcgcatctggctgggcacgttcgccaccgcggagatggccgcgcgcgcgcacgacgtggccgcgctcgccatcaagggccgcaccgcgcacctcaacttcccggacctcgcgcacctgctcccgcgcccggccaccgcggcgcccaaggacgtgcaggcggcggcgctgctcgccgccgccgcagccgacttcccctccgtctccgtcgacgccaatgccaagagccccgacacctgctccgtcgccagcgccgcctcgccgcagccgccaccgccggacgccgaagcggaccctgacagcacgctgttcgacctcccggacctgctcctggacctgagatacgagacgtcctcgagcctctcgtgcggggcgtcgtgggccgtcgatgacgacgtggccggcggcgtcgtgttccgcctcgaggagcccatgctgtgggattactga

SEQ ID NO: 11110 - DNA, 861 bp, Oryza sativa
  Clone ID: TFbOSC900314j.C1.o20.fg
atggcggcgatggtgtcggcgctggcgagtgtcgtggccggcggcggcggcacgtcgttgccggcgaagaggccagccgagagagagcccgaggagggcgccgccgtggagggggtgtggtggtcgtactgcagtgagctcgccgccgccgccgccgcgccgtcgccggcggctccatttccggccggctacgtgccatcgccggggcaacactcgcctgcgtcggcggcggccggcgacgaggaggagctcccgtcgccgtcctcggccgactccagcggcggcacggcgaggaagcggtacagaggggtgcggcagcggccgtgggggaagtgggcggcggagatccgggacccgcacaaggcggcgcgcgtgtggctcggcaccttcgacaccgccgaggacgccgcccgcgcctacgacggcgccgccctccgcttccgcggcagccgcgccaagctcaacttccccgagcacgccaccctcccaccgccgccgacgacgacgacggccgccgctcaccggtgcccgccaccgccgcggacggacgcgctgctggagtcgcaggagctctctcccggcgccggcggcggtgacccgtactctcagtacgcgaggttcttgcagggctccggcggcgacggtggcgaggcggcggcgcggcccggcggtggcgcctcgcaaagaacgccacccgccactacactgctctacagcttcgagggagacgctgcttccgccgcctgcctctggcagccggagagcggcggcggcgggatggggtggccggcgacttcgccggcggcgtggttggagtacggtttctacccgccgccggagcggcgcgacacggacacgtag

SEQ ID NO: 11111 - DNA, 597 bp, Oryza sativa
  Clone ID: TFbOSC900007j.C1.o7.fg
atgtgtgggggagcgatcatcgccgacttcgtcccgcccgccggcgcccgccgcgccgctgcctccgacatctccgacaacgccgtcctctccgctgccggtgccggtgacgagtcgttcgcggcggccaaggcgccggcgccggggaggaagacggcgtaccgcggcatccggcgccggccgtggggacgctgggcggcggagatccgcgacccgaggaagggcgcccgcgtctggctcggcacctacgccaccgccgaggaggccgcccgcgcctacgacgtcgcggcgcgcgacatccgcggcgccaaggccaagctcaacttccccccgaccatcggcgccgccgccgcgccaccgccgcccaagaagcgacgcaaagccgccgccgcggcgaaccaccaccaccaccaccaccagcaggagagctcaggctcctcgtcggcgtcgtcgctgcctcccaccccgccgccggccgccgagcaccagctccgcgagtgcatgtccgggctggaggcgttcttgggcctcgaggaggaggaggacgacggcggcgccggtgagccatgggacgccgtcgacatgatgctcgagtag

SEQ ID NO: 11112 - DNA, 957 bp, Oryza sativa
  Clone ID: TFbOSC404155j.C1.o16.fg
atgacggcgcgaagcatgttgcggaaccacccggaggcgtcggtgctcgacaccatccggcagcacctgctggaggagccgcgcggcggcggcggtggcgaggcggcggaggcgagcttcgggagcctggtggccgacatgtggagcgactcgctgccgttccgcgacgacgacgccgacgacatggtggtgttcggcgcgatgcgggacgcgttctcgtgcgggtggctgcccgacggcgtgttcgcggaggtgaagccggagcccctgctctcgccggactcgtcgtcgtacgacgggtcctcttgctgcttcggcttcgcggacgtgtcggagccggtgacgccgagcgacgcggcgtcgggggcggcagaagcggcggccgcggcggcggcggcgacggcggagcacgggaaggaggaggaggccgcggctgcggtggcgagggggaagcactacaggggggtgaggcagcggccgtggggcaagttcgcggcggagatccgggaccccgccaagaacggcgcgcgcgtgtggctcggcacgttcgacaccgccgaggacgccgccctggcgtacgaccgcgccgcctaccgcatgcgtggctcccgcgcgctcctcaacttcccgctccgcatcggctcggagatcgcagccgccgccgccgccgcagcggcagcggcagccggcgacaagcggccgtcgccggagccggcgacctcggagtcgtccttctcctcctcatcctcctgcaccaccaccaccacctcctcctcaacctcctcctccggctccccgaaacggagaaagagaggcgaggccgcggccgcgtccatgtccatgcccctggtgcccccgccttcccagctgaactggccggtgcaggcatggtaccccgccgccgcaccggtcgagcaggtggcgatcaccccgcgcgtggagcagctcgtcatctaa

SEQ ID NO: 11113 - DNA, 591 bp, Oryza sativa
  Clone ID: TFbOSC24031j.C1.o2.fg
atggcggcgctcttcgaggccgcggagacggcggccatcgtggctgcgctgacgcgcgtcattgccgacggcgggcgtggaggcagcggcgccggcgtgccgccgcccgcgccatcgttggtggtgccgccgctggcgggaacgggcggcgggcggcgcgtcgacgttgcgcgggaggaggagatggtcggcgtcgtctccgcgggagatcacaccggcgaggcaagcgtggccgcggcggcgcccgtggggcaagtggccggcgtagatcagggacccgaggaagcggcgcgcgtctggctgggcaccttccgcaccgccgaggacgcggcgcgcgcctacgacgccgccgcgctacgcttccgcgggcgccgcgccaagctcaacttccccgaggaggtgtcccgcccgtggcagggtcacgatgtcgatcacatgtcctgctcgccgccgtcgatctcgaacgctcgctttctgggttcgtggaccttcggaccgccgcagccgccatcgcggtccgtcgcggcggcggcgacgactctgcttggtgggagccatggaggcaacggagcagagaacgggagggaatag

SEQ ID NO: 11114 - DNA, 323 bp, Oryza sativa
  Clone ID: TFbOSC404155j.C1.o19.gp
ggcctcgcctctctttctccgtttcggggagccggaggaggaggttgaggaggaggtggtggtggtggtgcaggaggatgaggaggagaaggacgactccgaggtcgccggctccggcgacggccgcttgtcgccggctgccgctgccgctgcggcggcggcggcggctgcgatctccgagccgatgcggagcgggaagttgaggagcgcgcgggagccacgcatgcggtaggcggcgcggtcgtacgccagggcggcgtcctcggcggtgtcgaacgtgccgagccacacgcgcgcgccgttcttggcggggtcccggatct

SEQ ID NO: 11115 - DNA, 972 bp, Oryza sativa
  Clone ID: TFbOSC900036j.C1.o3.fg
atgtgtggaggaggccccgacaatcaccacgccatcaccgtcgccgccgacctgccgccgccgccgccgtcggtggtggcggtggagatggcgccgccgcgcggccaccgccccgggaaggaggtggagtacaatgaggaggaggaggacgacgacgacgagtacgacggccgtgagttcgaggaggagttcctcaggttcagcatgatggtggatgaggaagacgacgacggcgacgacgacgacgaggtggaggtggagatcatcgccgtcgtctcgccgccgcaccggcctctcgtcggagctagaggtactacatcagctgttgaatctgtcacaaaccttcaggcaagaacatcacctctcccaaatccggtggtgcctcagaccggcactaaagccagcaagcgcggcgacagcggggcaaaggcgaagccggcggcggcgaagaagaggaggagcaagcacgggttcctgggcgtccaccagcgcacgtatgggcgatggtcggccgagatccgggacaatgtcatcaagggctcccgcttctggatcggcaccttcgacaccgcgctcgacgccgccctcgcctacgacgccgtctcccgcaggctctacggcctcaacgccaagaccaacttccccgctgccgccggcgaagacgacctccctccgccgccgccgccggcgaagccctgcagctccaccaagcggccaaagaaatgcaacaccagtggcgatcttggcgccgccgcggcgccgccgcaagccgtggatactccggcggcggcagcagctggcgtggagctgacaagcctactgtgcagcgtggcggcgcaggcgcaggaggtgagcgacgggtgggagttcatccaggagctcctcctcctcggcggcggcgtttcgccgctggactacctcaacggccaggagctcgccggcgccgccgtcggcgatctctggagcttctga

SEQ ID NO: 11116 - DNA, 1179 bp, Oryza sativa
  Clone ID: TFbOSC407093j.C1.o2.fg
atggggaggccggtgaagcagaagacgacgacgtggctggtcgagcttctcagggagtactgccagcgcgcggcggcgcaggcgaccgcggggaacggggcggtggcggcggctgcggcggtggagggggagatcaacaccgacgggttggcggcgctggccgtggaggcggagggttttgcggccgcaaacggggagggctgggtggcgccggccgtcgagggagagggagagggtttcgtcggggcgccggttgtggagggggaggaaggtttgacggcggagcttctggtggcggcggagaggaagtaccggggggcgaggaagaggccgtgggggaagtacgcggcggagatccgcatccgcaacacgatgggggtgaaggagagggtgtggctgggcacgttcggcaccgccgaggaggccgcctgggcgtacgacaccgcggcgacggtgatccacggggacaaggcgacgaccaacttcccccgcgcgccgctgcggccggcgaccacgccggtgatgcgttccatgctcgtcttcttcgggatcgcccacctggtgcgctccctcgttccaagggctcgtggcccacgtggacgcggtggtggtgcccgtggacgcggcagaagccgacgccgtcgcgcggcggcggcggcggcgccatcagccccggcaagcgaggctcctcctcctcctcctccctcgtcggcgctggttcctgagcccgagctacaagttcaaggcggccgtggagagcgcgggcgcgggcgtggacgtggacgcggtggcggtcgcggcggccgccgcggccgcgggcgcacgccggcgagggtggtcgccgaggattctccgatgctgcaggcgactacacccgctgcagctccggcgccggcaccggcgctggcacctgcaccggccaatcaagccatcttccagccgatgatcatccctcccggcggcgtcgtggtggctcctgatgacttcctgctgtcggccatctccgacgacgagcccgtgctgccgcacaagaagccgaagctcctcggtgtctacaccccgccggacagccctgatcagttcgtcatggagttcttcgcggatctcggcgacggcgacgacatcctcagctcctcgttctggcaggatccggccggcgacggcgaggacacacagtaa

SEQ ID NO: 11117 - DNA, 537 bp, Oryza sativa
  Clone ID: TFbOSC400825j.C1.o36.fg
atggcgcggccgcagcagcggtatcgcggcgtgcggcagcgccactggggctcatgggtctccgagatccgccaccctctcctgaagacgaggatctggctgggcacgttcgagacggcggaggacgcggcacgcgcgtacgacgaggcggcgcggatcatgtgcggcccgcgcgtgcgcaccaacttcccccacgacgtcgccgacgaggccgcgccgccgccgccgccgcacagcgccgccgcagcctcctcgtcgttcctctccgcggcgctcgtcgccaagctccaccgcttcaacctcgcctccgtccaggctgcgcagcgcggcaacagcaacgacgacgactccaccacctcctcctccgccgccgcgtcgtcgcgcgccgtgattccgtcccttcccgccgccgccggcgcattgggcaatgcggcggcgacggcggagtggagcggcgggttcctcgaggagcagtacgtggaccagatgatcgaggagctcctcgactccaacttctccatggagatctcctgctga

SEQ ID NO: 11118 - DNA, 966 bp, Oryza sativa
  Clone ID: TFbOSC900006j.C1.o4.fg
atggatcgccaatggcgttgcctcgctgctgcggcttctactagtggtaatagtaagcttcctccgctgccgatggcgctgggcggcgccgtggagtacgggcagctcgtccatggcgcggcggcgcccgtggcgccgttcttcgtggacgccgagcagcagagcctgtcgccggcgacggccatggttcttggcgccgggtggtataactataaccttgtcacgccgtcgcaggcggcgcagctgcaccaccggctgcgacgggcggtgggcgcggcgccgtgctcgatgaagcggtgcggtggcatggcggcggcggcggcggggcggcttgcgctggtggggccggcgccggtgcaggcgaagctgtaccgcggcgtgcggcagcggcactgggggaaatgggtggcggagatccggctgccgcggaaccggacgcggctgtggctgggcacgtacgacaccgccgaggacgccgcgctcgcctacgacggtgccgcgttccggctgcgcggcgacgccgcccgcctcaacttccccgagctccggcgcggagggcggcaccacgcgccggcgctcagcgcgtccgtcgacgccaagatcctccaagccaccaccaccaccacggcggacaccgccgccgccgcagcaccggcgtcgacgaacaccacgccgccgccgtcgccgcgcgtcgtcaagaccgagccgggctgctgctccgtctccgaagcctccacgacgacgacggccgacgccgccgacgtctcgtccacagggtcttccccatccccgacctcatcgaatcaggccgccaccgccacgccgccggcgccgcggccgccgccgccgttgccggagacgattcagcagctggacttcacggaggcgccatgggacgaggccgacggcttcgcgctgcgccggtatccgtcgtgggagatcgactgggacgccatcctctcctga

SEQ ID NO: 11119 - DNA, 744 bp, Oryza sativa
  Clone ID: TFbOSC418226j.C1.o5.fg
atggagcaagagcaagtgatgtcccaggagagcaatagctgcacctgcagcagcagcagcaacgacgcgagctcggccgcctgcagctcgctcaacgcgtcgtcgccgagctccgtggactccgggagcgccggcggcggcggcggcggcaagaagcggccgcgcagtgatcacctgaagcacccgacataccgcggcgtgcgcatgcggagctggggcaagtgggtgtcggagattcgggagccccggaagaagtcgcgcatctggctcggcacgttcgacaccgccgagatggccgcgcgcgcgcacgacgtcgcggcgctcgccatcaagggccgcaccgtgcacctcaacttcccggacctcgcgcacctgctcccgcgcgccgcctcggcctcgcccaaggatgtccaggccgccgccgcgctcgccgcggccacggcttcgcccgcgcccgcgctctcgcccacgccatgccacgacgtcgacgccgctgccgatgacgagcccgagccggcggagcctgagcaggcgacggcgccggtttgcatcgttgagaacgggacactgcagcaggacggcggcactggactagactacacgtatttcaccatgccagatgctcttctagagttcgggttcacgttgccgccgccgccgccgccgtattattgcggttcgccgtgggatgacgatgctgacgatttcttctttggtgagccactggtgctctgggaacactga

SEQ ID NO: 11120 - DNA, 666 bp, Oryza sativa
  Clone ID: TFbOSC401961j.C1.o10.fg
atggagcaacacagccactgctggtactacggcggcggcatggctgtcaccgcagccgccggtgccggcgcggcgtcgtcgacatcctcggaatcgcagccgtctggctacgactacgagacggcggggagcgccgaggtgtcggcgcccggcggcggtgcgggccgcgagagggcggcgagaaaggaggagggcggggcgggggcggcggcggcggcggcgggcttcatcggcgtgcggaagcggccgtgggggaggttcgcggcggagatcagggactccacgcggaacggcgtgcgggtgtggctcggcacgttcgagacggccgaggccgccgcgatggcctacgaccaggccgcgctctcggcgcggggcgcggccgcggcgctcaacttccccgtggaacgcgtgcgcgagtcgctccgcgcgctcgcgctcggcgcggccggaggctcgcccgtgctggcgctgaaggggcggcactccaagcgaaagcggcggaagagatcagagctggccggtgccacggcgacggcgaacaagacgacgacgacgacgtccgccacgaccggcggggagcacaagcagatcgtcctcgagctggaggacctcggcgccgactacctagaggagctcctctggatgtccgagcaaactagccattga

SEQ ID NO: 11121 - DNA, 900 bp, Oryza sativa
  Clone ID: TFbOSC421444j.C1.o10.fg
atggcgttctcggagccgccgaagccggcgagccagccgtcgccgccgtcgtcgccgatgagcgagcggccgccgtcggggcgcagcaggcggcgcgcgcaggagccagggaggttcctcggcgtgcggcggcggccgtgggggaggtacgctgccgagatacgcgacccgaccaccaaggagcggcactggctgggcacgttcgacacggcgcaggaggcggcgctggcgtacgaccgcgccgcgctgtccatgaagggcgcccaggcgcgcaccaacttcgtctacacccacgccgcctacaactacccgccgttcctcgcgccgttccacgcgccgcagtacgccgctgccgccgccgcgccgtcctcggtgcagtacggcggcggcgtgggcgcggcgccgcacattggctcgtacggtcaccaccaccaccaccaccaccaccacggacatggcgcggcgtcgggcgcgtcgtcggtgggcgagtgctcgacgatgccggtgatggtcccggttgatccccaccgctccagcatgtcgtcgtcgctgctggacatggacaggaacggccacgacttcctcttctccggcgccgacgacaactccgggtacctgagcagcgtggtgccggagagctgcctccggccgaggggcggcggcgccgcggccgatcatcaggacatgcggcgctactccgacgccgacgcctacggcatgatggggctccgggaggacgtcgacgacctcgcgcagatggtcgccggcttctggggcggcggcgacgcggcggaccagctcggcgcctgcgggttcccggcgagcggcggcgccgccgacatggtcgcctcgtcgcagggctccgactcctactctccattcagcttcctctcccattga

SEQ ID NO: 11122 - DNA, 660 bp, Oryza sativa
  Clone ID: TFbOSC401894j.C1.o9.fg
atggagtgggcgtactacggcagtgggtactcctcgtcggggacgccgtcgccggtgggcggcgacggggacgaggactcgtacatgacggtgtcgtcggcgccgcccaagcggcgggcggggaggaccaagttcaaggagacgaggcacccggtgtacaagggcgtgcgcagcaggaaccccgggaggtgggtctgcgaggtgcgcgagccgcacggcaagcagaggatctggctcggcaccttcgagaccgccgagatggcggcgcgcgcgcacgacgtcgcggcgatggcgctgcgcggccgcgccgcctgcctcaacttcgccgactcgccgcgcaggctccgcgtgccgccgctgggggccgggcacgaggagatacgccgcgccgcggtcgaggccgccgagctgttccgcccggcgcccgggcagcacaatgcggctgccgaggcggcggccgctgtcgctgcgcaggcaaccgcggcgagcgcggagctctttgccgacttcccttgctacccgatggacggactggaattcgaaatgcaggggtacctcgacatggcacagggaatgctcatcgagccgccgccattggcagggcaatcgacgtgggccgaggaggactacgactgcgaggtcaatctatggagctactga

SEQ ID NO: 11123 - DNA, 1122 bp, Oryza sativa
  Clone ID: TFbOSC401369j.C1.o98.fg
atggaggaggggtttgtggctctcaagaggacggagcatgtcgaggtgacgtccttggcggtggcggtcgaggcgacgccgtcggcgaaggggggaaaggggaaggttgtggtgggtggtggtggcgccggcggcggcgttgggccgacgagggtgagggtgttctgtgatgacttcgacgcgacggactcgtcgagcgatgaggatgaggaggaggtgaccgcgcggcggagggtgaagcgctacgtgcaggagattcggttacagcgcgcggcggcggtggccgtgccgccggtgaaggtgaagggcgaggaggtgttcccggccgcggtgtcggcgaagatggcggaggccgcgaaggcgagggtggtgttggcggctgggaggaagaggaaggccggcggggtggacggcgccgagccgcggttccgcggcgtgcggaggcggccgtgggggaagtacgcggcggagatccgcgacccgtggaggcgggtgcgggtgtggctcggcacgttcgacaccgccgaggaggccgccaaggtgtacgacacggcggccatccagctacgcggccgcgacgccaccaccaacttcaaccagtccggggactcggcaagcctcgacgtcccacccgaggtcgccgagcgcgtcccgcagccgccgggggcgtccaagaacgcctccccggccacctcctacgactccggcgaggaatcccacgccgcggcggcctccccaacctccgtcctccgttccttccctccctccgccgtcgtcgcgaccgccgacacggccaacaagaagcagccgccgccgccgcctctcgtcgtccgcgagaccgacgagtcggtcgacgtcttcggctgctccttctccgacgacggcggcttcgccggcgagctcccacctctctacaccgacttcgacctcctcgccgacttcccggagcccccgctggacttcttgtccaacctccccgtggagcccttctccctggctcccttctccagcaacaatgggtcaccggacctccacctcgacgacgccccatcgccggcggcggcacaagtggacgacttcttccaagacatcaccgacctgttccagatccccgtcgtctag

SEQ ID NO: 11124 - DNA, 1260 bp, Oryza sativa
  Clone ID: TFbOSC400957j.C1.o1.fg
atggcgaccaccacctggtgctgtggttgctgctgctcctgcctcgccaccgctcgaagccgctcctcggtgctaaactccggggacgccggaggcggcggtggcggtggcggtggcggaggattattccggttcgacctcctcgcgagcagccccgacgacgacgagtgctccggggagcagcatcagttgccggccgcctcggggatcgtgacgcgtcagctcctcccgcctccgcctcccgcggcgccgtcgccggcgccggcgtggcagccgccgcgccgcgcggcggaggatgccgccctcgcgcagcggccggtggtcgcgaagaagacgcggcgcgggccgaggtcgcggagctcgcagtacaggggcgtcaccttctacaggaggaccggccgctgggagtcgcacatatgggcttacgatcgcgctgcgatcaagttccggggactggaggctgacatcaacttcaacctgagcgactacgaggacgatctgaagcagatgaggaactggaccaaggaggagttcgtgcacatactccggcgacagagcacgggattcgcgagggggagctccaagttccgcggcgtcacgctgcacaagtgcggccgctgggaggcacgcatgggccaacttcttggcaagaagtacatataccttgggctctttgacaccgaagttgaagctgcaagagcatatgacagggcagctattcgcttcaatgggagggaagctgttaccaacttcgagcctgcatcctacaatgtggatgctttaccagacgccggaaatgaggcaattgttgatggcgatcttgatttggatttgcggatttcgcaacctaatgcgcgtgactccaaaagcgatgtcgccacaactggcctccagttaacttgtgattcccctgaatcttcaaatattacagtccaccagccaatgggctcgtctccccaatggactgtgcatcaccaaagcacaccactgccccctcagcatcaacgtttgtacccatctcattgtcttggcttcctcccgaacctacaggagaggccaatggacagaaggcctgagctgggtcccatgccgttcccaacacaggcttggcaaatgcaggccccttctcacttgccattgctccacgctgcagcatcatcaggattctctgccggcgccggcgccggcgtcgccgccgccacccgccggcagccgccgttcccggcggatcaccccttctacttcccgccaaccgcctga

SEQ ID NO: 11125 - DNA, 1086 bp, Oryza sativa
  Clone ID: TFbOSC900118j.C1.o3.fg
atggcgaccaccacctggtgctgtggttgctgctgctcctgcctcgccaccgctcgaagccgctcctcggtgctaaactccggggacgccggaggcggcggtggcggtggcggtggcggaggattattccggttcgacctcctcgcgagcagccccgacgacgacgagtgctccggggagcagcatcagttgccggccgcctcggggatcgtgacgcgtcagctcctcccgcctccgcctcccgcggcgccgtcgccggcgccggcgtggcagccgccgcgccgcgcggcggaggatgccgccctcgcgcagcggccggtggtcgcgaagaagacgcggcgcgggccgaggtcgcggagctcgcagtacaggggcgtcaccttctacaggaggaccggccgctgggagtcgcacatatgggcttacgatcgcgctgcgatcaagttccggggactggaggctgacatcaacttcaacctgagcgactacgaggacgatctgaagcagatgaggaactggaccaaggaggagttcgtgcacatactccggcgacagagcacgggattcgcgagggggagctccaagttccgcggcgtcacgctgcacaagtgcggccgctgggaggcacgcatgggccaacttcttggcaagaagtacatataccttgggctctttgacaccgaagttgaagctgcaagagcatatgacagggcagctattcgcttcaatgggagggaagctgttaccaacttcgagcctgcatcctacaatgtggatgctttaccagacgccggaaatgaggcaattgttgatggcgatcttgatttggatttgcggatttcgcaacctaatgcgcgtgactccaaaagcgatgtcgccacaactggcctccagttaacttgtgattcccctgaatcttcaaatattacagtccaccagccaatgggctcgtctccccaatggactgtgcatcaccaaagcacaccactgccccctcagcatcaacgtttgtacccatctcattgtcttggcttcctcccgaacctacaggtattattatcaacaccccttgcttaccaattctaa

SEQ ID NO: 11126 - DNA, 2079 bp, Oryza sativa
  Clone ID: TFbOSC400032j.C1.o34.fg
atggccaccatgaacaactggctggccttctccctctccccgcaggatcagctcccgccgtctcagaccaactccactctcatctccgccgccgccaccaccaccaccgccggcgactcctccaccggcgacgtctgcttcaacatcccccaagattggagcatgaggggatcggagctctcggcgctcgtcgccgagccgaagctggaggacttcctcggcggcatctccttctcggagcagcagcatcatcacggcggcaagggcggcgtgatcccgagcagcgccgccgcttgctacgcgagctccggcagcagcgtcggctacctgtaccctcctccaagctcatcctcgctccagttcgccgactccgtcatggtggccacctcctcgcccgtcgtcgcccacgacggcgtcagcggcggcggcatggtgagcgccgccgccgccgcggcggccagtggcaacggcggcattggcctgtccatgatcaagaactggctccggagccagccggcgccgcagccggcgcaggcgctgtctctgtccatgaacatggcggggacgacgacggcgcagggcggcggcgccatggcgctcctcgccggcgcaggggagcgaggccggacgacgcccgcgtcagagagcctgtccacgtcggcgcacggagcgacgacggcgacgatggctggtggtcgcaaggagattaacgaggaaggcagcggcagcgccggcgccgtggttgccgtcggctcggagtcaggcggcagcggcgccgtggtggaggccggcgcggcggcggcggcggcgaggaagtccgtcgacacgttcggccagagaacatcgatctaccgcggcgtgacaaggcatagatggacagggaggtatgaggctcatctttgggacaacagctgcagaagagagggccaaactcgcaagggtcgtcaaggtggttatgacaaagaggaaaaagctgctagagcttatgatttggctgctctcaaatactggggcccgacgacgacgacaaattttccggtaaataactatgaaaaggagctggaggagatgaagcacatgacaaggcaggagttcgtagcctctttgagaaggaagagcagtggtttctccagaggtgcatccatttaccgtggagtaactaggcatcaccagcatgggagatggcaagcaaggataggaagagttgcagggaacaaggacctctacttgggcaccttcagcacgcaggaggaggcggcggaggcgtacgacatcgcggcgatcaagttccgggggctcaacgccgtcaccaacttcgacatgagccgctacgacgtcaagagcatcctcgacagcgctgccctccccgtcggcaccgccgccaagcgcctcaaggacgccgaggccgccgccgcctacgacgtcggccgcatcgcctcgcacctcggcggcgacggcgcctacgccgcgcattacggccaccaccaccactcggccgccgccgcctggccgaccatcgcgttccaggcggcggcggcgccgccgccgcacgccgccgggctttaccacccgtacgcgcagccgctgcgtgggtggtgcaagcaggagcaggaccacgccgtgatcgcggcggcgcacagcctgcaggatctccaccacctcaacctcggcgccgccgccgccgcgcatgacttcttctcgcaggcgatgcagcagcagcacggcctcggcagcatcgacaacgcgtcgctcgagcacagcaccggctccaactccgtcgtctacaacggcgacaatggcggcggaggcggcggctacatcatggcgccgatgagcgccgtgtcggccacggccaccgcggtggcgagcagccacgatcacggcggcgacggcgggaagcaggtgcagatggggtacgacagctacctcgtcggcgcagacgcctacggcggcggcggcgccgggaggatgccatcctgggcgatgacgccggcgtcggcgccggccgccacgagcagcagcgacatgaccggagtctgccatggcgcacagctcttcagcgtctggaacgacacataa

SEQ ID NO: 11127 - DNA, 357 bp, Oryza sativa
  Clone ID: TFbOSC18348j.C1.o1.fg
atggagaatttgagttgtttgatcagctcgccattgccaatgccaatgccggagtacgagctggcggcgtgcagtccggcgtcgccgtcgtcgtcggcctcgtcgacgtcgacgccaccgtcgcctgggggagaggcggcggcgaggtgcggcgagaagcgcgggaggggcggcggtgggggtaggcacccgacgtaccgcggcgtgcggatgcgggcgtgggggaagtgggtgtcggagatcagggagcctctcaagaagtcgcgcatttggctcggcacgttccctacgcccgagatggtagcgcacgcgcatgaactcttcgctctagttgtcaatatgattatatcactatga

SEQ ID NO: 11128 - DNA, 735 bp, Oryza sativa
  Clone ID: TFbOSC401762j.C1.o9.fg
atggcgttgtcggagccggacctcgcggcggagacggaggcgatcgtgtcggcgctcacgcacgtcgtcgcgtacggcggcggcggcccgccgccgagcgaggagaccgccgcgtccgcggtgacaaggacagcgccgtggcgcgcggacggcgcgcggcagggggcggtgccggcggcgaggaagtacaggggggtgaggcggcggccgtgggggaagtgggcggcggagatcagggacccgcacagggcggcgcgggtgtggctcgggacgttcgccaccgccgaggacgcggcgcgcgcctacgacgccgcggcgctccgcttccgcggggggcgcgccaggctcaacttccccgaggacgccgccgcggccgacgagcgacgcgccacggacgccgcggccgccgcggcggcggcgtcgtcggcgcccgccgcgctgctggagtcgcagccgggcgacgtcgcggactgcctcgactactccaggatcctggcgggggcgccggagcggccgacgagctccaccgtcccggacgggttcttcggcggcggcgggaacggccgcttcttgcactcgtggagcattggcacgtcgccgtcgccgtcgggctcgggctcgggcggagccggcggtggcggtggcggtggcggtggcggcgcccctgttcgtcctctgtttcatggcggtaacggctgggagcaacgcggtgacagtgcatacaacggtttctag

SEQ ID NO: 11129 - DNA, 744 bp, Oryza sativa
  Clone ID: TFbOSC401286j.C1.o8.fg
atgccggagctggaggtgtgtagccctgcgtcgtcgggtggggcgtcgccgccggagtcgccggtggaggggaggaggggaggaggaggaggggagaagagggggagatcaggggatggcgggaggcacccgtcgtaccgcggcgtgcggatgcgggcgtgggggaagtgggtgtcggagatcagggagccccggaagaagtcgcgcatctggctcggcacgttcccgacgccggagatggccgcgcgcgcccacgacgccgccgcactcgtcgtcaagggccccgccgccgtcctcaacttcccggacatggccgcctcgctcccgcgcccggcctccgcctccccgcgcgacgtccaggccgccgccgcccgcgccgccgccatggagcccccccagccgccgccgtcgtcgctcaccgtgcaggccgactccgccgccgccgcattcctgacgcccaagaacggcggtgtcagcggcgccggcgcggcggacgacgagctcgaggcgatcgtcgagctgccgcggctcgacgagctggacgccgccgagctcgtgttcggcgccgcgttccaggacacggcggcggaacacccgtggtgcgaccccgtctggatcgacggcggctacgcggcggccgccgcggcggcggcggcggccgcggcgcacgacgacctgttcggcctcgacgccgaccaccatggatgggcccagtcggttggtgccctcttatggaacctgtga

SEQ ID NO: 11130 - DNA, 411 bp, Oryza sativa
  Clone ID: TFbOSC419098j.C1.o8.fg
atggacggcgacggcggcggcggatgggacgatcagggcaacggcggcggcgagacgaccaagtaccgtggcgtgcgtcgccggccttctggcaagttcgcggcggagatccgtgactccagcaggcagagcgtccgcgtctggctgggaaccttcgacaccgccgaggaggctgcgcgggcttacgaccgcgccgcctacgccatgcgcggccacctcgccgtcctcaacttccctgctgaggcgcgcaactacgtgcggggatcaggctcgtcgtcctcgtcccgacagcatcagcagcggcaggtgatcgagctggagtgcctagacgaccaagtgctgcaagagatgctcaagggtggcgacgatcagtacaggtcagcagctgggagcaagaggaataactactag

SEQ ID NO: 11131 - DNA, 651 bp, Oryza sativa
  Clone ID: TFbOSC401153j.C1.o10.fg
atgtgtggcggcgcgatcatttccgacttcatcccgcagcgggaagcccaccgcgcggccaccggcagcaagcgtgccctctgcgcctccgacttctggccgtcggcgtcgcaggaagccgccgacttcgaccacctcaccgccccctgcaccttcacccccgaccaagcggcagaggagccgaccaagaagcgggagcggaagacgctgtaccgtggcatcaggcggcggccgtgggggaagtgggcggcggagatccgcgacccggcgaagggcgcgcgcgtctggctcggcaccttcgccaccgccgaggcggcggcccgcgcctacgaccgcgccgcccgccgcatccgcggggccaaggccaaggtcaacttccccaacgaggacccgccactcgacgacccggccgccgacggccacagccacggcggcgccgccatcccgtgcagggagttcatggactacgacgccgtcatggcgggcttcttccaccagccctacgtcgtcgccgacggcgtgccggccgtgccggcggaggaggcgcccacggtggcgtacgtgcaccaccacctgccgccgcagccgcagcaggacgcggggctggagctctggagctttgataacatccacacggccgtgccgatgtga

SEQ ID NO: 11132 - DNA, 1920 bp, Oryza sativa
  Clone ID: TFbOSC401980j.C1.o10.fg
atgacgaacagcaacaatggcaatggcggcacgaacgcggcggcgagtggatggctgggcttctcgctgtcgcctcacatggcctcctccaccatggacgaacaccaccacgtgcaccaccaccaacagcaacagcagcagcagcagcagcagcagcatcaccagcagcagcaacatggtttgttcttcccttcggtgaccaccgccgccgccgccgccgcgtatgggctcgccggcgacgtcgtggccgccaccaatgggtactactcccagctcgcctccatgccgctcaagtccgacggctcgctctgcatcatggaggctctccggagaaccgatcaagatcatcacgggcccaagcttgaggacttcctcggcgcggcgcagccggcgatggcgctgagcctggacaacacctccagcttctactacggcggaggcggcgccgccgccgccgggcacggccaacacggctacctccaggcgtgcgacctgtacggcggcccggccgcgccgtcgctcgtgaccgccgccgacgaggaggcggccgcggccgcggccgccatggcgagctgggtggccgcgcgcggcgccgccaccgcgtacgccacgggcgccgccgacgcgaacgccgccgagaacgtcctcccctccgccaccgccgcgcagcacctgcaccacccgctcgccctgtccatgagctccggctccctctccagctgcatcaccgccggcgagtacggcatggcggccgtggcagccgccgacggtggccgcaagcgcggcggcgccggcggcggcgggcagaagcagccggtgcaccaccgcaagtccatcgacacgttcggtcagaggacgtcgcagtacagaggcgtcaccaggcataggtggactgggcgatatgaggcgcacctgtgggacaacagctgcaagaaggaaggccagaccaggaaagggaggcaaggtgggtatgacatggaggagaaagcggcgagagcgtatgacctggcggcgctcaagtattggggcccttccacacacatcaacttcccgctggaggactaccaggaggagctggaggagatgaagaacatgacaaggcaggagtatgtggctcacttaaggaggaaaagtagcggtttctcacggggagcttccatgtaccgtggtgtcacaaggcatcatcagcacggacggtggcaggcacgcatcggccgagtctccggcaacaaggacctctacctcggcactttcagcacgcaggaggaggcggcggaggcgtacgacgtggcggcgatcaagttccgggggctcaacgccgtcaccaacttcgacatcacccgctacgacgtcgacaagatcatggccagcaacaccctcctccccgccgacctcgcccgccgcaacgccgccaccaccacctccaaggacgaccactccgccgccggcgccggcgccattgtctcggtgcactccgccgccgacatcgccgtcgccgacaccctctggaaggccaccactgccccgaggcagcagcagcagcaccacgacgacgtcgtgctgtccggcgccgaccaggccgcattctccgtcctccacgacctcgtcgccgtcgacgccgcggcggcgcaccagcagcagcagcagcagcagcacatgtccatgtcggcggcgtcgtcgctggtgacgagcctgagcaactcgcgcgaggggagccccgaccgcggcggcggcctctccatgctcttcgccaagccgtcgcccgccgtggcggcgtcggcgcagcagcaggcgtcgaccaagctcatggcggcgccgctgccgctcggctcctgggtctcctcgccgccggcgtctgccaggccgcccgccgtctccatcgcccacatgcccctcttcgccgcctggaccgacgcctaa

SEQ ID NO: 11133 - DNA, 1140 bp, Oryza sativa
  Clone ID: TFbOSC401446j.C1.o16.fg
atggcgaagcctcgcaagaactccaccactaccaacaccagcagcagcggtgtcgccgccgccgccgccgcggcggcggtgaagccgaagcgcacgcggaagagcgtcccccgcgagtccccctcccagcgcagctccgtctaccgcggcgtcacccggcaccggtggacggggcggttcgaggcgcacctgtgggacaagaacagctggaacgagtcccagaacaagaagggcaagcaagtttacctcggggcgtatgacgacgaggaggcagcggcgagggcgtacgatctggcggcattgaagtactggggacccgacaccatcctcaacttcccgttgtctgcatatgaaggtgagttgaaagaaatggaggggcaatcaagggaagagtatattggatccctaaggaggaaaagcagtgggttctcaagaggagtatcgaagtaccgaggcgttgcaagacaccatcacaatgggagatgggaggcccggattggccgtgtttttggcaacaagtacctctatctcggtacttacgcgacgcaggaggaggcggcaatggcgtacgacatggcggccatcgagtatcggggcctgaacgccgtcaccaacttcgacctcagccggtacatcaagtggctccggcccggcgccgacggcgcgggcgctccccagaatcctcaccccatgctgggtgctctgtcggcgcaggatctcccggcgatcgacctcgacgccatggcgtcgtcgttccagcacgacggccatggcgccgcggcggcggcggcacagctgatcccggcaagacattcgctcggccacacgccgacaacgtcggcgctcagcctgctgctgcagtcgcccaagttcaaggagatgatcgagcggacgtcggcggcggagaccaccaccaccagcagcacaaccacctcctcctcgtccccgtcgccgccgcaggcgaccaaggacgacggcgcctcgccgcagtgcagcttcccggaggacatccagacctacttcggctgcgccgccgaggacggcgccgccggcgcgggatacgccgacgtggacggcctgttcttcggcgacctcgccgcgtacgcgtcgccggcgttccacttcgagctggacttgtga

SEQ ID NO: 11134 - DNA, 624 bp, Oryza sativa
  Clone ID: TFbOSC21386j.C1.o4.fg
atgtcgtcgtcgtcttcggcgacgacgacgaagtataggggagtgcggctgcgcaagtgggggaagtgggtgtcggagatccggctgcccaacagccgcgagaggatatggctgggatcctacgacacgcccgaggaggcggcgcgggcgttcgacgccgcgttcgtctgcctccgcggcggcggcgaggccgccgggaacgggatcaacttccccggctcgccccctgccgtggcgcgcaccagcgacccgcaggaggtgtacgcggccgcggtgtcgcatgccaacaaccggccgccgccgccgccgtcggcccgagcaacgtcgtctgcacttccatgggaggaagctccggtggtggcggctcaggaggcggcggcggacatggcgcccgacgtggtggtgctgccatcgtcgccggtgaatgtgctggcagcagctgggagcttcgaatattggtcgcaacaaccactctactcgccgacggcagcaagcctcgatttgcagaggtggatgacggcggcggcggcggccgaggaatcaataatggaggatgacgacgacgaaggaacaagtgatggtctttggagtttccactactcaccgactcgttccaagtggtaa

SEQ ID NO: 11135 - DNA, 531 bp, Oryza sativa
  Clone ID: TFbOSC416986j.C1.o7.np
ggggaggggtggcgccggcggagagaggtggttcgcgtggctacggcgctacggaggtggagaggggaaatggagcggagtgaggcgcggagtgtggcggacggcggaggcagcaagtcacgcaagtgctgcccgctgcggcggtcgcggaaggggtgcatgaaggggaagggcgggccggagaaccagcgttgccccttccgcggcgtccggcagcgcacctggggcaagtgggtggccgagatccgcgagcccaaccgcggcgcccgcctctggctcggcaccttcaacaccgccctcgacgccgcccgcgcctacgactccgccgccagggccctctacggcgactgcgcccgcctcaacctactcctcgccggaatatgttgttgacaattaatacacacattcatgtatatgcatgtggtgtatgtgcgcatcgcatctgtaatactcctacgtgtcatgtgatatactctttccatctctaaatatttaacgccgttaatttctttaatatatttaaccgttcat

SEQ ID NO: 11136 - DNA, 1215 bp, Oryza sativa
  Clone ID: TFbOSC900118j.C1.o39.gp
ttactgcaataattttctactatattttattctaatcgaagaacatgtctatatctcacatcaaaggtcttatttagatgcaacatactaattccacaacaccttatcgaagcctaccatactgcatcacatatatcagcaaccataccgtatatacacatcataaccttaccaaatcaggtcacatgcagagtcatcttcacatcataagttcaatactaaccaaaattacacaataccaagtttccaatgatgctatgcataacaataaagctgctaacgatagtaattacggataattggaccctcaggccccgccaacttcttccacacaggcggacacagcatggaaggcacggacacgggttccacagcccgatcgcttcttacgcttgcctgaaatcatcgtccacattggctccggagcaagcacctggacctcacagctactggcctcctccttgacccgaccgccacagctctcaccttcctccttcacccgtggaagaagggtcggcttagctgtcccaattggcaaggtgattggcctcacagctgcttcaggcggtgaaatagttggcttgggtagctccggcggcagcgagtagcagcggacggaggcgaagttggtggcggcgctggaaccgcggaggcggacgctggcggcgtcgtatgcggcggcggcctcctcggcggtgtcgaaggtgccgagccacaggcggcggcggaggtgagggtcgcggatctccgccgcgaacctcccccacggccgctgccgcacgccgcggaaccgcgcggtcggcctcgcctcccccgcccccgcctccatcacgcggcgcttcacgcccccaccaccaccaccaccaccacccaccttacccctccgccgcggccgaggctgcgccaccgcaaccgcctcgtcctcgctggaggacgagtcggtggcgtcggcgtcgcgcacgaggatacgcaccacgcgtccccgcggcgccgcccccgccgccagctcgtgcaggctagggtttgtacccatgcctcgggaaacccacctcaatccatacagggtgttcgatcgatgtggctacgcgtagcctccgcgccccgccatgggagcgtggggggtggaaggcgaggtgggggggctagggtttagggttagggtttggttccgatcgatgcggcggcgtgcggcggggtggggttgcaatggaagcg

SEQ ID NO: 11137 - DNA, 699 bp, Oryza sativa
  Clone ID: TFbOSC900129j.C1.o30.fg
atgcgccgccgcgtctcctcctcctcctcctcctcctcgtcctcgtcgccggcgaggcatcacaaggcgcggcgcagcaggaggaagctcgccgtcgacgaggactgggaggccgccttccgcgagttcctctcccgcgaccacgacgacgacgacgacgaccacgacggtcagcatgtcgttgttgcgccgttgatccgtggtagtgacaagtgcgtccacggccacgaggtggtggcgtcgacggtcggcggtggcgcaagcggcggacgacgacgagccgacgacgacgacggcgagcggcggcggcggcggcggagggagaagcggagctacccgtaccgcggcatccggcagcggccgtgggggaggtgggcgtcggagatccgcgaccccgtcaagggcatccgcgtctggctcggcaccttcgacaccgccgagggcgccgcgcgcgcctacgacgacgaggttcgccgcatctacggcggcaacgccaagaccaacttccccccatcgccgcccacgccgccgccgccggagaagccagcggcggagaggagcccctcgacgacgccgacgacgaccacggaggactccggcgactcgcgcatactcatcgagtgctgctccgacgacctgatggacagcctcctcgccgccttcgacatgaccaccggcgacatgcgcttctggagctaa

SEQ ID NO: 11138 - DNA, 2217 bp, Oryza sativa
  Clone ID: TFbOSC31530j.C1.o6.fg
atgaagaacggggcgaggaaagacgcgggcggcggcggcggcggagtgttcgtcccgtgcgtcgacatcaagtcgttcgtgctctcgctcgccttcctcacggtgttcgtcgcattgtggcagctccagccgtacggctcgttgctcaccgcggcgcgctccaccgcctctgtctcggcctcgccatgttccctcatcgccacgcccgccgccgccgccgcgagcgcaggcgtcatccggtcggagaactccaccgccgacacggccaagaccgcgccggccgccgttgctagcgcagtccccgcgcggttggctagggcggcgaggccggcgcgggtggaggaccccaacaagcgtgagctccggccgtacggcagcgcggcggcgctgttcgttcagatgggcgcgtaccgcggcgggccgcggacgttcgccatcgtgggattagcgtccaagcccacccatgtgttcagcaacccctacttcaaatgcgagtggctgcccaaccccaccgccggcaacccgtcgccgcgccccgtccgcaccaaggcgtacaagatgctcccggactgggggtacggccgcgtctacaccgtcgtcgtcgtcaactgcaccttcccatccaaccccaacgccgacaacgccggcggcaagctgctcgtccacgcctactactccaccacctcccgccgctacgagcgcttcgtggcgctcgaggaggccccgggctcgtacgacgagtcccgcttcagcccgccgttcccgtacgactacctctactgcggctcgtcgctgtacggcaacctcagcgccagccgcatgcgggagtgggtggcctaccacgcgcacttcttcgggccgaggtcgcacttcgtcttccacgacgccggcggcatcagcccggaggtgaaggcggtgctggatccgtgggtccgcgccggccggctcacggtgcaggacatccgggcgcaggcggagtacgacggctactactacaaccagttcttggtggtgaacgactgcctgcaccggtacaggcacgccgccaattggaccttcttcttcgacgtcgatgagtacatttacctgcccaatgggcagacgctcgaccaggtgctcggcaagctctcgggatactcgcagttcaccatcgagcagaatcccatgtccagcaagctctgcgtgcaggatccaagcaaggattactcaagggaatggggttttgagaagcttgtcttccgcaattcaattaccaaagttaggcgagatcgcaaatatgcgatccaggcccgaaacgcatactctgccggcgtacacatgtcacagaatgtctacgggaggacaacccataagacagaaagcctgatcagatactaccactatcacaattcgatcaatgtcatgggagagccttgtcgggaatttgtgccggtgccggtcaatggtagtaagttgatgttcgaggggatcccttacgtatacgatgataacatgaagcgtttggctgggcagatcaagcgggaggagctcggcggccttgaagaggaggagggcgagccagtcgtcggcgaggcggcgctgggcggaggtgccgggggcggcagagtcgagggcggagtcgatgtgggagaagagggtgtgggagatggcgatgtggatgaggaagaggagggagagcgggaggacgaaggtggcggcgatgcgggcgaagagagggcggtcggcgacgatgatgatgagcttcgtcggcgacggctggagggagagaggggagcgggaggagggcgaccggcgctgacctcgccggcgagccgccgccgtcgctgcccgaggccagatccggcaagcccaggccggatctggccacctcgccgccactccgacgacgacgaccctgcggtgttctaccttcgcggccggtcggcgcggctcaacttccccgaggagatctccttgctggcttcgccgtcagagggtggcggcgcaggcgagccccgcgagcccgacggcggcacgctgtccgcggcctcgatccggaagaaggccatcgaggtcggctcccatgtcgacgcgctccagaccggcatgatggtcgcgccgacccaccaccgcgagcagcagaagcaccaccaccacccgcacctgcaaccgcacggcgaggagcaacaccaccacgaggattggattagttctaagtatgaagacattcatacttaa

SEQ ID NO: 11139 - DNA, 549 bp, Oryza sativa
  Clone ID: TFbOSC989j.C1.o1.fg
atggccaagcgacgcagcaacggcgagaccgccgccgcgagcagcgacgactgtagcgccggcgtctgcggcggcggcggcggcggtgaggttgagccgaggcggcggcagaagcggccgcggaggagcgccccgcgggattgcccctcccagcgcagctccgcgttccgcggcgtcacacggtgcgcaccggtggacgggcggttcgaggcgcatctctgggacaagaacacctggaacgagtcgcagagcaagaagggcagacaaggggcttacgacggcgaggaagcggcggcgcgcgcctacgacctcgccgcattgaagtactggggccacgacaccgtcctcaacttccctctgtcaacatatgacgaggaattgaaggaaatggaggggcagtccagggaagagtacatcggatcgctccgaggaagagcagtggcttctcaagaggggtgtccaagtacagaggagttgcaaggcatcatcacaacggcaaatgggaggctcggattgggcgtgtgttcggcaacaaatacctctacctag

SEQ ID NO: 11140 - DNA, 651 bp, Oryza sativa
  Clone ID: TFbOSC900306j.C1.o12.fg
atggccaccgtgcaacccgccgcctcggaccccgcgcctcctcctcctccggagacggaggagcagccggccgcggcggggggcgaggagatcgcggcgctcgacgagcagctggccgtcgcggacggcggcggggatgatgggaaagcggctgcggcggcggagggaggaggaggaggaggaggagggaagctggtggcggagaccatgcgcaagtacgccgcgccgcggtcgtcgcggtaccacggcgtcacgaggttgaagtggagcggcaagttcgaggcgcacctctgggacaacagcagccaggtcgagggccgcaagcgcaaggggaagcatggaagctatgttactgaagagaatgctgcaagggcacatgaccttgcagcccttaaatattggggtgcagggccaaacaccaaacttaacttcaatgtttctgattatgagaaagaaatcgagaggatgaagaccatgtcccaagatgaatttgtggtgtacataagaaggcagagcagctgtttctcaagaggaacttcatcatataggggtgtaacaaggcgaaaggatggtagatggcaagcacggattggtaggattggagaaagtagagacaccaaagacatctatcttggtacctttggtgagtga

SEQ ID NO: 11141 - DNA, 1095 bp, Oryza sativa
  Clone ID: TFbOSC401190j.C1.o4.fg
atgtgcggcggtgcaatcctcgccgatttcaccccggcgagggtgccccggcggctgaccgccgccgagctcctgccggtgaccccgactccccccgccgccgagaggagaaccacccggaagcgcaagtccgacgtcgacttcgaggcggagttcgagcttttcgaggacgacgacgacgacgatgagttcgagctttccgacgatggcgacgagagtttggccgtgtcatgtgtgtcgtcccccaagtcgaaggcagtaccttcgttttcttgtacgatgagatggagaaatcttgcctgctttcttgaaggattttcacctgacggcaacctgaactttacacgatttcttctcctgctgttgatttcatcgatcgccggcggcagtttcgtcggatgtctcctcgagctccaggccgcggcggcgcgtggcggcggcggcggccggtcgtcggaaggcgagcaagaagagcaagtacaggggcgtcggcgccggccgtcggggaggttcgcggcggagatcagggaccccaagaaggggcggcgcgtgtggctcggcacgtacggcagcgccgaggaggccgccatggcctacgaccgcgaggcccgccgcatccgcggcaagggcgcgaggctcaacttcccccgcgacggcgatggctcccctcgccggagtaacgaccggccctgctggaccatcgacctcaacctccccgcggcggccgtctccggtgacgacgacgacgccatggccgtcgacgccgcagacgcagacgcaggcagtgctggccgtgcagcagcctatgcagatcaagaagcactgagcgcggcaaagtgcaagatcaagcagtgtcctcgcgacgaacagatggcgagcgccacacctgagctcatggaggaggacgcgagcagcagcagaaacatggtgcccctgtccatggcgctgcagctgcagtatgcggcgatgatcgccgaatgcgaccgcgagatggaggagatcgccgccgtggagagggacctcgagaggcgcaggaggcaggtgttcgagcgcagaggccacctggtcaggcaggcctctcttctgctcgactga

SEQ ID NO: 11142 - DNA, 528 bp, Oryza sativa
  Clone ID: TFbOSC30077j.C1.o2.fg
atggcggacgcggcggagcagcatcaccggcaggaagagactgcggcggcgacgacgacgccgcagcagatgatgatgcggcggcggcgggcgcgcgcgtcgagcgagtacctgggcgtgcggcggcggccgtgggggcggtacgcggcggagatccgcaacccgtacaccaaggagcgccactggctcggcaccttcgacaccgccgaggaggccgccgtcgcctacgacctctccgccatctccatctccggcgccgccgccgcgcgcaccaacttcctctaccccgacatgcaccaccaccacccttcgccgccgcagcacgcgctgtctccggcagtgccaccgccgccaccgccgccgccgccgtcgccgctgtacgatgatgattacctgtcgccggcggcggcggaggaggaagtggaggccggcgacgacgagtcgctgacgatcgcgaccatcctgcagagcttccagtatcagcagagcgtcccaccggcgtcatcgggttccatgttttattattag

SEQ ID NO: 11143 - DNA, 879 bp, Oryza sativa
  Clone ID: TFbOSC405965j.C1.o10.fg
atgatgaacttctcctcgtacttctactcgtcgtcggcggcggcggcgggtggtggtggtggtggtggggagaagaagtcgtcgtcgtcgtcggcgtcgaagaagaagcagcagcaggcggcggcggcggagggagggaataaccagacgaggtaccttggggtgaggaggaggccgtgggggaggtacgcggcggagatcagggacccggcgacgaaggagaggcactggctggggacgttcgacacggcggaggaggccgccgtcgcctacgaccgcgccgcgaggtcgctccgcggcgcccgcgcgcgcaccaacttcgcctacccggacctccccccgggctcctccgtcaccccctacctctcccccgacctctccgccgacgcctccgatcagctgctccagccgttctacgccaatccctccgccgccgccgcgctgcccactccggcggcggtgatggccggaggaggaggagtcgaattcggcggcgagtacatgtacggcggcggcgtcgacatgtcgtcgctgatggacgacattgcggccatgcccgacgacctcccgcccagcgtgacgggcggcggcggcggcttcgccagcagcgacgaatactccagcggcggcggcgggatggtcgacgacgtctccatgtactgcggcggcaatggcggagggtcgtcgtggtgcgacgcctccgacttcgcctcgtactcgtcctcctcgccggcggcggcggcggcggcaggctcgcacgggatgtacttcgaggaggggtacgtgcacagcccgctcttctcgccgatgccggccgtcgacgacgccggcgccgacgggttccagctcggcggctcgtcgtcgtcctactactactga

SEQ ID NO: 11144 - DNA, 132 bp, Oryza sativa
  Clone ID: TFbOSC417134j.C1.o8.gm
atgcggaagtcgaagcagccgcagccgcagccgtcgccggagatccggtaccggggcgtgcggaagcggccgtcggggaggtacgccgccgagataccgggacccggcgaagaagaccccgattctggctgg

SEQ ID NO: 11145 - DNA, 1185 bp, Oryza sativa
  Clone ID: TFbOSC900225j.C1.o16.fg
atggacagcacgagctgtctcttggacgacgcgagcagcggcgcgtccacgggcaagaaggcggcggcggcggcggcgtcgaaggcgctgcagcgcgtgggcagcggcgccagcgcggtgatggacgcggccgagcctggcgccgaggcggactcgggcggcgagcggcgcggcggcggcggcgggaagctgccgtcgtccaagtacaagggcgtggtgccgcaaccgaacgggcggtggggcgcgcagatatacgagcggcaccagcgggtgtggctcggcacgttcaccggcgaggcggaggcggcgcgcgcctacgacgtggcggcgcagcggttccgcggccgcgacgccgtcaccaacttccgcccgctcgccgagtccgacccggaggccgccgtcgagctccgcttcctcgcgtcccgctccaaggccgaggtcgtcgacatgctccgcaagcacacctacctcgaggagctcacgcagaacaagcgcgccttcgccgccatctccccgccgccccccaagcaccccgcctcctctccgacgtcctcctccgccgcgcgcgagcacctgttcgacaagacggtgacgcccagcgacgtcgggaagctgaaccggctggtgatccccaagcagcacgccgagaagcacttcccgctccagctccctccccctaccacaacctcctccgtcgccgccgccgccgacgccgccgccggcggcggcgattgcaagggcgtcctcctcaacttcgaggacgccgccgggaaggtgtggaaattccggtactcctactggaacagcagccagagctacgtgctcaccaaggggtggagccgcttcgtcaaggagaaggggctccacgccggcgacgccgtcggcttctaccgcgccgccggtaagaacgcgcagctcttcatcgactgcaaggtccgggcaaaacccaccaccgccgccgccgccgccgccttcctcagcgcggtggccgccgccgccgcgccgccacccgccgtgaaggctatcaggctgttcggtgtcgacctgctcacggcggcggcgccggagctgcaggacgccggcggcgccgccatgaccaagagcaagagagccatggacgccatggctgagtcacaagcacacgtggtttttaagaagcaatgcatagagcttgcgctaacctag

SEQ ID NO: 11146 - DNA, 990 bp, Oryza sativa
  Clone ID: TFbOSC101030j.C1.o16.fg
atgtgcggcggagcgatccttgcggagctcataccgagcgcgccggcggcgaggcgcgtcacggcgggccacgtctggccgggcgacgccaacaaggccaagaagaagggcgcgcgcgccgacgacttcgaggccgcgttccgcgacttcgacaacgactccgatgacgaggagatgatggtggaggaggcggaggaggaggaggcgacctccgagcacaagccgttcgtcttccgcgccaagaaggcggcggcggcggcgtcgagcaggcgcaggaagccggcgcagtacaggggcgtgcggcgccggccgtgggggaagtgggcggcggagatccgcgaccccgtcaagggcatccgcgtctggctcggcaccttcaccaacgccgaggccgccgcgctcgcctacgacgacgccgcgcgcgccatccgcggggacagggccaagctcaacttcccttccgctaccacccctgacacccgcaagcgcggccgcgccaccgccgccgccgccccggccgtcaaggcgaccccggtcatcaacctcgtcgaggaggaggacgaggaggaggtcgccgccgccatggcgtccatcaagtacgagcccgagaccagcgagagctccgagtcgaacgccctcccggacttctcctggcagggcatgtcggcctccgacgagttcgccgtcgccgcggcggcgctgtcgctcgacagcgacgacgacctcgccaagaagcgtccgaggaccgagccggaggacaccaccgactccggctccggcgacgacaccgacgcgctgttcgacgcgctgctgttcgccgaccagtacaaccacttcaacggcggcgcctacgagtccctggacagcctgttcagcgccgacgccgtgcagaccaccgccgccgccgccgccgccgaccagggcatggggctctggagcttcgacgacggctgctgcctcgtcgacgtcgaggccagcttgtccttctag

SEQ ID NO: 11147 - DNA, 1216 bp, Oryza sativa
  Clone ID: TFbOSC101030j.C1.o28.gp
tttttgcatcaaaggcacagccaaaaagatcttttacgagaacgagaagcctcacataatttttcattaccgaaaggaaccaggacgaacacatgcttgcttggcaaaaccactcttctatgtacatgacatggtacaagatcgagtcacagggtcgccggagacgacggctagagcctagaaggacaagctggcctcgacgtcgacgaggcagcagccgtcgtcgaagctccagagccccatgccctggtcggcggcggcggcggcggcggtggtctgcacggcgtcggcgctgaacaggctgtccagggactcgtaggcgccgccgttgaagtggttgtactggtcggcgaacagcagcgcgtcgaacagcgcgtcggtgtcgtcgccggagccggagtcggtggtgtcctccggctcggtcctcggacgcttcttggcgaggtcgtcgtcgctgtcgagcgacagcgccgccgcggcgacggcgaactcgtcggaggccgacatgccctgccaggagaagtccgggagggcgttcgactcggagctctcgctggtctcgggctcgtacttgatggacgccatggcggcggcgacctcctcctcgtcctcctcctcgacgaggttgatgaccggggtcgccttgacggccggggcggcggcggcggtggcgcggccgcgcttgcgggtgtcaggggtggtagcggaagggaagttgagcttggccctgtccccgcggatggcgcgcgcggcgtcgtcgtaggcgagcgcggcggcctcggcgttggtgaaggtgccgagccagacgcggatgcccttgacggggtcgcggatctccgccgcccacttcccccacggccggcgccgcacgcccctgtactgcgccggcttcctgcgcctgctcgacgccgccgccgccgccttcttggcgcggaagacgaacggcttgtgctcggaggtcgcctcctcctcctccgcctcctccaccatcatctcctcgtcatcggagtcgttgtcgaagtcgcggaacgcggcctcgaagtcgtcggcgcgcgcgcccttcttcttggccttgttggcgtcgcccggccagacgtggcccgccgtgacgcgcctcgccgccggcgcgctcggtatgagctccgcaaggatcgctccgccgcacatctttggttgctgcttttcttttgcttttgggtgttgggttgtgaacttg

SEQ ID NO: 11148 - DNA, 2124 bp, Oryza sativa
  Clone ID: TFbOSC17489j.C1.o1.fg
gttacaacatcaagcatgatagagcacatgaaaaaccttctcaaaataccaggatcaaaggtcctgtttggtggtgaacctctggagaaccattctatcccagaaatatatggtgccttcaaaccaactgctgtatttgttcctctatcggaaatccttaaaagtggcaattttgagcttgtgacaagggagatctttggtcctttccaggtggttacagagtattctgatgatgagcttgaattagtattagaagcctgtgaaaggatgaacgctcatctgacggctgcagttgtttcaaacgaccctttattcctgcaggaagtacttgggcgatcagttaacgggacaacatatgccggcatccgagcaaggacaactggtgctccacagaaccactggtttgggcctgctggtgatccaagaggtgcagggatcggaactccagaagccattaaactcgtttgcgatccaaacttcaatggctctaattggatcggcattcctgtccatgacacgaactctggtgagcccagacataatgagaactctgtccatggcgcgctcagactgcagatgagacccctgtatgacaccgcaaaatatgctgacaataaacaggtgacaaactctgtcgccagccaatgcaaccagtacataaacacacctgcagtcattcagatagctacatgctacattggaggccaagaaccaagttacatcatgatggtgaagaatgagattgaaaactactcaggatcatctccagcaatgatcatcaatgcgctggaaggcggcgccgaggcgggcccggttgtcaggaggagaaggagggagccgtctttgctcgcaccgatcaatggtgatggtgacaccaatggtggtggcattggcaagtcgtccttgtcaggcatcactgtcaagaggagctctaggtttcgtggagttagcagattcagagcttgtagagatgacaagaagatgttgtcatgtaggcatcggtggacaggtcgtttcgaagcacatttgtgggacaagaactcgtggaatcctacacagaggaagaagggcaagcaggtctatcttggagcatatgatgaggaggaggcagcagcaagggcttatgaccttgctgctctcaagtactggggaccaactacctatacaaattttccggtaatggactatgaaaaggagttgaagataatggagaatcttactaaggaagagtatcttgcatctctaaggaggaagagcagtggcttctcaagaggtgtgtccaagtacagaggggttgcgaggcatcatcaaaatggaagatgggaagcaagaattgggcgtgttttcggaaacaagtacctctacctaggaacctacagtgagtacaagaacagtgcttatactctattctacattgtgaattggtattccaatgcatccaaaacttcacatcttaacatcggcccatctgccattcttcctaaatctttttctccaggcactcaagaagaggctgcccgtgcctacgacatcgccgcgatcgagtacaaaggcgtaaacgccgtcacgaacttcgacctcagatcatacatcacatggctgaagccaacccctgctcatgttgccatgaaccctgcagaagctcttgcaatgcagatccctgtagatcacttcctcccaatggaaacccagatgatgatgctccctcagagcaatcctttcacctcatatcacaatgcacaatcactgggtggtggtgacggtggcagtagcagtactaataatcaagaagcctccatgataatctctcccagtggctcatctagaaagagatcatcatccactgctcttagccttcttctgaaatcgtcgatgttcaggcagctggttgagaagaattcagatgcaggtgaagaaaatggaggtgagatgagagagccgggtgcccatccaggagaaggatatgaataccacaacttcttccagggagatgctgctccggacatggacatgtgtgatctgctttcatcaggaaatgtgcatgctgcaagtggtagtgctggatttgaagaggacatcgcatgttatagtggttttggaagcatgcagtcgctgcagcaatag

SEQ ID NO: 11149 - DNA, 2022 bp, Oryza sativa
  Clone ID: TFbOSC417300j.C1.o3.gp
ttttaacaacgacgctaaataataataatagtagtagtagaggtaattcacattacaagttcttataacacgctaataatattacaagacataataataataataatgctactactactgtttacaacctgtaagatcagcagtagaaggtaataacagactttagaagagcaatggacgccacggccggagtaaccgaccagtgaccggccaccggagacgcacgccggacacaaaaacgccggctgccggtagcatcggcgtctccggttgaggaagaacaccaaccaaccctagcatctacagaggaaacaagtccggagagagatcgatctacgtacacaaacgaaccaaaccaaaaggattagggactataaaactgctaatccatgcccgtccgtgcggtgcagaatgtctaaaatcccatctgcacggcggcggcggcggcgacgattaggctaacgacggcgtgagtactagccaagaagtggtggtggtgttaattggcggcgaggagggagtcccagtcgatctcgtaggacgggtacttggtgagggcgaaggcggcggcctcgtcccacggcgcctcgctgaagtcgagctgctgcatctccggcacggtcgccggcgtctcggccgtggtggcggcggaggacggcgacagggagggcgacgagtcggcggactccaggcaggacgacgcgtcgtcggaggacggcgacgagcagttgctggtgggcgcggaggatgttgcggcggcggaggcggagacagaggacttcttggcgttcttggcggcggcgatgttctggcagagcgtctggagcttggcgtcgacggaggcgtggagcgggccgcgggaggcggcgttgtcggggaagttgagccgcgccgcgtcgccgcggaggcggtacgccgcctggtcgtaggcaagcgccgcctcctcggctgtgtcgaaggtgccgagccagagccgcgtgcggttccgcgggaggcggatctccgccacccacttcccccagtgccgctgccgcacgccgcggtacagcttctgcggccgcggcggcgtcgccgccgcccccgccgccgaagccgacgacgacgacgccttcatcggctgcgcgcgcgggccgagcgggccggcctgcgccgcctgccgctggaggtggaggcgggcctggatgtagtgcatctgggccgggctgagctctggctgctgggccagcccgccaccgtacgcgaacgcgtgcgggaaggagaatggcgaggtgggactaaactgggaacaaaccggaggcgagccggaggcatctcggataaaaggctcgagtgctctcatcagctcctcccctgacagatctatagctgcagccatctactcactcttttttttgggatttttttttctgatactaaaacagtagtaacaaagatttgcctggttccgaatccaaaatcaagaacaggcaggaaggagggagaaatcgacagccacagtaaaaaaacagatggctttttggtggtagatctagcaagtgaggtgtggaaaaagaacccctcttggctaccaacctaacactagaacacaaagaagatgaaagaaaaacagcagatctgggagccctggatctaaaaggccctgggtctctcgctctctgcaagcaacctaaccaagaaaccgtagaagaacaggtgggggagccagaggaggaagaagaagaagagggtttcgagaaaactttaccttgaagacgctcgaagtcgctcagatctaaagcttttcttacctcgctcgagctcacggtggctgtgggtgttcgtgggcttggagatggtggcggcggcggtgggaggatggctgtggatctgggtgtgtgtgtgggcgaaagtgggaatggtgggcggggaggtgtgagggacgccattggagctcttttatagcaaagctctccagctccaaagaccattaccggttaatcccctcccttaattagtaatttccctcgtcttatcgccccggat

SEQ ID NO: 11150 - DNA, 876 bp, Oryza sativa
  Clone ID: TFbOSC417300j.C1.o4.fg
atggctgcagctatagatctgtcaggggaggagctgatgagagcactcgagccttttatccgagatgcctccggctcgcctccggtttgttcccagtttagtcccacctcgccattctccttcccgcacgcgttcgcgtacggtggcgggctggcccagcagccagagctcagcccggcccagatgcactacatccaggcccgcctccacctccagcggcaggcggcgcaggccggcccgctcggcccgcgcgcgcagccgatgaaggcgtcgtcgtcgtcggcttcggcggcgggggcggcggcgacgccgccgcggccgcagaagctgtaccgcggcgtgcggcagcggcactgggggaagtgggtggcggagatccgcctcccgcggaaccgcacgcggctctggctcggcaccttcgacacagccgaggaggcggcgcttgcctacgaccaggcggcgtaccgcctccgcggcgacgcggcgcggctcaacttccccgacaacgccgcctcccgcggcccgctccacgcctccgtcgacgccaagctccagacgctctgccagaacatcgccgccgccaagaacgccaagaagtcctctgtctccgcctccgccgccgcaacatcctccgcgcccaccagcaactgctcgtcgccgtcctccgacgacgcgtcgtcctgcctggagtccgccgactcgtcgccctccctgtcgccgtcctccgccgccaccacggccgagacgccggcgaccgtgccggagatgcagcagctcgacttcagcgaggcgccgtgggacgaggccgccgccttcgccctcaccaagtacccgtcctacgagatcgactgggactccctcctcgccgccaattaa

SEQ ID NO: 11151 - DNA, 1464 bp, Oryza sativa
  Clone ID: TFbOSC400651j.C1.o26.fg
atggcgaagagatcgtctcctgatcccgcatcatcttctccatctgcatcatcctcgccgtcgtctccttcctcctcttcctccgaggattcctcttcgcccatgtcgatgccctgcaagaggagggcgaggccgaggacggacaagagcaccggcaaggccaagaggcccaagaaggagagcaaggaggtggttgatccttcttccaatggcggtggcggcggcggcggcggcaagaggagttctatctacaggggagtcaccaggcatcggtggactggcagatttgaggcccatctgtgggacaagaattgctccacttcacttcagaacaagaagaaagggaggcaaggggcttatgatagtgaagaggcagctgctcgtgcatatgaccttgcagctcttaagtactggggtcctgagacagtgctcaatttcccactggaggaatatgagaaggagaggtcggagatggagggtgtgtcgagggaggagtacctggcctccctccgccgccggagcagcggtttctccaggggtgtctccaagtacagaggcgttgccaggcatcaccacaatgggcggtgggaggcacggatagggcgggtcctggggaacaagtacctctacctgggtactttcgatattttgtacaatctatcacaaaactacagatttaagaacttgttttacaaaaatacagattcagtggcttcgtttatcacaaaactacagatcaaagaccatgagaccaagataccatcctatactcaagaggaggcagccaaggcctatgatcttgctgcaattgaataccgaggtgccaatgcggtaaccaacttcgacatcagctgctacctggaccagccacagttactggcacagctgcaacaggaaccacagttactggcacaactgcaacaagagctacaggtggtgccagcattacatgaagagcctcaagatgatgaccgaagtgagaatgcagtccaagagctcagttccagtgaagcaaatacatcaagtgacaacaatgagccacttgcagccgatgacagcgctgaatgcatgaatgaaccccttccaattgttgatggcattgaagaaagcctctggagcccttgcttggattatgaattggatacaatgcctggggcttacttcagcaactcgatgaatttcagtgaatggttcaatgatgaggctttcgaaggcggcatggagtacctatttgaagggtgctccagtataactgaaggcggcaacagcatggataactcaggtgtgacagaatacaatttgtttgaggaatgcaatatgttggagaaggacatttcagattttttagacaaggacatttcagattttttagataaggacatttcaatttcagatagggagcgaatatctcctcaagcaaacaatatctcctgccctcaaaaaatgatcagtgtgtgcaactga

SEQ ID NO: 11152 - DNA, 660 bp, Oryza sativa
  Clone ID: TFbOSC401719j.C1.o17.fg
atggacaccgaggacacgtcgtcggcttcgtcctcgtcggtgtcgccgccgtcgtcgccgggcggcgggcaccaccaccggctgccgccgaagcggcgggcggggcggaagaaattccgggagacgcggcacccggtgtaccgcggcgtgcgcgcgcgggcgggggggagcaggtgggtgtgcgaggtgcgcgagccgcaggcgcaggcgcgcatctggctcggcacctacccgacgccggagatggcggcgcgcgcgcacgacgtcgcggccatcgccctccgcggcgagcgcggcgccgagctcaacttcccggactccccctccacgctcccgcgcgcgcgcacggcgtcgcccgaggacatccgcctcgccgccgcgcaggccgccgagctgtaccgccgcccgccgccgccgctggcattgccggaggatccgcaggaaggcacgagcggcggcggcgccaccgccacctcggggcgtccggctgccgtgttcgtggacgaggacgccatcttcgacatgccggggctgatcgacgacatggcgagggggatgatgctgacgccgccggcgattgggagatctctcgacgactgggccgccatcgacgacgacgatgaccattaccacatggactacaagctatggatggactga

SEQ ID NO: 11153 - DNA, 594 bp, Oryza sativa
  Clone ID: TFbOSC101807j.C1.o6.fg
atggagaagaagtacaagggtgtgcggcggcggaagtgggggaagtgggtgtcggagatccggctgcccaatagccgcgaccgcatctggctgggctcctacgactcgccggagaaggcggcgcgggcgttcgacgccgccttcgtcacgctccgcggccacggcgccgccggcgccgacctcaacttcccggactcgccgccgtcgtgcgacgcccgcagcagcgacccgcggcaggtgcaggccgccgcgctctcccacgccaaccgcgcccacgtcacgccgcagcaggcggccgcggcgctcatgtcgccgccctcgctgtcgccgccgccggggttcgccaccggcagcgaggtggtggcgcccgccgtgcgcgccgacggcagcatcgactggcgcccggtcatggcgcacccgccgccgctgtactcgccgcccggctggggcggcggccatgcctacgacttcttgcagccgccgccgccgtcgccgccgttgccgtcgtgcgacgacgacatggtcgacgtcgtagatgagagcagcgcttcgctttggagctttgacacgcgagactcctacttccgatactaa

SEQ ID NO: 11154 - DNA, 1869 bp, Oryza sativa
  Clone ID: TFbOSC404117j.C1.o14.fg
atggcttctgcagataactggctaggcttctcgctctccggccaaggcaacccacagcatcaccagaacggctcgccgtctgccgccggcgacgccgccatcgacatctccggctcaggcgacttctatggtctgccaacgccggacgcacaccacatcggcatggcgggcgaagacgcgccctatggcgtcatggatgctttcaacagaggcacccatgaaacccaagattgggcgatgaggggtttggactacggcggcggctcctccgacctctcgatgctcgtcggctcgagcggcggcgggaggaggacggtggccggcgacggcgtcggcgaggcgccgaagctggagaacttcctcgacggcaactcattctccgacgtgcacggccaagccgccggcgggtacctctactccggaagcgctgtcggcggcgccggtggttacagtaacggcggatgcggcggcggaaccatagagctgtccatgatcaagacgtggctccggagcaaccagtcgcagcagcagccatcgccgccgcagcacgctgatcagggcatgagcaccgacgccagcgcgagcagctacgcgtgctccgacgtgctggtggggagctgcggcggcggcggcgccgggggcacggcgagctcgcatgggcagggcctggcgctgtcgatgagcacggggtcggtggccgccgccggagggggcggcgccgtcgtcgcggccgagagctcgtcgtcggagaacaagcgggtggattcgccgggcggcgccgtggacggcgccgtcccgaggaaatccatcgacaccttcgggcaaaggacgtctatataccgaggcatagatggacaggaagatatgaagctcatctgtgggataatagctgtaggagagaaggccaaagtcgcaaggggagacaggatgagtaattatgaaaaggagctagaggaaatgaaacacatgaccaggcaggagtacattgcacatcttagaaggaatagcagtggattttctcgtggtgcatccaaatatcgtggtgttactaggcatcatcagcatgggagatggcaggcaaggatagggcgagttgcaggcaacaaggatatctacctaggcaccttcagcaccgaggaggaggccgccgaggcgtacgacatcgccgccatcaagttccgcgggctcaacgccgtcaccaacttcgacatgagccggtacgacgtcaagagcatcctggacagcagcacgctgccggtcggcggcgcggcgcggcggctcaaggaggcggaggtcgccgccgccgccgcgggcggcggcgtgatcgtctcccacctggccgacggcggtgtgggtgggtactactacgggtgcggcccgaccatcgcgttcggcggcggcggccagcagccggcgccgctcgccgtgcactacccgtcgtacggccaggccagcgggtggtgcaagccggagcaggacgcggtgatcgcggccgggcactgcgcgacggacctccagcacctgcacctcgggagcggcggcgccgccgccacccacaacttcttccagcagccggcgtcaagctcggccgtctacggcaacggcggcggcggcggcggcaacgcgttcatgatgccgatgggcgccgtggtggccgccgccgatcacggcgggcagagcagcgcctacggcggtggcgacgagagcgggaggctcgtcgtggggtacgacggcgtcgtcgacccgtacgcggccatgagaagcgcgtacgagctctcgcagggctcgtcgtcgtcgtcggtgagcgtcgcgaaggcggcgaacgggtacccggacaactggagctcgccgttcaacggcatgggatga

SEQ ID NO: 11155 - DNA, 1029 bp, Oryza sativa
  Clone ID: TFbOSC401545j.C1.o27.fg
atggtggaagttatcgtggagaagaaggcgcgaaggattgtgagggggaggtggcatgtggaggcgagcaacgaagcggcggcggcggcgccggctgttgccgcgcccgcgcccagggttgttcgggttctctgcagagaccacgacgccacggactcctccggcgacgacgatggcgaggacgacgcgccgcggcgtgctcgcctcctcgtgcacgagatccacgtcgcgcggcagccggtggccatgtcgccagcggcggcgagctccagccagagacgtcgtgtcggcccgatgaagaggacggaatcggcggtggatgcgacgatggacgcgacggcggcggcgccggagaggaagttccgcggggtgaggaagcggccgtgggggaagtacggggcggagatccgcgtgtcgcagcagagcgcgcgcgtgtggctcggcacgttcgacaccgccgaggaggccgcgcgggtgtacgaccacgccgccctccgcctgcgcgggccgtccgccacgaccaacttccccatgacgccagcggcgccgtcgcctcctccctcgcgcgccacctacgccggcgcggcgtccgggtacgacgagtccagcgacgagtcgcagctcgtcggctcgccggtctccgtgctccgcccaatgccggcgcgcgcaacggccaagaaagaggccaaggaagaagacgactccgcccccgatatcctcggcatctccgccggcgacggcttaatctccccgttcacctgcgacgtcctgaatttcccaccgcccgacgaggacatgttcggcggcggcatctccttcggcgagccgacaccgccacccatggtgttcgacgacgactgcatggcgcgcctcggccacgcccccaacgacgacgagcacccggtgacgagctcgtccttcctcgacggcgatctcggcgacctgccgtcgtggacggaggtggacggcttcttcagcgacgtcggcggcgacgacctgttcgccgccgagccgttcccggcgctctga

SEQ ID NO: 11156 - DNA, 808 bp, Oryza sativa
  Clone ID: TFbOSC401249j.C1.o62.gp
tttgattttgaaactcaagagggccattccttgtcaattatcgcgtaaagaatagtggtacagactattgtcgagtcgaatacaagcatctaattgggaaaagatgacgagcagtagaatcgtcttctccggttgcttcgattcggtgtggattcctatcagagccgcaggtccgtgcacaggtcgacgtggtcccggtccagcggcggcgggaggttgaggtcgaacgccgccacgcgggaccgaacggtggaggcgtcgtcggcgtcgtccacgacggaggccgacgaggcgcagtcgctgtggcagccggcgtcgggcgccggtggcgcgggccgcgggacccgcctccggggcaccgccgccgccgtggccgccggtctgggcccgcgaggcccgctcgaggactcgacggtggagctcgcgctgcacgcggggccggccaccggcggcgccgccgccgccgccttcccggggaggtggtagtggggcgacgggagcgggagggaggagacgagcgggaagttggttctggcgagcgggccgcggaggttccgcgcggcgacgtcgtaggcccgcgccgcggcctcggcggagtcgtaggtgccgagccacacgcgcgcccgcttcgccgggtcccggatctccgccgcgaacctcccccacggccgcttcctcacccccctgtacctcggcgccgccgcctcgcacatgacctctccccccaccatctccacaaatcaacaaacacctcctcggcgcggagctgcaacgcgagaaggcttgagctgatgaactgctgggttga

SEQ ID NO: 11157 - DNA, 573 bp, Oryza sativa
  Clone ID: TFbOSC401249j.C1.o42.fg
atggtggggggagaggtcatgtgcgaggcggcggcgccgaggtacaggggggtgaggaagcggccgtgggggaggttcgcggcggagatccgggacccggcgaagcgggcgcgcgtgtggctcggcacctacgactccgccgaggccgcggcgcgggcctacgacgtcgccgcgcggaacctccgcggcccgctcgccagaaccaacttcccgctcgtctcctccctcccgctcccgtcgccccactaccacctccccgggaaggcggcggcggcggcgccgccggtggccggccccgcgtgcagcgcgagctccaccgtcgagtcctcgagcgggcctcgcgggcccagaccggcggccacggcggcggcggtgccccggaggcgggtcccgcggcccgcgccaccggcgcccgacgccggctgccacagcgactgcgcctcgtcggcctccgtcgtggacgacgccgacgacgcctccaccgttcggtcccgcgtggcggcgttcgacctcaacctcccgccgccgctggaccgggaccacgtcgacctgtgcacggacctgcggctctga

SEQ ID NO: 11158 - DNA, 732 bp, Oryza sativa
  Clone ID: TFbOSC401517j.C1.o1.fg
atggatcatattggaattagcggcggcggcgagggcggggtggtgtctccggcgcagccgtcgtcgccggagcggcggtacaagggcgtgcggctgcggaagtgggggcggtgggtgtcggagatccggatgcccaacagccgggagaggatatggctgggctcgtacgagtccgccgagaaggcggcgcgggcgttcgacgccgccgccgtctgcctccgcggctcgcgcggcgccggctcgctcaacttcccggagtccccccctcccgacgtccgccgccgcttccccggcgcggctctcacggtcgagcagatccaggccgaggcggcgaggcacgccaaccgcccgtttccggcgaacaccgccgccgccggcgggtcgtcgtcgtcgtactcgatctcgcagcggcaagaagcagcagcccctgcgcggtcgacgagcaacgacgacacggccatgtcgtcagtgccctccaccgacggcggcgctgccgactacgacggcggtgatgatgtcattgactggtcattcatggacacgttgccggcgatgtcgtcgtcagcggctagtaccaatgctgatctggtcccggccatggatgatttcatgtacgggttcttgcacacaatgccgccatcgccatgcgaagacggtggggaggatgtgatgatcgacggcaattgcaacatggatcagacatttttctcagtagatctttggagattttga

SEQ ID NO: 11159 - DNA, 1590 bp, Oryza sativa
  Clone ID: TFbOSC410095j.C1.o16.fg
atggacatgaacagtggttggcttggcttctccttgtcttcttcctcggcgaggggttatggagacggctgtggtgagggaaatggaggtggagatggagatggctcgtgctcgtcgcctgttgcagcttcacctctcgtggctatgccgttgcactctgatggatctgtgcactatgatgctccagattggaggcatgcagaggccaaagaccccaagcttgaggacttcatgagcgtcagctacagcaacaaaagcagcagcaacctgtacggcagcagcagcagcagcagctgcggccacgccgaccagatcaaataccatcatgtccatgacgtccaagctttctcgacgccgtacttctacggccatggcggcagcggcgttggcatcgacatcaacatgaatgcgccaccggcaggctgcacaggcgtcctgccggaccaccgaccacctccgccgcagcaagaccatatcttcctgcctccccatggccagtacttcctgggcccaccgaacccaatggcgccggcgccgatgtacaacgccggcggcggcggcggcggcgtcgtcgacggatccatgtcgatctccggcatcaagtcgtggctccggcaggcaatgtacgtgccggaacggtcagcggcggcgctgtcgctctccgtgccggccgctcccccgagcgaggcgccgctgccgccggcggcgatgccggtggtccgcaagcccgctcagacgttcgggcagaggacgtcacagttccgtggcgtcaccagacatagatggactggaagatacgaggctcacttgtgggacaacacttgcaggaaggaaggccagaccaggaaaggaaggcaaggtggctatgacaaggaggagaaggctgcaagggcttatgatttggcagcactcaagtactggggtccaacaactcacataaattttccattgagcacttatgagaaggagctggaggagatgaagcacatgacaaggcaggagttcattgcccacttaagaaggcatcaccagcacgggagatggcaggcaaggattggaagggtcgcagggaacaaggacctgtatctcggcaccttcagcacgcaggaggaagcggcggaggcgtacgacatagcggcgatcaagttccgcggcctgaacgccgtgaccaacttcgacatcagcaagtacgacgtgaagcgcatctgctccagcacccacctcatcggcggcgacctcgcgtgccgccgctccccgacgcgcatgctaccaccggacgctccggccggcgccgccggcgtcgacgtcgtcgtggcgccgggcgaccaccagcagatcagcgccggtggcggcggcgcgtccgacaactcggacaccgcctccgacggccaccgcggcgcgcacctgctgcacggcctgcagtacgcgcacgccatgaagttcgaggccggcgagagcagcggcggcggcggcggagacggcgccaccaccaactggatggccgccgccgccgccgcggcgcgcccggtcgccggcatcccgaccaccgtgcaccaccagctcccggtgttcgcgctgtggaacgactga

SEQ ID NO: 11160 - DNA, 888 bp, Oryza sativa
  Clone ID: TFbOSC900276j.C1.o5.gp
tttgattttgaaactcaagagggccattccttgtcaattatcgcgtaaagaatagtggtacagactattgtcgagtcgaatacaagcatctaattgggaaaagatgacgagcagtagaatcgtcttctccggttgcttcgattcggtgtggattcctatcagagccgcaggtccgtgcacaggtcgacgtggtcccggtccagcggcggcgggaggttgaggtcgaacgccgccacgcgggaccgaacggtggaggcgtcgtcggcgtcgtccacgacggaggccgacgaggcgcagtcgctgtggcagccggcgtcgggcgccggtggcgcgggccgcgggacccgcctccggggcaccgccgccgccgtggccgccggtctgggcccgcgaggcccgctcgaggactcgacggtggagctcgcgctgcacgcggggccggccaccggcggcgccgccgccgccgccttcccggggaggtggtagtggggcgacgggagcgggagggaggagacgagcgggaagttggttctggcgagcgggccgcggaggttccgcgcggcgacgtcgtaggccgcgccgcggcctcggcggagtcgtaggtgccgagccacacgcgcgcccgttcgccgggtcccggatctccgccgcgaacctcccccacggccgcttcctcacccccctgtacctcggcgccgccgcctcgcacatgacctctccccccaccatctccacaaatcaacaaacacctcctcggcgcggcgctgcaacgcgagaaggcttgagctggtgcgctgctgggttgagctgagacgcggcggatttggctacggggagaagagggggtgaagggggtagaagaaggaggagggcgtcgcgtatgggagg

SEQ ID NO: 11161 - DNA, 3123 bp, Oryza sativa
  Clone ID: TFbOSC414535j.C1.o7.gm
atggaggacaaccggagcaaggacacggcgaccaagtaccgcggcgtgaggaggcggccgtggggcaagttcgcggcggagatccgcgacccggagcgcggcggggcgcgcgtctggctcggcaccttcgacaccgccgaggaggcggcgcgtgcctacgaccgcgcggcctacgcccagcgcggcgccgccgccgtgctcaacttcccggccgccgccgccgccggcaggggtggaggagccggcggcgccgcttccgggtcgtcgtcgtcgtcgtccgcgcagcgcggcaggggcgacaagatcgagttcgagtacctcgacgacaaggtgctcgacgatctcctcgacgacgagaagtaccgtgcgagcgcgcagagagggacgagacgggaaggccggcggggctgccggcgctggggaggacaggagccccgtcctcgccggtggcggcgactgcctctccccgcgcggagccacggaccccgtgtcgactgccccttccgatgcctcaccaccggcctccgtttgggtctcctccgacctctccgcgccctcagcagcgtgtcccgctccagcacccgcaactgcgctcctcctcgttgcctcttgaaaccatggagactcaccgcccatcctatccgcttcgcctcctccgccacggtcgagctcccccgtttccatcccctctactccatcaccgccgcttctttctacgacgacggtggcttgaagacctcagaggcgaaggagatgcccctctacgttcttggcgatcgtctggtcgaggtgtatatgcacatgaccaacgctaaggagttgtgggatgcactgaatactaaattcggtgctactgatgctagcaatgatctgtacatcatggagcagtttcatgactacaggatggctgacaaccgttctgtagtcgaacaggctcatgagatacaaatcatggctaatgccaatgttgtgcacaaggcccagaacaagtgcaaggggaaatacaaagctcaacagaccaccaacttcaagaagcagaagaagaagaacaacaaacctaatcaggatgagaggacttgctttgtgtgtggccaacctggtcatctggctaggaagtgtccacagcgcaaggggatgaaagcaccagcagggcagacttctaagtctgctaatgtgaccattggcaatactggagatggaagcgggtatggtaatttacctactgttgcacggggttccaccgtcctaatgggaaatgggtcacatgcttctgctcatggtgttggcacggtagatctgaagtttacttcgggaaagatcgtgcagctgaagaacgtgcagcatgtcccttctatcgacaggaatcttgttagtggctcctgtctgactagagacggatttaagttggtttttgagtctaataaagtagtcgtgtctaaacatggatattttattggtaaaggttatggtgaagctcctcgaaggagtaagagacaaaggatggctaagtcctttggtgatgatttcattgtgtacctcgtggatgacactcctaagtcaatttcagaagcatatgcatctcctgatgcagactactggaagaaggctgtccgtagtgaaatggattccattatcactaacgggacttgggaggtgacagagcgaccctatgggtgtaaacctgtggggtgcaagtgggtgttcaagaagaagcttaggcctgacgcctcacatggtcttctcgttcatcaaatggacgttaagacagcttttcttaatggagagctggatgagaagatctatatggatcaacctgatgcgtttgtagttgaaggctttgcagtcaatgaggtagataaatgtgtgtattatcgctatggtgggggtgagggagttattccgtgcttgtatgttgatgacatactgatatttgggacaaatcttagggtgataaatgagaactttcttgaaagaactcacctctgtgagcttgattgttggtcgcagtctatgaagattttggactactccatcctgctcgctggcgtgcaccggcgatcgggagagcaggtctccggaacctctgccttcgacgtcttgcatcgggagaaggcggcaataatgtttttggaaagcgcttcacgtgactgctccctgttcatccgcgacggctcgtcttcctctcctttcgcgtgctgcgcgctttcgtcgacgcccgcaaccgcgagtagttcctgccgtgtaaccggtctttccgccacctcgcgtctcagcgcccgccgcccactcgcccgagccctcgactccacgccgccagccgccaactgtcgagacctcaactccgcgccgcttcgccggtgcccggcgccgtcccggctggccgcgcctgcggccagtgccgccaccaccgtcccctccccttcccgcgccgcgaggccgcaactccagcactccgcgtctccgcgccggcgccggcgctgccactgccgtccgcgccgtcccctcccctcctctgcgccagcgccgcgcgtcctctcctccggcctccccgccgtccgtgccgagttgccgacgtcgcgccgtgccaccgtcccctcccctcccttgcttagcccagataatgatattgtgtcgttatttcggaaacatgaagctaagaagattgcaacctcttctagctcttcgaatggcttcattggtgatgaagctcctgtacctgaagaagaaccaccacaagctccaacaattgatgatgaagctcctgtgcccgaagtcaatgcacctcattatcctatttatgatgttaatcgtcttgaaagtgatccaggcctaagacttccaatttcgagctatccggccaatgaccaagattctgttcggagagcatatattctcaagggcccttggcaaaagagcagcttgcgcgcgtgccaactagcaaccccccaagtcgccagcctccttgcctcctccctccccgccccacctccactcgccggcctctgccgattccacctccgccgtgcttccgctctcgctcgctggcctgccagcgcccgtgacagccgcatctgcggaacaaggggaaaaggggagaaggagaaggaggattggagcagatag

SEQ ID NO: 11162 - DNA, 570 bp, Oryza sativa
  Clone ID: TFbOSC1014j.C1.o1.fg
atggcgaagagatcgtctcctgatcccgcatcatcttctccatctgcatcatcctcgccgtcgtctccttcctcctcttcctccgaggattcctcttcgcccatgtcgatgccctgcaagaggagggcgaggccgaggacggacaagagcaccggcaaggccaagaggcccaagaaggagagcaaggaggtggttgatccttcttccaatggcggtggcggcggcggcggcggcaagaggagttctatctacaggggagtcaccaggcatcggtggactggcagatttgaggcccatctgtgggacaagaattgctccacttcacttcagaacaagaagaaagggaggcaaggggcttatgatagtgaagaggcagctgctcgtgcatatgaccttgcagctcttaagtactggggtcctgagacagtgctcaatttcccactggaggaatatgagaaggagaggtcggagatggagggtgtgtcgagggaggagtacctggcctccctccgccgccggagcagcggtttctccaggggtgtctccaagtacagaggcgttgccaggtag

SEQ ID NO: 11163 - DNA, 731 bp, Oryza sativa
  Clone ID: TFbOSC414122j.C1.o5.fg
atggcggccatagatttgtacaagtatcagctgagctcctcgtcctcgtcttcttcctcggatcaggagctcatgaaagcgctcgaaccttttatcaggagcgcttcacccacctccacctccacctccacgccattgttctactcctctagctccatctccaccaccaccaccactcccttctcctactcgtctccattgccgcaagaatcgtactacctccctgcttcttcgtcctacgccgccattgttccacctccgacgacgacgacgaacaccaccacctccttctcggagctccctcccctgcctccctcctcctcgtcgttcgcctcgccggcgaatgctgcggcggtggggctggctcaccttggcccggagcagatccagcagattcaggtgcagttcttgatgcagcagcagctgcagcagcgggggatggcggcgtcggcgtcggcgtcggcggcggcgtcgtaccttggcccgcgggcgcagcccatgaagcaggccggggcggcggcggcggcggcggccggcggcaagatgtaccgcggcgtgcggcagcggcactgggggaagtgggtggcggagatccggctgccgaagaaccggacgcggctgtggctgggcacgttcgacaccgccgaggacgcggcgctcgcctacgacaaggaggcgctccgccttcggggagactacgtgctccttacttccgcactcttcgccttggg

SEQ ID NO: 11164 - DNA, 1188 bp, Oryza sativa
  Clone ID: TFbOSC900238j.C1.o1.fg
atggagccaaactacagcgactaccaccccaacagtgtccccttcgatgcctactacgagcacggccatggccatctcgacgatcatggccatggccaccaccacctgatccctgcccatcctgagccctcctactcctacggcaactggtccttcctccatgccgatgccaccgcaacgtcctcctccgagtcgtcgtcggcgtccgccagctccggcgcggcgcacattgttggcgcctccggtccttctgcatccttcgtgcggcagcttcatttcggcggcgagtactacgacgacgacgcggcggacatcagcgccctcatggaagccgcctccatctcctgctggacgacgaacggtggtgccggtgcgtcaacgtcgcaaaccacaggcttggagggggtggaggtgatgaggagagcggcggccccggcgccggacaacggatcaagtgacaaggaggaggcggcgcggccgctgatcggggtgcggaagcggccgtggggcaagtacgcggcggagatccgggactccacgcgcaacggcgcgcgggtgtggctgggcaccttcaacacccccgagcaagcggcgctggcgtacgaccaggccgccctctcggtgcgcggccccggcgcggtgctcaactacccgctccaccgcgtgcgggagtcgctgcgcacgctcgagctcggcgccgccgccgccgcctcggagtcccccgtgctcacgctcaaacggcgccaccgcatccggaagcgctccacgaccaagaaggcgctggcgggcaaggaggccgacgaggcacccgccacgacgtcgtcggaggggaagaagaagcggcaggtcaacaccaccagccatagtcatgacggcgcatggcgccgacacctcctctcctccgggcggctctcgatggaggggtcgacggcggctggcgggcacggcgggctcgcgggaggacgtggggaggcagccgggagcaacgtgcgtgcggccgacgacgacgaggacggcgaggcggcggccgggagcagtgtgcacgtggctaacgacgatgacgacggcagcgaggcggcggccgtgagcagcatgcacgcggccgataatgacgacgaggcggtagccggaagtggcgtgcgcatgacgacgacgacggcggcaaggaggcggtcgggagcgggctga

SEQ ID NO: 11165 - DNA, 1530 bp, Oryza sativa
  Clone ID: TFbOSC400090j.C1.o33.fg
atggagttggatctgaacaacgtggcggaaggggtggtggagaagcatgagacggcggcgaggagcgactccggcacgtcggagtcgtcggtgctcaacggggaggcgtctggcgcggccatcgcgccggcggaagaggggtcgagctcgacgccgccgtcgccgccgccgcctcccgcggcggtgctcgagttcagcatcctgaggagctcggcgtcggcgtcgggcgagaacgacgccgacgacgacgaggaggaggaggccaccccctcgccgccgccgcaccaccaacaccagcagctgctcgtcacccgggagctattcccttccgccgctccctcgccgcagcattgggcggagctcggcttcctccgccccgacccaccgcgcccacacccagacatcagaatcctcgcccacgcgcctcccccggcgccaccgccgccgccgccgcagccgcagcctcaggcggccaagaaaagccgccgcgggccgcgctctcgcagctcgcaataccgcggcgtcaccttctaccgccgcaccggccgctgggaatcccacatctgggattgcggcaagcaagtctacctaggtaatttcatcgaacacatcatcttcctcctctcaatccaacgcgacatcgccatgaacaatctaacaaacaccttcatcttctcccaaacaatcacaggtggattcgacactgctcacgcagctgcaagggcgtacgacagggcggcgatcaagttcaggggagtagaggctgacatcaacttcaacctgagcgactacgaggaggacatgaggcagatgaagagcttgtccaaggaggagttcgtgcacgttctccggcgacagagcaccggcttctcccgcggcagctcaaagtacaggggtgtcaccctccacaagtgcggccgctgggaggctcgcatgggccaattccttggcaagaaggcttatgataaggctgcgatcaaatgcaatggcagagaagccgtcaccaacttcgagcccagcacatatgatggtgagctgcctactgatgctgctgctcaaggagccgatgtggatctgaacctgagaatatctcagcctgcagcctcacagcagagccccaagagggatagcggctcccttggcctgcaaatccaccatggatcatttgaagctccctctgaacttgctagccgccctcatcggttccctcttctgaccgagcatccgccaatctggactgcccaacctcatcccctattcccaaataatgaggatgcatccagatcatcggatcagaagaggaagccatcagagggggtagctgttccaagctgggcatggaagcagtttggtgccagctaccaagttgcttccagagcaaacactagggatggcaattgtgcccgtttgcccgtttacccgcgggtaaaaaccctattagggttgggtttgttctccattttatacccatgggtatcttattggttcaaaagctatgcccgatgggtaaatgggcatgggtatgggtaa

SEQ ID NO: 11166 - DNA, 1035 bp, Oryza sativa
  Clone ID: TFbOSC415507j.C1.o9.fg
atggacttcagcggcgacatcgatgacctgatctccctccagctcctccacgatcagctgctcggggtcgaggccgacgcgtgcctcccggtggcagttcatcacgatggcgtcgccgcgttcgccgagcatcagcagggtttccatcccgcggcgttcttgccgcagcagccgatgacgatgacaccggctgggtacgtggacatggcgaatgatcagtatttgggtgcgcatgccgccgctggcgaggcggaggcggtctaccgggcggcggcggcggagccggtgatgatacggttcggcggcgaggtgtccccggtgtcggacccccggaggccgcccctgacgatctcgctgcctccgacgtcgcacgcgtgggcggcggcggaggcggtgcacccggccgctctgctgcaggcgcagaccgcggccgcggccgccgacccgaacgacttccggaagtaccgcggcgtgcggcagcggccgtggggcaagttcgcggcggagatccgcgaccccaagaagcggggctcgcgcgtgtggctcggcacgtacgacacggccatcgaggcggcgcgcgcgtacgaccgcgccgccttccgcatgcgcggcgccaaggccatcctcaacttccccaacgaggtcggctcccgcggcgccgacttcctggcaccgccgccgccgcccccgccgccgacgacgtcgacccacggcaaacggaagcggcacgagacggcggcggccgacccggacgtcgaggtgatcggagaatcatccaaatccgtcaagaccgagacgtacacatcgccggcgtcgtcgtcgctggcctcaacgacaacctcaacggtgacatcatcatccacgtcgccttccccctcgtcggaggcagctgcctgcggcggcggcggcggcgagctgttcgtcccaccgatgccgtcgagctggtcgtgggatcagttggaggggttcttcggcatcctctcgccgctctcgccgcacccgcaaatgggattcccggaggtcgccgtaaactaa

SEQ ID NO: 11167 - DNA, 1281 bp, Oryza sativa
  Clone ID: TFbOSC401001j.C1.o62.fg
atggtctccatgaggaagaagaagaaggcctttgctgttgcagctgcaaccaccttgctttcccctcctcggtcctcctcctcctcctcctccacggcgtcctcctgcattgtgccgccgcgcactgagagcggcaagaagaagagtaagcacaggaagagggccaaggatggcaccggcggtgacgacgacgacgccgccgttgctgctgcgccgaggaagggatcctccatctacaagggcgtggcaaggcacaggggttcagggaagtacgaggcgcacctgtgggacaagcaaggctggaacccaaaccagacaaggaagagaggcaggcaaggagcttatgacacagaggaggctgcagctcgcacttatgatcttgcggcactcaagatctggggctcagaccatgtcctaaacttcccgattgacacgtacaggaaggagcttgagaggatgcagcgaatgacaagggaggagtacctggctactctgaggcgcaagagcagtggcttctccaggggtgtctccaagtacaggggagtggcaaagcatcaccacaacggccggtgggaggccaggataggccgagctgtaggcaagaaatacctctacctgggaacattcgatacccaggaggaggcagccacggcctacgacctggcggcgatacagctccgcggccgcagcgcggtcaccaacttcgacgccagctgctacacctacacggaccacctgccgccgccgccgccgccgcagccaccgtccgtctgcaagaccgagccggagctggagccgccgcagccggcggcgcctccaggctcggagtcacttctccggcccaagatggagccctgcgacgactgggagccgccggcgatttgcccgtcgctccgtgacgcggacgacgcggaccacgccatcgccgagatcctgccggcgctctgcatggaccgcgccgacttcgaggccaggtaccctgcccgccgcgcccgcgacgccgccgccgacggctggtcgacgtcgtcggacgacgtcgccgccgcctccgtcgacgatgacgtgctgcgtagcctgccagacgacgtgggcttcgtcgacgacgtcgagagcctcttcctggacgcgcccggcccggccgccgccgccgccgccgccgcgatgccagacgacgtggaacgcgcggtgcagcgcgcgccttctgccgcgtctcgtcgggccaacgccgcggcggtctcctacgcgatcagctcgttggcgtccgggcgctggtggtattga

SEQ ID NO: 11168 - DNA, 822 bp, Oryza sativa
  Clone ID: TFbOSC413093j.C1.o2.fg
atggacgccagcctccgcacactgcctccggcgatcttccccggcgaggtccgctccgccgtctcctccctcctcctctctcccggcggcagcgccctcgacaccgtgttctcccacctcccgccgcccgtcaccatcccgccgctcggctccagcgtctactaccgccagagcgagctcctgcgccacttcgccgcgtcgcaggcggcgcaggcgcagagcgccaccgccgccgccagctcttcgtcggccgccgcggcgggtctcgacgatggcgcgccgcggaagctgtaccgcggcgtgcggcagcggcagtgggggaagtgggtggccgagatcaggctgccgcagaaccgggtgcgcgtgtggctcggcacctacgactcgccggagaccgccgcgcacgcctacgaccgcgccgcgttcaagctccgcggcgagtacgcgcgcctcaacttccccggcgtcatggacggccgcgactgccccgacaacctgcgccaactccgcgacgccgtcgacgccaagatccaggccatccgcgtccgcatggcgcgcaagcgcgcgcgcgcgcgccgccagcgcgaggagagcaagaagagccaacgcgccgaggacgcgaaggcggcgacgccgtctcgccccgtggcctccgagcgcgccgcgtccgagacgacgacgacgacaaccacgacgtcgtcgtcgtacgggtcaccggacggcgtgctctccatgagcgcggcgtccgtcgacggcgactgcccgctcgagcggatgccgtcgttcgatcccgagttgatctgggagatgcttaacttctag

SEQ ID NO: 11169 - DNA, 702 bp, Oryza sativa
  Clone ID: TFbOSC407922j.C1.o8.fg
atgcagggcgagtaccaccgctcctccagcgaggactcggctgcttctgctgctgctgctgcggcggcggcggctgcggctatggctcctctcgccgcggctgcggcggcggttgctgccaaggaggagcaggcggcggcggcggcggtgctgccgctgcagcagcagcagccgaggcggcagtaccgtggcgtgcggatgcggaagtggggcaagtgggtggcggagatccgggagccgcacaagcggacgcgcatctggctggggtcgtacgcgacgcccgtggcggcggcgcgcgcctacgacacggcggtgttctacctccgcgggcggtcggcgcggctcaacttccccgaggagatctcctcgctggcgtcgctgtccgagggcggcggcgcgagcgagccccgcgagcccgacggcggcacgctgtccgcggcctcgatccggaagaaggccatcgaggtcggctcccgcgtcgacgcgctccagaccggcatgatggtcgcgccgacgacccaccaccgcgagcggcagaagcaccaccaccaccaccaccaccaccacccgcacctgcagccgcacggcgaggagcaacaccaccaccacgagcagaagcaccagcggacggcgtggagcggccgcgccaagaacccggatctcaaccaggcgccaagcccggagaactccgacgccgagtag

SEQ ID NO: 11170 - DNA, 699 bp, Oryza sativa
  Clone ID: TFbOSC900281j.C1.o6.fg
atgcagggcgagtaccaccgctcctccagcgaggactcggctgcttctgctgctgctgctgcggcggcggcggctgcggctatggctcctctcgccgcggctgctgcggcggttgctgccaaggaggagcaggcggcggcggcggcggtgctgccgctgcagcagcagcagccgaggcggcagtaccgtggcgtgcggatgcggaagtggggcaagtgggtggcggagatccgggagccgcacaagcggacgcgcatctggctggggtcgtacgcgacgcccgtggcggcggcgcgcgcctacgacacggcggtgttctacctccgcgggcggtcggcgcggctcaacttccccgaggagatctcctcgctggcgtcgctgtccgagggcggcggcgcgagcgagccccgcgagcccgacggcggcacgctgtccgcggcctcgatccggaagaaggccatcgaggtcggctcccgcgtcgacgcgctccagaccggcatgatggtcgcgccgacgacccaccaccgcgagcggcagaagcaccaccaccaccaccaccaccacccgcacctgcagccgcacggcgaggagcaacaccaccaccacgagcagaagcaccagcggacggcgtggagcggccgcgccaagaacccggatctcaaccaggcgccaagcccggagaactccgacgccgagtag

SEQ ID NO: 11171 - DNA, 994 bp, Oryza sativa
  Clone ID: TFbOSC900393j.C1.o17.fg
gcaccggtggacggggaggtacgaggcgcacctgtgggacaatagctgccgccgggaaggccaaagccgcaaaggccgccaaggaggttatgataaggaggagaaggccgcaagagcttacgacctcgccgccctaaagtactggggtccaaccaccacgacgaacttccctgttgccaactacgagacggagctggaggagatgaagtccatgacgcggcaggagttcatcgcgtcgctgcgcaggaagagcagcggcttctcaagaggggcttccatctacagaggagtaacaagacatcatcagcacggccggtggcaagcgaggatcggcagggtggccggaaacaaggacctgtacttgggcactttcagcacgcaggaggaggctgccgaggcgtacgacattgccgctatcaagttcagggggctcaacgccgtcaccaacttcgacatgagccgctacgacgtcgacagcatcctcaacagcgacctgccggtcggcggcggagccgccacgcgcgcctctaagttcccctctgacccatcgctgccgctgccgtcgcctgccatgccaccgtcggagaaggactactggtccctccttgccctgcactaccaccaccaccagcagcagcagcagcagcagcagtttcctgcttctgcatttgacacctacggctgctcctccggcgtgaacgtggacttcacaatggggactagcagccacagcggcagcaacagcaacagcagcagcagcagcgccatatggggcacagccgccggcgcagcgatggggaggcagcaaaacggcggcagcagcaacaagcagagcaacagctactccggtaacaacattccttatgctgctgcagcagctatgacttctggatcagcactctacgggggctccaccggtagcaacgggacatgggtggcgagtaacacgagcacggctccccacttctacaactatttgtttgggatggagtag

SEQ ID NO: 11172 - DNA, 5229 bp, Oryza sativa
  Clone ID: TFbOSC900383j.C1.o18.fg
atggatcggcaatggatgtacgctgaccggcggtccaaagagtttattgacggcgtgcactattttttgagagtggccgaagctaacaggcaaaggggttttatttgttgtccatgcaataagtgtaagaatcagaaggagtattctgcatccaggactattcatttccacttgtttgagtcggggttcataccaagctataattgttggacatcccacggagagcaaggtgttgaaatggaagaagatgaagtggaagacgacaatattccggactttgctcagtatgttggatttgaaggaaatcaaacgggcgaggaggaaatagctgctgatggtaacgacgttgcggatgatcttggtcagatgttgcaggacgccagggaggactgcgaaagtgaaaaggaggcccataaattggacaagatgttggaggaccacagaacttcgttgtacccaggttgcgagcaggggcacaaaaagttggataccactctggagttgttgcaatggaaggcaaaaaatggggttagtgacaaggcatttggcgatttattgaaactcgtcaagaacattcttccggggggaaacaaattgcccgagacaacgtacgaggctaagaagatagtctgcccgttaggactggaagttcataagattcacgcatgtccgaacgattgtatcctatatcgcggtgaggagtatgagaacctagaagcatgccctgtttgcaaagcactacgatacaagattagacgggacgatccaggagaagttgacgggcagctgacaaagaagagaattcctgctaaggtgatgtggtatttccctataataccacggctaaggcgttttttcaggaacaaggggaatgctagaatgttgcgatggcacgctgaagagcgtcaacaggacgggatgctgagacaccccgccgatggttcgcagtggcgaaacatcgacagaaaatttaaagaatttggaaaggacgcacgaaacatacggtttggtttgagtacggatggcatgaatccttttggagagatgagcagcggccatagcacttggcccattacgatgtgtatctacaacctccccccctggctatgcatgaagaggaagtacataatgatgccgattattattcaaggccccaagcaacctggtaacgacatcgacgtgtacctaagaccactggtcgaagatcttaaactgttgtggaggaaggaaggtgtccccgtgtgggacgaggacaaacaggaggagtttaacctacgagcgctgctgttcgtaaccatcaacgattggcctgcacttagcaacctatccggacagtccaacaaggggtacaaggcttgcactcactgtatggatgaaacagaaagtacgtatcttaagcactgtaggaaggttgtatacatgggtcatcgtcgattccttgcagcaaaccacccggtacggaagaaaggcaagcacttcgaacataaggccgaccaccaatttcgaaatagcgagaacgtgaacgagaacgagaacgatcgaacgaacgagagcgagaacgagaacgatcgaacgaagacaagcgagaacgagggaacgaacgtgaatgagaacaagcgaacgaacgtgaatgagaacgagcgaacgaacatgaacgagctagggaacatggctgaccgcgatgaggaacagatattgtacgatacaatcgcggagggaagcagccagtactggaatgaagaagaggggaacgaggatccaaaccagtacttgaacgaggaagggaacgtggagagggatgcggaggggaaccagcaggggcacgtggaaagggatgtggaggggaaccaggaggaggaggctagtggtagtcaaccctccgttggacagaagagggcacgcgggcaacgaggtgcagcgaagaagcttgagggtcggcacatcataacggaagtggaagaagatggacgtcctagtgccccggccgaagccgccaagaactatgtacgtcacagcggttgggttgtgcgggataacgtgcctgtcagtacggtgtactggcgaagaataagggcacgcggagatcatgagagctttgtcccagattcggagaaagagatgctgtggaccacaatgctcgagacattcacccttcctgcgggtacagaggacaaagtgaaaaggtggactctgaagaaaatggcagaacagtttcagagcttcaagggagatctgtatcagaagtatatactgaaggggcagacaccgaacttcgacacattcccaaagctaagggatcactgggacgagttcgttgcatataagacaggtgaacaagggcaggcgatgatggaaagaaacaaagaaaatgcagccaagaagatgtaccatcaccacttggggtcaggaggctatagcgtcgcgatgccgaactgggagcagatggaggctagcttgattgagaggggtatcgaaccggcaacagccaattggccggaacgatcgaagttctggtactatgctcacggtggaacgctcaacccagctgatggctcactggtcttcggcgatcagatgcgagaggctgcgcgacgactaacagatgcagtggaagcctcctctcagggcacgttccgaccagacagagatagggacgagctgacactcgccctgcagactccagagcatccaggacgaacacgagggaaaggggtgattccttggaagattggtttcaaggaggacatctacacgtacaggagtcggatgaggagcaagagagataccgaggcgaagattgcagacctagagttccgggtatcgagctacgaactcaacatgcaagaggaggtggcaaggaaggttgatgaacgcatggccgcacatcggtcccatgatccccagccgaccattcctcctgcaatggtgagcccattaggaaaccgtagcagctgcgcctcaatggggcaggtaggatcacagagcatggacgccatgcaaacacaggacgaatcgacccgtcccgttgatgacatcactcagcggacaccatgtgagctgcatattcctttcaagaacttatcaataaaggtggcgtcgggcatggccatcccaacggacccttcaggtacttaccactgcaggccgattccagcaggatactcgaaggtcgaagttgagttggtcgaaggcgcgtacgaggacctcgagctggattaccctggaggagacggtgagacgcatctacgagacacatgccatgccattattctacggcgcaggcggtacatcatcctccctgggcgacaagcggcgtctcgtgcactatctcctccggctccgccatctcctcctcaggatcctgcaccgtctcctcctcatgctccgccagcaccgtctccagctcaggctccagcatcgactcctcctcaggatcctgcaccgactcctcctcgtgctcctacacctactcccccgcaagctcctcttccggcaccttcaaagtcaagggcccccccagctccaccgcctgcccacacaagggcaacgaagaaggcgaaagttgacgccgccaagaacaaggacccggggtacgattgcacgcaagaggagcttgacgcttacgttgcatcagaaatcaagagacaattcaagcctcgaagtccagaaaagaagattcctatagaccccagtgtcaggaacttcttcaggggtatgtctgcatctgtcaaagaggccatcaagctatcggactatgagcgaacgctgaagaaagcatcttctggaaagtccaaaccagtccctcagcttggagagcaaccaaaccaggagatcgagccgttggtgaccggtaaagaaatgacgatagaacaatttattactgacaccggtctaactacggatcaattgctaggagtcgcaccaatcgaaaaggcggaagtgaaatacatgtacgaactcggtaaaccgcttgtcaagcctgagctgctgcagtccctacccacacaaatgtacaagttccatcagctgtacatggagatgagcgccaccggtagagagatgatcggagtgaggatcagggacacggacttcttgcaaggagatgacattctctggatcaatttcaggggaatctacgaactataccagctagacgccctcgacgtctctattatgagttgctggattttaatggagattcaaagggcccgacggcggagggttttcgatactggattcatcgaccctcggaaagtaaacgtcgcaatgctcgaccaatatccacaagaaacagaggacaatctcgtccatctcctgaaggcgcagcattacaagacgttcatactgttgccatacaacacagaattccactgggtgcttttactcatcgacctggaggcctgcaccgtcaacgtatatgactcaatggataaaaaagagtctacgtttgacaaggttttcgaacttatagacagctttaaactccatgtggtccgcggcaaatggagagaaagacttaggcggaagttcaaatttccttgcgcaaagcaaaagcagggaactaacttgtgcggttattacgtgtgcgagtattgccactgccttgcagaccaaatcatcaccacaagagagctcgattttattcgcatgagggataacctgaccacacacaaggaatttatcgcggcggttcaagaacaactcatgggattcatcaacgaagaaatccttgatcccaagggtggtggcaaaactcgcggggagatgaacaaagatgatgaggtgatcgggacgttcgacacggcggtggaggcggcgctggcctacgacgccacagcgcgatggctctacggcagcaaggccgtgaccaacttccccaccaccaccggcgatggtgacgacggcctcccggttgctgaacccgccgtcgtcgtcgttgccgctcccgccttcgccggcgaggagatggacaagcaggtagctccggcggcggcgacggcggcagagacagtagccgcagaccccggcgccggcgagttgggtccagtggtgctttgtcatgaactggaggccaccaacggctggcagtacgaggcgtacggctacggctacagcatggggctggagctgcttgagaactacgcgtacgccggcgacgtccagccgctgggcctgggggggtcgacgagcaacgccgccgccgccaacgactgcctttggatgttctaa

SEQ ID NO: 11173 - DNA, 786 bp, Oryza sativa
  Clone ID: TFbOSC900408j.C1.o17.fg
atggctgacctgaccgagcatccgtcgccgactgctcctcctcaagtgcaaacagctggcctgccggcggcggcttctccgggtcctgcctcgcctcattcaccgtcggagcaaggggacaagacggcgcccggggcagccacggcgtcgacgatgacgacggcgagctcgggcgagccgtcgccacggtcctcggggaagcacgccttctaccggggcatccggtgcaggagcggcaaatgggtctcggagatccgcgagccgcgcaaggcgcgccgcatatggctcgggacgtacccgaccgccgagatggccgccgcggcctacgacgtggccgcgcgcgcgctccgcggggccgacgcggtgctcaatttcccgggcgccaccgcctcccgccctgtcccggcgtccgcatccccggccgacatacgcgccgcggcggccgcagcagccgcggccgccgcgcaccttgagcggccgcacggccccaccggcactgcctatcctgccaccgccgcagcggagcaccaccagcagcagcagcagcaacagtacggcagtggcagtccggccgccgacgacgtctcaggctacccgccgatggagggagggattggcaatgacgatttcatggacgaagaagccatcttcgagctgcctcagctgctgcgcaacatggcggctggcatgatgatgagcccgccgaggctgagccccaccacctccgacgtgtcgccggagccgtcggaggccggcgagagcctgtggagctaccgtgatccctag

SEQ ID NO: 11174 - DNA, 1209 bp, Oryza sativa
  Clone ID: TFbOSC423200j.C1.o1.fg
atggccttccacctccaacctcactcactcactcaagccaagctagcaatcgatcgatcgagctcaatgcctccatccatggcgacggcgagggtggcgtcaccgtccacggacaggaagcgcaaggccagcagcgaggacgacatagacgccgccgccgccgccgccgctctcacctcgccgctggcgccggcgagggggaggaagcggttcgtcggcgtgcggcagcggccgtcggggaggtgggtggcggagatcaaggacaccatccagaagatccgcgtgtggctcggcaccttcgacaccgccgaggaggccgcccgcgcctacgacgaggccgcctgcctcctccgcggcgccaacacccgcaccaacttttggccccgcccctcgccgccgcccgccgccgtcgcgccaccggagacgacgacgacgccggcgctgccgtccaaggtcaccaacttgctactgctccgcctcaaggctcgcaaccagcaggtcgtcgacgccggcgccgcggcgccgcaagaagccgctctgttgcagctgcagcagcagacgccggcgtcgtgccaggaggtgttcgtccgtagccacggcgaggagtacggcttccacgtcgacgacttcctcagcgacgcgtgcagcaacgagcagtactccggcgacagctcgctgggattggacgacgacgacggcgaggtggaagacgaggaggaggaggagctcgacttccagttcatggacgtcgcgcccggggcgtcgtcggcggcggcggaggcggggctaggcggcgagggcgcgctgtgctcgccgttcgagatggtcgccgcggagctcggcggcgcggtggacgtggccgcgcacgacgcgatgaggcagatggactacgagaggaagatctccgcgtcgctctacgcgctcaccggcgtctccgagtgcctccggatccgcgccgccgccggcgccaccgccgctgcgcgggaccacctcaccggcctgagagaggcttgccggaagaagcagaaattcgccgccgccgcggcggcgccgccacagcagcaagaaccatctcctcctccacagcagcctgagacgccggcgagctcaggcggcggcatgtcggagacggcgagcggcggcggcggcgacggcgacgtgctgatgtggagctcactggacttggctccgatttgccacatggcatag

SEQ ID NO: 11175 - DNA, 618 bp, Oryza sativa
  Clone ID: TFbOSC401241j.C1.o1.fg
atggtacagccaaagaagaagtttcgtggagtcaggcagcggcactggggctcctgggtctctgagatcagacaccccctccttaaaaggagggtgtggctgggcacctttgagacggccgaggaggctgcgcgagcctacgatgaggctgctgtgctgatgagtggccgcaacgccaagaccaacttccccgtgcagaggaactccaccggtgatctcgccacggccgcagaccaggacgcccgtagcaatggcggtagcaggaactcctccgcgggcaacctgtcacagattctcagtgctaagctccgcaagtgctgcaaggcgccatctccgtccttaacctgcctccgcctcgaccccgagaagtcccacattggcgtgtggcaaaagcgcgcaggggcccgtgctgactccaactgggtgatgacggtggagctcaacaaagaggtagaaccaactgaacctgcagctcagcccacatcaacagcaacagcttcgcaagtgacaatggatgatgaggaaaagattgcgctgcaaatgatcgaggagttgctgagcaggagcagtccagcttcaccctcacatggagagggagagggtagctttgtcatctga

SEQ ID NO: 11176 - DNA, 912 bp, Oryza sativa
  Clone ID: TFbOSC415507j.C1.o6.fg
atgctgcttaatccggcgtcgagagaggtggccgcgctggacagcatccggcaccacctcctggaggaggaggaggagacgccggcgacggcgccggcgccgacgcggcggccggtgtactgccggagctcaagcttcggcagcctcgtggccgaccagtggagcgagtcgctgccgttccggcccaacgacgccgaggacatggtcgtgtacggcgccctccgcgacgccttctcctccggctggctccccgacggctcattcgccgccgtcaagccggagtcgcaggactcctacgacgggtcctccatcggcagcttcctcgcgtcgtcgtcgtccgaggcggggacgcccggggaggtgacgtcgacggaggcgacggtgacgccggggatcagggagggcgagggcgaggccgtggcggtggcgtcgagggggaagcactaccgcggggtgaggcagcggccgtggggcaagttcgcggcggagatcagggacccggccaagaacggcgcgcgcgtgtggctcggcacgttcgactccgccgaggaggccgccgtggcgtacgaccgcgccgcctaccgcatgcgcggctcccgcgcgctcctcaacttcccgctccgcatcggctccgagatcgccgccgcggccgccgccgccgccgcgggcaacaagcggccatatcccgacccggcgagctccggctcttcttccccttcatcctcttcctcctcgtcgtcgtcttcctcctccgggtcaccgaagcggaggaagagaggcgaggccgcggccgcgtccatggccatggcactggttccaccaccgccaccaccggcgcaggcaccggtgcagctcgccctcccggcccagccatggttcgccgccggtccgatccagcagctggtgagctaa

SEQ ID NO: 11177 - DNA, 1059 bp, Oryza sativa
  Clone ID: TFbOSC415507j.C1.o7.gp
attctgcagagagtgatgctctgttctgaacttgctcgacccatcaagcagcaatcgatcacgcacagtcgcacaagatggctaaatcaccactaccactaccacatcgccacttagctcaccagctgctggatcggaccggcggcgaaccatggctgggccgggagggcgagctgcaccggtgcctgcgccggtggtggcggtggtggaaccagtgccatggccatggacgcggccgcggcctcgcctctcttcctccgcttcggtgacccggaggaggaagacgacgacgaggaggaagaggatgaaggggaagaagagccggagctcgccgggtcgggatatggccgcttgttgcccgcggcggcggcggcggccgcggcggcgatctcggagccgatgcggagcgggaagttgaggagcgcgcgggagccgcgcatgcggtaggcggcgcggtcgtacgccacggcggcctcctcggcggagtcgaacgtgccgagccacacgcgcgcgccgttcttggccgggtccctgatctccgccgcgaacttgccccacggccgctgcctcaccccgcggtagtgcttccccctcgacgccaccgccacggcctcgccctcgccctccctgatccccggcgtcaccgtcgcctccgtcgacgtcacctccccgggcgtccccgcctcggacgacgacgacgcgaggaagctgccgatggaggacccgtcgtaggagtcctgcgactccggcttgacggcggcgaatgagccgtcggggagccagccggaggagaaggcgtcgcggagggcgccgtacacgaccatgtcctcggcgtcgttgggccggaacggcagcgactcgctccactggtcggccacgaggctgccgaagcttgagctccggcagtacaccggccgccgcgtcggcgccggcgccgtcgccggcgtctcctcctcctcctccaggaggtggtgccggatgctgtccagcgcggccacctctctcgacgccggattaagcagcatctttgaattatcccgtgaatttgaatttgatttt

SEQ ID NO: 11178 - DNA, 654 bp, Oryza sativa
  Clone ID: TFbOSC900404j.C1.o1.fg
atggcggcgctcttcgaggccgcggagacggcggccatcgtggctgcgctgacgcgcgtcattgccgacggcgggcgtggaggcggcggcggcgtctgcgtgccgccgcccgcgccgtcgttggtcgtgccgccgcgggcgggaacaggcggcgggcggcgcgtcgacgttgcgcgggaggaggagatggtcggcgtcgtctccgcgggagatcacgccggcggggcaaacgtggccgaggcggcggcggcggtggtggtggcggcgccggcgacagcgcgcaggtaccgcggggtgaggcggcgaccgtggggcaagtgggcggcggagatcagggacccgaggaaggcggcgcgcgtctggctgggcaccttccgcaccgccgaggacgcggcgcgcgcctacgacgccgccgcgctacgcttccgcgggcgccgcgccaagctcaacttccccgaggaggtgtcccgcccgtggcagggtcacgatgtcgatcacatgtcctgctcgccgccgtcgatctcgaacgctcgctttctgggttcgtggaccttcggaccgccgcagccgccatcgcggtccgtcgcggcggcggcgacgactctgcttggtgggagccatggaggcaacggagcagagaacgggagggaatag

SEQ ID NO: 11179 - DNA, 801 bp, Oryza sativa
  Clone ID: TFbOSC413120j.C1.o7.fg
atggcggcggcgaggcaggattcttgcaagaccaagcttgatgagcgtgggggtagtcatcaggctccgagctccgcgcggtggatctcgtccgagcaggagcacagcatcatcgtcgcggctctgcggtacgtggtgtccgggtgcaccacgccgccgccggagatcgtcacggtggcgtgcggggaggcgtgtgctctgtgcggcatcgacggctgtctcgggtgcgacttctttggggccgaggcggcggggaacgaggaggcggtaatggcgacggattatgctgctgctgctgctgcggccgcggtggcaggaggatcaggcgggaagagggttaggcggaggaggaagaagaacgtgtaccgcggcgtgcggcatcggccgtgggggaagtgggcagcggagatacgcgacccgcgccgcgcggtgcgcaagtggctcgggacgttcgacaccgccgaggaggccgccagggcgtacgaccgcgccgccctcgagttccgcggcgcgcgcgcgaagctcaacttcccgtgctccgagcctttgcccatgcccagccaaagaaacggcaatggcggcgatgctgtcacggcggcgacgacaacggcagagcagatgactccgactctgtcgccgtgcagcgcggatgccgaggagacgacgacgccggtggattggcagatgggcgcggacgaagccggcagcaaccagctctgggatggcttgcaggacctgatgaagctggatgaagcggacacctggttcccgccattttccggtgcagcgtctagtttttga

SEQ ID NO: 11180 - DNA, 807 bp, Oryza sativa
  Clone ID: TFbOSC404645j.C1.o13.fg
atggtcaccgcgctagcccacgtcatccgcgccgcccccgacctgcacctcccccaccacccatcctcctccgcctccgccgccgcccacccgcagcaggcttcttccttctacccgaccgccgccgccgccgcctcctcgccgtccgaccagctcgccgccgccgccgctgccgaagagcaagggaggaggcggcactacagaggtgttcgacagcggccatgggggaagtgggcggcggagataagggacccgaagaaggcggcgagggtgtggctggggacgttcgacacggcggaggacgccgccatcgcctacgacgaggcggcgctccggttcaaggggaccaaggccaagctcaacttccccgagcgcgtccagggccgcaccgacctcggcttcctcgtcacccgtggcatcccccccgccgccacccacggtggcggctactacccctcgtcgtcgccggcggcgggggcatgccccccgccgcggcagcagcagacggtcgtgccgtacccggacctcatgcggtacgcgcagctgctgcagggcggcgtcggcggcagttacatgccgttcggcggcgccgcgacgatgtcgtcgtcgacggtgtcgtcctcgtcggcgccgcagatactcgacttctcgacgcagcagctcatccgggccggcccgccgtcaccaatgccatcgtcgggctccggctcggcgaccgcggcggcgtcgtccacgacgtcggcgtcgtcgcccggtgcatggccgtacggcggctcggagcgcaagaagaaggattcgtcgtcgtga

SEQ ID NO: 11181 - DNA, 711 bp, Oryza sativa
  Clone ID: TFbOSC401008j.C1.o5.fg
atggagaagaacaccaccgccatggggcaattgatgagctcctccgcgacgacggcggcgacggcgacggggccggcgtcgccgaagcggccggcggggcggaccaagttccaggagacgaggcacccggtgttccgcggggtgcggcggcgcgggcgcgcggggcggtgggtgtgcgaggtgcgcgtcccgggcagccgcggcgaccgcctgtgggtcggcacgttcgacaccgccgaggaggccgcgcgcgcgcacgacgccgccatgctcgccctgtgcggggcctccgccagcctcaacttcgccgactccgcctggctgctccacgtcccccgcgcccccgtcgcctccggccatgaccagctgcccgacgtgcagcgcgccgccagcgaggccgtcgccgagttccagcgccggggaagtactgccgccactgccaccgccacctccggcgacgccgcatccaccgctcctccgtcgtcgtcgcccgttctgtcacccaacgacgacaatgcctcgtcggcgtccactcctgcggtggcggcggcgttggaccacggcgacatgttcggtggcatgcgcaccgatctgtacttcgcgagcttggcgcagggtctgctcatcgagccgccgccgccgccgaccaccgctgagggtttctgcgacgacgaaggatgcggcggcgctgaaatggagctgtggagctag

SEQ ID NO: 11182 - DNA, 639 bp, Oryza sativa
  Clone ID: TFbOSC400832j.C1.o8.np
ctgtactaattaaggtggactatgacaattcttggtccaaccattttcagatatttctcatccggcgggaggtgcacgcggtttcgcggggtgcagaagcggccatgggggcggtacatggcggtgatctgtgacccggtgaagaaggcgcgggtgtggctggaaacctatgactccgccgaggaagacacataggcctacgacgctgcgcgggcctacgatgtggcagcgcgggcgctccgggtcccaaggccaagaccaacttcactctctccctccctcacgcccagccccagctccaccaccatcagcaccaccaccaccacctcacctacccaccctactccgctgccatcgctagctaggccagccaccaccagccttagctccaccattgagtcattcggcaccaggccgcgaccggtgctccttccacggctttcgccatcgtagatccttgatggtgactgccacaatgattgcgggttgtcggcgtcgatggttgatgaggactgcacggacgccaccgcctcactgtcgtgtcagctcacgtttcagtttgacctcaacctgccgcctatcggcgccatttggctagatcgaggtggttggcgactccatatcaccgcaaggcgttta

SEQ ID NO: 11183 - DNA, 1089 bp, Oryza sativa
  Clone ID: TFbOSC400736j.C1.o6.fg
atgtgcggcggcgccatcctctccgacctcatcccgccgccgcggcgggtcaccgccggcgacctctggctggagaagaccaagaagcagcagcagcagaagaagaagaacaagggcgcgaggaggctgccactgcgccaagaggaggaggatgatttcgaggccgacttcgaggagttcgaggtggattccggcgagtgggaggtggagtccgacgccgacgaggccaagccgctcgccgcgccccggagcggcttcgctaaaggtggattgaaaaacactactgttgctggtgctgatgggcctgcagcaaggtctgctaaaaggaagagaaagaaccaattcaggggtatccgccagcggccatggggcaaatgggctgcggaaatcagagatcctcgcaaaggtgtccgcgtctggcttggcaccttcaactctcctgaggaagctgccagagcttatgatgctgaagcacgaaggattcgaggcaagaaggccaaggtcaatttcccagatggggctccagtggcttctcagaggagtcatgctgagccctcctccatgaacatgcctgctttcagcatcgaagagaagccggccgtcatgtcagcaggcaacaaaaccatgtacaacacaaatgcttatgcctaccctgctgttgagtacaccttacaggagccatttgtgcagattcagaatgtctcatttgttcctgcaatgaacgcgattgaggatactttcgtgaacctgtcctctgatcaagggagcaactcctttggttgctcggactttagccaggagaatgatatcaagacccctgacataacttccatgcttgcaccgaccatgacaggtgttgatgactccgcattcctccagaacaatgccagtgatgcaatggtacctcctgtgatggggaatgctagcattgatcttgctgacctggagccgtacatgaaatttctgatcgatggtggttcggatgagtcgattgacacccttctgagctctgatggatctcaggatgtggccagtagcatggacctttggagcttcgatgacatgcccgtgtcggccgagttctactga

SEQ ID NO: 11184 - DNA, 714 bp, Oryza sativa
  Clone ID: TFbOSC401539j.C1.o112.fg
atgtctctctccttggggtttagcgccggcgccggcgtcggtgccgatcgcctcgccgccgcgcccgcgctccaggccgccggtgctctgccgccacgcgtggacgtgtctctgtcgctggcgcgcgcggccaacgggcagccgtcgtcgtacctcccgctcaacgagaacgactcgctggacatggtcctcttcgacgtcctccgcgaggcctccgcggtggcggcgctgtcgtcgtcgtcgtcgtcgtcgccggagctgggcgcgcggacgacggcgccggtggtcgccggccaccccgccgggcgcaagggtggcggcggcggaggcggaggcaggggagcggcggcgaggggcggcgccgctggcgggcggcactaccgcggtgtgaggcggcggccgtgggggaagtacgccgcggagatccgtgacccgacgcggcacggcgcgcggctgtggctcggcaccttcggcacggccgaggaggccgccgcggcgtacgaccgcgccgcgttccgcatgcggggcgccaaggcgctgctcaacttcccgccggctgtcgccggtgacggcgcccgtcgcggcgccgccgcggccgcgaagcaggtcggcatgagcgacgtggtaccaagagcatgtcatgtagtttgttactctgtgcttagtgctcacattttttatgatatctttcgtggtgtgataccaattccgtga

SEQ ID NO: 11185 - DNA, 312 bp, Oryza sativa
  Clone ID: TFbOSC6566j.C1.o6.np
tatctcctaacaacagtccattactacgaatctgacgagcaagccaattcgatcaccgaaagcaaaggggaaataatggatcaccgacgcagcgagagcggagacgagcgaactcggcgtggcgttgtccgtatgcgcgtgccgtgtcagcgaaatggagaaaaacggaaaggaaaaaaaatcgaatttattttcgtggcggtccagcgtggcggcggtgtgtggccaggccgcatctgcggcgagatggagaaggaggtagaggaggaggaggaggaggaggaggcggaggcgagtagaaagaagggagaa

SEQ ID NO: 11186 - DNA, 1473 bp, Oryza sativa
  Clone ID: TFbOSC410566j.C1.o16.fg
atgtcgccgccgacgaacggcgccatctcgctcgcgttcccgcccatggggccgctgccggcggacgcgctgatctacccgttcgacggcctctcctacgacgacttcgtcctccctgtcgccgccgcaccgcagcatccgctccccgtcgccgtcgccgaccccgcgcccctcctcctcctgccgccgccgtcctcctgcacctgcaacggcgccagcagcggcatgggcgccgttgcgccgcgcacgttggctctgggcgccaccaccgacggcagcgtgatgacccccaccagctggggcagcgacggcggcggcggcggctcctcctccgcgcgggccgtgcgctcgccgtcgccggtgctgccgctggtgcagggcaccggccagaggacctcctgctaccgcggcgtgaccaggcacaggtggacggggcgatacgaggcgcacctgtgggacaacacgtgccggcgagaaggccagaagcgcaagggccgccaagttacgactccagtagagttgtttctactgtccgtccttgttgattggcatttggcaacaaacttttgtactttactcgatacgcttgcagagttgcacagtgcagtggttccttttttttttttaagaaaggactaccagtggttccatgatagtgatactatgacatgctgcttctttgcattcagtggctatgacatagaagataaggctgctagggcatatgaccttgctgctctgaaatattggggtgctaatgctaccactaacttccctaaagaaagttacgtgaaagagattgaggagatgcaaaagatgagcaagcaggagcttgtagcctcactaaggaggaagagcagtggcttttctagaggtgcatcgatctacagaggtgtaacaaggcaccaccaacatggccgctggcaggcaagaattggtcgtgttgcaggcaacaaggacttgtatctcggcacctttgcgaccgaagaagaagcagcggaggcgtatgacgttgcagcgctgaagttcaggggcgccaacgccgtcaccaacttcgagccaagccggtacaacctggaagcgatctctcagagcgacctcccgatcagcgtgtccgggaggcggcacaacagcagcagcaacagcaacaatccagcaccagaagcaggaggccaaatcactctgatgagcagcccgccgatctcccagcagtcgagcagcgcgccaccgtatctcatccacaacctcctgcagttccagccatgtggtcccccatacgcaccaccaccaccaccaccaccaccaccaccaccaccacaggctcttccgctgccaggatcgtacaactttgcagagccagtaggcttctactggccctacggcgatggggaggagcagaaggttcagctcaacagcaacatggttggaatggctagtggtggctttcttcatctggccaatgctgccaactga

SEQ ID NO: 11187 - DNA, 1254 bp, Oryza sativa
  Clone ID: TFbOSC415455j.C1.o7.fg
atggaggatttcctcggcggcctaggcggaggcggcggcgccgtcgccgccgctccggcagctgccccggaggatcagctcagctgcggcgagcttggtagcatcgccgccgggttcttgcgccggtacccagcgcctgagaacgccggcggggtgaccatcgcaatggcgaccgacgcggcggcggagctggccgatccggcgaggaggaccgccgagacgttcgggcaacggacgtccatctaccgtggtgtcactaggcaccggtggacggggaggtacgaggcgcacctgtgggacaatagctgccgccgggaaggccaaagccgcaaaggccgccaaggaggttatgataaggaggagaaggccgcaagagcttacgacctcgccgccctaaagtactggggtccaaccaccacgacgaacttccctgttgccaactacgagacggagctggaggagatgaagtccatgacgcggcaggagttcatcgcgtcgctgcgcaggaagagcagcggcttctcaagaggggcttccatctacagaggagtaacaagacatcatcagcacggccggtggcaagcgaggatcggcagggtggccggaaacaaggacctgtacttgggcactttcagcacgcaggaggaggctgccgaggcgtacgacattgccgctatcaagttcagggggctcaacgccgtcaccaacttcgacatgagccgctacgacgtcgacagcatcctcaacagcgacctgccggtcggcggcggagccgccacgcgcgcctctaagttcccctctgacccatcgctgccgctgccgtcgcctgccatgccaccgtcggagaaggactactggtccctccttgccctgcactaccaccaccaccagcagcagcagcagcagcagcagtttcctgcttctgcatttgacacctacggctgctcctccggcgtgaacgtggacttcacaatggggactagcagccacagcggcagcaacagcaacagcagcagcagcagcgccatatggggcacagccgccggcgcagcgatggggaggcagcaaaacggcggcagcagcaacaagcagagcaacagctactccggtaacaacattccttatgctgctgcagcagctatgacttctggatcagcactctacgggggctccaccggtagcaacgggacatgggtggcgagtaacacgagcacggctccccacttctacaactatttgtttgggatggagtag

SEQ ID NO: 11188 - DNA, 1077 bp, Oryza sativa
  Clone ID: TFbOSC417508j.C1.o10.gm
atggagcttctagcatacaaggaaggaattgctttggcgattcaatggactctaaaaccgatcgtggtggaatcagactgcttggaagcggcgcatgctaaagttggggtggcggcggcagaaatattagtcccacggcgaccggtgataacggggaaagggatgtggcacctgcaactcttccacctgcacgactctaggttggataaggtgttcattgttgttgcattgattatgttcgcctaccgcgagatcaccatggtctggttacgggtgctgtcgcctcctagctggactgccctctcgccccccgtggcagctggctctagggttggtggccatcttccagtgctgagtatggatttctacttcttctcctcgtcggcgccggcgccggagaagaagacgaggcggcagcagcagcagcagcagcagcgggagcaggaggggggtggaggagggaacgaggcgagatacctcggcgtgaggcggcggccgtggggccggtacgcggcggagatcagggacccggcgaccaaggagcggcactggctgggcacgttcgacacggcggaggaggccgccgtcgcctacgaccgcgccgcccgcaccatccgcggcgccgccgcgcgcaccaacttcgcctacccggacctgcccccgggctcctccctcacgccctacctctcccccgacctctccaccaacgacctccaccgccactactacggcgccggcgccggcgccgacacccagaccgccgccgcgctgccggcgccggctcagcccgcacacggcggcgacgcccaggaaatggcttacggtggcggtggcggtcagaatgtgggtggcgtgttcgacgtcgtcggcggcggcggcggcgcggcgtggtgcgacgcgtcggagctggagttcggcgggtacgacgacgcgggcgcgtcggcggcggcggcggcggtgtacttcgaggaggggtacgtgcacagcccgatgttctcgccgatgcccgcggccgacgaggtcgccgccgacggcttccagctcggcgggtcgtcgtcctcctcgtattactactga

SEQ ID NO: 11189 - DNA, 629 bp, Oryza sativa
  Clone ID: TFbOSC900102j.C1.o14.np
tggtactgctggaactacggctgtgcgacctgcaggcacccggtcatctagtttccatggtgtgaccaggcatagatggagtggaaaatatgaagctcatctgtgggacagttcgtgcagaatggaagggcggagaagaaagggaaggcaagactatgcaggaagttatgataccgaggaaaaagctgccaggtcatatgatgttgcagctcttaaatactggggccaaaatacaaagctgaatttctcggtttcagaatacgaaagggaactggaggacataagggacatgtctcgagaggaatgcgtaacatacctaagaagaagaagtagctgcttctcaagaggggcttctatttatagaggagttactagaaggcagaaagatgggaggtggcaggcacgcataggactggttgctggaacaagagacatttacctgggaactttcaaaactgaggaagaagcagcggaggcttacgacattgctgctattgagatccgtggcaaaaatgcggtgaccaactttgatcgaagcaactacatggagaaggcacttctttatggaatattttattaggaacgcagcgttcctaataaattaaaagactataaaaacctagtggtga

SEQ ID NO: 11190 - DNA, 1452 bp, Oryza sativa
  Clone ID: TFbOSC407922j.C1.o4.fg
atgcgcagcagcagcagcaaggccacacccacaacctcccctgcttttcgcgtcctctgctctcctcctagtgccaagagtccaagacccaacaagggggaggacggaggaggcgaggcagaggcatctcaccgaagggggaagggcgacgccatgtgggacctcaatgactcgccggcggccgaggccgcgccgccgccgctgtcgccgtccgccgacgactccggcgcctcctcgtcctcggccgccgccgtcgtcgagatacccgacgacgccgacgacgactcggccgctgtggttgtcgtcacgcgccagttcttccctccggccgtcccgggcggcggcggcgaccccgcccccgggaacgcgcgcgccgggtggctccgcctggccggagccgccccgccggtcgctgcaacggggccggcggcgtcggcggcggtgtccaagaagagccggcgcgggccgcggtcgcgcagctcgcagtaccgcggcgtcacgttctaccgccgcaccgggcgatgggaatcgcacatatgggattgtggcaagcaggtctatttgggcggatttgacactgctcatgcggcggctcgggcgtacgatcgggcggcgatcaagttccgcggcgtggaggccgacatcaatttcagcttggaggattacgaggatgacctgaagcagatgagcaacctgaccaaggaggagttcgtccacgtgctccggcggcagagcacggggttcccccggggaagctccaagtacaggggcgtgacgctccacaagtgcgggagatgggaggctcggatgggccaattcctcggcaagaagtacgtctacttggggctgttcgacaccgaggaggaagctgccagggcgtacgaccgcgctgccatcaagtgcaatggcaaggatgcggtgacgaacttcgatccaagcatttacgccggggagttcgagccgccggcagcggccacgggtgatgccgccgagcacaacctggacctctcgcttgggagctcggcgggctccaagaggggcaacgttgacggtggcggggacgacgagatcaccggcggcggtggcggtggcgcgggctccgaccagcgcgtccctatggcgttcgaccttgactggcaaacggcggcggcgaggagcaccaaagctaagttcttgagcaatggtgatccggggacagcgggaggcctgtcactgacgatcggcgcaggcatggccgggcactggcctccccagcagcagcaggggtggggcaacgccggcggcatgagctggccgcacccgccgcacccgccgccgccgccgaccaacgccgcggccgccgcaaccgctacagcagctgcagcatcatcacgattccctccctacattgcgacgcaagcctcaacctggctgcagaagaacgggttccattccctgacccggcccacctaa

SEQ ID NO: 11191 - DNA, 1416 bp, Oryza sativa
  Clone ID: TFbOSC900281j.C1.o2.fg
atggagtcgttctctttccacgtctttccccacactgccaagagtccaagacccaacaagggggaggacggaggaggcgaggcagaggcatctcaccgaagggggaagggcgacgccatgtgggacctcaatgactcgccggcggccgaggccgcgccgccgccgctgtcgccgtccgccgacgactccggcgcctcctcgtcctcggccgccgccgtcgtcgagatacccgacgacgccgacgacgactcggccgctgtggttgtcgtcacgcgccagttcttccctccggccgtcccgggcggcggcggcgaccccgcccccgggaacgcgcgcgccgggtggctccgcctggccggagccgccccgccggtcgctgcaacggggccggcggcgtcggcggcggtgtccaagaagagccggcgcgggccgcggtcgcgcagctcgcagtaccgcggcgtcacgttctaccgccgcaccgggcgatgggaatcgcacatatgggattgtggcaagcaggtctatttgggcggatttgacactgctcatgcggcggctcgggcgtacgatcgggcggcgatcaagttccgcggcgtggaggccgacatcaatttcagcttggaggattacgaggatgacctgaagcagatgagcaacctgaccaaggaggagttcgtccacgtgctccggcggcagagcacggggttcccccggggaagctccaagtacaggggcgtgacgctccacaagtgcgggagatgggaggctcggatgggccaattcctcggcaagaaatacgtatacttggggctgttcgacaccgaggaggaagctgccagggcgtacgaccgcgctgccatcaagtgcaatggcaaggatgcggtgacgaacttcgatccaagcatttacgccggggagttcgagccgccggcagcggccacgggtgatgccgccgagcacaacctggacctctcgcttgggagctcggcgggctccaagagggacaacgttgacggtggcggggacgacgagatcaccggcggcggtggcggtggcacgggctccgaccagcgcgtccctatggcgttcgaccttgactggcaaacggcggcggcgaggagcaccaaagctaagttcttgagcaatggtgatccggggacagcgggaggcctgtcactgacgatcggcgcaggcatggccgggcactggcctccccagcagcagcaggggtggggcaacgccggcggcatgagctggccgctgccgccgcacccgccgccgccgccgaccaacgccgcggccgccgcaaccgctacagcagctgcagcatcatcacgattccctccctacattgcgacgcaagcctcaacctggctgcagaagaacgggttccattccctgacccggcccacctaa

SEQ ID NO: 11192 - DNA, 638 bp, Oryza sativa
  Clone ID: TFbOSC100759j.C1.o1.np
atcgccatgatctatctccattctccagctagcttctcatgtagtaataagccgatggcaaattcgtccaatcgatcggcaatacaacgagtacgtcgaagaggagccaagtagtcagtgaggccgtacaagggggtgaggatgcggagctgggggtcgtgggtgtcggagatcagggcgccgcaccagaagcggcggatctggctgggctcctacgccacgccggaggccgcggcgcgcgcctacgacgccgcgctgctctgcctcaagggctccgacgccgtcctcaacttcccctcctccgcctcgtctcgccgccgcctcgacatccaccgggggggcacggactcggcggcgggcgacatgtcgccgaggtccatccagcgcgtcgcggccgccgcggcgggggcattcgacgccgccgccgccgccgtcgtcctccggcggcggtgacgtgctggaccacgcgacgacgccgtcgtcgtcgtcgtctgccgcggccaacgtttgctcgccgccgctggagggggaccatgagctgtggacggagctggacgcgttcgcgtcgccgaagttcatggatctaatggccccggcggcacggcgttctcgtcgccgtgggaggagcccgaggagga

SEQ ID NO: 11193 - DNA, 855 bp, Oryza sativa
  Clone ID: TFbOSC401685j.C1.o143.fg
atggagcggggggaggggaggaggggagattgctccgtgcaactttgtggaattattgagttacctcattgggtcaggaagaagagaacgcgaaggaaaagcgatggccctgattcaatcgctgaaaccatcaagtggtggaaggagcaaaaccagaagctccaggaggagaatagctccaggaaagcgccagccaaggggtccaagaaagggtgcatggctgggaaaggaggtccggaaaattcaaattgtgcttaccgcggtgtcaggcaacggacatggggtaagtgggtggctgagatccgtgaaccaaaccgtggaaggcgcctatggctaggatcatttcctactgcgctggaggctgcgcatgcatacgatgaggcggcaagggcaatgtatggtcccacagcacgtgtcaattttgcagataattccacagatgccaactctggctgcacatcagcaccttcattgatgatgtctaatgggccggccactataccttctgatgagaaggatgagctggaatctcctcctttcatcgtggctaatgggccagctgtgttgtatcagcctgataagaaggatgtgttggaacgtgtagtccctgaggtgcaggatgttaaaacagaagggagcaatggcttgaaacgtgtttgtcaggagcggaagaatatggaggtatgtgaatcagaagggatcgttttacacaaagaagtgaacataagttatgattatttcaatgtccatgaagttgttgagatgataattgttgaattaagtgctgatcagaaaacggaagtacatgaagagtaccaagagggagatgatgggtttagccttttctcctattag

SEQ ID NO: 11194 - DNA, 1077 bp, Oryza sativa
  Clone ID: TFbOSC401827j.C1.o10.fg
atgccgatgccggcggcggctggggaggggccgtggccgcgccgcgcggcggatctcggggtggcgcagagccagaggtcccccgccggcgggaagaagagccgccgcggcccgaggtctcggagctcccagtacaggggcgtcaccttctacaggaggaccgggcgatgggagtcgcacatctgggactgcgggaagcaggtgtacctgggtggtttcgatacagctcatgccgcagcgagggcctatgatcgcgcggcgatcaagttcagaggcctcgacgcggatatcaactttaatctgaatgactatgaggacgacttgaagcagatgcgcaattggaccaaggaggagtttgtgcacatacttcggcgccaaagcacaggatttgcaagggggagctcaaagtaccggggtgtgacactgcacaagtgtggccggtgggaagctcggatgggccagctgctcggcaagaagtacatctatctaggattgtttgacagtgaaattgaggctgcaagagcatatgaccgggcagctatccgcttcaatggaagggaagctgttactaattttgatcctagttcttatgatggagatgttctacctgaaaccgacaatgaagtggttgatggagacatcattgacttaaatctgagaatttcacagcctaacgttcatgagctgaaaagtgatggtaccctaactgggttccagttgaattgtgattctcctgaagcttcaagttctgttgttactcagccaataagtcctcagtggcctgtgcttcctcagggcacatcgatgtcccagcatccacatttatatgcatctccttgtccgggcttctttgtgaacctcagggaagtacctatggagaaaagacctgagttgggtccccagtcgttccctacttcgtggtcatggcaaatgcagggctcccctttgccattactccctactgcagcatcatcaggattctctacgggcaccgtcgccgacgccgcccgctcgccttcctcccgcccccatccatttcccggccaccaccagttctacttccccccgaccgcctga

SEQ ID NO: 11195 - DNA, 651 bp, Oryza sativa
  Clone ID: TFbOSC900301j.C1.o3.fg
atggcggcgctcttcgaggccgcggagacggcggccatcgtggctgcgctgacgcgcgtcattgccgacggcgggcgtggaggcagcggcgccggcgtgccgccgcccgcgccatcgttggtggtgccgccgctggcgggaacgggcggcgggcggcgcgtcgacgttgcgcgggaggaggagatggtcggcgtcgtctccgcgggagatcacaccggcgaggcaagcgtggccgcggcgggggtggtggtggcggcgccggcgacagcgcgcaggtaccgcggggtgaggcggcggccgtggggcaagtgggcggcggagatcagggacccgaggaaggcggcgcgcgtctggctgggcaccttccgcaccaccgaggacgcggcgcgcgcctacgacgccgccgtgctccgcttccgcgggcgccgcgccaagctcaacttccccgaggaggcgtcccgcccgcgccgcccgtggaagggtcacgacgtcgatcacatgtcctgctcgccaccatcgatcgcgaacgctcgctttctgggttcgtggatcttcggacctccgccgccgtcgcggtccgtcgcggcggcgacaacgactctgcttggtgggagccatggaagcaacggagcagataatgggagggaatag

SEQ ID NO: 11196 - DNA, 831 bp, Oryza sativa
  Clone ID: TFbOSC405795j.C1.o6.fg
atgtctccggcggactccctcgccgccggcaggagccgccgtgttggggctagcatgcctcggcccaagcgtgtccgcgtctacttcgtggacgccgacgccacggacaccgactcctccggggacgagcgctccaggccgcgcgtccgggaggtcatcgacatcgacgtcggggccgcctcgccggcgccggcgccgaagcacccgaggcggctggttccgacggcgacggcggcgctggcccggcggcgcgcggggatggcggcgagccggcggttccgcggcgtgcggcggcggccgtggggcaggttctcggcggagatccgcgacccgagcctgcagaagcggctgtggctcggcaccttcgacaccgccgaggaggccgccgccgtgtacgacgacgccgcgctccgcatcaagggctcccacgccgtcaccaacttcccctccgactccgacaccccctccgccaaggccaagcagatgaagctccaccctcgccgacacaccaccccggacaagaccccaagctcttccaccgccgccgccgccaaggcctccgtccccgatccgacgccggcgccaccggaggaggaccgcgccaacgacagctcgttcaacccgttcgcgtcgccgacctccgtgctccggtacgcggcagcggacgaggtgaccgcgccatccttcgagcacctcctcgtcgagctgggcgacctctcggcgccgccgccttccaccaaggcggcggagttcgactggctgccgtggtgggaaggggaggacttcgtgacggcggggctgacggcgagcaacgccgtcagcgtgaaatga

SEQ ID NO: 11197 - DNA, 957 bp, Oryza sativa
  Clone ID: TFbOSC410095j.C1.o5.fg
atggagagctacgggaggaagcgggcgtggaagaaggggccgacgagggggaagggcgggccgcagaacgcggcgtgcgagtaccgcggcgtgcggcagcggacgtgggggaagtgggtagccgagatccgcgagcccaacaagcggacgcgcctctggctcggctccttcgccaccgccgaggaggcggcgctcgcctacgacgaggccgcgcggaggctctacggccccgacgccttcctcaacctgccccacctccgcgccgcctccgccgccgccgcgcaccagcgcctcaggtggctcccggcctccgccgccgccgccgccgcaagggggggcgccgccgccgtccccgcctacggcctcctcaacctcaacgcgcagcacaacgtccacgtcatacaccagaggctgcaggagctcaagaactcgtcgtcgtcgccgaccaagccgccgccgcgtacgccgacgcgcgccaacccgcctccgccgcctctccccacctcgtcgccctgctccaccgtcaccaacagcgtcggctccgcggctctgcctccgcccatgtcgtgcttccaggcgctggagcaagcgatggcggccacggcggcgatggagagcgcgccgtgcgacgacgacgccgccgtcgtgggcttcggcgccgacaagccccagctcgacctcaaggagttcttgcagcagataggcgtgctcaaggccgacgacgacggcgcgacaggcaagaacggcgccgtccacggggacgacggcgagctggcggacgcgtttggcttcggcggcagcggcgagttcgactgggacgcgctggctgccgacatgagcgacatcgcaggaggccacggcggcgcgctgggcgccaatggcgggttccagatggacgatctgcatgaggtcgaacagtttggcgggtgcatgcccatccctatttgggacatttga

SEQ ID NO: 11198 - DNA, 885 bp, Oryza sativa
  Clone ID: TFbOSC22414j.C1.o4.fg
atgccgccctgcgccgccgggaagcgcagctccatctaccgcggcgtcacccggcataggtggacaggccgatatgaagctcacctctgggataaaagcacatggaatcagaatcagaacaaaaaagggaaacaaggtgcatatgatgatgaagaggctgcagcaagagcttatgaccttgctgcattgaaatactggggagctgggacacaaataaactttcctgcttatgttcattatgtatttgcttatttagggaaggacatcacgctggatgggaaatttgcaggaacctttggcttagagaggaaaattgatctgacaaattacataaggtggtggctcccaaaaaagacacggcagtcagatacatctaaaatggaagaggttactgatgaaatccgtgctattgaaagttcaatgcaacggactgagccttataagtttccttcccttggcctccattctaactcaaagccctcttccgtggtcctatcagcatgtgatatcttatctcagtctgatgccttcaaaagcttctcagaaaaatctacaaaactatctgaagaatgtacttttagcaaagaaatggatgaaggaaagacagttaccccagtacctgcaactggacatgacacaactgcagttaacatgaacgtgaatgggttgcttgtgcaaagagctccatacacattgccctctgttactgcacaaatgaaaaatacctggaaccctgctgatccttctgcggaccctcttttctggaccaacttcatcctgccagcaagtcaacctgtcacgatggcaacaatagcaacaacaacgtttgcaaagaatgaggtgggtgataacatcctgcacgtctatgggtttccttcttcctag

SEQ ID NO: 11199 - DNA, 260 bp, Oryza sativa
  Clone ID: TFbOSC24042j.C1.o1.np
gtgctttttcttattatttcactacacctacgacatatttttaagagtaaagttcatcaccgctccctaaacttatattgctgtgtcatcccggtccctaaactcgcaaatcgaccgttcagatccttaaacttgttcgactgtgtcatcccggtccccaaacttgcagatcactcgtttaggtcctccaacttgttcagttgtatcaccccggtccctaaacaggtttttgaattaaaactgtttagggtcctaaaata

SEQ ID NO: 11200 - DNA, 570 bp, Oryza sativa
  Clone ID: TFbOSC401180j.C1.o8.fg
atggtgccgccggcggcgcacgcgccgaagaacctggggctgaggggggtgcggcgccggctgtggggcaggtgggcggcggagatccgcgtgccgcggggccaccgcgcggccgcgaggctgtggatcggcacgttcccgtccccggcggcggcggcgctcgcctacgacgccgcgctctactgcttccacggcggcgcgccgccggggaaccgcgccttcaacttcccgcacgcgccgcgcctccgcatcgacgaccgccgccgccacgcgctcacgccgggccacgtcagggccatcgccgagaggtacgcccacgacgtcggctccgtcctgttccgcccgctccctccgccgccgccgcccgtcgccgccgccgccgtccccgtgttcgccgcacctgcaccgcccatggcgccggcgccggccaaccatgctgccgatccttactactgcaacgagcctgacaccaccacagacgaggacgtcatggctgcggctgaccgcctcctctccatggacatcgaagaggtcgccgctttgatcgccattgttcagcaaggagagtga

SEQ ID NO: 11201 - DNA, 849 bp, Oryza sativa
  Clone ID: TFbOSC900397j.C1.o2.fg
atggcgatggagggggaggtggagggtggtgggaggaggcgggtggtgcggatcatcttccgcgacgaggacgcgacggattcgtcgagcagtgaggaggagggggagggggaggtggtggcggcgaggcgggtggtggtgaagcggacgcggctgcggtgccaggaggtggagaggaggttcaccggcgtgcggcggcggccgtgggggaggtgggcggcggagatccgcgaccccaaggagaacgggcggcgcgtgtggctcggcaccttcgacaccgccgaggccgccgccgccgcctacgacgacgcctgcctccgcctccgcggccccggcgccgccctcaacctcccctcccgccgctgcgtcgctcccgctccgcctccaccgcctcctccgccgccgccgacggccgaggagaagaagctgctgctgttcccgccgccgctgcctccgaggaagaaggcgatgctattcccgctgccgctgccgccgaggaagaagccgctgctgtacccgccgccgctgccgccgaagaagaagccgctaccaccaccatcaccaccgccacagccgccgctgccggagaaggagaacaccccgctcccgccgctgctgctgcctccaaagaagaagccgcttccgccgccgtcaccgacagcggcagcgaaggaggagcccatcgagctcgagcatgcggcgccgccgccgcctttcgtgccccggccggtgtggcccctcctggccagcggcggcggcgggaagcggaagaagcagtcgggctgcggcggccgcatccccgccctcaacaccgccgccgccgccgtcgaggagaccggccgcgcctga

SEQ ID NO: 11202 - DNA, 336 bp, Oryza sativa
  Clone ID: TFbOSC6563j.C1.o1.gm
atgagccgggcggagtgcggcggcggcgaggaggaggagcggtgcaggtacaggggcgtgcggcggcggcggtgggggaagtgggtgtcggagatccgggtgcccggcacgcgggagcggctgtggctggggtcctacgccacgccggaggccgccgccgtcgcgcacgacacggcccaaatgatgacactctatcatctgaatcagagttttcatgtatcaaattataatgatgactatcatccgatgcgcactgtgcttttggatgcaatgcagctaccaattggcagtgttctggtgatccagacttgtatgcacttgcacttccatctgtga

SEQ ID NO: 11203 - DNA, 1029 bp, Oryza sativa
  Clone ID: TFbOSC414138j.C1.o23.fg
atgtgtggaggatccattctcggcgaccttcacttgccggtgcggcggacagtgaacgccggtgacctgtggggagacgccggcaagggtagagatggtggcgacggcttgaagaagaggaaggggagttcttgggatttcgatgttgattgcgatgatgatgatgatgatgactttgaggctgattttgaggagtttgaggatgactatggcgatgatgatgatgtgggtttcggggacgacgaccaagaatccgacatgaacggtctcaagctcgccggattcagcaccacgaagctcggcctcggcggcagcaggaagaggaagacgcgataccgagggatccggcagcggccatgggggaaatgggcggcggagatcagggacccccgcaagggcgtccgcgtctggctcggcacgttcggcaccgccgaggaggccgccatggcgtacgacgtcgaggcacgccgcatccgcggcaagaaagccaaggtcaacttccccgacgccgccgccgccgccccgaagcggccacggcgttcttcggcgaagcattcgccgcagcagcagaaggccaggtcgtcgtcgtcgtcgccggcgagcctgaacgccagcgacgccgtgtccaagtccaacaacaaccgcgtcagctcggctgggagcagcaccgacgccaccgccgccgccatcgccatcgacgacggcgtcaagctcgagctgctctcggagacggatccttctccgcccatggccgccgccgccgccgcgtggctcgacgcgttcgagctgaacgatcttgacggatcaagatgcaaggacaacgcattcgatcaccagattcacaaggtagaagcggctgtcgctgatgaattcgcgttctacgacgatccgagctacatgcagctgggttaccagctcgatcagggcaactcgtacgagaacatcgacgcgctcttcggcggcgaggccgtcaacattggtggactctggagcttcgacgacatgccaatggagttcagagcttattga

SEQ ID NO: 11204 - DNA, 606 bp, Oryza sativa
  Clone ID: TFbOSC22139j.C1.o2.fg
atggcgttgtcggagccggacctcgcggcggagacggaggcgatcgtgtcggcgctcacgcacgtcgtcgcgtacggcggcggcggcccgccgccgagcgaggagaccgccgcgtcgcgggcggcgcgggtgtggctcgggacgttcgccaccgccgaggacgcggcgcgcgcctacgacgccgcggcgctccgcttccgcggggggcgcgccaggctcaacttccccgaggacgccgccgcggccgacgagcgacgcgccacggacgccgcggccgccgcggcggcggcgtcgtcggcgcccgccgcgctgctggagtcgcagccgggcgacgtcgcggactgcctcgactactccaggatcctggcgggggcgccggagcggccgacgagctccaccgtcccggacgggttcttcggcggcggcgggaacggccgcttcttgcactcgtggagcattggcacgtcgccgtcgccgtcgggctcgggctcgggcggagccggcggtggcggtggcggtggcggtggcggcgcccctgttcgtcctctgtttcatggcggtaacggctgggagcaacgcggtgacagtgcatacaacggtttctag

SEQ ID NO: 11205 - DNA, 262 bp, Oryza sativa
  Clone ID: TFbOSC100668j.C1.o5.np
cgcgcaggtaccgcggggtgaggcggcgaccgtggggcaagtgggcggcggagatcagggacccgaggaaggcggcgcgcgtctggctgggcaccttccgcaccgccgaggacgcggcgcgcgcctacgacgccgccgcgctacgcttccgcgggcgccgcgccaagctcaacttccccgaggaggtgcgccattgccgacgacggacgtggaggtggcgcgacgttgggcggcggtgcgccgctctgcccgcgccgtcgtt

SEQ ID NO: 11206 - DNA, 939 bp, Oryza sativa
  Clone ID: TFbOSC101030j.C1.o20.fg
atgtgcggcggtgcaatcctcgccgatttcaccccggcgagggtgccccggcggctgaccgccgccgagctcctgccggtgaccccgactccccccgccgccgagaggagaaccacccggaagcgcaagtccgacgtcgacttcgaggcggagttcgagcttttcgaggacgacgacgacgacgatgagttcgagctttccgacgatggcgacgagagtttggccgtgtcattttcgtcggatgtctcctcgagctccaggccgcggcggcgcgtggcggcggcggcggccggtcgtcggaaggcgagcaagaagagcaagtacaggggcgtccggcgccggccgtcggggaggttcgcggcggagatcagggaccccaagaaggggcggcgcgtgtggctcggcacgtacggcagcgccgaggaggccgccatggcctacgaccgcgaggcccgccgcatccgcggcaagggcgcgaggctcaacttcccccgcgacggcgatggctcccctcgccggagtaacgaccggccctgctggaccatcgacctcaacctccccgcggcggccgtctccggtgacgacgacgacgccatggccgtcgacgccgcagacgcagacgcaggcagtgctggccgtgcagcagcctatgcagatcaagaagcactgagcgcggcaaagtgcaagatcaagcagtgtcctcgcgacgaacagatggcgagcgccacacctgagctcatggaggaggacgcgagcagcagcagaaacatggtgcccctgtccatggcgctgcagctgcagtatgcggcgatgatcgccgaatgcgaccgcgagatggaggagatcgccgccgtggagagggacctcgagaggcgcaggaggcaggtgttcgagcgcagaggccacctggtcaggcaggcctctcttctgctcgactga

SEQ ID NO: 11207 - DNA, 1164 bp, Oryza sativa
  Clone ID: TFbOSC400468j.C1.o6.gm
atgggcccacagtgcagtggcccgggaggaagcttcgcgcgcacgggccgctccccgacggaagaggcaattagtgaggacagagagttccagagccttttagtttctggtgttctgatctgttcttggtgtaagattattgaaggaaatctgatgcgggcgctgggagaggctccgtcgccgcagatgcagaagatcgcgccgccgccgtttcatcccggcttgccgccggcgccggcgaacttctcctcggccggagtccacgggttccactacatgggcccggcccagctcagcccggcccagatccagcgcgtccaggcccaactccacatgcagcggcaggcccagtcggggctcggcccgcgggcccagcccatgaagcccgcttcggcggctgctccggcggcggcggcggcgcgggcgcagaagctgtaccgcggcgtgcggcagcggcactggggcaagtgggtggcggagatccggctgccgcgcaaccgcaccaggctctggctcggcaccttcgacaccgccgaggaggcggcgctcacctacgaccaggccgcgtaccgcctccgcggcgacgcggcgcggctcaacttcccggacaacgccgcgtcgcggggcccgctcgacgccgccgtggacgccaagctccaggccatctgcgacaccatcgccgcgtccaagaacgcctcatccaggtccaggggcggcgccggcagggccatgcccatcaacgcgcccctggtcgccgcggcgtcgtcgtcctccggctccgaccactccggcggcggcgacgacggcggctcggagacgtcgtcgtcgtctgcggcggcgtcgccgctggcggagatggagcagctggacttcagcgaggtgccgtgggacgaggcggaggggttcgcgctcaccaagtacccgtcgttccggaggctgctcgccggcgtcgtttttgtgtccggcgtctccgatgtctatttggtcttcggaaactcaggactgaatttcatccaaaaaaactcaggactggggaagaccgaggcgacgccgacacttgaggtggagccgcggagggaggaggcggcgccggcgctggaggcgatgccgcggagggaggaggtgacgccggcgccggaggcggaggcagaggcggaggcgtga

SEQ ID NO: 11208 - DNA, 1191 bp, Oryza sativa
  Clone ID: TFbOSC900362j.C1.o6.fg
atgtgcggcggagcaatcatctccgggttcatcccgccgtcggccgctgcggcggcggcggctgcggtggccaagaagcagcagggcaggagggtcacggccgacgtgctgtggccggggatgctgcggaaggggaaggcggcggcggcggaggaggactttgaggccgacttccgcgagttcgagcgtggcatgagcgacgacgaggcggaggggggcggcggcgaggaggaggaggacgacgacgacgtggtcgtggtggtccccccgccggcggcggcgaggttcgtcgtccgtgccgcggccaaggcggcgcccccaactgcagatgggatgttgactacaaagcttgtccaacatgatggacctactgctagatcagcaaagcacaagaggaagaatcagtacagggggatccgccagcgtccctggggcaaatgggcagctgaaatccgagaccccagcaagggtgtccgtgtttggcttggaacatataacactgctgaggaggcagctagggcatatgacgctgaagcccgcaagatccgtggcaagaaagccaaggtcaactttcctgatgaaccagctgttgctcagaagctctccctgaagcaaaacgctgccaagcaagagaaactagctccacctctgaagacctgtggcgatgatgctttctttcagctaaacagttcagacaatgatttgtttgcaatgcttgcaaaggtgcctgcaaagccggcagagcctgttgatctcatgcctccagtcaaacctcttgcttccactgagacattcgagatgaacatgctctctgatacgagcagcaactcatttggctcttcagactttggttgggaggatgacaccctgaccccagactacacttcagtcttcgttcctaatgctgccatgccagcatatggtgaacctgcttacctgacaggtggagcgccaaagagaatgaggaacaactatggtatcgccgtgccccagggaaatggcatgcctaatctcgcacaaaacatgcccaccttcgatcccgagatgaagtatttgccattaccttatgttgagagcagctcagatgaatcaatggacaaccttctgcaaaatgatgctacacaagacggggcaagcaacgagggcatctggagccttgatgagctgctcatggcagctggtgcctactga

SEQ ID NO: 11209 - DNA, 801 bp, Oryza sativa
  Clone ID: TFbOSC407938j.C1.o7.fg
atggagctccagttccagaagccaacacaagggcaatcccagcagcagcaatgccattaccaagtgccaaccgtgacagtggccaagaacaaagcgaaaaccaagtgcagcagcagtaagttcgtgggcgtcaggcagaggccctcagggaggtgggtggcagagatcaaggacaccacccagaagatacggatgtggctcggcacgttcgagaccgccgaggaggctgcgcgggcctacgacgaggccgcatgcctcctccggggctcaaacacgcgcaccaacttcgcaacgcaggctgcaccagactcgccgctcgcgtcgaggatccgcaccatcctcacccacaagaagctcaagaagagcatgccccagcctaccatcaccttcagcaccgcagtatatcaccatgctcgtagcactgtccctgctgctgcaaccagcacaagcaccagtggtgtcagccccagcagaagcaacagctcaagccttaattttgctacaaacctctctaattttgctatgagtggaggtgaagaattgcagctggcttcttcacaacaacaatatgatcagtcatgggcactcaacaccagcctactaccgattggggatggatgcgacatgtcaggcagcaatgcttgcccagtggcctcagaccaggataagatgaaggcagagaagcaaggctcccatggtatgaatggcatccaggagcaggaaacctttgatatgggtaatgatctgtgcgactccttgtgggatctgccccctatttgtcaactgtcctgcaagtattaa

SEQ ID NO: 11210 - DNA, 837 bp, Oryza sativa
  Clone ID: TFbOSC401961j.C1.o15.gm
atggcggggagggcggcgacgtggggacgcggagtgggggcgcggcgtggagcggagaaggcggcggcgcggacggtttcggcggcggttgccgtcgtggggctggcggctggaggaaggggacgacctgacagccacgccggcatgtacatcggctacacggcagacgccgccgcgtcctcctcctcctcctcctcgtcttcgtcgtcttcctcctcggagatgcttcggttcgacacgggctggcccgacgagacacctgcgccatcctccgtggcggggaggaggaggagcgcgggcggtgatcatcgtcaaggtcggggacagacggaggcggcggcggcgttcatcggggtgcggaggcggccgtggggcaggttcgcggcggagatccgggactcgacgcggaacggcgcgcgggtgtggatcggcacgttcgacagcgccgaggccgccgcgatggcctacgaccaggccgcgctctcggcgcgtggcgccgccgcggcgctcaacttccccgtggagcgcgtccgcgagtcgctccacgcgctctccctcggcgcggccgggggctcccccgtgctggcgctgaagcggcggcactcgaagcgaaagcggcgcaagaaagctgaactactcgccgccgccgccgccaccgccgcgacggcgaatgccacgccgcaaacgcggaggatcagcaagagcacggaattgactactgcgacgacggacgagcagaagcggttcgtcgtggagcttgaggacctcggcgccgagtacctggaggagcttctctggctgtcggagatcaatggtggtagtgaccctgctgactga

SEQ ID NO: 11211 - DNA, 849 bp, Oryza sativa
  Clone ID: TFbOSC413563j.C1.o9.fg
atggcgatcggagcggctccagcttccaatcagcctcatgacacgagcaacatactcgagaacgtgtgggccagcatcatgacgtcgtcgtcgtcgccggcggtgtcgtcgtcggtggcggtgtcgtcgtcggcggtgaccggtcaggaggagaattcggcgatcttgcagaggttgccgagcttggggaggtggatatccatgggcgcagaggagtgggacgagctgctgctcagcggggcggcgctcgcgtcggaatcctccggcgagctacagctcgtcgccgcctcccccggtgatcacaaccaggtcgtcggtggcggcggcggcgccaactacaggacgacggcgacggccgcggcgcggaggagctaccgcggggtgaggcggcggccgtggggcaagttcgccgcggagatacgcgacacgcggaggaggggcgcgcgggtgtggctcgggacgttcgcgacggcggacgaggccgcgctggcgtacgacatggcggcgctccgcatgcgcggccaccgcgcccacctcaacttcccgctcgccaccgtgcagaagcacctcgagcgcgacctcgccggcggccgctcctcctccgatcagacctccacccgcgcgcgccgcaggaggaggccgagagcgaacaccaccaccgatgccgcagcaagaagcgtcgtcttctccggcgtgcagaccgcgacgaactgtgatcacatggtgtcgttcgcttcagaaaaagatcaagtttcgatgcaagaatgctcgaaaagtgacgcaggagtgatcgatttcgaggagattggtggcgagtattgggattatttgttcccgcctcttgtataa

SEQ ID NO: 11212 - DNA, 296 bp, Oryza sativa
  Clone ID: TFbOSC18525j.C1.o1.gm
acgttgctagccgaccaacactcggccacacccagaccggccgtgagccgctgtggacgctccggataccgcggccgccgtcggcagccaccgccgccgacagcaccacctccaggagctcctgccgacggctgacgccgccaccgccgtgggcctcgcaccgccgtcgccaccgcgacgggcgctcctgccacgagctcgccctgctgccgccgccgccacgtcgtcgcgagctcaacaacgagctccttgaggtagctgtgcttgcggagcatgtcgatgacctcggcctttga

SEQ ID NO: 11213 - DNA, 966 bp, Oryza sativa
  Clone ID: TFbOSC101030j.C1.o17.fg
atgtgtggcggcgcgattctggctaacatcataccggccacgccgccgcggcccgccacggcggcgcatgtgtggcccggcggcgacggggagaagcggcggaaggttggtggaggcgggtgtgatgacgacttcgaggcggcgtttgagagattcggacgtgaggactctgagatggaggaggaggaggtggaggaggtggtggttgggaagaaggcggcggtgaggcggcggagggcgacgcccgccgccgggcgccgcgcgaggccgagcaagtactggggcgtgcggcgccggccgtgggggaagtgggcggcggagatccgcgaccccgtcgagggcgtccgcgtctggctcggcacgttcgccaccgccgaggccgccgcccacgcctacgacgccgccgcccgcgacctccgcggcgcgaccgccaagctcaacttcccctcctcctcctcctccaccgccgccaccccacgcccccgcaagtgccgccccaccaccgccaccgccacccccaaggcgacgacaccgaacgtcgtcgtcgtcgtcaacctcgtcgacaaagaggccgaggtcagcgagagctccggtgccagcagcagcgcgctgccggacttctcgtggcagggcatgtcggcgtcgtccgacgacgacgccgcggcgcagcaggcactcctcgacgccgccggcggcgccaagaagcgtccccggagcgagccccacgtcacctccgacgacgaagtgctcccggcgtcattcgacagtgacaacaacaccgccgccgccggcctgctcccgctcgacgatcctttcttgttcggcgaccagttcggcgacctcaacggcggcgcgttcgcctcgctcatggacgggctgttcgccgccggtgaagcgaacgtcgccggcgagagcgtggggctctggagcttcggcgacgactttctcaacgcgtcgtactattag

SEQ ID NO: 11214 - DNA, 624 bp, Oryza sativa
  Clone ID: TFbOSC400325j.C1.o13.hg
atggacgatcgcaggaggggagcagacgcaacgtggcctccattccccgccgacacgttcctctgcacccacccacgcggaccgttcggcctcgtcgaacagcagcactatagcggcagcatccatcccatccagccgtccaaaaccttgctatctcttgcagccctcccgtcctctggcacagtatataaagcgtacctgcaggtgcagcacctgatacctgcaaagcagaggcactggggctcctgggtcgccgagatccgccaccctctcctgaagacgaggatatggctggggacgtacgggacggcggaggacgcggcgagggcgtacgacgaggcggcgaggctgatgagcggcccagcggcgcgcaccaacttccctctcagcagcagcggcggcaacgcccgcagctgcctctccccgaccctgcgcgcgcggctggagaaatgctgcggcgcggggtcatcagcgcaggcgcaacagggcgccgtcgctggccaggacaacgacgatgctgctgcggcggcggcggcgatgggcgtcgacgacggcgacgagtacgtcgaggagatgatccaggagctcacgttctacggctccatagagatcgtccagccctga

SEQ ID NO: 11215 - DNA, 834 bp, Oryza sativa
  Clone ID: TFbOSC412549j.C1.o4.fg
atggagggagtgcaacatatggaagccacatcgaagtgtcaaacacgccacacacacactgagcagcagcagcagcagcagcagcatcagacagcgaggcacaacgagagatcacttgcgtttcaagccatcaaacgttttgacatggtgaagacggcggcgagcaatggcgcggcggcggcgaggcgcgtcggcggcggcggtgatgggaagagggcggcgtacaagggggtgaggatgaggagctgggggtcgtgggtgtcggagatcagggcgccgagccagaagacgcggatatggctgggatcctactccaccgccgaggcggcggcgcgcgcctacgacgccgcgctgctctgcctcaagggctccgccgccgccgacctcaacttccccgtccgcctcccgttcgacctccccgccgccgccatgtcgcccaagtccatccagcgcgtcgccgccgccgccgccgccaatgccaacgccaacgccagcagcagctgcagcgcggccgtcttcgccggcgtcgacgacagcggcggcgccagcgccagcgaggccagcacacctgcctgcagctccagcgatggtgccgcctcgccgtcgccggtgagctccccggagacggtcatcagcgacgtcgacgtggactacagcttgctcgccgacatcgaggcgttcttccagtctcccaagtgcatggagtacgccatgatggacccgtgcagcgcgttcttcgcgccgccgccgccgccggcgatggcgatggaggaggagtgcggctgggaggaggaaggcgacattgcgctctggagcttctcctctctggactga

SEQ ID NO: 11216 - DNA, 603 bp, Oryza sativa
  Clone ID: TFbOSC900026j.C1.o24.fg
atggatcgagacgagagcttgggcacgcagccattgaccgggaggcgggtgcgcgcggacacaaggcacccggtgtaccgcggcatccggctccgcagcggcaagtgggtctcggagatccgcgagccgggcaagtccagcaggatctggctcggcacgtacccgacgcccgagatggccgccgcggcgtacgacgccgcggcattggcgctgcgcggcgccgacgccgcgctcaacttccccggcacggccacgtcgcgcccggcgccagcctccggctcccccgacgacatccgcgcagcggccgcggccgccgccgcgatgatcggctccggtcaccgtggcaaccagcgcgccgccgacgcgagcacgtctcgcgcggcgacggcggcgccggaggccgccgtcgccgctggggcgggcgatcagaagcgcgtcgtggacgaggacgacgtcttcgagatgccgcggctgctggtgagcatggccgagggcttgatgatgagcccgccgaggctgagcccctcgacggacggcgtcggcggcgtgtcgccggaggacgacgaggacgaggacggcatgagcctgtggaaccattcctga

SEQ ID NO: 11217 - DNA, 687 bp, Oryza sativa
  Clone ID: TFbOSC401367j.C1.o10.fg
atggcagccagcgagcagagctccgagtcgtcgtcgacggcgtccacgtcgtcgtgcggcaagaaacagcaggtggccgggaagaggaagcgcgaggacgtcggcggcggcggggagcaggcggcggcggtggcgtacaggggggtgaggatgagggcgtgggggaagtgggtgtcggagatcagggagccgaggaagaagtcccgcatctggctcggcaccttcccgtgcccggagatggcggcgcgtgcgcacgacgtcgccgcgctcagcatcaagggcgcccgcgccgtcctcaacttccccgacctcgcccctgccctcccgcgcccggcctccctcgccccccgcgacgtccaggccgccgccgccctcgccgccgtcatgcaccaccacaaacacccctcctcctccacctccacctcctcgccgccggctgctcctccgccggacgaacaccaccctcgccacgagccgcagcagcctgagtcgagcagggaggatgaccagcagcagcagccggcggcggcggcggcggcgcagatggcggtggccgagctggtgttcgacgagctggcgccgctgtgggtggaggacgtggtggagttcgggacgtcggatcattgctggacggcgtacgatgcgcttgaccccatcggcttccagcctctcctctgggagtactag

SEQ ID NO: 11218 - DNA, 540 bp, Oryza sativa
  Clone ID: TFbOSC18350j.C1.o8.fg
atggcggcgcgcgcgcacgacgccgccgcgctcgtcgtcaagggccccgccgcggtgctcaacttcccgggcgccgccgcgtccctcccgcgcccggcctccgccgccccgcgcgacgtgcaggccgccgccgcgcgcgccgcggccatggcgctcgacgccgtcgtccccgcgccgccgtcgccgccgcctccgttaatgccgccccaggcatcgccatcagaggcggctcgcgcgcacgcgctcgttgcccaggtcgaccaggacgacgacgacgaggagctggaggagatcgtcgagctgccgcccatcgacgagctcgacgccgcggcagagctcgtgttcgccagcagcggcgctacgacgttccactacgaccccgccgccgaccagccgtggtacgaccagccggcggcgtgtctgcaggacggcggcggcggcggcattgccgtgcacgacgcgctcgggttcgagctggaccatgtctgggcggacggcgtcgtggcgtccggcttcggcgcgctcctgtggaacatgtag

SEQ ID NO: 11219 - DNA, 957 bp, Oryza sativa
  Clone ID: TFbOSC403609j.C1.o3.fg
atgtgcggtggtggcaaggtggcgagcccgccgggaccacgactgccgcggctcgccggcgccggcggcgaggaagaagaggaggaggcggcggctggaatgctgtcgaggcatggacaggcgagggagatgtctgtgatggtgtccgcgctggcgagggtggtcgccggcggcggcggcggcgaggcggaggagtggtggccgccggcgtacggcgcggcgccgctgccaccgtctacttcccctgcatctcacgagcacgcagcagccatggcggcagggcagtacgcgccggcgacgtcgtcggcgatggcgtcaccgcgcgagcaggcctcctcgccgtcgtccggcgacgccgccggcggcggcggcggcggcggcaggaagcggtaccgcggcgtgcggcagcggccgtgggggaagtgggcggcggagatccgcgacccggtgaaggcggcgcgcgtgtggctcggcaccttcgacaccgccgaggccgccgcgcgcgcctacgacgacgccgccctccgcttccgcggctgccgcgccaagctcaacttccccgaggacgccgcgctcctgccgcctccgcctccgcctcctgcgccggcgccggcgccgccgcagtcgcaggggatggtcggcgtcggcgaggagtactccgagtacgccaggttcttgcagggcgccggcgagccgccgcatttcctcgagcagataatggaggactcgcctcggccatcgacggcggccggcgcgtcgtcgtcgtcgtcggggcagtcgtcgtttccgttgttctacagcttcgctggacatgagcttggcggcaacgaagcgaaccttgcccgcccgccggagagcggcggcgctggtggtgacggtgggaggggctcctcgccgccggtgacttggccgggctatgggtggggtgcgccgccgccgtgggacccatcgagatag

SEQ ID NO: 11220 - DNA, 1329 bp, Oryza sativa
  Clone ID: TFbOSC400189j.C1.o6.gm
atggccgaccaacgccggagatttcgcggcggaggagattggcaggcgagcgtcgacgatgtggtggacgacggtggcgagctcgaggccgcggcggcggcggcggcgaggggatcggtgctgtccggggagtaccaggctcaggagatgtccacgatggtgtcggcgctgacctgggtcgtcgccgccggccacgacgaccacggcggcgggcagtggtctggccttgtggacgtgccggcgacgacgctcgccggcggcggcggcggcgactacgggcatggcgcacaggggagctattattactacggcgcagcgccgacgtcgacaccggagttcgtagcaggagggcagcaagagcagctcagctccgacgtgccgcagggcggcgctagtctcggtctcgccatggacgagcactcgcccacatacaccgtcgaagcgtcgtcctccgccgatcagcacggcggcggcggcggcgggcggcggtaccgcggcgtgcggcagcggccgtgggggaagtgggcggcggagatccgcgacccgcacaaggccgcccgcgtctggctcggcaccttcgagaccgccgaggccgcggcgcgcgcctacgacgaggccgcgctccgcttccgcggcagccgcgccaagctcaacttccccgaggacgcgcgcctcagcagcccgcccgccggcgccggcgccggtggcgccaccgcagcggcgcagacggtgccggtggcctacccggccagcgcggtctcggactacttgcacggcggcgccgccgctgccatgagtagctctttggggccttactcctccatccccacctcctcggtcaccgtcgcctccgtgccgtcgtcgtcctctgccgcgtcgtcttcttcgggttacggcgcgccggcggagcacggcgaggcggtgcagtggaccagctggccggacgctcagctgcagccggcgcccgcgcgggcggagcaaaccacgggcggggcgaccacgccgacgacccgcgcacacgccggcttcttcgtcctcttcttcttcttcttcttcttccacccccgcgacccgccgccgcccccgcgccgaagctcgtggcctcctccgccgtccacgtccacggccactagctaccatctagaagcttccggaagcttcgggaaggaagccgccccccgcgccgccttgccgggcctcgcaatgccggaggagaaggagtacgcgcccgtgcccctcggccaggcgccggaggcggtggaccccgaggacccggtcaagtcgccgccgcggcccacctcgccggcgaactccacccgcaaggtctag

SEQ ID NO: 11221 - DNA, 1182 bp, Oryza sativa
  Clone ID: TFbOSC401948j.C1.o30.fg
atggacagctccagctgcctggtggatgataccaacagcggcggctcgtccacggacaagctgagggcgttggccgccgcggcggcggagacggcgccgctggagcgcatggggagcggggcgagcgcggtggtggacgcggccgagcctggcgcggaggcggactccgggtccgggggacgtgtgtgcggcggcggcggcggcggtgccggcggtgcgggagggaagctgccgtcgtccaagttcaagggcgtcgtgccgcagcccaacgggaggtggggcgcgcagatctacgagcggcaccagcgggtgtggctcggcacgttcgccggggaggacgacgccgcgcgcgcctacgacgtcgccgcgcagcgcttccgcggccgcgacgccgtcaccaacttccgcccgctcgccgaggccgacccggacgccgccgccgagcttcgcttcctcgccacgcgctccaaggccgaggtcgtcgacatgctccgcaagcacacctacttcgacgagctcgcgcagagcaagcgcaccttcgccgcctccacgccgtcggccgcgaccaccaccgcctccctctccaacggccacctctcgtcgccccgctcccccttcgcgcccgccgcggcgcgcgaccacctgttcgacaagacggtcaccccgagcgacgtgggcaagctgaacaggctcgtcataccgaagcagcacgccgagaagcacttcccgctacagctcccgtccgccggcggcgagagcaagggtgtcctcctcaacttcgaggacgccgccggcaaggtgtggcggttccggtactcgtactggaacagcagccagagctacgtgctaaccaagggctggagccgcttcgtcaaggagaagggtctccacgccggcgacgtcgtcggcttctaccgctccgccgccagtgccggcgacgacggcaagctcttcatcgactgcaagttagtacggtcgaccggcgccgccctcgcgtcgcccgctgatcagccagcgccgtcgccggtgaaggccgtcaggctcttcggcgtggacctgctcacggcgccggcgccggtcgaacagatggccgggtgcaagagagccagggacttggcggcgacgacgcctccacaagcggcggcgttcaagaagcaatgcatagagctggcactagtatag

SEQ ID NO: 11222 - DNA, 519 bp, Oryza sativa
  Clone ID: TFbOSC1745j.C1.o11.fg
atggcgaggccgcagcaacgataccgcggcgtgcggcagcgccactggggctcctgggtctccgagatccgccaccctctcctgaagacgcggatatggctgggcacgttcgagacggcggaggatgcggcgcgggcgtacgacgaggcggcgaggatcatgtgcgggccccgcgcgcgcaccaacttcccgctcgccgacgccaccgcggcggcggcggcggccgccgcgtcctcgtcgttcctctccgccgcgctcgtcgccaagctccaccggttcaacctggcgtccgtgcaggccacgcagcggcagagggaggccgccgccaccgccgccgcggcctcttcggcctccgccacgacgccgccgctcggcaatgccgccgccgccgacgacgacgcgcggaccaccacgacgtacggcgcggaatggagcggcaggttcctcgaggagcagcacgtcgagcagatgatcgacgagctgctcgactccaacttctccatggagatctgctactag

SEQ ID NO: 11223 - DNA, 386 bp, Oryza sativa
  unsure (1)..(386): unsure at all n locations
  Clone ID: TFbOSC407709j.C1.o1.gm
gggcgtgcggcggcggcggtgggggaagtgggtgtcggagatccgggtgcccgggacgcgggagcgcctgtggctcggctcctacgccaccgccgaggccgccgccgtcgcgcacgacgccgccgtctgcctcctccggctcggcggcggccgccgcgccgccgcaggcggaggcggcgggctcaacttccccgcccgcgcgctcgccgcggcggcggccgcctcctcctacggcggcgccggcggtctcctgtccccgcgctccgtgcagcgcgtggcgtccgacgccggcatggccgccgacgcgcagctcgtggacctgcgccgcgaccacccgcccgcngcngccgccgcctcatcctccggcagcggcgtggcgggagacg

SEQ ID NO: 11224 - DNA, 783 bp, Oryza sativa
  Clone ID: TFbOSC900060j.C1.o3.fg
atgtcgtcgcggcagccgataggatccggaggcggcggcgcgcccccggattggcacgacgtcgagccgcagtggcagccggtggacgacgtggtcaccgtggccgccgccgcagcctacctcgccgcgccggccggggcgacgctgtcgtcggaatcagctgaccggcggtggcggccggtggggccttcagccgccgccgccgccgctgccctgcaggccgtggaggcgcaaggtgcggcggcggcggagcggcactaccgtggcgtgcggcggcggccgtggggcaagtgggcggcggagatccgggaccccaacaaggcggcgcgcgtctggctgggcaccttcgacaccgccgaggccgccgccgccgcctacgacgacgccgcgctccgcttcaagggcgccaaggccaagctcaacttccccgagcgcgtccgcggccgcaccggccagggcggcttcctcgtctcccccgctgtgccccgcccgccgccgcatggtgttcccgctcccgcgcccgccgtggcgccggcgccgttccccgacctgatccagtacgcgcggctgctgcggagcggggaggacgccgccgccgccgccgccgtggccggcattgcggccaccgcggcgccggcggcgcagatcctggacttcgcggcgcagcggctcgtcggggtctctccggcgatggcgccgcgcccgccgtcgacgctgccgacgacgacgaccgcggcgtcgtcgccgagcgcgtggcctcacggcggcggccacgggagctag

SEQ ID NO: 11225 - DNA, 702 bp, Oryza sativa
  Clone ID: TFbOSC400143j.C1.o10.fg
atggggctgacccacctgggcccagcccagatccagcagatccaggcccagttcttggcccagcagcagcagcagagggccctggccggcgccttccttcggccgcgtggccagccgatgaagcagtccgggtcgccgccgcgcgcggggccgttcgcggcggtcgccggggcggcgcagtcgaagctctaccgcggagtgcggcagcgccactgggggaagtgggtggcggagatccgcctcccgaagaaccggacgcggctgtggctcggcaccttcgacaccgccgaggacgccgcgctcgcctacgacaaggccgccttccgcctccgcggcgacctcgcgcggctcaacttccccaccctccgccgcggcggcgcccacctcgccggcccgctccacgcctccgtcgacgccaagctcaccgccatctgccagtccctcgccacgagctcgtccaagaacacccccgccgagtcagcggcctccgcggcggagccggagtcccccaagtgctcggcgtcgacggaaggggaggactcggtgtccgccggctcccctcctccgcccacgccgctgtcgcccccggtgccggagatggagaagctggacttcacggaggcgccatgggacgagtcggagacattccacctgcgcaagtacccgtcctgggagatcgactgggactcaatcctctcataa

SEQ ID NO: 11226 - DNA, 1933 bp, Oryza sativa
  Clone ID: TFbOSC400143j.C1.o13.gp
tgagaaaggtacatatagttacataagctactgaatttccaacatgtaacaagggattacagcttaattctcgaccggccgcgccgtgaaaaaaacaaccggcagctcaaccaggagatcagatcactgagtacaccaacgacacttgcacgacgacgtaataccaacgaccttactactactgagtactgactagttactgctactcgcagcagccatggccgacgtctaaaatgccaccgagccatggaagccacggaattcagagaagattacacagctagttgagttgagtgactctagcttgacgaagactactactagtactagtaatagactagtagtagctgcttctgcttgtttatgagaggattgagtcccagtcgatctcccaggacgggtacttgcgcaggtggaatgtctccgactcgtcccatggcgcctccgtgaagtccagcttctccatctccggcaccgggggcgacagcggcgtgggcggaggaggggagccggcggacaccgagtcctccccttccgtcgacgccgagcacttgggggactccggctccgccgcggaggccgctgactcggcgggggtgttcttggacgagctcgtggcgagggactggcagatggcggtgagcttggcgtcgacggaggcgtggagcgggccggcgaggtgggcgccgccgcggcggagggtggggaagttgagccgcgcgaggtcgccgcggaggcggaaggcggccttgtcgtaggcgagcgcggcgtcctcggcggtgtcgaaggtgccgagccacagccgcgtccggttcttcgggaggcggatctccgccacccacttcccccagtggcgctgccgcactccgcggtagagcttcgactgcgccgccccggcgaccgccgcgaacggccccgcgcgcggcggcgacccggactgcttcatcggctggccacgcggccgaaggaaggcgccggccagggccctctgctgctgctgctgggccaagaactgggcctggatctgctggatctgggctgggcccaggtgggtcagccccatcggcccgttcgtcgccgacgccgcaggtgaagcagcatgatactgcgaagagtacagcggaggtagctgcgagaaagacgaggtggtggtggcggcggcggttgtgatagaggaagtgggataagatggggtgggcatgtaagaatcttggctcatggaaggagaagaagagtagtagtggtggcagggggaggaagcggaggaagaagaagcgctcctaataaaaggttcgagcgctttcatgagctcctgatccgaggatgcgatctggtgtgtgctagtgttatacttgtacatgtctattgctgcggccatgaggactggatggaggtagaagatgaagatggcaagggtatggaaatcttaaaaacaggaaagaaaaaaggggtgctttttggatgcaagaagtgaaaaatcagccctgttcctcaataaaagtagagaaacaaagggtgcaaagaaagaaagagcttttgaatagaaagaagaaaaatttgagaggatgaactagaagggtattgcaaaacaaccctttctggccttagaaaagcaaaggaagcctaaaaatcggcaagaatccagaagagaaaaaaggttctctggatctctgttcctcctaggagaagttgatgggatgagaaagaacctgtacgcacaagaactcctctttcgatctaataaacccgaaagaagtaccttcttgggacaggacctttcttgtgtgttacctgcttctaaaaagatcagagaagttcagagaacaaacctgttgctgctcgtcgctgatgatttttttcagatcgctcaacctcaccgtggactgggatgggatgggatgtggctttggtgttcttggggtggggttgaggc

SEQ ID NO: 11227 - DNA, 900 bp, Oryza sativa
  Clone ID: TFbOSC401580j.C1.o12.fg
atgtcccggtcgcgcacggtgcggatcttctgggacgaccccgacttgacagactcgtccggcgaggacgaggggtgcggcggccggagggtggggagcatggtgcgggagctgccgcctgcccagatgcccgtggcgcaggcaggttttgctcctgctgctgcagccgctgctgctgctttgccggagcagtgcagcggcggggacggtgatatgggaagaagggtcgttggtggcggatgcactgtgggtgtgggacggaggaggttgacgaaggacggagggcctggcgcgccgagcaccaagttccgcggcgtcaggcggaggccgtggggcaagttcgcggcggagatccgcgacccgtggcgcggcgtgcgcgtctggctcggcaccttcgacaccgccgaggaggccgcgcgcgtgtacgacaacgcggccatccagctccgcggccccagcgccaccaccaacttctccgcctccaccaactccgcgggtgcacaagatccggtggcagttggctacgagtccggcgcggagtcctcgccggcggtgtcgtccccgacgtctgtgctccgcaaggtcccgtccctgtgctccctggccgaggacaaggacgactatgaggccggcccctgcgagcccgcaactgccgccggttccaacctcaccgttctcgaggaggaggagctcggcgagttcgtgccgttcgaggacgcgccggtctacggcggcagcagcttctgggacttcgagcccgagtccggcttcctgtacgccgagccgtcgtcgcctgagacgccgtgggacgccggcgccacgtcctccggcgaggcccaagactacttccaggacttgcgcgacctgttcccgctcaacccgcttcccgcaattttctaa

SEQ ID NO: 11228 - DNA, 624 bp, Oryza sativa
  Clone ID: TFbOSC400601j.C1.o37.fg
atgtgcggcggtgcaatcatctacgactacatcccggcgcgccgccggttgtgcgcctccgacttctggcccgacgccgacgactccgacccccacacccccgctcccgagaaaccgccgcgcgcgaagagggagcggaagaaccagtaccgcgggatcaggcagcggccgtgggggaagtgggcggcggagatccgcgacccggtgaagggggtgcgcgtctggctcggcacctacccgaccgccgaggccgccgcgcgggcctacgaccgcgccgcgcgccgcatcaggggcgccaaggcgaaggtcaacttccccaacgacttcggcgccgcccccgcgccggccgcggcggcggcgaaggccgtccctcgcgtcgcgcccacgccggccgtgctcccgccgcccaagatggaggcggtgtccgagggcgccggcgcctgctcctccgacgaggtcaaggagctgtccgaggagctgctcgcgtacgagaactacatgagcttcctcggcatcccctacatggagggcggcgccgcctccgccgccggcgccgaggaagccgcggcgcccgccgggctctggaccttcgaagactacgagctgccgtcgctagcgctctag

SEQ ID NO: 11229 - DNA, 945 bp, Oryza sativa
  Clone ID: TFbOSC400903j.C1.o14.np
atggataaccacgccgtcgcggtccagcaacgcgacacggcgccccggccccgcgcccgcgcgcgcgcctccgtatccagtatccagggggggggggggcctggctgggctgaccacgtcgccctcccacgcccgccacgttgccacccgcgccgccctcccaccccatgtcggcgaccgctcgcgttcgcgtcctcctccatccatccgcatcgcgccgtgctgccaagcggcgcgccgcctcacgtgtcggccggggcgcgcgacacgggcggcgcggcggggctcgcgcgaccccaccactcatttccccaggagaaaaagccgaagccaagacacgcaggtgtcgcctcgcctcgcctcgccctcgcgccgctgcggaattccgcgaggatggataggagggaggccaccgtcttcttgcccccgccgccgccaccgcagccgacgcagccgcagcagcagcctgcggcggcggcggtgagggctccggtaggcgggaggggtgggggaggagggaggcagtatcgcggggtgcggatgcggaagtgggggaagtgggtggcggagatccgcgagccgaacaagcggtcgcggatctggctcggctcctactccaccgccgtcgccgccgcgcgggcctacgacaccgccgtgttctacctccgcggccgctccgcgcgcctcaacttccccgaccagctcgacggcgcgggtggtggtggcgcgggcgccggcggcgccgaggaccacagggagctcaccgccgccgtcatccgcaagaaggccgccgaggtcggcgcccgcgtcgacgcgcagcactccgtcgtcggcgccgcggcgcccgtgccgctccagccgccgcagcccccgccgccccagcgccgccggaccaagaaccccgacctcaaccgggagcccaccccggacacctccgacgacgag

SEQ ID NO: 11230 - DNA, 1332 bp, Oryza sativa
  Clone ID: TFbOSC400466j.C1.o4.fg
atggcgaagagatcgtctcctgatcctgcatcatcttctccatctgcatcatcctcgccgtcgtctccttcctcctcttcctccgaggattcctcttcgcccatgtcgatgccctgcaagaggagggcgaggccgaggacggagaagagcaccggcaaggccaagaggcccaagaaggagagcaaggaggtggctgatccttcttccaatggcggcggcggcggcaagaggagttctatctacaggggagtcaccaggcatcggtggactggcagatttgaggcccatctgtgggacaagaattgctccacttcacttcagaacaagaagaaagggaggcaaggggcttatgatagtgaggaagcagctgctcgtgcatatgaccttgcagctcttaagtactggggtcctgagacagtgctcaatttcccactggaggaatatgagaaggagaggtcggagatggagggtgtgtcgagggaggagtacctggcctccctccgccgccggagcagcggtttctccaggggtgtctccaagtacagaggcgttgccaggcatcaccacaatgggcggtgggaggcacggatagggcgggtcctggggaacaagtacctctacctgggtactttcgatactcaagaggaggcagccaaggcctatgatcttgctgcaatcgaataccgaggtgccaatgcggtaaccaacttcgacatcagctgctacctggaccagccacagttactggcacagctgcaacaggaaccacagttattggcacaactgcaacaagagccacaggtggtgccagcattacatgaagagcctcaagatgatgaccgaagtgagaatgcagtccaagagctcagttccagtgaagcaaatacatcaagtgacaacaatgagccacttgcagccgatgacagcgccgaatgcatgaatgaaccccttccaattgttgatggcattgaagaaagcctctggagcccttgcttggattatgaattggatacaatgcctggggcttacttcagcaactcgatgaatttcagtgaatggttcaatgatgaggcattcgaaggcggcatggagtacctatttgaagggtgctccagtataactgaaggcggcaacagcatggataactcaggtatggcagaatacaatttgtttgaggaatgcaatatgttggagaaggacatttcagattttttagacaaggacatttcagactttttagacaaggacatttcaatttcagatagggagcgaatatctcctcaagcaaacaatatctcctgccctcaaaaaatgatcagtgtgtgcaactga

SEQ ID NO: 11231 - DNA, 1005 bp, Oryza sativa
  Clone ID: TFbOSC101030j.C1.o19.fg
atgtgtggaggcgccatcctcgccgagttcatcccggcgccgtcgcgcgccgcggcggcgaccaagcgggtgaccgccagccacctgtggccggccggctccaagaacgccgcccgcggcaagagcaagagcaagaggcagcagaggagcttcgccgacgtcgacgacttcgaggccgccttcgagcagttcgacgatgactccgacttcgacgacgcggaggaagaagacgaaggacacttcgtgttcgcgtccaaatctcgtgtcgtcgccgggcacgacgggcgcgcggcggcgagggcggcgagcaagaagaagcgggggcggcacttccgaggcatccggcagcggccatgggggaagtgggcggcggagatccgcgacccgcacaagggcacgcgcgtctggctcggcacgttcaacaccccggaggaggccgcacgcgcctacgacgtcgaggcgcgccgcctccgcggcagcaaggccaaggtcaacttccccgccacgcccgccgccgcgcgcccacgccgcggcaacacgagagccaccgccgtgccaccgccggcgacagcacccgccgccgccccgccgcgcggactgaagcgagaattctcgccgcctgctgagaccgcgctacctttcttcaccaacggcttcgtcgacctgacgaccgccgcggcgccgccaccggccatgatgatgacgagctccttcaccgacagcgtcgccacgtcggagtccggcgggagccccgccaagaaggcgaggtccgacgacgtcgactcgtccgagggcagcgtcggcggcggcagcgacacgctgggtttcaccgacgagctggagttcgacccgttcatgctgttccagctcccctactccgacggctacgagtccatcgacagcctcttcgccgccggcgacgccaacagcgcgaacaccgacatgaacgccggcgtcaacctgtggagcttcgacgacttcccaatcgacggcgcccttttctga

SEQ ID NO: 11232 - DNA, 170 bp, Oryza sativa
  Clone ID: TFbOSC422801j.C1.o1.fg
atggcgggggtgggggtgggggaaggggaggtgaggtaccgtggggtgaggaggcggccgtcggggaggtacgcggccgagatccgggacccggcgaagaagaccccgatctggctcggcacgttcgactccgcagaggccgccgcccgcgcctacgacgccgccgcgag

SEQ ID NO: 11233 - DNA, 969 bp, Oryza sativa
  Clone ID: TFbOSC401103j.C1.o24.fg
atgtctcaaacccaatcaaactccaaccaaactcacctacctacccccaacccatccagagctagagctatgtgcggcggcgcgatcctcgccgacctcataccgtcgccgcgctccggcggccacaccaaaaagaacaagcggcggcggatcagcgacgacgaggacttcgaggccgccttcgaggagttcgacgccggcgacgacgactccgactccgactccgagtccgaggaggtagacgagtacgacgtcgtcgtcgacgacgacgacagcgaggacggcgtggtggttcttccgccgccgccgccgccgccgccggtgattccacatgagcgccatggcgcgaggcggttccgcggcgtgaggaagcggccgtgggggaagtgggcggcggagatccgcgaccccgtgcgcggcgtgcgcgtctggctcggtaccttccccaccgccgagtccgccgcgcgcgcctacgacgccgccgcccgccgcctccgcggcgccaaggccaagcccaacttcccctccgcgccgccgccctcggctgctgctcaccgccgcaagaagcgccgcgcccacgccgccacgcgctcgccgtcgtctccgcccgccaccagcgaggtcacggcggcgtccgcgtccgcgtccagcgatgtccccgcgccggcgttcgcttccttcgtcggcgagcccgggcacggcggcgccaagtcgatgccgacgacgagccacacctcgcagccagccccgccggcgacggtggcgtccgagaacgtcgacgacccggaggtgttcgacccgtacgacgtccacggcggcctcgcctcctacttcgccggcggcgcgtacgagtccctggagagcctgttcgcgcacggcggcgacagcgccgccgtcgaccaagcggcgagcgaccactggccggcggcgctatggagcttcgcagacgacggctcgttctgcttctga

SEQ ID NO: 11234 - DNA, 1056 bp, Oryza sativa
  Clone ID: TFbOSC400259j.C1.o124.fg
atgacggtggcgggggcgtcggagctcatgtcggggtattaccaggcgcaggagatgtcgacgatggtgtcggcgctggcgcgcgtcgtggcgggcggcggcggcggcggcggcgacggcgacggcgaccagtgggcgtggtcgtcgccgtcgccgtcgtcgtcagcggcggcggcggcggcgcgtggcgtgcaggagaggaggcgggaggagcaggcaatgcacgagctggcgggatacgcctgcgggggcgcgccatcgccggagttcgcaggatcggagcagagctcggacacccagagcgcgagcgcggcgaccatggacgagcaccactcgccggtgggcggcggcgggaacgcggaggggcccgacacgccgcggcggcggtaccgcggggtgcggcagcggccgtgggggaagtgggcggcggagatccgggacccgcacaaggcggcgcgggtgtggctcggcacgttcgagacggcggaggccgcggcgcgggcctacgacgaggccgcgctccggttccgcggcagccgcgccaagctcaacttccccgaggacgcgcgcctctacccgaccgccgccaccaccaccaccgcggcgccgcccccggcgccggtcgcggcggcatcgccttccgcggccatctaccccggcgcctcccagagcgccgagtacctgcgctaccagatgcttctgcaggggaggcttaccaccgccacccccaaccaaggcacccttcttccgttctacggcggcggcggcggcggtggctccatgaccaatccctacggaggcggtggcggcggcgccatgagcggcttcctcggctcctactactctttccctaccccctctgtttccgtggccaccgtcccctcctccacctcctccgcgccgggcaactactactcgtcccacggcggctcgcaccagagcatgtcggcggcggaggagtggaactgggagaacgccctggtctacccggcgacggcggcgtcatggtcggagtcgagctatcaccaccacccgccgccgccgcacacgcagtag

SEQ ID NO: 11235 - DNA, 987 bp, Oryza sativa
  Clone ID: TFbOSC418226j.C1.o20.fg
atggacttccaccacggagacgccgacgacttcgccctcgagttcatccgcgagcaccttctcggcgtcgacggcgccaccgccacggccaccgagccggcggacctcgaggtcgtcgaaccggcggcggcgtacccgcctatgtcgtggcaagagcagcggcagcaggagcagcatggttgtcacgtagaactaacggacgagcacctggaatccgcacccgctgctgaggcagcggcggcgttccgaacggcgcccgcgcagccggcggccgaggtgatgatcaagttcggtggcgagccctccccggtgaggccgtcgtcgtcgctgaccatatccctgccaccgagctcgttcggcagctgggcgtccgcggcggcgccggccgcggccgccgtggaggacttccgcaagtaccgcggcgtgcgacagcggccgtgggggaagttcgcggcggagatccgcgacccgaagaggcgcgggtcgcgcgtgtggctgggcacgtacgacacccccgtggaggccgcgcgcgcgtacgaccgcgccgccttccgcatgcgcggtgccaaggccatcctcaacttccccaacgaggtcggcacccgcggcgccgaactgtgggctcctcccccgccgccacccgcgcactccgccgccgcctcgacgacgaacaagcggaagcggcagccgtcggaggaccccgacgacggcgtcgaggtgatcggagtggtaagcaaggccgtcaagaccgaggcgccgacgtccaactcgtcgtcactgtcgtcgtccctgacgtcgcgggacacgacgccggccacgtcgtcggcgggggcggagcacgccggcgcggccgccgagagttcgccggcgacgccgtcgagctggagctgggagcagtactgggaagcgctgctcggtggcctcccgccactgtcgcctctgtcgccgcacccggcgttggggttccctcagctcaccgttaactga

SEQ ID NO: 11236 - DNA, 957 bp, Oryza sativa
  Clone ID: TFbOSC418226j.C1.o21.fg
atggacttccccggagacgccgaggatttcgccctcgagttcatccgcgagcacctgctcggcggcgacgcccctgtactgccgcctgctgctgtaccggcggcggcggcgtacctacccaccagtaccatgttcttgccacagcagcagcgaggctacgcaggcctaacgccgcaggagtacgtggtggattccgccccggctgctgatcaggccgcgttccgtgatgatcagcccgatccggcggccgacgtgatgatcatgttcggaggcgagcgcttccctgcggtgaagccgtcgtcgtcgtcgtcgccatcgctgactgtcaccgtgccccccagctcgttcggatcatgggcgccggccgccgtgcccgccgtggcggccacggccgccgccgtggaggacttccgcaagtaccgaggcgtgcggcagcggccgtgggggaagttcgcggcggagatccgcgacccgaagcggcgcgggtcgcgcgtgtggctgggcacgtacgacacccccgtggaggccgcgcgcgcctacgaccgcgccgccttccgcatgcgtggcgccaaggccatcctcaacttccccaacgaggtcggcacacgcggcgccgaactgtgggctacgccgccgccgacgaacaaaaggaagcggcagccggaggacgacaccgccgccgccgacgacgtcgaggtgatcggagtggcaaacaaggctgtaaagaccgaagcgccgacgtccgcctactcatcgtcgtcactgtcatccatgtcgcgggacacgacggcgaccacgtcgtcggcggggacgtcgactgggtcgtcggagcccacgagttttccggtggtgacgccgtcgagctggagctgggaccagtactgggacggcctgccgccgctgtcgcctctgtcgccgcacccggcgttggggttcccgcagctcaccgttagctaa

SEQ ID NO: 11237 - DNA, 582 bp, Oryza sativa
  Clone ID: TFbOSC400698j.C1.o29.fg
atggagcaacgggcggcggcggcggcgcagcagcggcaggggaggaggcagagcgcggcggcgtgcgggatcaggcgggcgagggcggagacgcggcacccggtgtaccgcggcgtgcggttcagggcggggaagtgggtgtcggagatccgggagctccggaagccgagcaggatatggctcggcacgtacgccacccccgagatggccgccgcggcgtacgacgccgccgcactggcgctgcgcgggcgcggcgcggcgctcaacttccccgacgccgcgcggtcgcgccccgccccggcgtccgcgtccgccgacgacgtgcgcgccgcggccaccgccgccgccgccgcgatggcacaccaggaggaggacgacgacagtcggcgtcagctcgaggacgggggcggcggcggcggcgtggtggacgaggacgacgtgctggagatgccgaggctgatggtgagcatggcggaggggctgatgatcagcccaccgccggtgatgctcggcctgcaggcggacggcggtggaataatggacgagggcggcggcgtggtgaggttgtgggatcacagctga

SEQ ID NO: 11238 - DNA, 1098 bp, Oryza sativa
  Clone ID: TFbOSC409411j.C1.o25.fg
atgtgcggcggcgccatcatccaccacctgaaggggcacccggaggggtcgcgccgggcgacggaggggctcctgtggcccgagaagaagaagcccaggtggggcggcggcgggaggcgccacttcggggggttcgtggaggaggacgacgaggacttcgaggccgacttcgaggagttcgaggtggactccggggactcggatttggagctcggggaggaggacgacgatgacgtcgtcgagatcaagccggccgccttcaagagggccctctccagagataacttgagcaccattaccactgccggatttgatggtcctgctgcaaagtctgccaaaagaaagagaaagaaccaattcaggggcatccgccagcgcccttggggtaagtgggctgctgaaatcagagatcctcgcaagggtgttcgtgtctggcttggcactttcaacagtgctgaagaagctgcaagagcttatgatgctgaagcacgcaggattcgtggcaagaaggccaaggtgaattttccagaggctccaacaactgctcagaagcgtcgtgctggctccaccactgctaaagcacccaagtcaagtgtggaacagaagcctactgtcaaaccagcattcaacaatcttgccaatgcaaatgcgtttgtctacccatctgctaacttcacttcaaacaagccgtttgttcagcctgataacatgccatttgttcctgcaatgaactctgctgctcctattgaggaccctatcatcaactctgaccagggaagcaactcatttggctgctctgactttggctgggagaatgataccaagacaccagatattacatcaattgctcccatttcaaccatagctgaagtcgatgaatctgcattcattaagagcagtaccaacccaatggtccctcctgttatggagaacagtgctgttgatctgcctgatttagaaccctacatgaggttccttctggatgatggtgctggtgactcaattgatagccttctcaacctggatggatcacaggatgttgtcagcaacatggacctctggagctttgatgacatgcccgttagcgatttctattga

SEQ ID NO: 11239 - DNA, 730 bp, Oryza sativa
  Clone ID: TFbOSC400766j.C1.o8.np
atggctcccaggaacgccgccgaggccgtcgccgtcgccgtggcggagggcggaggagccggcatggagcccaggttccgcggcgtgaggaagcgcccgtggggcaggtacgcggcggagatccgcgacccggccaggaaggcgcgggtgtggctcggcaccttcgacaccgccgaggccgcggcgcgcgcctacgacagcgccgcgctccacttccgcgggcccaaggccaagaccaacttccccgtcgccttcgcgcacgcccaccaccacgccccgccgccgccgctgcccaaggcggcggcgctggccgtcgtcagcccgaccagcagcacggtcgagtcgtcctcccgggacacgcccgccgccgccccggtggcggccgcggccaaggcccaggtgcccgcctcgccttcgctcgatctgagcctcgggatgtcggccatggtggccgcccagccgttcctgttcctcgaccgcttggagtacgacccggacggaggagacgcgcggaaaaccgcggcaccaacgaccatctacgacgacgtcgcttgccgcgggccccgtggagaacgagtccacccgtgcacaggcgtgcgcagcgggagcagagctcgtaggacgccgcgccgcaccgcgtcgcgtcgcccaggggagggggaggagtcgtcgtggtcacgctcacacagtcacacttgctcccacggcgcgacaaccacgtagccaaagc

SEQ ID NO: 11240 - DNA, 591 bp, Oryza sativa
  Clone ID: TFbOSC400555j.C1.o42.gm
atggaggacgacaagagtaaggaggggaaatcgtcgtcgtcgtaccgcggcgtgcggaagcggccgtggggcaagttcgcggcggagatccgcgacccggagcgcgggggagcccgcgtgtggctcggcacgttcgacaccgcggaggaggccgcgcgggcgtacgaccgcgccgcattcgccatgaagggcgccacggccatgctcaacttcccgggagatcatcatcacggcgccgcaagcaggatgaccagcaccggctcttcttcgtcctccttcaccacgcctcctccggcgaactcctccgcggcggcgggccgcggcggctccgatcggacgacggacaaggtggagctggagtgcctcgacgacaaggtcctggaggacctcctcgcggagaccaactatctacgaggagagcgggacgcggccgggttcgcgacggcgcacacgcaggctgggccggtgatgggctgcgtgggagcacacgcgattcgccgccgcccgctggagtccccgccgcccgccagcgactcgccgacgccccttcgccacgccaccaccgccatgttgcaaaccctcccgttgtga

SEQ ID NO: 11241 - DNA, 828 bp, Oryza sativa
  Clone ID: TFbOSC401067j.C1.o3.fg
atgggaggcaaccaggagtacatgatccgattcgacggccacatcgacgatgcctcgccgagctccgccactgcagagccaccgccgccgctgccgccgccgcgtcccttcgccgggagggcgatctcggccgagagggagcactctgtgatcgtcgcgacgctgctccatgtcatctccggctacaggacgccgccgccggaggtgttcccggcggcgcgcgcggaggtgtgcggggtttgcgggatggaccagtgcctcgggtgcgagttcttcgccggggagtccggggtggtgtcgttcgatggcgcggagaaggtggcggcggcggccgccgcggcggcggctggcgccgcggcggggcagaggaggaggaggaagaagaagaacaagtaccgcggcgtgcggcagcggccatgggggaagtgggctgcggagatccgcgaccctcgccgagcggtgcgcaagtggctggggacgttcgacaccgccgaggaggccgccagggcgtacgaccgcgccgccgtcgagttccgcggcccgcgcgccaagctcaacttcccgttccccgagcagctctccgcgcacgacgacagcaatggcgacgccagcgccgccgccaagtccgacacattgtctccgtcgccgcgcagcgcagacgccgacgagcaagtagagcacacgcggtggccgcagggaggaggaggcggcggcggcggcggcggcggcgagacaggggaccagctctgggaaggcttgcaagacctgatgcagctggacgaaggcgggctcagctggttcccacagtcgtcagattcttggaattga

SEQ ID NO: 11242 - DNA, 954 bp, Oryza sativa
  Clone ID: TFbOSC900147j.C1.o10.fg
atggtgccctcttcacggaaagtccgtgttttctgctctgatcctgatgccactgactcctctgatgaagatgaccagaataagaaggaaaggagattttcaagggaaatactaattccaatggaaaactccaaggcatccaaacctgttaagacccttgttcaatgtggcacaaagactgtaaaggattccgagaaggaaccgacgagcaaatacaggggtgtgcgccggcgggcgtggggcaaatgggctgcagaaatacgtgaccctgtgcgaaaatcaaggaaatggattggcacatttaacagtgaggaggaggccgctgcggcatatcttgcacaatcaaaccagttccatgaagagttgatggccttgaaaatccaatcttctgtatcagagcaggaagatttgtcaagctctgttactatatcctgcgtgtcctcatctcagtcatgtgaccagaagattcaggcaaagccacaagaacacaagagagtgtcagtggtggttaaccgtgagaccgttgagcagaagtttaaggcacagccacaagctcagaagattaaggcacagccagaagtgcagaagagagtgtcagtgaagattagccatgagactgaggatgagcacttgctgaacttgccgtccacgcctaaaggcaaagagatttcgatgggcgctgttcttggcaggatagatgagattcctgtgagcaactgtgtgggccatattgatgaatttccacctgatgatttcactaggcttgcagatgcgttcccagttagtgattttatcggcatggcagatgtgccactgggcgatgattacattggccttgcagacatcagccacctgccgctgcctatcacagatctgaagttcgacctcaatgcagaactcaactgggacgggttcgactttgcttcattggaacaagaactcaactgtctttga

SEQ ID NO: 11243 - DNA, 2604 bp, Oryza sativa
  Clone ID: TFbOSC401715j.C1.o2.fg
atgtcatcctttatccttcccttcctcctccctccttctctctcttctctcccccttttctcttccccgttcgaacgcctcggcggcagcggcggccgggggccggagtggcgacggcgaccgcgccaccgcctgccctgtctccaagctggcctaccatcgcgcaagctccgccaggggctccgccgggggcgcggcatgggcgcccgcgcgcagcccacgccgtcgtgggcgcgggagccactgttcgagaaggccgtgacgcccagcgacgtcggcaagctcaaccgcctgctggtgcccaagcagcacgcggagaagcacttcccgctgcggcggacgagctccgacgcctccgccaccgccgccgcggccacctgcaactctgcaagggcgtgctcctcaacttcgaggacggcgaggggaagcagccagagttacgtgctgaccaagggatggagccgattcgtgagggagaagggcctccgcgccggcgacaccatagtcttctccggctcggcgtatggccccgacaagctgctcttcatcgactgcaagaagaacaacacggcggcggccaccggcgacgagaagccaattacaagcggcgaagcaacacgcgtcgtgaggctgttcggcatggacatcaccggcggcggcggcgattgccggaagcgggagagggcggtggaaatggggcaagaggcgttcttgatgaagaggcaatgcgtgtgcaccacactacaccgtccgctcagcgaaggcgatataacagcaatgcaggtgcagcaacgcaagcccaaggcttgcgccgagagcgccgcggcggcgcgaggagcggatcagcagcagtgcgacggcaggccgctggaggcgggcgaggagtccctggagcgctccgtgccgcggaagaggaagccagctgcggcggtggctgctgccgagaagcgatggagctccgtggcctacgtcgtgctcgccgcctttgtcatggcgacggtcttcgccgttcttggcgggcggcgccccgccgtctggatcgccgccaccaaggccctgcgtcgaggttccgacgataaatcgattccattggcacgaagcgccgctgacaaactcctcggcggcctcttgcccgaaggattcgacgagaaatcatgtcgcagcaggtacgagtcatacctgtaccgccggaacccgggccgacgaccatctccgcacctcgtggcgcggctgcggatgcacgaggagctccagagacggtgcggccccaacacggagtcgtacaaccgcgccgtgcaacggctgagggacggcggcgccgccgaggccgacgcgcactcgccggacgacgagcagtgcaagtacgtggtctccatctcgtaccgcggcctcgggaaccgcatcctcgccgccgcgtcggccttcctctacgcggtgctcaccggccgcgtcctcctcgtcgacccgagcaacgagatggacgagctcttctgcgagccgttccccggcacgacgtggctgctcccacgcgacttcccgctggcgtcgagctacgcgaacttcagcgccgacaccgccgagagctacggcaacatgctgaagaacaaggtgctcgggacggacgggagtactgacggtgacatgcccgcggcgcagatgccggcgttcgcgtacctccacctggaccacgactacggcgacggcgacaagatgttcttctgcgacgacgaccagcggctgctgtcgaacatccagtggctggtgatgaggacggacacctacatcgtgccgtcgctgttcctggtcaccacgttccaggacgagctcgacgcgctcttcccggagcgcgacgccgtgttccaccacctcggccggtacctgttccacccggccaaccatgtctggggcctcgtcgcgcggtactaccgcgcgtacctcgcgacggcgcggcagctggtcggcgtccaggtgcgcgtcttcgaccaccggcaggcgaagtcgccgcacgtcgtcctcgagcagatcacgtcgtgcgcgtggaaggagaagctgctcccggaggtactcgacgcggtggaggacgcggccatgcccacgccaccgacgacgccgcacggcgggagcaacaactccaaggccgtcctgatcacctctctccggccgtggttctacgagcgcgtcaaggctatgtactgggagcgcgcgacggcgaccggcgaggacgtgagcgtgcaccagccgagccacgaggagtaccagcacttcggcgagaagtcgcacgacggcaaggcgtgggcggagatgtacctcctgagcctgtgcgacgtgctggtgaccagcggctggtcgacgttcgggtacgtggcgcaggggctcggcgggctgaggccgtgggtgatgtacaagccggtgaacatcacggcggtgccggacccgccgtgcggacgggacgtgtccatggagccgtgcttccactcgccgccgttctacgactgcaagacgaagcgcggagtggacaccgggacaatactgccccacgttcggcactgcgacgacgtgagctggggattgaagcttgttgatccgaatggaagtccgaactag

SEQ ID NO: 11244 - DNA, 257 bp, Oryza sativa
  Clone ID: TFbOSC900114j.C1.o17.gm
atgcgtggaggaggaggaggaggagactctgaagtgaactgccatggcgagcatgaagcagcagcagacgccgggagctccgcggtgaccgcggcggcggcggcctcctcctccgccaccgccccgtggccgcatgcgaaggggagcgaaggcggcggcgatcaactcggagctgtggcacgcgtgcgccggcccgtcgtgtcgctgccgccggtgggcagcctcgtcgtctacttcccgcaaggcacagcgagcag

SEQ ID NO: 11245 - DNA, 2895 bp, Oryza sativa
  Clone ID: TFbOSC400188j.C1.o2.fg
atggcggggatggctgcggcggcggcggcgttggtggcggcgaagaggtgcatgaacgccgcgtgcggggccccggccccgtccccggcgggaggggagtggaggaagggctggccgctgcgatccggtggcttcgccgtgctctgcgacaagtgcgggttggcatatgagcagcttgtgttttgtgatatatttcaccaaaaagaatctggctggagggactgctcattttgtgggaagcgtctccattgtggatgtattgcttcgaagaactcctttgatctacttgatagcggtggagttcaatgtgtcacttgcattaaaaattcagcagttcaatctgttccaagtccagtcgtccccaagcttttttcatcccaaaataaccagagactttttggcaaaagcgatgatttattgtctggtagaccactggagacatcctcccttatggtcgatgccagaaacgatgatcttactattatcgctaagaacaaccttccattcatggtgaaaaacgtagaagctgggcaaagcagtaatattttgaggcaaaaagaactagagaatggtgcgaggcagattaaatgggaactacctacccttagtatcggggacatgggaaggatacctttcctaactagatctcaaagtgcattggagtctcgaagagatgaaaataaagacccaactacagaaagcacgacaagtgaatcactttctgaggcatgcctcaacatgagcttgggaattgctagtaatggaaacaagttggaggctacttcaactgtggaaagacctatgctatcaccaacaacaggatttcctgaaggaagagagcttaccactgcattatctccatttcagcatgcacaaagggctcgtcattttctgaccagaccgccaagggttggtgaaggtgctgtttttgatccaacgaaagatatgcttccgcatcttcgtgttgcaaggccacctgcagaaggtaggggccgcaatcaattacttcctcgatattggcctagaataacagaccaagagctacagcaaatttctggagagtatccttattatatttatcaacttcttggtgatattatgcataattcaaattccaccattgtccccctgtttgagaaggttctaagcgccagtgatgcaggccgcatagggcgccttgttctaccaaaagcctgtgcggaggcatatttccctccaatttctcagccagaaggtcgtcctttgacaattcaagacgcaaaaggcaaagaatggcattttcagttcagattctggccaaataacaacagcagaatgtatgtcttggagggggttacaccatgcatacaatcattacaattacaggctggtgatacagtgacttttagtcggatagaacctggagggaaacttgttatgggcttccggaaggccacaaacactgtcagtttgccagactcacagatttcagctattgccaacggttccattcttggggatacattattttctagtacaaatgagaatttagcaatagtaagtggttattcaggatttcttcagtcaataaagggggctgcagatctccatacaagctctatatacgatcatcatgtgaactcagctgacggggatgttagttggcttaagacagataaattcggcagcaggccagatgaggggtctttgcagtttttaaagagaggccgcaatattggttccaaaagcaggaggctttcaatggatgctgaagaagcctgggaactaaagctttactgggatgaggttcaggagctgttgcgtcctgctccaactgcaaaacctactgtcgtgatgattgaggactacgaaattgaagagtatgatgaaccccctgtgtttgcaaagagatcaatttttaccatccgttctactggggaacaagatcaatggattcaatgtgatgattgctcaaaatggcgccggttaccacttaatgttattgttgcatccaagtggacatgtgctgacaacacaatcgactcaaaaagctgttcctgctctgcacctgaagaattaacccccaaagaattgcacattgttcttcagcaatacgaagatatgaggaggcgaaggaacagctttggttttaagcagaacatccccgaaatggatgcggtcagccttgatgcctttgccactgccgcagtctatggtgatgtcgggaaccaaggttccccttctgttgcgacaaccacaaagcacccccggcatcgccctggctgcacctgcatagtgtgtatccagccacctagcgggaagggcccgaagcacaacccagcttgcacctgcaatgtctgcatgaccgttaggcgtcgcttcaagacactgatgatgaggaagaagcaacggcagtcggagcgagaggaggccgaggcgagcaagaagatcgcttggatgaacagagatgagcctgagggaagcagcctgtcaagatccccacagacggttgacactacccgagacggagatgtgaccatgttcgacaaggttgacatcaacaagggccacatagacctgaacttccaccctactgccgtccgagacgaggagcggcatggcgggcagcctcgggtgagcatggtcagcctcctggaggtggccaaccggccactggagaactacatgaagcagaacggcctgacgagcttggctggggagcaagggagctccagcacatgtacaggtgcagccacggttccgcagccggctctggtggagagcgaagagcggacgtccaacaacgacggcgggcgtgtggcgacggcagagcagccggagagcatggccgtcgacgaggctggagataaccagccggacaaggctgccggtgactctgctgctgctttagcttga

SEQ ID NO: 11246 - DNA, 1128 bp, Oryza sativa
  Clone ID: TFbOSC100150j.C1.o1.fg
atggagttcactacaagcagtaggttttctaaagaagaggaggacgaggagcaggatgaggcgggaaggcgagagatccccttcatgacggccacggccgaagccgcgcctgcgcccacgtcgtcgtcgtcgtctcctgctcatcacgcggcttccgcgtcggcgtcggcgtctgcgtcagggagcagcactccctttcgctccgacgatggcgccggggcgtctgggagcggcggcggcggcggcggcggcggagaagcggaggtggtggagaaggagcacatgttcgacaaggtggtgacgccgagcgacgttgggaagctgaaccggctggtgatcccgaagcagtacgccgagaagtacttcccgctggacgcggcggcgaacgagaagggcctcctgctcaacttcgaggaccgcgcggggaagccatggcggttccgctactcctactggaacagcagccagagctacgtgatgaccaaggggtggagccgcttcgtcaaggagaagcgcctcgacgccggggacaccgtctccttctcccgcggcatcggcgacgaggcggcgcggcaccgcctcttcatcgactggaagcgccgcgccgacacccgcgacccgctccggctgccccgcgggctgccgctcccgatgccgctcacgtcgcactacgccccgtgggggatcggcggcggagggggattcttcgtgcagccctcgccgccggccacgctctacgagcaccgcctcaggcaaggcctcgacttccgcgcttcaaccccgccgccgcgatggggaggcagggcggcgggctcaccggtggtgctcgactcggttccggtcatcgagagccccacgacggccgcgaagcgcgtgcggctgttcggcgtgaacctcgacaacccgcatgccggcggcggcggcggcgccgccgccggcgagtcgagcaatcatggcaatgcactgtcattgcagacgcccgcgtggatgaggagggatccaacactgcggctgctggaattgcctcctcaccaccaccatggcgccgagtcgtccgctgcatcgtctccgtcgtcgtcgtcttcctccaagagggacgcgcattcggccttggatctcgatctgtag

SEQ ID NO: 11247 - DNA, 936 bp, Oryza sativa
  Clone ID: TFbOSC400240j.C1.o9.fg
atggagttcatcacgccaatcgtgaggccggcatcggcggcggcgggcggcggcgaggtgcaggagagtggtgggaggagcttggcggcggtggagaaggagcacatgttcgacaaggtggtgacgccgagcgacgtggggaagctgaaccggctggtgatcccgaagcagcacgcggagaagtacttcccgctggacgcggcgtccaacgagaaggggctcctgctcagcttcgaggaccgcacggggaagccatggcggttccgctactcctactggaacagcagccagagctacgtgatgaccaaggggtggagccgcttcgtcaaggagaagcgactcgacgccggggacaccgtctccttcggccgcggcgtcggcgaggccgcgcgcgggaggctcttcatcgactggcgccgccgccccgacgtcgtcgccgcgctccagccgcccacgcaccgcttcgcccaccacctcccttcctccatccccttcgctccctgggcgcaccaccacggacacggagccgccgccgccgccgccgccgccgccggcgccaggtttctcctgcctccctcctcgactcccatctacgaccaccaccgccgacacgcccacgccgtcgggtacgacgcgtacgccgcggccaccagcaggcaggtgctgttctaccggccgttgccgccgcagcagcagcatcatcccgcggtggtgctggagtcggtgccggtgcgcatgacggcggggcacgcggagccgccgtcggctccgtcgaagcgagttcggctgttcggggtgaacctcgactgcgcgaattccgaacaagaccacgccggcgtggtcgggaagacggcgccgccgccgctgccatcgccgccgtcatcatcgtcatcttcctccgggaaagcgaggtgctccttgaaccttgacttgtga

SEQ ID NO: 11248 - DNA, 705 bp, Oryza sativa
  Clone ID: TFbOSC408625j.C1.o9.fg
atgagctcgtcgacggcggccagcatcgggccgccgcagccgccgccgccccccacgtctcccgaggaagagaagtgcctcaacttggagctctggcacgcctgctccagcccgctcgtctgcctcccctccgtcggcacgcgcgtcgtctacttcccgcaaggccacagcgagcaggtgtcgtggctcagtgcaatgggatgctcacttctgtccaggggaaaccatcaaagaccatggtggattgccttgccatcttcgtgctggtgcttcttctccaagactctcgccgagcgcgaggcgttctattacgtggttgacaacgctgctgtcatggacttcatcactgtgaacaccagcggctccatcctcatcaacatgctcaagcctgagtataggaaatttggtgaatgggggaacaggtgcatttggtttacaacaattcagttctctgtaatctccaaggatctagcttcttacatatcaattcagccagtaagtggccaaactatctgtgttggattgttatgggagtatattataggtcattttctatcttcaacagctcttgtatcattcatttgttgctccaaaacacatgggtatattgcttcagcattctataatgcaccccaggagcttaaaaaggatattgagctaatgatagtgatgaccaggagctatctaaggaaaaagaataaataa

SEQ ID NO: 11249 - DNA, 595 bp, Oryza sativa
  Clone ID: TFbOSC100150j.C1.o1.np
atcatgtaagatcaatgtgtgttttgatttttattctgtgatgaacaattggcatctgtgattattggttttgatatttggagattatcgtcgaagtggttttggagataatcaattttcaggtgatgatcagattcactgttattttatgtgaccggtctgaccgggctgtgtatgccggctagagttgatgcacgtggttggtgaagattctatatggcatacgatggaggtattgtgtgcgtatgggatgcggagtcgaatttggaaggagtccaaatttggtacaattggttatgtaaagtttgtatcttgtactagaggatttcctaaggtgtttaggactcttagtatgagtttggttcgtggctttaggctgcctacctcatgtataaatagagggggagcgtctaaccggcaactcaccggcggtcagaccgatggcattgtggcggtcagaccggcggcggcgacagcgagcggcaggcgactttggcagttcgaccgatcattctacatcggtcagatcggcggcatccactcggtcagaccgacagatcaatctcggtcagaccgatctccgtcgatttcgagg

SEQ ID NO: 11250 - DNA, 2289 bp, Oryza sativa
  Clone ID: TFbOSC101706j.C1.o7.fg
atggcggcggcggcggcggcgctcgccgacgacggcgacgggatcgtagaccgtgccatgtggctcgcatgcgccgccccgaactccggccgcctccccgccgtcggctcgatggtcttctacttcgtcgacggccacgcagagcagttttgccagttccccgcacctctcctggagcagctcgccgtccccggcccccgcgtcttcctctgtacggtggccgccgtccgcctccgcgccgacgccctcaccaatgaggcctacgccgacatcaccctcgacccggtcgccgaccacgacgtcccgcgcctgctccccgctcccgctcccgccgccgccgccggtggccagcagcagcagttgcgttacttcgtcaagacgctgatgtcttccgatgccgagtaccgagaccgcttcgccgtccccatggatgttgccaaggacgtcttcccgccgctggtcgacgccaaagcggtccagcccctcatcgtcaaggaccttcaaggatctccgatgacgttcgactacggcaggaacggcaacagggtcacgctcgccaaggtctggaagaaatttcgggacgacatggacttcgtcgacggagacagcgtcatcttcatgcgtcgccgcgacgacgacgagctgtacgtcggggtgcggcgccagcgcacgctcgacaagccactcaggacgcgccgatccaggcctccgacaccgcttccggtggccgtgcaggaggtgatagctgcagcgggtcgcgcggcggccggcgagcagttcactgcgacgtaccgctcgcggcaggacggcgacgagttcgtcgtgccacgcgaggtggtggaggaggggctccgcctccgctccagattcactcccgagatggaggtggagtttgtttgggcccttgaggatggcgcgccgcccagcgtcgggccacatggcaagatcaccgccatccacgacactacatggatgtggcgatcagtcgagattggatggacgggaggttcagagatgaacaagtacgccaacttctggcaagttcgattggttggttcggacgattttgcttctgctgctcctccccctcctctttctccaaagaggctgaagagttcagagcagtgcccgtcgcgtccaccagagccccttccaggcagggtgtttctatgtaaagtcacagctgtccgcttggatgcaacaagaaatgagctctttgcgaccatgtccctcatcccagtcgccagagaccaagccatccagcctcaggcgcccgctgatccaggtccaagctcccctcaagtgcagactactcttgtttcatttgtgaagcctctcacgtgcaccgatgctgtcaagaatcggtatcggttcatagtgcccaagagagagaccgccatgggtgttctaccccagctccaattgaacgaacacgtgccgctctatatcaaggacatgcacggaaaggagtgggtgattaattatacatggaaagagtacacccacatgctttccagtggctggataaaattcgcgaatgccaaccgccttgtcacaggtgacaacgtagtgtttatgcgcagcatggacagtggcgagagatacatggggctgcgtcgcaccctcaagccggagccagtgtcagttgacgaagtgattgaggccgtatggagggcggcgcgtctcgagccgttcgaggtgacctacctctcgcgccaggacggcgacgagtttgttgtaccgtgtgggattgtacataatgctctacgagcgaagtttaccccaggaatggtggtaaacttcgtatgggctgttgaggaggacaggctgccgaatgttgggccacagggaaaggtcattgccatagagaactatgcaacctcaatctggaggatgattcaggttgagtggccatcctgtgcaggaatgaacagatatgttaatttttggcaaattcgtgaagttcttggagagagttcctttgaggcatccacttgcattgtgagaagtcaagattactcgccggcaccacagaggaatttagttaatgcgcttcagcttcctgacggaacaaaacagcttcagcaaaacaagaagtctgtttcctcgtcatccaccttccgactctttggcaaaaaaatgacacctggcgtgccaccaagaagagacaccagtggtctttctggacaggtatcattattcagccattatcttccccatgatgaggacgatggacaagttccaacgatgaggcaacggctagagacgctgtttcctgataacatctga

SEQ ID NO: 11251 - DNA, 1224 bp, Oryza sativa
  Clone ID: TFbOSC101706j.C1.o6.fg
atggcggcggcggcggcgccgctcgccgacgacggcgacgggatcgtagaccgtgacatgtggctcgcatgcgccgccccgaactccggccgcctccccgccgtcggctcggtggtcttctacttcgtcgacggccacgccgctcagttttgccagttccccgcccctctcctggagcagctcgccgtccccggcccccgcgtcttcctctgtacggtggccgccgtccgcctccgcgccgacgccctcaccaatgaggcctacgccgagatcaccctcgacccggtcgccgaccacgacgtcccgcgcctggcccccgctcccgctcccgcacccgccgccgccgccggtggccagcagttgcgttacttcgtcaagacgctgatgatttccgacttcgacttccgcatccgcttctccgcccccatggctgacgccaaaggcgtcttcccgccgctggtcgacgccaaagcggtccagcccctcctcgtcaaggacctccatggatctccgatgacgttcgactacggcaggaagggcaagagagtcacgctcgccaaggtctggaagaaatttcgggacgacatggacttcgtcgacggagacagcgtcatcttcatgcgtcgccgcgacgacgacgacgacgacggcgagctgtacgtcggggtgcggcgccagcgcacgctcgaaaggccactcaggaatacgatgcgccggtacaggcctccgaccccgccccaggcggccgtgcaggaggcggtactagccgcggcgggtcacgcggcggccggcgagcggttcacggtggcgtaccggtcgcggaaggacggcgacgagttcgtcgtgccacgcgaggcggtggaggaggggctccgcgccagactcacctcgctggcggaggtggagtttgtgtgggccgtcgaggacggcgcgccgcccatcgtcgggccacggggcaaggtcaccgccattgccaccggacagctgtggcgaaatctcgagattgtatgggatggaaactcggagatggacatgagtgccaacttttggcaagttcgacctgttgaggaagttgatatttctccttctactcctcctccgaagaggctcaagaattgtgagattgatgataccgcctctacttctgtttccgtcgacaatggagatgagcaagttccaacgatgaggcaacggctagaggcgctgattcctgataacatctga

SEQ ID NO: 11252 - DNA, 2778 bp, Oryza sativa
  Clone ID: TFbOSC400219j.C1.o15.fg
atggctgctgcagcgacggcggcggcctcgccggttgaggggctcaccggcggcggcggcggtggtggtggaggagtggacgggctgttcgtggagctgtggcgcgcgtgcgcggggccgctggtgacggtgcccgccgtcggggagagggtcttctacctcccgcagggccacatcgagcaggtggaggcatcgacgaaccaggtcgccgagcagcagggggctccgctctacaatctgccatggaagatcccgtgcaaggtcatgaacgtcgagctcaaggctgagcctgatacggatgaggtgtatgcgcagctcaccctgcttccggagaagcagcaggatgggaatgggagtggtaacgggaatgtgtccaaagacaaggtggaggaggaagaggtggtgccaccagctgcaactgagcggccccgggtgcactccttctgcaagacgctcactgcgtcggacacgagcacgcatggtggcttctcggtgctgcgccggcacgcggatgagtgcctcccaccactgtacagcttttttgataggctaattgtagcaatgcctttgacgtcgctgcttgatcaggatatgagtcagcatcccccaacacaagagctggtggccaaggatcttcatggggttgagtggcgcttccgtcacatcttccgaggtcagccacgaagacaccttctccagagtggttggagtgtttttgtgagtgccaaacgccttgttgctggagatgccttcatatttctcagaggtgagaatggggaactacgagttggagttcggcgtgcaatgagacaacaagctaatattccatcttcggtcatatcaagccacagtatgcatcttggtgttcttgcaactgcatggcatgcagtgaacactggaaccatgttcactgtgtactacaagccaaggactagtccatctgaatttgtggtaccacgtgatctgtacaaggaatctctgaaacgaaatcattcaatagggatgagattcaagatgacatttgaaggcgaagaggctgcagagcaaagattcactggcacaattgttggagtaggtgattctgacccatctggttgggctgactcaaaatggcgttcccttaaggtgcgatgggatgaagctgcttctgttcctcgtcctgatagggtttctccttggcaaatagaacctgctaacagcccttcccctgtcaaccctcttccagcaccccgaaccaagcgggctcgtccaaatgttttagcttcctcacctgacttgtctgctgtaaacaaagaagttgcttcaaaagtcatggcaaactcgcagcaaaatggtcttccaagggccttccacagtcaagaaaacatgaatttgagaagtcgttttggtgatagcaatgagctaaatacttcccaaaagcttaccatgtggtcttcaggaagcaatcaagagaaaaataatgtttctgtccagagggagctaggttcacagagttggatgcagatgagaaggcctgatggttcctctgagatattatctggatttcaaccactgaaagatacgcggaaccctctgagttcatttcctagtcagatatctggaaaccgttcaaatacgtggaacacaatcaatgttcattatcccgaccaaaatgccaatcataatatgtaccctggcacatggtctcttatgcctccaaacactggttttggtgtgaatcagcagaactacctaatgacgcctgacatcacactccctcaaaggtctcttaatgccaagtttggtgggaatggagcattcacttcgcttcgggcccatggcatagatcagcgctcctctggttggcttgggcatattgagccaagttctcacattgatgatgcctcatcgagtcttatcaagccacagcctttggttattgatcacaatgttcagaaagctaaaggctcttcatgcatgctatttgggatttctcttgacagccctgcaaaacctgaactattgatatccccaccaagtgttgcatttgatgggaagctccaacaggatgcacttgaagaggatgaatgctctgatccttccaagactgtgaagccacttgatggagctcagcacgattctgctagagagaaacatcagtcatgtccagatggtaccaaaaacattcagagtaaacagcaaaatggttcctcccgaagttgcaagaaggtccacaagcaaggaatcgcactcgggaggtcaatagatcttacaaagttcacttgctatgatgagttgattgctgaactggaccagatgtttgacttcaatggtgagctgaacagttcaagcaagaactggatggtcgtttacactgataatgagggtgacatgatgttggttggtgatgatccttggaatgaattctgcaacatggttcataaaatcttcatctacacgagggaggaggtccagaagatgaatccgggtgccctaaactcaaggtcttttgtggtttgcaagaacagaagacgacatatccatggtaggaaggaatcttttcgtggtgtagtagtagtagctggtgctttatatgtatcgggtaagccccgcagtaccccatttgtagatggtgcttgtcctggtatcagttgcccgctcttcgttttcgacaagttttgggtgtgctttgttgaggttttaagttattgtatgatatgccccgtagtagtgaaaggtgctgaggccaagctgccgcgcccggtgcgcttgcttgcttgcgctcttcctccctcctaa

SEQ ID NO: 11253 - DNA, 141 bp, Oryza sativa
  Clone ID: TFbOSC1558j.C1.o4.gm
atgaaggcgagggggtatgttgttgtgttgttggagaaggcggaagcgacggggagatgggcgtcatcggcggcggaggcgacgagcggccacggtgtcagcgacggggtcttctatcatgccaaggctctcaaaaactga

SEQ ID NO: 11254 - DNA, 3114 bp, Oryza sativa
  Clone ID: TFbOSC400924j.C1.o6.fg
atggcgagctccggcggagggggtggtggtggggaggagggggagggcaggggggcgaccaaggtgaaccaggagctgtggtacgcgtgcgcggggccgctcgtctcgctgccgccgcaggggagcctcatcgtctacttcccccagggtcacagcgagcaggctgatcctgacacagatgaggtttatgctcgaatgactctccagccagttagcaatgtgacccagtgtgacaaggagacattgctagcatcagagcttgcgctgaagcaaaccaggccacaaacagaattcttttgcaaaacactgaccgccagtgatacaagcactcatggaggtttctctgtgccacgccgtgccgctgagaggatttttcctcgtcttgacttctccatgcagcctcctgcccaggaactgcaggcccgggatttgcatgataatgtttggacatttcgtcatatataccggggtcagcctaaaaggcatttactgactacgggctggagcctatttgtcagtggaaagagattacttgctggtgattcagtcttgtttattagtgatagtatgcatattggaattcttgctgcagcagcccatgctgcagcgaataacagccaatttacaatatattataacccaagggccagtacttccgaatttgtgattccttttgccaaataccagaaggcagtgtatggtaaccaattatctcttggcatgcggttcagaatgatgtttgaaactgaagagtcaggaacaagaaggtacatgggtacaataactggtataagtgatctggatccagtaaggtggaaaacatctcattggcgcaatattcaggttgcatgggatgaagcggcaccaactgagagacgcaccagggtttccctctgggagatagagcctatcattgctccattcttcatctacccctcaccattattcaccgcaaaacgtccaaggctacctgggatgacagatgacgagactgaaatggacggtcttctcaagagggccatgccatgggttggtgaggagatttgcaagaaagatctgaatattcagaacagtgtagtgcctggtctaaatctagctcagtggatgaacatgcagcacagctcctcgcttcctggcacggttgtgcaaccagagttactaaactcattaagtggaaaacctgtacaaaatttggctgcagctgatttatcaaggcaaatcagttttcacccgcagttcttgcaacaaaacaacatccagttcaacactgcgttggtacctcaacaaaaccaacagacagaacaattagcgaaagttatccctacaccaaaccaattgggaagtgttataataccgcagaaggtggttcaggattgcaactctgaacaaaggcagcatgtggttactcaaccagtgcaaggcagccagccaaacataaacattccacagcctcagcttgttgttcaggctcagcttcagcaaccgcaagtcattctccaggcgcaactgcagcaacctcaagttgttgtccaggcccaactccagcaaacgcaaccttcggtccaaagtcacactgtcttacaaggaggtcttcaacaaatccagcttctccagcagcaacagccacatgtgcagcaccagcagataccgcaacagttacatcatcagcagcagcaaacacaacagttgcaacctgtccagcaggttcagcagtcagtacaggaacatcagcaaataaagatacaacctgttcatgtttccatggatgcaagtatgaatacgcaggtggcagatcatcaaatgaaactacaactactcaaggctttacagccacagcagcctctgatctcagagcagcagaagatgcttttggatttgcagcagcaagtgataaattcacagtcagctcctcagcagtgtgtacagcaaaaggttcagtctcaccaagttcaagacttaactgggaatgtcattcctaattcaaaatcagacatcgctacttccatgggtgctagttctttgcatgtagctggtggacgccaattattgaagacagatgatgttccgtctacttcaacatcaccatccactaacagcaatcctgttcttctgcaatccatcccaagtagctccaagaaccaaagtttaactacagcaggaaagacatctcaatcatctgttgtgttgggtcctacgatcgaacaggacacaaagccatatcaaaatgtaaagcaaacagttatgattcccaagacgacagaacaaaggccagctactggacaagactgcataaataacaatcctcaaatggattacttggacacatcctcttcagctacttcggtttgcctttcccaggctgatggatcattgcaacaaaactttccaccttcatccttccaccagcatcacttgctaaaagacacagttccagatagcgagtttgaggttacagatccaagaaataaccttctatttggggtgaatattgatggtcaactgggtttaccacttaatgcagacctgcttgcgaatgacattggaaccgataaatacatggatcagttgccaggaaatggcatttctaacttcatttcatcaaaggattctcaacaagagttatcatcttcaatgatttcacattcatttggagttgctgatatggcattcaattctatagattctgcaatcaatgataccccattcttaaatagaaattcccggtctgcagcaggtcctgcacatcaacggatgagaacctacaccaaggtacacaagcgtggtgcggtgggaagatcaattgacatcaatcgatattctggatatgatgagctgaaacatgacgttgctcggatgtttggtattgaggggcagcttggtgatcaaaatagagttggctggaagctagtatatgaagatcacgagaaggatgttctactagttggtgatgatccatgggaggactttgtgaaatgtgtacgatgtatcaggattctttctccacaggaagaaatgcagatgagattagtcggcgactttggagacagctttctacccaaccaagcttgcagcagctctgatgggggtcatccctggaggataaccggcgactag

SEQ ID NO: 11255 - DNA, 1545 bp, Oryza sativa
  Clone ID: TFbOSC900261j.C1.o1.fg
atgagctcgtcgtcggcggccagcatcgggccgccgcagccgccgccgccccccgcgccgcccgaggaagagaagaagtgcctcaactcggagctatggcacgcctgcgccggcccgctcgtctgcctccccaccgtcggcacgcgcgtcgtctacttcccgcaaggccacagcgagcaggtggcggcgtcgacgaacaaggaggtggagggtcacatcccgaactaccccaacctgccggcgcagctgatctgccagctccacgatgtcacaatgcatgcggatgtggagactgacgaggtgtacgcgcagatgacgctccagccactgaacccagtaaggcgcctggggtttttgcatgatgtttgcagtgctgaggttttgatgcaggagcagaacgatgcgtaccttcccgcggagatggggataatgagcaagcagccgacgaattacttctgcaagacattgacggcgagcgacaccagcacgcacggggggttctccgtgccccgccgtgctgctgagcgcgtcttccctcctctggatttcacacagcagcctccagcccaggagctaattgcacgggatattcatgacatcgagtggaagttcaggcacatctttcgaggccaacccaaacgacacctgctaaccactggctggagcgtttttgtcagtgctaagagacttgttgctggagattctgtgcttttcatatggaacgagaaaaaccagcttttacttggaataagacgtgccagtcggccacagactgtgatgccttcctctgttctttcaagcgatagcatgcacataggtctccttgcagcagcagctcatgctgctgctacaaacagccgtttcactattttctacaacccccggtatatggggactataactgaagttagtgatgcagacccagtccgttggcctagttcctattggagatctgtgaaggttggttgggatgaatcaactgcaggggaaaggccaccaagagtttctttatgggaaattgaaccattgacaacctttccaatgtatccatctctgttcccactgagagttaagcatccttggtattcaggagttgcttccctgcatgatgacagcaatgctttaatgtggctgagaggagttgctggtgagggaggttttcagtctctgaactttcagtcacctggtattggctcctggggacaacagaggctccatccatccttactgagcagcgatcacgatcagtaccaagcagtagttgctgctgctgctgcttcccaatctggtggttacttaaaacagcaattcttgcaccttcagcaacctatgcagtcccctcaagaacactgcaacctcaacccattattgcagcaacaaattctgcagcaagcaagccagcaacagataattaatcctgatgcccaaaatatccaaacgatgttgagcccaagtgctatacaacagcaactccagcaactacagcaaatgcagcaagttcagaatgatcagaagcagaagattcaaccagatcaaagctaccaa

SEQ ID NO: 11256 - DNA, 2490 bp, Oryza sativa
  Clone ID: TFbOSC900260j.C1.o14.fg
atgagctcgtcgtcggcggccagcatcgggccgccgcagccgccgccgccccccgcgccgcccgaggaagagaagaagtgcctcaactcggagctatggcacgcctgcgccggcccgctcgtctgcctccccaccgtcggcacgcgcgtcgtctacttcccgcaaggccacagcgagcaggtggcggcgtcgacgaacaaggaggtggagggtcacatcccgaactaccccaacctgccggcgcagctgatctgccagctccacgatgtcacaatgcatgcggatgtggagactgacgaggtgtacgcgcagatgacgctccagccactgaacccagtaaggcgcctggggtttttgcatgatgtttgcagtgctgaggttttgatgcaggagcagaacgatgcgtaccttcccgcggagatggggataatgagcaagcagccgacgaattacttctgcaagacattgacggcgagcgacaccagcacgcacggggggttctccgtgccccgccgtgctgctgagcgcgtcttccctcctctggatttcacacagcagcctccagcccaggagctaattgcacgggatattcatgacatcgagtggaagttcaggcacatctttcgaggccaacccaaacgacacctgctaaccactggctggagcgtttttgtcagtgctaagagacttgttgctggagattctgtgcttttcatatggaacgagaaaaaccagcttttacttggaataagacgtgccagtcggccacagactgtgatgccttcctctgttctttcaagcgatagcatgcacataggtctccttgcagcagcagctcatgctgctgctacaaacagccgtttcactattttctacaacccccggtatatggggactataactgaagttagtgatgcagacccagtccgttggcctagttcctattggagatctgtgaaggttggttgggatgaatcaactgcaggggaaaggccaccaagagtttctttatgggaaattgaaccattgacaacctttccaatgtatccatctctgttcccactgagagttaagcatccttggtattcaggagttgcttccctgcatgatgacagcaatgctttaatgtggctgagaggagttgctggtgagggaggttttcagtctctgaactttcagtcacctggtattggctcctggggacaacagaggctccatccatccttactgagcagcgatcacgatcagtaccaagcagtagttgctgctgctgctgcttcccaatctggtggttacttaaaacagcaattcttgcaccttcagcaacctatgcagtcccctcaagaacactgcaacctcaacccattattgcagcaacaaattctgcagcaagcaagccagcaacagataattaatcctgatgcccaaaatatccaaacgatgttgagcccaagtgctatacaacagcaactccagcaactacagcaaatgcagcaagttcagaatgatcagaagcagaagattcaaccagatcaaagctaccaagttcctacaagtgcagttctcccaagtccaacatcattaccgagtcatttgcgagaaaaatttggcttctctgatcctaatgcgaattcttcaagcttcatcacctctagcagtagtgataacatgttggattcgagcttccttcagggaagttcgaaagctgtggacttatctcgatttaatcagcctgtagctagtgagcagcagcagcaacaggcatggaagcagaagtttatgggttcacagtcagtgtcttttgggggctcggttttgcataactcacccacaagcaaagatggttctgttgaaaacaaaattggtcgtgatgtgcaaaaccagtccctttttagtccacaagttgactcttcatccctcctgtacaacatggttcctaatctgacttcgaatgtttcggatggcaacttatcaacgatcccttctggatcaacttatctgcagaatgcaatgtatggttgcttggacgactcttctggtttattgcaaaatacaggagagaacgatccagcaaccagaacatttgtgaaggtttacaagtcaggttcggttgggaggtcgttggacatcacccggttctctaattatgctgaacttcgagaagaactgggtcagatgttcggcattaagggtcaattggacgaccctgatagatcaggctggcagcttgtattcgtcgacagggagaatgatgtgcttctccttggagacgacccttgggaattcattaacatctatatgaatgtgaggaatgctaaaaagtcttacattatgaaacggagggagtacaatactttggtttcctggtttccacaactaatagcttatcgaggaaagactgttcttccttcaataatatgtgttggtcagtcactacatgttgatgctcagttacccaagacccttcgtgagagtaaacatcagacatga

SEQ ID NO: 11257 - DNA, 3282 bp, Oryza sativa
  Clone ID: TFbOSC401881j.C1.o3.fg
atggcgagcatgaagcagcagcagacgccggcgagctccgcggtgaccgcggcggcggcggcctcctcctccgccaccgccgccgtggccgcatgcgaaggggagcggaaggcggcggcgatcaactcggagctgtggcacgcgtgcgccggcccgctcgtgtcgctgccgccggtgggcagcctcgtcgtctacttcccgcaaggccacagcgagcagctactaataactgtacttgttcattaccaaagtggttgggagcattgggcctactggcttcccttttctgttgccctactagtatggtcaatagacagtcttgggaggactaatcctgcaattattcgtgcatttctttttagaaagatgagaaaaaaggtgtacaaaagtaacataatattaagaaatgctttctccatgctattggaaacagcagaatatctacttaatctaagctttttgtttcaggttgcagcttctatgcaaaaggatgtggatgcacatgttccaagctacccaaatcttccctccaagttgatatgtcttcttcacggtgtcaatttgcatgcagacccagatactgatgaagtttatgcacagatgactcttcaaccagtgaatacatatggaaaagaggcgttgcaaatatcagagcttgcactaaaacaagcaaggccacaaatggaattcttctgtaagacactcaccgcaagtgatacaagtacacatggaggattctctgtgcctcgccgtgccgcagagaagatattccctcccctggacttctctatgcaacctccagctcaagaactgcaagctagagatatacatgacaatgtgtggacatttcgtcatatatatcgaggtcaaccaaaaagacatttacttactactggttggagccttttcgtgagtggcaagaggttatttgctggtgattctgttattgttgtgagggccagtcctactgaatttgttatcccatttgcaaaataccagaaggcactgtatagtaatcagatatctttaggaatgcggtttcgcatgatgtttgaaaccgaggaattaggaacaagaaggtacatgggtacaataactggaataagtgacctagatcctgttggctgggatgagtctgcagctggtgaaaggaggaacagagtttcaatctgggagattgaaccggttgcagctcccttttttctatgtccccaacctttttttggtgtgaagcgccccaggcaattagatgacgagtcagagatggaaaaccttttcaagagggcaatgccttggcttggtgaggaggtatgcataaaggatactcaaaaccagaacagtacagcacctggtctaagtttggttcagtggatgaacatgaacaggcagcagagctcatcattggctaacaccgctgcgcagtctgagtacctgcaagctctaggtaaccctgccatgcaaaaccttgctgctgatgaacttgcaaggcaactatatgtccagaacaatctccttcaacagaactgcatacagtttaattctcccaagctccctcagcaaatgcaaaccatgaacgatctgtccaaggcggcaattccgttgaatcagcttggggctatcatcaatcctcaagatcagaaacaagatgctgtcaaccatcagagacagcagaactccatacaagtgattcccctgagccaagctcaatctaatctcgtccaggctcaggtgattgttcagaatcagatgcaacagcagaagccatctccaactcaaaacccgcaaaggattaatggccagcggctgcttttgtctcatcaacagaaggatcaaaatttacagctgcaacagcagcttttacttcagcaaaaacaacagttacagcagcagcagcagcagcaacaacagaatcagcagcagctaaataagtcccttggacagttggtaaatctggcaagtcagcagtctaagttgtttgatgaggagcttcagttgcagatattacagaaactgcagcagcaatcactgatgtcacaatccacatcaacactctcacagccacctctgatccaagaacagcaaaagttaatcacggacatgcaaaagcagttgtcaaattcacattcacttgctcagcaacaaatgatgccccaacaagaaatcaagccttcattgcaagcaacaccattgctacccacggtccagcaagagcaacagcagaagcttttacagaaacaagtctcacttgcagatgtgtcaggagttgcttttcaaccaatttcatcaaccaatgtgatccccaaaactggaggtgctatgatcatttcgggtgctacacaatctgtagttacagaggaaatgccctcttgttcaacatctccatccacagctaatggaaaccactttacacaatcaaccaaaaacagacattgcatcaacacagaaaggctgccaccgtccactgctccaatgttgatcccaacctccattgacgctgtaacagcaactccactaatgaccaaggaattgccaaagccgaataataatgtgaagcaaagtgttgtcaactcaaaattaccaaatgttgctcctggcccacaaaattgtataaaccatgcattgcaaacagacaacttggaaacatcttcatcagcaacttcattatgtccttcccgaacagatggacttgtgcatcaaggtttcccctcttctaacttcaatcaacaccagatgttcaaagatgcacttcctgatgtagaaatggaaggtgtggatccaagtaacagtggcttgtttgggatcaacaatgataacctgttaggattcccaatagaaacagaggacttgctgataaatgcacttgattctgtcaagtatcagaatcacatatcaactgatgttgaaaacaactacccgatgcaaaaggatgctctgcaagaaatatcaacctccatggtttcccagtcatttggtcagtcggatatggcttttaattccattgattctgcgatcaatgatggtgccttcttgaacaaaaattcctggcccgctgcccctctgctgcagagaatgcggacattcaccaaggtgtacaaacgaggagctgtaggccggtctattgacatcggcaggtactctggatatgaagagttgaagcatgctttggctcgcatgtttggtatagagggtcaacttgaagatcgacagagaataggctggaaactggtctacaaggatcacgaggatgacatcctgcttcttggtgatgacccatgggagtaa

SEQ ID NO: 11258 - DNA, 1203 bp, Oryza sativa
  Clone ID: TFbOSC102151j.C1.o2.fg
atggagttcactacaagcagtaggttttctaaagaagaggaggacgaggagcaggatgaggcgggaaggcgagagatccccttcatgacggccacggccgaagccgcgcctgcgcccacgtcgtcgtcgtcgtctcctgctcatcacgcggcttccgcgtcggcgtcggcgtctgcgtcagggagcagcactccctttcgctccgacgatggcgccggggcgtctgggagcggcggcggcggcggcggcggcggagaagcggaggtggtggagaaggagcacatgttcgacaaggtggtgacgccgagcgacgttgggaagctgaaccggctggtgatcccgaagcagtacgccgagaagtacttcccgctggacgcggcggcgaacgagaagggcctcctgctcaacttcgaggaccgcgcggggaagccatggcggttccgctactcctactggaacagcagccagagctacgtgatgaccaaggggtggagccgcttcgtcaaggagaagcgcctcgacgccggggacaccgtctccttctcccgcggcatcggcgacgaggcggcgcggcaccgcctcttcatcgactggaagcgccgcgccgacacccgcgacccgctccggctgccccgcgggctgccgctcccgatgccgctcacgtcgcactacgcccccccctcgccgccggccacgctctacgagcaccgcctcaggcaaggcctcgacttccgcgccttcaaccccgccgccgcgatggggaggcaggtcctcctgttcggctcggcgaggattcctccgcaagcaccactgctggcgcgcgcgccgtcgccgctgcaccaccactacacgctgcagccgagcggcgatggtgtaagggcggcgggctcaccggtggtgctcgactcggttccggtcatcgagagccccacgacggccgcgaagcgcgtgcggctgttcggcgtgaacctcgacaacccgcatgccggcggcggcggcggcgccgccgccggcgagtcgagcaatcatggcaatgcactgtcattgcagacgcccgcgtggatgaggagggatccaacactgcggctgctggaattgcctcctcaccaccaccatggcgccgagtcgtccgctgcatcgtctccgtcgtcgtcgtcttcctccaagagggacgcgcattcggccttggatctcgatctgtag

SEQ ID NO: 11259 - DNA, 2040 bp, Oryza sativa
  Clone ID: TFbOSC100243j.C1.o9.fg
atgtcgtcgcaaggtgacgcgctgcctctggttcttgttttgttcttgttcttgtttttgttttgttttgtttgccgggagctgcaagagccgacggacccggcgctgctggcggagcaaatcaagatgttccaggtgccgtacaagatcctctgcaaggtcgtcaacgtcgagctcaaggccgagacggaaaccgacgaggtgttcgcgcagattaccctgcagcctgacccggatcaagagaatctgccaacattacctgacccgcccctgccggagcagccgaggcctgtggtgcactccttctgcaagatcctgaccccatccgacaccagcacccatggcgggttctccgtgctccgacggcatgccaacgagtgcctcccgccactggatatgtccatggcgacaccaacccaagagctcatcacaaaggaccttcatggatctgagtggaggtttaagcacatctacaggggccaaccccgtaggcatcttctgactactggatggagcacgtttgtgacatcgaagaagctgatttctggcgacgcgtttgtctacttgaggagtgagacaggagagcagcgtgtcggagtgaggcgtcttgtgcagaaacagagcacaatgccggcatctgttatatcaagccaaagcatgcatcttggtgtgcttgcaagtgcatctcatgctatcaagactaattcaattttcctagtgtactacaggccaaggttaagccaaagccaatatattgttagtgtgaataagtaccttgcggctagtaaggttggatttaatgtgggcatgaggttcaagatgagttttgaaggggaagacgtcccggttaaaaagttttctggaactatagttggtgaaggtgatctttctctgcagtggtcaggttctgaatggaagtccttgaaggtccaatgggatgaagtcacaaatgttaatggccctgagagggtttccccttgggaaattgaaacatgtgatggcactgcacctgccatcaatgtacccctgcagtcagcaacgaaaaacaagcggcctagggagccaagtgaaactattgaccttcaatcactggaaccagctcaagagttttggctatctggaatgccacaacagcatgagaagacaggtattggttccagtgaacctaattgtatctctggacatcaagttgtttggccaggcgagcatccaggatatggtgccgtgagtagttcagtttgtcagaatccgctagtacttgaaagttggttgaaggatttcaactcttcaaacaagggtgtctcccctaccttgtcagagatttctcagaaaatttttcaggttaccagcaatgaagcaagaattgctacatggcctgcacgttctgcttaccaagctgaggagcccacttccaagttgtcttcgaacaccgctgcctgtggttaccgaactgaagaagttgctccaaatgcgtccaaggttgttgaaggaaaaaaggaacctgccatgtttcgtctgtttggtgtggatttgatgaaatgtaccagcatatctactaccactgatgacaagtcaagtgtgggagcaggagaagcttcagccaaaggtactggttctcacgaagactctggtcagctgtcagcattctcaaaagtgacaaaagagcatattgctgcggatgaaagcccccaagagatccaaagccatcagaattacaccgctagaactcgcataaaggttcaaatgcatggaaatgctgtgggcagagctgtggatctagctaatctagacggatatgagcaactgatgaatgagctggaagagatgttcaatataaaggacctcaaacaaaaatggaaggtggctttcactgatgatgagggtgacacaatggaagttggagatgatccttggctggaattttgccagatggtcagaaagattgtgctctatcccattgaagacgagaagaagatcgagcctcacccgaagttactgtcttcagctaatccagagcaggatcagaagactgggttttag

SEQ ID NO: 11260 - DNA, 1434 bp, Oryza sativa
  Clone ID: TFbOSC421067j.C1.o1.fg
cacgccgagcagtgtcccgcccctctcccggatccgctcccctccgcccaccgattcttcctctgcaccatcaccgccgtcgacctctccgccgacaccaccaccggcgagccctacgccaccatctccctcctccctcttcgccacgacgcccccgcccccgcccccgcccccgcccccgccgccgccgaattagcagaagcagaatcacaggagttccgctactacgccaagcagctgacgcagagcgacgccaacaacggcggcggcttctccgtgccaaggttgtgcgccgatcacatcttcccggcgctcaacctggatgatgacccgcccgtccagagcctcaccatgggggacctgcagggcgactcgtgggaattccgccacatctaccgcggcacgccgcgccggcacctgctgacgaccgggtggagcaagttcgtgaacgccaagcagctggtggccggggacacggtggtgttcatgtggtgcggggccccggcccccgagaggaagctgttggtcggggtgcgacgcgcggccaggtactcgggcgagtcggcgtgcaacgcgcgggggcgggtgcagccccaggaggtgatggaggcggtccgactggcggcggagcaggcggcgttcagggtgacctactacccgcggcatggggcgggggagttcgtggtgccgcgggtggaggtggataagggattgactactccgtggaggtgcgggatgcaggtgcgcgcccaggtgatggaggccgaggacacccgccgcctcgcttggctcaatggcaccctcactaacctccgccaccaacaaatctggcgcactctcgaggttgaatgggatgcctccgccgcgtcatcttccatgaaaaacagatttgttaatccttggcaggtccagcctgttgatttccctcctcttcccatggggctaaagatttctaacaacaatattagtgcacctgtgtgcaatggggattcactgctggtgccaccgatactaatgcacccgcaacctcaacctcccgctgacattcagggagccaggcataacaatggccatgcctatgcagatataccctcttcatcaacaccatcaatggtgaggactcagcagctgttcccaagggatcttcagattttagttccccacaccgacattgtcactcctcaaaatggatcaccgcccgacaaccccgtaaacacgcctctttctgcatctgacggaatgaagaccatacagctgtttggcgtcacaataacatcacctgtgcaaggagacaccaatggcgctttcgcttcagcacaagtgaatcaggttccagagggtgtagatgatgaaactgctaccgaagaagcttctgacacaagcctacctgactctcttaccaatggccacaatcaagatggtgctaggctttga

SEQ ID NO: 11261 - DNA, 1044 bp, Oryza sativa
  Clone ID: TFbOSC900237j.C1.o1.fg
gtaagatgggatgatagtacagatagcagccaccaaaacagagtttctccatgggagatcgagagagttggtggcagtgtctcggttacccattccttgtcatctgggtctaagcgaaccaaattgcactttcctcaaggcagtttggatactccatttcttaatggaaatggtcacccggactccatgggaactgaaaatttccacagggtcttgcaaggtcaagaatttaggggttctaggtcccatggtgttgtatgctctgaatcacctggtgtaccaaactttcaatctcctgacaataggagattttctgctgatatgcggggctacatgatgccagcaagtgggcccccacagcggaacacagagtttacttatcagcccataggcttcagtgagtctcttggattcccagaggtcttgcaaggtcaagaaatgtcacaagtagttcctttgttccgaggagctacttttggcgctcgtacacagaatgacagagttgtctctgctaattctgtgcatagatcagctgcacagagtggattgctagcttcaactctagggcatcccatctcgcagtttactctgtcatcgtcaaaggtatcttctccctcgtcggttctgatgtttaaccaagcgacagctccaaatcatgaaacagtaagcggaaccaacaacaaaggtatgcatgtcagccagtttgcttcccaggagatgctctcagaaactgtaacctggcccggcacacaacgtcaaacgccgagcgaaatcacgagcaaccagttcgccctggcgagaatcccagctcctccaagcggagctgaatccggattgcccaagagggatgccgggagaagcagctgcagactgtttggcttctccctgacaggcaacatgctgggagaagatggagaaggcctagatgatggagccattgaagctggttgcgaaaacccgcccgtgctggagctgtttgggcacagccattctactcccggtgctcttcatgccctgtgtgctgctgctcccctgggaatgtga

SEQ ID NO: 11262 - DNA, 2190 bp, Oryza sativa
  Clone ID: TFbOSC400500j.C1.o18.fg
atggtgattagtaggacattggtggtaaggggttttgatgaactttgggagacgattcggccggttttggtttcatcagatggtccagcttccatgagcaaaaatggactgttgcttgttgtttcggaggagttttggattggcaaggtttggtgggtgagcggtgatcgcatttgggggttggagatgaaggaggtgggggaggtggaggaggtgaggtgcttggacccgcagctatggcacgcgtgcgcgggcgggatggtgcagatgccggcgccgcgttcccgggtgtactacttcgcgcagggccacgccgagcacgccgacggcggaggcggggcggcggcggcggccgcggagctggggccgcgcgcgctcccgccgctcgtgctctgccgcgtcgaaggggtccagttcctggccgatcgggactccgacgaggtgtacgccaagatccgcctcgcgccggtcgcccccggggaggccgagttccgggagcccgacgagctctgcccgctcggcgccgccggcgacgcggcggagccgtcgccggagaagccgacctcgttcgccaagacgctcacgcagtccgacgccaacaacggcggcggcttctcggtgccccgctactgcgccgagaccatcttccccaagctggactacagggccgacccgccggtgcagacggtgctcgccaaggacgtccacggcgtggtctggaagttccgccacatctaccgcggcacgccgcgccggcatttgctcaccaccgggtggagcacgttcgtgaaccagaagaagctcgtcgcgggggactcgatcgtgttcctgcgcaccaggcacggggagctctgcgtcgggatacggcgggcgaagcggatggcgtgcggggggatggagtgcatgtcggggtggaacgcgccgggctatggcggcggcggcttctcggcgttcttaaaggaggaggagagtaagctgatgaagggccatggtggtggtgggtacatgaagggcaaggggaaggtgaggatggccgatgtcgtggaggccgctagcctcgcgtcgagcgggcagccgttcgaggtggcgtactacccgagggctagcaccccggattttgtcgtgaaggctgcgtcggtgcaggccgcaatgaggatccagtggtgctccgggatgaggttcaagatggcttttgagacagaggattcatcaaggattagctggtttatggggacaatatcttctgttcaggttgctgatcccaacagatggccgaattcgccgtggagacttcttcaggtgacatgggatgaaccggacctgttgcagaatgtgaaatgtgtcagcccatggcttgtggagcttgtgtcaagtattccaccaatccatttaggaccattttcgtcacctcgaaagaagttgcgggttcccccacatcctgacttcccatttgagggtcatcttctgaacccaattttccatgggaacccacttggtcctagcaacagcccactatgctgttacccggacaccgctcctgcaggcatacagggagccaggcatgctcaatttggtttaccactaacagaccaccagcttaacaagctgcaccttggtctgttacatagcggcagttttaacagacttgatgctattactccaccttcccggatatcaaagggctttgtggtcagtagtgcaccagcccatgacaatatctcttgtttgttgtcaatcagtacaccacaggtcgcagagaaatctgatgacagaaagacgacaccccatataatgctgtttggaaaggctatatttactgagcagcagataacttcaagcggatcaacagagacactctcccctggagttactggaaatagctcacctaatggcaatgcgcacaagacaggaaatgcatctgatggttctggttcatcaatttgcattggtttctcatctcaaggtcacgaggcttctgaccttggtttagaagctggtcactgcaaggtatttatggaatcggaggacgttggtcgcaccattgatttgtctgtctttgggtcatacgaagaactgtatggtcggctggctgacatgttcggaatcgagaaagaagaaatcataaaccatcttcatttccgtgacgcagctggtgtagtcaagcatccgggtgaggtaccattcaggtga

SEQ ID NO: 11263 - DNA, 2727 bp, Oryza sativa
  Clone ID: TFbOSC401589j.C1.o17.fg
atgaagctctcgccgtcggccggcggcgtctccgaccagccgccgtcgccgccggaagttgcagaggagcagaagtgcctaaattctgagttgtggcatgcatgcgccggccctctcgtttcgctgcctgcggtcggtagtcgggtggtttattttcctcaaggccacagtgagcaggtagctgcatcaacaaataaggaaatggagtctcagatccccaactatcctaacctgccgccgcagcttatatgccagctacataatgtgaccatgcacgccgatgcagagacggatgaagtctatgcgcaaatgacgctgcagccactcagcccgcaagagctcaaggatccattcctacccgccgagctaggcactgccagcaagcagccaacaaattatttctgcaaaacgttaactgctagtgacacaagtacacatggtggattctctgttccccgtcgagcagcagagaaagtatttcctccgctggatttcactcagcagcctccagctcaagagttgatggcgaaagacctccatggaaatgaatggaaattccgtcatatctttcgtggccaaccgaagcggcatcttctgactacgggttggagcgtctttgtaagtgcaaagagactggttgctggagactctgtcctttttatctggaatgacagtaatcagctgcttctgggaattcgtcgggcaaataggccacaaacggtcatgccatcatcagtattgtctagtgacagcatgcatattggtctgcttgctgcagctgctcacgccgcatcaacaaatagccggtttactattttctataatccaagagcaagcccttcggagtttgttataccactggctaaatatgtaaaggctgtctaccatacccgcatatcggtgggcatgcgtttccggatgctttttgaaacagaagaatccagtgttaggagatacatggggacaataacaggaataagtgatcttgatcctgttcgttggatgaactcacactggcgctctgtcaaggttggatgggatgagtcgactgctggagagagacagccaagggtgtctctttgggagatcgagcctctgacaactttcccgatgtatccatctccttttcctctcagactaaagcgtccatggccaacaggcttaccttctttatatggcggaaaggaggatgacttggcttcttctcttatgtggcttcgagatagtcaaaacacaggtttccaatctctgaattttggaggacttggtatgagtccgtggatgcagccaaggctggatagttccctacttggtctgcaacctgacatgtaccaaacgatagcggcggcggcggctttacagaacaccactaagcaagtatcacctgccatgctgcagttccagcagccgcaaaacattgtcggtagatcttctcttctatccagtcagattctgcagcaagcacagcctcaatttcagcagatgtaccaccaaaacatcaatggcaactcaatccaaggccatagtcagcctgagtacctccagcaaccgcttcaacattgccaatcatttaacgaacagaagcctcagttgcagccgcagcaacagcagcaagaatcacaccagcagcaacctcagcatcaacaaatgcaacaacagaaacacttgtccaactttcagactgtaccaaatgcattgtcggttttttcacagctttcctccacccctcagtctacaccctccacattgcagacagtttcaccattctcacagcaacataatttccctgacacaaatatcagttgtctctctccatccaatgtctcatccatgcacgatacactgagatcattcccttcagaagctgcttcagacctcccaggtgtgccaagaatcacccctgtacctgtctctgacccatggtcatctaagcgagttgcagtggaatctacgatcacttctcgcccacatgacatttcatcacagatagagaacttcgacttgacaccttctagtattcctcaaaactccacgttagcaccactgcctggaagggaatgcctggtggatcaagatgggagctctgatcctcaaaatcacttcttgtttggtgtaaatatagactcacagtcacttttgatgcaagatggcattccaagccttcacaatgaaaacagttcaagcacaattccatattccacatccaacttccttagcccttctcaagatgattatccattgagtcaaacactaactactccgggctgcttagatgaatcaggatatgttccatgttcagataatgctgatcaagtgaagcgaccgcatgcaacctttgtgaaggtttacaaatctggaaccgttggaaggttgctcgacatcactagatttagcagttatcatgaacttcgtagtgaggtagggcgcctttttggccttgagggccagttggaagaccctttgagatcaggctggcagcttgtatttgttgaccgagaggacgacgttcttctagttggcgatgatccgtggcaggaatttgtgaacagtgtgtcttgcataaagatactttcgccgcaggaggttcagcagatgggcaagccgggcattgaactcttctcgacttctgcaaggagacttggcaacagctgtgacaactacatgagcaggcaggaatcaagaagcctaagcactggaatcgcgtcggtgggctcagttgagttctga

SEQ ID NO: 11264 - DNA, 1194 bp, Oryza sativa
  Clone ID: TFbOSC400860j.C1.o2.fg
atggagcaggagcaggatgaagaggaggaggaggcggaggcctcgccccgcgagatccccttcatgacgtcggcggcggcggcggccaccgcctcatcgtcctccccgacatcggtctccccttccgccaccgcttccgcggcggcgtccacgtcggcgtcgggctctcccttccggtcgagcgacggtgcgggagcgtcggggagtggcggcggcggtggcggcgaggacgtggaggtgatcgagaaggagcacatgttcgacaaggtggtgacgccgagcgacgtggggaagctgaaccggctggtgatcccgaagcagcacgccgagaagtacttcccgctggactcggcggcgaacgagaagggccttctcctcagcttcgaggaccgaaccggcaagctatggcgcttccgctactcctactggaacagcagccagagctacgtcatgaccaagggttggagccgcttcgtcaaggagaagcgcctcgacgccggggacaccgtctccttctgccgcggcgccgccgaggccacccgcgaccgcctcttcatcgactggaagcgccgcgccgacgtccgcgacccgcaccgcttccagcgcctaccgctccccatgacctcgccctacggcccgtggggcgcggcgcgggggcgttcttcatgccggcccgccacgctcttcgagcatcaccgctttcgccagggcttcgacttccgcaacatcaaccccgctgtgccggcgaggcagctcgtcttcttcggctccccagggacggggattcatcagcacccgcccttgccaccgccgccgtcgccacctccgcctcctcaccaactccacattacggtgcaccacccgagccccgtagtcaccgccggcctgcccatggttgtcgactcggtgccgcacgtcaacaacccagcggcggcatcgaagcgcgtccggctgttcggagtcaacctcgataacccacatccggacggcggccagtcgtcgagcggccacgacgccaatgcattgtcgctacggatgcccgggtggcaaaggcctgcaccattgaggtcgctggaattgcctccacacatgccggctggtgcagctggagcggagtcctctgccgcgtcgtcgccgtcgtcatcgtcgtcatccaagagagaggcgcactcctcgttggatctcgatctgtga

SEQ ID NO: 11265 - DNA, 2532 bp, Oryza sativa
  Clone ID: TFbOSC401583j.C1.o40.fg
atggctccccctcccccgccgcagggctcctccacaggggatccgctctacgacgagctgtggcacgcctgcgcggggccgctcgtcaccgtgccgcgggtgggcgacctcgtcttctacttcccgcaggggcacatcgagcaggtggaggcgtccatgaaccaggttgccgacagccagatgcgcctctacgatctgccctccaagctgctttgccgtgtcctcaacgtcgagctcaaggcggagcaagacaccgacgaggtctacgcgcaggtcatgctcatgccggagcccgagcaaaatgagatggcggtggagaagacgactcctacgtccggccctgtgcaggcaaggccgccggtgaggtccttctgcaagacgctcaccgcgtctgacaccagcacgcacggcggcttctctgtactccgccgccacgctgatgagtgcctccctcccctggatatgacccagtcgccacccacacaggagctcgtggccaaggatctgcacagcatggactggcgcttccgtcacatctttcgcgggcaaccgaggaggcatctccttcagagtggttggagtgtgtttgtcagttccaaaaggcttgttgctggggatgctttcattttcctcagaggagagaatggtgaactccgtgttggtgttagacgagctatgaggcagctgtccaatgtgccttcttcagtcatatctagccaaagcatgcacctgggagtccttgctactgcatggcatgctatcaacacgaagagtatgttcaccgtctactacaaacctaggacgagcccttcagagttcattataccatatgatcagtatatggagtccgtcaaaaacaattactctgttgggatgaggttcaggatgaggtttgaaggagaagaggcaccagagcagaggtttactggtactataattggcagtgagaatctcgacccagtgtggcctgaatcaagttggagatccctgaaggtgcggtgggatgaaccatcaactattccgcggccagatagagtctctccttggaaaatagagcctgcttcatcacctcctgttaacccccttcctctttctagggttaaaagacctaggccaaatgctcctccagcatctcctgaatctcctattcttacgaaagaagctgctactaaggttgacactgatcctgctcaagcacaacgaagtcaaaacagtacggtcttgcaaggtcaagaacaaatgaccttgaggagcaaccttactgagagtaatgactctgatgtcactgctcataagccaatgatgtggtctccatccccaaatgctgcaaaagcccaccccttgacatttcagcagagaccccctatggataattggatgcagttgggaaggcgtgaaactgactttaaggatgtccgttctggctctcaatcttttggtgattccccaggcttctttatgcagaattttgatgaggctcctaaccgtcttacttctttcaagaaccagtttcaggatcaaggttctgctcggcacttctctgacccatactactatgtatctccacagccttccctaactgttgaatcaagcacacagatgcacacagacagtaaggagttacatttctggaatggccagagtactgtgtatggtaattcgagagaccgaccacagaatttcagattcgaacagaactcatcaagttggttaaatcagtcatttgcccgacctgaacagccaagagtgattagaccgcatgcatcaatagctccagttgagttggaaaaaacagaaggcagtgggtttaagatttttgggtttaaagttgatacaaccaatgctcctaacaatcacttgagctccccgatggctgcaacacatgagcctatgcttcaaactccatcatcattgaatcagttgcaacctgtacaaactgattgcattcctgaggtatcagtaagcacagctggaacggcgactgagaatgagaaaagcggtcagcaagctcaacagagttcaaaagatgttcaaagcaagactcaggttgcttcgacgaggagttgtacaaagcacatgaagttttttcttctcgtagttgacatgctgaagttctcgttttgtaaatttcttgcaaaatctcagttttatcccctttgtggtatggtccataagcaaggcgttgcacttggcagatctgtggatctttcaaagttcagtaactatgatgaactcaaagctgagctagacaagatgtttgaattcgatggtgaattggtgtcttcaaacaaaaactggcaaattgtttatactgataatgagggtgatatgatgcttgttggagacgacccatgggaagaattctgcagcattgtgcggaagatttatatttacaccaaggaggaggtccagaagatgaattcgaaatcaaatgccccaaggaaagatgactcttcagaaaatgagaaaggttcagtgaagcgagatgatacaagagatggagggagtactccagaaagctgcctctactag

SEQ ID NO: 11266 - DNA, 2700 bp, Oryza sativa
  Clone ID: TFbOSC417639j.C1.o11.fg
atgaagctctctccgccggcgtcggcggatatgccgcaggccttgccggagaacgacggggaacaaagatgtctgaactcggagctgtggcatgcatgcgctgggccccttgtgtctttgccagtggtcaggagcagggtcgtctactttccacagggccatagcgagcaggttgcggcatcaactaataaggaagttgatgctcaaatcccaaattatccaaacttacctcctcagttaatctgccagcttcataatgtcaccatgcatgctgatgcagagacagatgaagtttatgctcagatgacattgcaaccattgagcccggaagagcaaaaggagcctttccttccaatggagttgggtgctgctagcaagcaacccactaattacttctgcaagacattgactgcaagtgacacgagcactcatggtggtttctctgttccccgccgggcagctgagaaagtcttccctccactagatttttcacagcagcctccggcacaggagctgattgcaagagatttgcatgataatgaatggaaatttcgccatatatttcgtggtcagcctaaaaggcatctcctgacaacaggctggagtgtgtttgtgagtgcgaaaagactagtagcaggagactctgttatatttatctggaatgataacaatcaacttcttttgggaatacgtcgtgcaaatcgccaacagactgttatgccctcttccgtgttgtcaagcgatagcatgcatataggtcttcttgcagcagcagctcatgctgcagccacaaatagtcgcttcactattttctataaccccagggctagcccttctgaatttgtgattccattggccaagtatgtgaaagctgtttaccacacacgtgtatctgttggaatgcgttttagaatgcttttcgagacagaggagtcaagtgtcaggcgatacatgggtacaatcaccagcataagtgatctagattcagtgcgctggccaaactcacactggcgttctgttaaggttggttgggatgagtccaccactggtgataaacagccaagggtttctctttgggagattgagcctttgacaacctttccgatgtaccccagtgcttttcctttaagacttaagcgtccgtgggcttcaggactgcctatgcatggcatgttcaatggtgggggaaatgacgattttgcacgctattcttctctcatgtggcttcgagacggaaatagaggaacccagtccctgaattttcaaggacatggagtctcaccatggcttcagccaagaatagattctccattgctgggccttaagccagacacgtaccagcaaatggctgcagcagcactggaagaaattcgatatggggacccttcaaagcagcatccagctactctgcaataccaacagactcataatctgaacagtggattaaattctctgtttgcaagccatgttctagggcaggtgcagtttcaacctcagcagtcacccctgcaagttgttcagcaaggccattgtcagaacactggtgactctgggttccttcaaggtcagcttccacggctgcagttgcataacactcagcagctgctaaaggagcaagagttgcagcagcagcaaagacagcatgttttacaagagcaatctagtcaagagatgcaacagcagctcccatctagtgatcatcatgttgctgatgtagcttctgagtctggatctgctcctcaggcacaatcatcattgcttagtggatcatcattctacaatcagaacctcttagaaggaaatagtgatccccctttacatctacacaacaatttccacaacttctctaaccaggaagcctcaaaccttcttattttgcctcgaagtagccaattaatggcatcagatgggtggccttcaaagcgattaactttagaatctgctgttcatcctgaagctccgtccatgcaccccaagattgagaaagtaaatcaccagggtatatctcattttcctggcgcctttccaccacaatcagcaagaggctgttccatcgtccaggattgcagggcagatgctgagaaccgcctactttcatcatcatttgaactccaggatggcatgacaagcatcataactgatgctaacagagaaactgatactatggccatacctttgttgagatatagtggtgcagatttgacaactgaaaacaccttagcaacctccaattgtttaggtgaatctggaacgttcaatcctcttaataacatatctgtaaatccatcacaaggagcaacctttgtgaaggtttacaaatcagggtcccttgggagatcacttgacatctccagattcagcagctactgcgagttacgtagtgagcttgagcgtctctttggtcttgaaggccaactggaggaccctgtaagatcaggctggcagcttgtatttgtcgaccgggaaaatgacattcttctcgtcggcgacgatccatggcaggagtttgcaaatagcgtatggtgcatcaaaatactctcgccacaggaggtgcagcagttggttcgtggtggagacggccttctgtcctcacctggagcaaggatgcagcagagcaatgcctgcgacgactattctgcaagccacaacatgcagaatatcgccggaaacattgcatctgtagcgcctctggactactga

SEQ ID NO: 11267 - DNA, 2352 bp, Oryza sativa
  Clone ID: TFbOSC413089j.C1.o8.fg
atgatcacgttcgcggacctggcggagccggcgcccggcgccgagcggtgcgtcgaccggcagctgtggctggcgtgcgcggggggcatgtgcaccgtgccgccggtgggcgccgccgtgtactacttcccgcaggggcacgccgagcacgcgctcggcctcgccgcgccggagctctccgcggcgcgcgtcccggcgctcgtgccctgccgcgtcgcgtccgtgcggtacatggccgacccggacaccgacgaggtgttcgccaggatccgcctcgtgccgctccgcgccgcggaggatggggacgtcgaggaggatggcgccgcggcaggcgaggagcacgagaagccggcgtcgttcgccaagacgctgacgcagtcggatgccaacaacggcggggggttctcggtgcccaggtactgcgccgagaccatcttcccgcgcctggactacgccgccgacccgcccgtgcagaccgtcgtcgccaaggacgtccatggagtcgcctggaacttccgccacatctacaggggcacgccgcgccggcacctgctcaccacggggtggagcacgttcgtgaaccagaagaagctcgtggccggcgactccatcgtgttcctccgcggcgacggaggggacctgcacgtcggcatccggcgcgccaagcgcgggttttgcggcggcggaggcggagccgaggaggcctccctgcccgggtgggaccagtacggcggcctgatgcgaggcaatgcgagcccgtgcgcggccgccaaggggcggggcaaggtgcgcgcggaggacctcgtcgaggcggcgaggctggcgaacggcgggcagccgttcgaggtcgtgtactacccgcgcgccagcacgccggagttctgcgtgcgcgcggcggcggtccgcgcggcgatgcgggtgcagtggtgccccgggatgcggttcaagatggcgttcgagaccgaggactcctcccggatcagctggttcatgggcaccgtcgccagcgtccaggtcgccgaccccatccgttggccgcagtcgccgtggcggcttctccaggtgacctgggacgaaccggacctcctccagaacgtgaagcgggtgagcccatggttggtcgagctggtgtcgagcatgccggccatcaacctctcgtctttctcgccgccgcgcaagaagccccggattctggcgtacccggagttccccttcgaggggcagctcctcaacccggcgttcccgccaaacccgctggcacacggccaccaccattaccatcacaaccacccgtccttcttcccgttccccgacgttagtgctcctgcaggcatacagggagccaggcatgcgcaatttggtccatctttatcagatctccaccttacccacctgcagtcgagcctcatgtacccggggctccgccgccccgatcatgtcggtccaacatccatcccgccaccaagaatcagcactgacctgacaatgggcagctcgccgccggcgcgcgctctgtccatgggcgccaagaagcccgacgacgccaagccgccggggctaatgctgttcgggcagaggatactgaccgagcgccagatgagccttagcggcaccacctcgccggcggccaccgggaacagctctctcaactggaacaccgagaaaggtgcctcggagggctcgggctccggcgtcatccagaacagccccaccgacaacacgtcgtcggagaggctccagtggttcagggagaacagcaccgtctccgagctcgggctggagcccgggcagtgcaaggtgttcatcgagtccgacacggtcggccgcaacctcgacctctcgtcgctggcctcgttcgagcagctctacggccggctgtccgagatgttctgcatcgacagcgcggagctgaggagccgtgtgctctaccgtggcgccaccggcgaagtgaggcacgccggcgacgagccattcagtagagatttcaacaagaaagctcaatctgcacaggtatcctactgttctcctgtatccttcttcatcatcatcaacaacgatcagctgcgtgtacttgttgattcccgtgtactacgatgcaaaaatcctgtgaccactcatcagaggcttgaatgccgcggccccttggcccaagggacaagcgcatgcagcatgcagacgcagacgcagcgctgcgccatttctgacctctccggtggcctgacctccaggctccagcctccaggcgaggcaatccctcttggttctcttgccttggcagcaagctcgcttacccatgatgatgagatttgtgatctgcatcgtgctgcgtatccctggctagtagagagctag

SEQ ID NO: 11268 - DNA, 2754 bp, Oryza sativa
  Clone ID: TFbOSC414152j.C1.o3.fg
atgaggctttcgtcgtcgtccggcagcgtcctcccggctcaggcggcgtcgccggaagctgtagaagaacaaaaatgcctgaattcggagctctggcatgcgtgtgccggtccccttgtttcgttgcctgcagtgggtagccgagtggtttatttcccacagggtcacagcgaacaggtagctgcatcaacaaataaagaaatggagtctcagatccccaattatcctaacttgcctccacaacttatttgccaacttcacaatgtgacgatgcatgcagatgcagaaacagatgaggtttacgctcagatgacgctacaaccacttagcccgcaagagctcaaggacccatatctaccagctgaattaggttctgccaacaaacagccaacgaattatttttgcaaaacattaacggcaagtgacacaagtacgcatggcggattctctgttccccgtcgagcagctgagaaagtgttccctccgctggattttactcagcagcctccagcacaggagttaattgcaaaagatcttcatggcaatgagtggaagtttcgtcatatctttcgtggtcagccaaagcgacaccttctaactacaggctggagcgtctttgtaagtgcaaagagacttgtcgccggggattctgtcctatttatctggaatgacaacaaccagcttcttctgggaattcgtcgagctaaccgcccacaaactgttatgccatcttcagtcctatctagtgatagcatgcatattggtcttcttgctgcggctgctcatgctgcttcaacaaatagccggtttacaattttttataacccaagagcaagcccttcagagtttgttatcccactttctaaatatgttaaggctgtatatcatacccgtatatctgtgggcatgcgtttcaggatgctttttgagacagaagagtcaagtgtacggagatacatgggcacgataacaggaattagtgatcttgatgctgctcgttggccaaactcacattggcgttctgtaaaggttggctgggatgaatcaactgccggagagaggcagccaagggtgtcgctttgggagattgagcccttgacaactttcccaatgtacccatctccttttccactcagactgaagcgtccatggccaacaggcttgccttcattacatggtggtaaggatgacgacttgacttcttctctcatgtggctccgagacagcgcaaatcctggtttccaatcattgaatttcgggggtctcggtatgaatccttggatgcagccaaggtttgatgcttccttacttggtctgcaacctgacatgtatcaaacgatagctgcgactgctttccaggacccaacaaagcaggtctctcccacgatattgcagttccagcagccgcagaacataggtggcagagctaatacacttctgccaagtcagattttgcagcaagtgcagcctcagtttcagcagcagcaatacctccaaaacatcaacgagaccacaatccaagggcatgctcagtctgagttccttcagcagcagctccaacgctgccagtcgtttactgagcagaagccacagctgcaaacccagcaacaacagcaagaatcacagcaacaacagcagcagcaatcgcagtgtatgcaagtcccacaacatcagcaaatgcaacagcagaagaacatgaccaactatcagtctgtacctaatgcattgtcaccgttttctcaactctcctctccttctcagtcttcacctatgacactgcaaacagtattaccattctcccagccacagagctatccagacacgagtatgagctcattgtcaccatccaacacatccaccatgcataatgcattgaggccattttcatcggaagcaccttcgcacctaagcatgccaagaccgactgcagtacctgtccctgacccatggtcatcgaagcgagttgcagtggagtctttgcttccctctcgtcctcaggttacatcgcagatggagcagttggactcaacagcacctagtataccacaaagctctgcgttggcgccgcttcctggaagaggatgcttggtggatcaagatgggaactctgatcctcaaaaccatctgttatttggcgttaacatagattcacagtcacttctaatgcaaggtggcatcccaagcctccagggtgagaatgattcgacggcaattccttattccacctccaatttcctgagcccgtcgcagaatgatttccccttggatcaaacactaagtagtgcagactgcttagatgaatcaggatatgtgccgtgttcacagaattctgatcaagtgattaatcgaccacctgcgacctttgtgaaggtttacaaatcgggaacctatggaaggtcacttgatatcactagatttagtagctatcatgaacttcgtagagaactagggcgcctatttggccttgagggccagttggaaaaccctttgagatcaggctggcagcttgtattcgtcgaccgagaggatgatgtcctcctcgttggcgacgacccttggcaggaattcgtgaatagcgtctcctgcataaagatactttcaccacaggaggtgcagcagatgggcaagccctttgagcttttgagctcggctcccggaaagaggctaggtagcagctgtgatgactatgtgagcaggcaggaatcaagaagcctgagcacaggaattgcatctgtcggctcagttgaattctga

SEQ ID NO: 11269 - DNA, 2271 bp, Oryza sativa
  Clone ID: TFbOSC404615j.C1.o10.fg
atggctggctccgtcgttgctgctgctgccgccgccggcggtggcacagggagctcttgcgatgcgttgtacagggagctatggcatgcttgcgctgggccgttggtcacagtgcctcgccaaggcgaattggtttactacttcccccagggccatatggaacagcttgaggcatctacagaccaacagcttgaccagcatctgcctttgtttaacctgccatctaagatcctctgcaaagtggtcaatgtagaacttagggctgaaaccgattcagatgaggtttatgctcaaattatgctgcaaccagaagcagatcaaaatgaactcaccagcccaaaacctgagccacatgaacctgaaaaatgcaatgtccattccttctgcaagactttgactgcttcagatacaagcacccatggtggattttcagttcttaggaggcatgcagaagaatgtcttcctcccctggacatgactcagaatccaccatggcaagagcttgtggctagagatctccatggaaacgagtggcatttccgtcacatctttcgagggtccccccaccactcccttattttaggacaacctaggaggcatctgcttacaactggctggagtgtttttgttagctcaaaaagattagttgccggtgacgcattcatctttctgagaggtgagaatggagagctacgagttggtgtcaggaggctcatgaggcaactaaataacatgccatcatcagtaatatcaagtcatagtatgcatcttggagtcctagcaactgcatcacatgctatatccaccggaactctcttttctgttttctacaaaccaagaacaagtcagtctgagtttgttgtgagtgctaacaagtaccttgaagctaaaaacagcaagatatctgttggaatgaggtttaagatgagattcgagggcgatgaagctcctgaaagaaggtttagtggaacaattattggtgttgggagcatgtcaacgtctccatgggcaaattctgactggagatctttgaaggtccaatgggatgagccttctgtggttcctcgtccagatagagtttcaccatgggaactagagccacttgctgtgagtaattcacagccatcacctcagccaccggcaagaaataagcgggctcggcctcctgcttcgaattcaattgctccagaactacctccggtcttcggtttgtggaaatcttcagctgagtccacacaaggcttctcattttcgggactacagcgaacacaggaactatatccttcaagccccaatccgatcttctcaacatcattaaatgttggattcagtacaaagaatgagccatctgctctaagcaacaagcatttttactggccaatgagagagacaagagccaactcttactctgctagcatcagcaaagttccatctgaaaagaagcaagagcctagttcggctggctgcagattgtttggaatcgagataagctctgctgtggaagctacatctccactggctgctgtttctggtgttggtcaagaccaaccagctgcctcagtagatgctgagtctgatcagctctcacaaccatcacatgccaacaaatctgatgctccagcggcaagcagtgagccatctcctcatgagactcagagtcggcaagtgaggagctgcaccaaggtcatcatgcaaggaatggcagttggaagggcagtggacctgacaaggctccatggatatgatgatcttcgctgcaagttagaagagatgtttgatatccaaggagagctctctgctagcctaaagaaatggaaggttgtttacacagatgatgaggatgatatgatgctggttggggatgacccttggcccttgatgcgttggaccctcactaccttgttgcaatgtctgatcctcctgtcgcgtgttctcgtcaatgcggccctcctgatactgtacatccaaagagctgttctcttcaacggtctgtgcttccaaatccactggatcaatgctggcggttttgggggatggaaggagggatactcgacaaagagggcaagtggtgtttgtcgagagccagtggtcgatgcaatcgatgtggaagggcctcagggcattgatatgcttgctattgcccttcggaaacattctctaaatgtagctcaaggctctaatttagaagcacttccattcattactgaactaattattgagatattggtggtccagacccaacggaaaacctacatcgaagtgctttcatga

SEQ ID NO: 11270 - DNA, 2007 bp, Oryza sativa
  Clone ID: TFbOSC900189j.C1.o13.fg
atggggattgacctgaacacggtggaggaggaagcggaggagggggcggcggcggcggtgtgcggggagctgtggcacgcgtgcgcggggccaggggtggcgctgccgcggcgcggcagcgcgctcgtgtacctgccgcaggcgcacctcgccgcggacggcggcggcggcgaggtgccgcctgccggcgccgcggccgtgcccccgcacgtcgcgtgccgcgtcgtcggcgtcgagctgcgcgcggacgcggcgacggacgaggtgtacgcgcggctcgcgttggtggcggagggcgagatgttgcagcggaacttccgcgagggtggaggtgaagatggtgcaggggagatggagggttgtgatgcagaaaagaagccccggatgccacacatgttctgcaaaactctcacagcatctgatacaagcacccatggaggtttctctgttcctcgccgggctgcagaggactgtttcccacctttggtgatacacttaaaagaaaaacttgtaacttttaatgactataagacagttagaccttctcaagagctgattgccgtggacttacatggcacacaatggaagttcaggcatatttatagaggtgatgatggccaactaagattgggtgtaaggagagcagttcaacttagaaatgaggccctctttgaacctgtcaacagcagcgattcaaagctacgcattctatcttctgttgccagttccttggaaaataaaagtgttttccacatttgtttcaacccaaggagtggtgcgtcagaattcattgtaccgtattggagattattgaagagcctgaaccatccattttccattggaatgaggttcagagtttgctatgagagtgaagatgctaatgagaggtccgctggattaatttcaggcattagtgaagttgaccccataagatggcctggatcaagatggaaatgcctactggtaagatgggatgatagtacagatagcagccaccaaaacagagtttctccatgggagatcgagagagttggtggcagtgtctcggttacccattccttgtcatctgggtctaagcgaaccaaattgcactttcctcaaggcagtttggatactccatttcttaatggaaatggtcacccggactccatgggaactgaaaatttccacagggtcttgcaaggtcaagaatttaggggttctaggtcccatggtgttgtatgctctgaatcacctggtgtaccaaactttcaatctcctgacaataggagattttctgctgatatgcggggctacatgatgccagcaagtgggcccccacagcggaacacagagtttacttatcagcccataggcttcagtgagtctcttggattcccagaggtcttgcaaggtcaagaaatgtcacaagtagttcctttgttccgaggagctacttttggcgctcgtacacagaatgacagagttgtctctgctaattctgtgcatagatcagctgcacagagtggattgctagcttcaactctagggcatcccatctcgcagtttactctgtcatcgtcaaaggtatcttctccctcgtcggttctgatgtttaaccaagcgacagctccaaatcatgaaacagtaagcggaaccaacaacaaaggtatgcatgtcagccagtttgcttcccaggagatgctctcagaaactgtaacctggcccggcacacaacgtcaaacgccgagcgaaatcacgagcaaccagttcgccctggcgagaatcccagctcctccaagcggagctgaatccggattgcccaagagggatgccgggagaagcagctgcagactgtttggcttctccctgacaggcaacatgctgggagaagatggagaaggcctagatgatggagccattgaagctggttgcgaaaacccgcccgtgctggagctgtttgggcacagccattctactcccggtgctcttcatgccctgtgtgctgctgctcccctgggaatgtga

SEQ ID NO: 11271 - DNA, 2160 bp, Oryza sativa
  Clone ID: TFbOSC1558j.C1.o2.fg
atgaccgggatcgacctcaacaccgtcgaggaggaccaagaggaggcggcggaggaagtggcggcgaacggctcgtctccggctccggcgaaggcgggcgcggtgtgcctcgagctgtggcacgcctgcgccgggcccgtggcgccgctgccgaggaaagggggcgtcgtcgtgtacctgccgcaagggcatctcgagcacctcggcgacgcgcccgcggcggcggcggccgcggccgccgtgccgccgcacgttttctgccgcgtcgtcgacgtcaccctcctcgcgaacgcggcgaccgacgaggtgtacgcgcagctctcgcttgtcccggagaaggaggaggtggcgaggcgggcggaccacggcgagggcgaggacggggacggcatgaagcagcggttcgcgcggatgccgcacatgttctgcaagacgctcacggcgtccgacaccagcacgcacggcggcttctccgtgccgcgccgcgccgccgaggactgcttccctccactggattacagccagcagcggccgtcgcaggagcttgttgccaaggatttgcacagcactgaatggaggttccgccatatttaccgaggccagccacgtcggcaccttttaaccacaggttggagtgcatttgttaacaagaagaagcttgtttctggggatgccgtactatttttgcgaggtgatgatggggagctaagactgggagttcgccgtgcagctcagcttaaaaatgggtctgcttttccagcactttacaaccagtgttctaatcttggtacacttgccaatgttgcacatgcagtggctacagaaagtgtgttcaacatatactacaatcccaggttaagtcagtccgaattcattgtaccctactggaagttcatgaaaagcctcagccaaccattttctgttgggctgaggttcaaaatgagatatgaaagtgaagatgctactgaaagaaggtacaccgggataattactggaagtggtgatacagaccctatgtggcatggttcgaaatggaaatgtttgttggtgaggtgggatgacgacgctgagttccgtcgaccaaacagggtctctccttgggagattgagctgactagttcagtgtcaggatcccatttgtccacaccccattcaaagcgattgaaaccatgtcttccccatgttaatccagaatacatggttccacgtggaggtggttgtcctgattttgcggaatctgcccaattccacaaggtcttgcaaggtcaagaattattgggttttaaatctcatggtggtactgctgctgctacttctcagccatgtgaagcaaggcatttacagtacatcgatgagcggagttgctccagcgatgcgagtaacagtatcctaggggttccaagacttggtgatagagcaccacttggaaacccaggattttcctaccattgctcaggctttggggagtctcacagactccaaaaggtcttgcaaggtcaagaattatttcgtccctaccgaggaactttggttgatgcgtctatgggtagtaatgggtttcatcaacaagatagtcctcgtgcaccaggtgtggtgaataaatggcaggcacaacttcatggccgtgctgcttttcatggaccaccagcactggctcttccatctcaatcatcatctccgccatctgtcctaatgtttcagcaagctaattcaaagatgcccaggttggagtttgggcatggacagttggacaagcacgagaatgataggcgtgttaggtttggtccttctgaaggaattgaaagaagagagcaaagaataccactccagccttatcctacttctggagaagtgatagatggacaggttacagttgagaagtctcactcccctggtcgacatggaaaggatggtccagataacaaagctgttggcacaaatagttgcaaaatatttggcatctctttgactgagaaggttccagcaagagaagaactagatgatggcgacgccaactattcactccagtctttgaagcaagtgccaaaatccctgggcaatagttgtgctaccatggtggccgagtatcagggagatggagggactgatgattctgatatttttatcttagatgtaggcgttggagcacttatcatgtga

SEQ ID NO: 11272 - DNA, 1968 bp, Oryza sativa
  Clone ID: TFbOSC401539j.C1.o103.fg
atgggcatcgacctcaacaacaccgcgagcggcggcgaggaggacgcgccggcgccggggccggtgtgccgggatctgtggcacgcgtgcgctgggccggtggtgtcgctgccgcggcggggcagcgcggtcgtgtacctgccgcaggggcacctctccgcggccggcgccggcggcgggatccgcggggaggtggcggttgccctccctccccacgtggcgtgccgcgtcgtggacgtcgagctatgcgtatttgagaggaacttgcatggtggtggaatcgaaagggaggatgacatggaggatggtgatgaggaaaggaagtccaggatgctgcacatgttctgcaaaacactaacggcctctgatacaagcacacatggagggttctctgttcctcgtcgggctgctgaggattgctttccacctctggaccacaaacagctaaggccttctcaagagcttgttgccaaggatttgcatggagcaaagtggaggttccgccatatttatagaggtcaacctcgcaggcatcttttaacaactggatggagctcctttgtcaataaaaagaaactggtctcaggggacgcggtgttatttctccggggtgatgatggtgagctaagattgggtgttcgaagagctactcagcttaaaaatgaagcgattttcaaagcttttagtagcgaaagttcaaagatgcgcacactgtcggctgtggctgattccttgaaacatggaagtgtttttcacatttgttacaacccaagggctactgcttctgagtacgttgttccatattggaagttcgtgaaaagcttcaaccatccagtttgtattggaatgaggttcaagtttcattttgagagtgaagatgttaatgagaggcgttctggaatgattgccggtgttagtgaagtagaccccatcagatggcctggttcaaagtggagaagccttctggttcgatgggaggatgctactgactgcaacagccaaaatagagtatctccatgggagattgagatagttggtggttcaatctctgttgctcattctctgtcggcatccagttctaaaagaaccaaattatgccctcagggcaatttggacgtgccagctctgtatggaaatggtcgtccagactcggtggaaactgaaaagttccccagggtcttgcaaggtcaagaattgatgggttctaggacccatcgtgctacttgttctcctcagtcaatcgacattacaaaaagtaagtcttttgatgcttggagattccttactgatacacgaagctgcatgttgggcagttcaacaagcagacttccagtgcagtactctggctatacccaccaatctgtaagcttcggtgaatctattggattcccagaggtcttgcaaggtcaagaaatttctcagacagttcctccgtttcaaggaatgttgcctgatgcatgttcagcgaaaagcagatatgaattaaagaattatgtgtgcaccccagctaccatgaatggactatcatctgcaaatgaaggatattgtctctccctgtcaactgtgccaccttctccaccttccagtcttatgttataccaaacaggggtaccacagcttgaattggcaagcaagaacaatgacaaaagtggaaatgacagccaaccagccttgcgacagcacaagttgctcagtgaaactagctgggaccagtttaaaattggaaaggcttcaacacctgggaatgctactaagcctggtaatggtggaagggaggttgacagaactagttgccgcctttttggtttttccttgaccgagaagattatcccaacagacaaagatggtgaaaaggaagtgagttatgaaactgattgccaaaatccacggatgctagacttgtttgggtacaattgcagtacgcctggtgctcttcatgccctttgtgctgctcctttgggaatatga

SEQ ID NO: 11273 - DNA, 222 bp, Oryza sativa
  Clone ID: TFbOSC8547j.C1.o1.fg
atggcgagcatgaagcagcagcagacgccggcgagctccgcggtgaccgcggcggcggcggcctcctcctccgccaccgccgccgtggccgcatgcgaaggggagcggaaggcggcggcgatcaactcggagctgtggcacgcgtgcgccggcccgctcgtgtcgctgccgccggtgggcagcctcgtcgtctacttcccgcaaggccacagcgagcagtga

SEQ ID NO: 11274 - DNA, 3168 bp, Oryza sativa
  Clone ID: TFbOSC21386j.C1.o1.fg
atgaaggatcagggatcatccggtgtgtctcccgccccaggggaaggggagaagaaagccatcaattcggagctatggcatgcttgtgccgggcctcttgtgtcgctgccgccggtgggcagtctcgtcgtgtacttccctcagggtcatagcgagcaggttgctgcttccatgcacaaggagctggacaacatccctggttatccctctcttccgtctaagctgatctgcaaacttctgagtctcaccttacatgcagattctgaaactgatgaagtttatgctcagatgacacttcaaccagtcaataaatatgatcgagatgcaatgctggcatctgaactgggcctgaagcaaaacaagcaaccagcggagttcttttgcaaaacgctgacggcgagcgacacaagtacccatggtggattttcagtgccacgtcgtgcggcggagaagatatttccaccactagactttaccatgcaaccaccagcacaagagctcatcgccaaggatctgcatgatatttcatggaaatttcgacacatttaccgaggtcaaccaaagaggcaccttctgacaactggttggagcgtctttgtcagcacaaaaaggcttctagctggtgattcagttctgtttataagggatgagaaatctcagcttctattaggcatacgtcgtgctaccagaccccaaccagctctatcgtcatcagttctatcaagtgatagcatgcacattgggattctagctgctgcagcacatgctgctgcaaacagtagcccatttactattttctacaatccaagggcaagtccatcagaatttgtcattcctttagcgaaatataacaaggctttgtatacacaagtatctcttggaatgcggttcagaatgctgtttgagacagaggattcaggggttcgaagatatatgggaacaatcacaggtattggtgacttggatccagtgcgctggaagaactctcattggcgaaaccttcaggttggttgggatgaatcaacagcatctgagaggcgcactcgtgtttcaatatgggagattgaaccagtcgcgacacctttttatatttgtccaccaccatttttcaggccaaaacttcctaagcagccaggaatgccagatgatgaaaatgaagttgagagtgctttcaaaagagccatgccatggcttgctgatgactttgccctgaaagatgtgcaaagtgcattatttccaggtctgagcctagtccaatggatggctatgcaacagaatcctcagatgctaacagctgcgtcccaaacagtgcaatcaccgtacttgaactccaatgcattggctatgcaggatgtgatgggtagtagcaacgaggacccaacaaaaagattgaacacacaggcacaaaatatggttttacctaatttacaggttggctcaaaagtggatcaccctgtaatgtctcaacatcaacagcagccacaccaactatcacaacagcagcaggtccagccatcgcagcaaagttctgtggttttacagcaacatcaagcccagttgctgcagcagaacgccattcacttgcagcagcagcaagaacatctccagcggcagcagtcacaaccggcacagcagttgaaggctgcttcaagtctgcattcagtggaacagcacaagctgaaagaacagacttcaggtgggcaggttgcctcacaagcacaaatgttaaaccagattttcccaccatcttcatcgcagctacaacagttaggtttacccaagtcacctactcatcgccaagggttgacaggattaccaattgcaggttctttgcagcagcccacactaactcagacatctcaagtccagcaagcagccgaatatcagcaggccctcctacagagtcagcaacagcaacagcaactgcaactgcaacaactatcacaaccagaagtacagctgcagctgcttcaaaagattcaacaacaaaacatgctatctcagctgaacccacaacatcagtcccagttgattcaacaattgtctcagaaaagccaggaaattctacagcaacaaattttgcaacatcaatttggtgggtctgattctattggtcaactcaagcaatcaccatcgcagcaagctcctttaaaccacatgacaggatctttgacgccccagcaacttgtcagatcacattcggcacttgctgagagtggggatccatccagttcaactgctccatccaccagccgtatttctccaataaattcgctgagtagggcaaaccaaggaagcagaaatttaactgacatggtggcaacaccacaaattgacaacttacttcaggaaattcaaagcaagccagataatcgaattaagaatgacatacagagcaaagaaacagtccctatacataaccgacatccagtttctgatcaacttgatgcatcatctgctacctccttttgtttagacgagagcccacgagaaggtttttccttccctccagtttgtttggataacaatgttcaagttgatccaagagataactttcttattgcggaaaatgtggacgcattgatgccagatgccctgttgtcaagaggtatggcttcaggaaagggcatgtgcactctgacttctggacaaagggatcacagggatgtcgagaatgagctatcatctgctgcattcagttcccagtcatttggtgtgcctgacatgtcctttaagcctggatgttcaagtgacgttgctgttactgatgccggaatgccaagccaaggtttgtggaataatcaaacacaacggatgagaactttcactaaggttcaaaagcgtggttctgtggggagatcaattgatatcacaagatatcgagattatgatgaacttaggcatgatcttgcatgcatgtttggtatccaaggtcaacttgaagatccatataggatggattggaagctagtctatgttgatcatgagaatgatatccttcttgtcggcgacgacccttgggaggaatttgtgggctgtgtgaagagcatcaaaatactctcagctgctgaagtacaacagatgagcttggatggtgaccttggtggcgtccctccacaaacacaggcctgtagtgcctctgatgatgcaaatgcatggagaggttga

SEQ ID NO: 11275 - DNA, 621 bp, Oryza sativa
  Clone ID: TFbOSC416737j.C1.o22.fg
atggagcaggagcaggatgaagaggaggaggaggcggaggcctcgccccgcgagatccccttcatgacgtcggcggcggcggcggccaccgcctcatcgtcctccccgacatcggtctccccttccgccaccgcttccgcggcggcgtccacgtcggcgtcgggctctcccttccggtcgagcgacggtgcgggagcgtcggggagtggcggcggcggtggcggcgaggacgtggaggtgatcgagaaggagcacatgttcgacaaggtggtgacgccgagcgacgtggggaagctgaaccggctggtgatcccgaagcagcacgccgagaagtacttcccgctggactcggcggcgaacgagaagggccttctcctcagcttcgaggaccgaaccggcaagctatggcgcttccgctactcctactggaacagcagccagagctacgtcatgaccaagggttggagccgcttcgtcaaggagaagcgcctcgacgccggggacaccgtctccttctgccgcggcgccgccgaggccacccgcgaccgctcttcatcgactggaagcgccgcgccgacgtccgcgacccgcaccgcttccagcgcctaccggtccccatga

SEQ ID NO: 11276 - DNA, 2163 bp, Oryza sativa
  Clone ID: TFbOSC401045j.C1.o15.gm
atgtcggtgacgagagatcggacaaagagcccaggcgggcacccgactagcccggaagagatgataactttcgtggattccgcggcgaaggagcgggagcgggagagtgacaagtgcttggacccgcagctgtggcacgcctgcgccggcggcatggtccagatgccgccggtgagctccaaggtgtactacttcccgcaaggccacgccgagcacgcgcaggggcatggccccgtcgagttcccgggcgggcgcgtcccggcgctcgtgctctgccgcgtcgcgggcgtcaggttcatggccgatccggacaccgacgaggtgttcgccaagatccgcctcgtccccgtccgcgccaacgagcagggctacgccggtgacgccgacgacggcattggcgccgccgcggccgcggcggcgcaggaggagaagcccgcgtcgttcgccaagacgctcacgcagtccgacgccaacaacggcggggggttctccgtgccgcgctactgcgccgagaccatcttcccgcgtctcgactactccgccgatccccccgtccagaccgtcctcgccaaggacgtccatggcgtggtctggaagttccgccacatctaccgcggcacgccgaggcgccacctcctcaccacggggtggagcaccttcgtgaaccagaagaagctcgtcgccggcgactccatcgtgttcatgcgcaccgagaacggggatctctgcgtcggcatccgccgcgccaagaaagggggcgtgggaggcccggagttcctgccgccgccgccgccgccgccgccgacacctgccgccggcggcaattacggcgggttctccatgttcctgaggggcgacgacgacggcaacaagatggcggcggcggccaggggcaaggtcagagcccgtgtccggccagaggaggtcgtcgaggcggccaatctcgccgtgagcgggcaaccattcgaggtcgtctactacccgagggcgagcacgccggagttctgcgtgaaggccggggcggtcagagcggcgatgcggacgcagtggttcgccggcatgaggttcaagatggcattcgagacggaggactcatcaaggatcagctggttcatgggcactgtatcggccgtgcaggttgctgaccccattagatggcctaattcaccatggaggcttcttcaggtttcatgggatgaaccggacttgttacagaatgtgaagagggtgagcccatggttggttgagcttgtgtcaaacatgccggccatccaccttgctccattctcgcctccacggaagaagctttgcgtgccgttgtaccccgagcttcccatcgacggccaatttccgacaccgatgttccatggaaacccgctcgcccgtggggttggtcctatgtgctatttcccggatggcactcctgcaggcatacagggagccaggcatgctcaatttggtatatctttatcagatctccaccttaacaaactgcagtcgagtctatcgccccacggccttcaccagcttgatcacggcatgcagccgaggatcgccgctggtctaattatcggtcatccggctgctcgggatgatatctcatgcttgttgaccattggtagcccccagaacaacaagaaatcagatggcaagaaggcgccagcccagctgatgcttttcggaaaacccatactcacagagcagcagatatccttgggtgatgctgcttcggtggatgttaagaagagctcttctgatggtaatgctgaaaatacggtgaataagagtaactccgatgtttcaagcccgagaagtaatcagaatggcaccacagataatttgtcatgtggaggagttccattgtgccaagacaacaaggtacttgatgttgggctggaaacagggcactgcaaggtattcatgcagtcggaggatgtcgggcgcacacttgatctctctgttgttggttcatatgaggaattataccggcggcttgctgacatgttcggcatcgagaaagctgagctgatgagtcatgttttctaccgtgatgcggctggggcactcaagcacactggagatgaacctttcagcgagttcacgaagacggcgcgtaggctgaatatactaacagatacaagcggcgataacttagcgaggtag

SEQ ID NO: 11277 - DNA, 3405 bp, Oryza sativa
  Clone ID: TFbOSC400589j.C1.o1.fg
atggagatggcggcgaatccaggtggttcaggaacctgcagcgatgcactattccgggagctatggcatgcttgtgctggtccgttggtcacggtcccgaagcgcggcgagcgcgtctactactttccccagggtcatatggaacagcttgaggcgtctacaaaccagcagcttgaccagtacctgccgatgttcaatctaccatccaagatcctatgcagcgtggtcaacgtagaactccgggcggaggctgattcagatgaagtttatgctcaaattatgctgcaaccagaagctgatcaaagtgaactcaccagtctggatcctgagcttcaagatcttgagaaatgcacagctcattccttttgcaagacattaacagcttcagatacaagcacacatggcggtttctctgttcttaggaggcatgctgaagaatgccttcctcagctggacatgtctcagaatccaccatgtcaagaactggttgccaaagatctccatggaactgagtggcatttccgtcacatctttcgtggacaacctaggaggcatctgcttacaaccggttggagtgtctttgttagctcaaaaagattggttgctggcgatgcatttatcttcctgaggggcgaaagtggtgagctacgggttggagtaaggagacttatgagacaagtaaataacatgccatcatctgtcatatcaagccacagcatgcatcttggagtccttgcaacagcttcccatgctatctccactggaaccctcttttctgttttctacaaacccagaacaagccggtctgagtttgttgtgagcgttaacaagtaccttgaagctaagaagcagaacttgtctgttggaatgaggtttaagatgagatttgaaggtgatgaagctcctgaaagaaggtttagtggaacaattattggtattgggagtgtgccagcaatgtcaaaatctccatgggcagattctgactggaaatctctgaaggtccaatgggatgaaccttcggctattgtccgtccagatagagtttcaccatgggaactggaaccattggatgcgagtaatccacaaccacctcagcctccattgaggaataagcgtgcaaggcctccagcttcaccttctgtggttgcggaacttcctccaagtttcgatgtggactctgatcagatctcacagccatctaatggcaataaatccgatgcccctggaacaagcagtgaacgttctcctcttgagtcccaaagtcgtcaagtgaggagctgcacaaaggtaattatgcaaggtatggcagttgggagggctgtggacttgacaaaactaaatggttatggtgatcttcgcagcaagttggaggagatgtttgatatacagggggacttgtgtcccaccctgaagagatggcaagttgtttacaccgatgatgaggatgacatgatgcttgtcggggatgatccttgggagaaattccaatgtttcttcattactgcttcctgtgctgaagacgcaacgcccttttgtcttgaattgtggtggtatttgaactgcaagtgccaggaagttcccaagactggcaagaccgcctggaagaggcattctggcaaatgcatgccgttccaaattgttttgtgttttggtaggagccttggcgttcttgtctggtgcccagatttaggcgattcggtcggcggcggcgcggagaggcggcgaaccggcggcgtggagaggcggcggagggagcccgtgactcggcggagaggcggcaaggagaggcgacgacccagctggcgggctctggcggcgaaccggcggcgcggagaggcggcaaaccagcgacgcggagaggcggcgacccagcgtggaggcagcgacccagctggcgggctccgacggcgcggagaggcggcgaaacggcggcacggagaggcggcaaaccggtggcgcgaagaggcggtgaggagaggcggcgacccatcggagaggtggcgaaccggcggcgtggagaggcggcgaagggagcccgcgactcggcggactggctccagcggcgtgggcttcttccacgcgtcgtcatcgtcgctcattgccggagcgaatggcggcagcgacggcggtggcggagctcgaactttgagttggggaacgtggtggcggcgacttggcaggctggctccgacagtggcgctgggttggtgtgggcgctggagcacgagagaggaggggattattgacgtggggaagagaatccatgtggggccaccatttggcgaggggaaccgccggcgcagcaccctcgtcctcccgcacgtccgatctgcccccttccacgccgtggttccgggagctgtggggggtcaacgccgacaaatagtagcagccgccgtcgccgaagctgatggtaatgaaaacggaaataagcatttcacttgtcacagggagaatgcaaactatggtctaaaatctgcatctgaaaataaaattgagctgctgaggggtgctcatagttgggccgacagtaatttaattgaggatgtactggcctctgtgaacaatgatgttggtgaagcatctgctttgttgaaagctatggcgtctccttgttttccaataagggaggatggactacctgatcagctttcttctgagattaataaaacacatggtttaccatcaggaaatggtacagcagaaaataatcttgtaaatgactcgcagttgttgcctctgccaatgaatatgtcgtctgtacccatagaaccggaagtggaagagctcgatgacgattactttaaccacaggaaagatgcattgaagattatgagggctgccacgaagcattctcaggctgcgagtaatgctttcttgagaggtgaccatgctgctgccaaggaactttccctcagagctcaagaagagcgatccgctgctgaagagctgaacaagaaggcagcaaaagaaatatttcgcctcaggaacagcaataatagcatttggaagctagacatgcatggtctacatgcatcagaggctgtggaagtactggaacggcatcttcacaggatagaattccagccaccagggaataatgcagcttcatctgatgaagtagctaggtctgaacccagagtgtctggtccaagcattgagcccggcccagggaaggtggtgtttgttcgtcccatacaggctatcttagaggtgatcacagggattggcaagcacagcaaagggcaggcctcactacctgttgcagtcaggggcttcctcattgaaaatgggtaccgatttgatgagctgcggcctgggcataagcttctcacttctcagcctgaagttaaaaatcacaaaggaatcaaggtgaaggaagagttcttttctatactttcttaa

SEQ ID NO: 11278 - DNA, 4293 bp, Oryza sativa
  Clone ID: TFbOSC32301j.C1.o3.fg
atgcctccccgcactcgccatggtcgtcgtgagcccacgcccgatcccgtcagtgagaatgaggattcaagcggagatgagtatgttcaaagtgatgatgacaatatggaaaatgttgagggtgatgagatggaagtaagtgatgatggtgatgacaatgagagtggaaatggtgaagatgatgaggcaagtgatgataggagtcctctcgattccaccatccaatttgtgcttaatttgaggaatgctcaacaatacactatcctccgtcatcataatcaattccgaaggcctaacgattgtaatgatccaagatttcatacacggttccaaaagtccgtgtatgcacaagtgtatgccaacaaagccttcgccgaacacaagtggatttcttggaagcacattggtgagacaccggagtttgagaatttgcaagagatgttccggaccgttgggattgatagaattgtcaccatgaagcaaccttttgatgaagatctcatccggcaattctatgccaccgtatgggtgtccggcgattgtgatgcaatgaagtggatgtcgaggaccctccgatgctctatcaaccgccgtgaatccaaggagctcttgcacattcgcttcaacaacggggatgaccttcatgatgagcacacccacaaccccttccccattgatcacttttctcagttttatgaagaagggggaaggcacacatatggcaaggtggcgggtttgagggctctcccaagtgtgatcaaccgcatagtaagggccaccatcctcccaagatgcggcaacaatgatgacatacgcggagttgcttggcatgttattgatgccattatggatggtcgtcggtttgatgttatcaaccttatgatgaaggagattgccatctcaaaggggactcttggacaaggaatctattatgctccctacataatgaggttgattcaaagcaagttgggacaaattggtcacaatttaaaagaacataaggagtacaagcctcgtctccaactctcctcccctagagctcctcgtgtgcgccaaccaacattcgatcaaggtgcaagctcaagtgcagcccccccttctcctcaagggtatgatccaagtgcttttttccatctacaatatgcctactttggaatgcaacccaatgacttcttcaacccggtccttggggctattcataccctaagtgaaagcattcaacgcttatccaccgggcatgaagcattgcatgaggatgttcgtggcttgtgcaccgatgttggcaacttgaatacttcggtgggaagattgcatactagggggcggtcagaccggccacatagtggcggtctgaccggcgtgccctggccggtggtgtgcgaggcttcgcaaatactagtggcgcattatgaatgtcctaaggtatacacgctgcacaattgcacagtacactatactgatggagtatgcaactgtgcacgatgtgagttctgtcccaaaaaaactgcttttggatacaatgcaaaggagaaggccaagacgggtgttctgagaaatgccgcagcgctgctcgacgaaatgcagctcatgggagaaacacagggtgccaagaaggtgatcaactcggagctctggcacgcttgtgccgggccgcttgtgtgcttgccgcagcgggggagcctcgtgtactacttccctcaggggcacagtgaacaggttgcagcgacaactagaaagattccaaattcccgcattccgaactacccaaacctgccatctcagttgctgtgtcaagttcacaacatcaccttgcatgccgacaaggacactgatgaagtttatgcacagatgacccttcagccagtaaactctgaaacggatgtattccctattccaactcttggtgcttataccaaaagcaagcaccccactgaatatttctgcaagaatttaaccgcaagtgatacgagtacacatggtggtttctcggtgccacgaagggctgcagagaagttgttcccacaactggattactcaatgcaacctcctaaccaggagcttattgttcgagatttgcatgataacatgtggacattccgtcacatttatcgtggacagccaaaacgacatcttctaacaactggatggagtctctttgttggggcaaagcgtctaaaagcaggggactctgtcttatttataagcatgcacattggcgttcttgctgctgcagctcatgccgcatcaagtggtagttcatttactatctactacaatcctaggacaagtccttcgccatttgtaattcctgtagcaaggtacaacaaggcaacatatatgcaaccatcagttggaatgagatttgcgatgatgtttgagacagaggagtcaagcaagcgcagatacacaggtacagttgtgggaataagtgactacgaccccatgagatggcccaattctaaatggcgcaacttacaggtcgaatgggatgaacatgggtatggagaaagacctgagcgtgtgagcatatgggatattgaaactccagaaaacactcttgtgttcccttcgtcgaccttgaattcaaagcggcaatgtcttcctggttatggagtttcagtgcctgggatggaaattggatcagcaaatatgtcatcatttccaagggctcagggtaatccctatggcagtttgcagcacattccagctgttggatcagaattggctatcatgcttctcaaccaatctggtcaaacccttgggagtccccttagttttcaccagtcctcatattctagtattatccaaaatgtgaagcaaaattatatccctcctctaacagttagcacttcagcttgtttgacaaagcaagaaagcctgccttcagatgatgcccagcaccagttccatatggcaaatatgcagaatggtgatcttgaaggctctgaagtccagcctgtcattgattcgatttctgagtcaaagttgaatgctacatcaagagatccaagaaacacagattcatacacaagtcgaagtacttcggagcaaaacagtaagggtgagcctagaggcaagactcgtaggagtaagaagggcttgcctcacaaaaccgtttcagagaaatctgacctttcttcagccccttcttggatctgtgacaatcagcaggttggtttagaatcgaaactggttggttgtgatgaacaagtaaactgtggaaatattgaagattcatcaggtgcacttactcaaggtaattttgttggacagccgcatggccatcaggttgaacaaaagggagtgctgtcgccaccaaaggtagaatcatcaaaatcacctgatggaggaaagtctgtcaattcgtttccaaaccaagggtgtttttcgcagttcattgatggtcttgattggatgactcagccttcctactaccaagactccaatgtaattcaaccagccggtgtgtcagagaacattttcagttcttctgcagatatacctccctcaatgattgctgatactatggagacttttcaggcttcatgtctttctgattgccttcctaattccatacaagaattcatctccagcccagatctgaattcactaacctttctttcacctgacatgcaaaatttggaggtccaactccagcatgatggaagcaatttgccaagcacgtccaactcgtttgtacagatgagtttttctgaagagagtgcaagtcagagtgcaaacttaagtggacttcacatggaatctacacacagaagcataaacaccacttcatgctctcaaccaatgtctactgggggctttgatgcagggatgtactcaaagttgccacgtttaaaagaatcccaaatcttgtctttgccagagattcataccaattccatgggaacatcagcttgcagtatggatgcaaccgagtacagccttgaccgaagtgcgaagccgatgaaaccaccagtgcggacatatacaaaggttcaaaagcaaggatcagttggaagatctatcgatgttacagggtttagaaattaccatgagttgagatctgccatcgcttgcatgtttggtctccaggggaaattggagcatcctggcagttcagagtggaagcttgtatatgtcgactacgaaaatgatgttcttcttgtcggagatgatccatgggaggaattcatcaactgtgtccggtgcatccggattttgtcaccttcagaagtacaacagatgagcgagaatggcatgcatgttttgaacgactgtattcaagcagcttag

SEQ ID NO: 11279 - DNA, 2592 bp, Oryza sativa
  Clone ID: TFbOSC401249j.C1.o16.fg
atgagctcgtcgtcggcggccagcatcgggccgccgcagccgccgccgccccccgcgccgcccgaggaagagaagaagtgcctcaactcggagctatggcacgcctgcgccggcccgctcgtctgcctccccaccgtcggcacgcgcgtcgtctacttcccgcaaggccacagcgagcaggtggcggcgtcgacgaacaaggaggtggagggtcacatcccgaactaccccaacctgccggcgcagctgatctgccagctccacgatgtcacaatgcatgcggatgtggagactgacgaggtgtacgcgcagatgacgctccagccactgaacccagtaaggcgcctggggtttttgcatgatgtttgcagtgctgaggttttgatgcaggagcagaacgatgcgtaccttcccgcggagatggggataatgagcaagcagccgacgaattacttctgcaagacattgacggcgagcgacaccagcacgcacggggggttctccgtgccccgccgtgctgctgagcgcgtcttccctcctttggatttcacacagcagcctccagcccaggagctaattgcacgggatattcatgacatcgagtggaagttcaggcacatctttcgaggccaacccaaacgacacctgctaaccactggctggagcgtttttgtcagtgctaagagacttgttgctggagattctgtgcttttcatatggaacgagaaaaaccagcttttacttggaataagacgtgccagtcggccacagactgtgatgccttcctctgttctttcaagcgatagcatgcacataggtctccttgcagcagcagctcatgctgctgctacaaacagccgtttcactattttctacaacccccggacatcaccccattatttatgggaattttataattgggcctctataaaaatccataatatactaatgcgcccaatgcacactttaatgaaacacaggtatatggggactataactgaagttagtgatgcagacccagtccgttggcctagttcctattggagatctgtgaaggttggttgggatgaatcaactgcaggggaaagaccaccaagagtttctttatgggaaattgaaccattgacaacctttccaatgtatccatctctgttcccactgagagttaagcatccttggtattcaggagttgcttccctgcatgatgacagcaatgctttaatgtggctgagaggagttgctggtgagggaggttttcagtctctgaactttcagtcacctggtattggctcctggggacaacagaggctccatccatccttactgagcagcgatcacgatcagtaccaagcagtagttgctgctgctgctgcttcccaatctggtggttacttaaaacagcaattcttgcaccttcagcaacctatgcagtcccctcaagaacactgcaacctcaacccattattgcagcaacaaattctgcagcaagcaagccagcaacagataattaatcctgatgcccaaaatatccaaacgatgttgagcccaagtgctatacaacagcaactccagcaactacagcaaatgcagcaagttcagaatgatcagaagcagaagattcaaccagatcaaagctaccaagttcctacaagtgcagttctcccaagtccaacatcattaccgagtcatttgcgagaaaaatttggcttctctgatcctaatgcgaattcttcaagcttcatcacctctagcagtagtgataacatgttggattcgagcttccttcagggaagttcgaaagctgtggacttatctcgatttaatcagcctgtagctagtgagcagcagcagcagcagcaacaggcatggaagcagaagtttatgggttcacagtcagtgtcttttgggggctcggttttgcataactcacccacaagcaaagatggttctgttgaaaacaaaattggtcgtgatgtgcaaaaccagtccctttttagtccacaagttgactcttcatccctcctgtacaacatggttcctaatctgacttcgaatgtttcggatggcaacttatcaacgatcccttctggatcaacttatctgcagaatgcaatgtatggttgcttggacgactcttctggtttattgcaaaatacaggagagaacgatccagcaaccagaacatttgtgaaggtttacaagtcaggttcggttgggaggtcgttggacataacccggttctctaattatgctgaacttcgagaagaactgggtcagatgttcggcattaagggtcaattggacgaccctgatagatcaggctggcagcttgtattcgtcgacagggagaatgatgtgcttctccttggagacgacccttgggaattcattaacatctatatgaatgtgagcaatgctaaaaagtcttacattatgaaacggagggagtacaatactttggtttcctggtttccacaactaatagcttatcgaggaaagactgttcttccttcaataatatgtgttggtcagtcactatatgttgatgctcagttacccaagacccttcgtgagagtaaacatcagacatga

SEQ ID NO: 11280 - DNA, 2250 bp, Oryza sativa
  Clone ID: TFbOSC101706j.C1.o13.gm
atggccacggtggaacggcgcgggagcgccacggaagacgaggaaacagctgccaccggcgggcgcaacgctgccggccgtgacgccgctggctgcgacactgctagccgtgacgccaccgggcaaggggctgcaggtacaggcaccggcgggcgaggcgccgctgccgggagaggcgctggcgggcgacgcgacgccgccgggagaggcgcaggcgagcgcggagaatcgccgggcgggagcatttcgtcttcgcacgggaacgagaggagagagaggcaggagtgtgagattgggagcgatattcgcgagaatactcgccccctcggtggcgtcgacggcgagggcgcgccatgcgcgccgcccccctcccccatccctgctggccccgcttcgtcgacggtctccgcggcgtcgagcgcgcccgctacccgcgactacctcggcgggatcactggccaccgcctcggccaggaggacgactccggcggccacgagtacacatccgtctccggcatccacgtccccagcagcagcggcgtcgccttcgtgtcgttcggccagtgtcctcaggaggtgatctccaccgacctctgcctcggcttggggcccatcgccgccaccgcaccgctgcaacctcctccacctccagcggcggcagcggcagcggggtctccgtctgctacgacgccggagccaggacatggggaagcgacaccgacgacaagttcctccgcgcagtttcagacgcaggcgcagcaggttacgcgcgacatgtggatggcctgcgctgcacccaagtccggccgtctccccaccgttggatcattggtctactacttcccggacgggcacgccgagcagtgcctgtcacgtccgcaggagccgcttccaggcagaattttcctatgcaaagtcacggacgtccgcctcggcgcagcagcaacaaacgaagccttggcaaccatctctctcgtcccgatcgccgccgacgaccatgccttccagcttcaggctcccgctgatccagaccctgctccagcccagtcccagagtctcgtttcattcgtcaagcctctcacctataccgatgtcaccaagaatcggttcatggtgcccaaggacgatgccgctgcgggagttcttcctcacatacagttgaacgatgatgtgcctctccgaatcaaggacttgagcggaaaggagtgggcgtttaactacacctggaaagctcacacccgcatgtttcgcaatggttggatggagttttctaatgccaacggcctcgtcactggcgacaatgccgtgttcatgcgtcgcggcaacggcgagatgttcatggcggtgcggcgcacgcgcaacaggccggcgcccttctcagtggaggaggtcatcgaggccgtgtggcgggcagcgcgccgcgagccgtttgaggtcagctattgcttgcgccaggatggggacgagttcgttgtaccacgtgacatcgtcgatgatggcttacgcgccaggtttgctccaggcatggctgtgaacttcgtatgggctgttgaggatggcaagctgccaaccatcgggccacagggggaggatgtatgcaacgcttgtttcagtgagcttgaagaccagctggttgcgtgctttccagagaccgtgcgaacaagcagcaaagcatgcagggcatcccggtttctggtgttctgggctgacgtcatccaagggggggctgcgctgacaggtgggccccgcttgtcagcgcacaaggggaggagagggggctcgggcaagtgggccccactggcagcggcacaaggtggccggtctaccgtggaccgggaccacgcgggtggtccaccgccggtccacgggaccgacagtccggatcggcccgaggctgatcggacggcgcgggcggcgcgcaggccatccacatgtcgtgcggagcggcggcggacggcgcgaaaggctgcggcggacgtccggagcggcggcacggccaaaggcggcggcacggccaaaggtggcggcgcacgcgggaaggggagaaaagggagggggagggagtcctcaccggaggggcggcgaccggagcgggaggggatgagcggcggcagcgcttcggaaaacggcggacgggagcggcgcgtcctgggaaaaggcggtgaaggggttagggagaagagaggagccgcggcacggcgaggagaaatggccggagatggaaacaatggcgagctcaccggcgtgtag

SEQ ID NO: 11281 - DNA, 2187 bp, Oryza sativa
  Clone ID: TFbOSC101706j.C1.o5.fg
atggcgcagccgcctgacgccgccgccgccgccgccgtcccgccgccggtagtcatcgaccgggatgtctggcacgcctgcgccgtcccgtactccggcgtcctccccggcgtcggcacactggtctactacatcccccatggccacatcgaacagtgcgccgaggatcccgcgctgctgctctcccgcctcccggaccccatccaccccgtgccctgcaccgttgccgacctcgtcctcgacgtcgacgccgagagcggcgaggcgtacgccaccatctccctccttccaggcagccacgacgacacgaccgcgcggcgccaggtccccgcccacggcgagccggggttccgcttcttcgagaagcagctgtcgccggccgacgtcaccagcaacgccctcgtcctccccgccggcgccgagcacgtccttccgccgctcgacatcgccgcctaccagaccgcccggctcttcgacgtgagggacctgcgaggcaagcgcttcgagttcgtgcacatctgggacaagaagcgctgccgctacatgctcggcgacctcggcgtcaacgacaacgacggctggagagggttcgtcaaagccaagcgcctcgccaccagggacaccgtggtcttcatgcgccgcggcggcggcgacggcgacggcgacggcgagctgcttgtcggggtgcggcgcgcgccccgcgcgcgcggcggccaccacccgaggcccggggtcgaagacaacaaggtggtgtccgaggtgtggctggcgatgcagggcgtgacgccgttcgaggtgacctactacccacgggagggcacattcgagttcgtggtgtcgcgcgacgagtacatcggcttctccttctcgccgttctaccctttcgttcccgggacgacggtgcacttgcggatgaacccgctgcagatcgcccaatcgatttcgggcaccgtcaggaccttcgaccatctacgcccatggcgcatgctcgaggttgattgggatcaagcggcctccccgatctcctacaggatacacagacaagttaattcttggcaagtcctgcgtcagcctcagccagcagcaactacttcggctgtgcgaattcgggatgccattgttgccaccccgcaagttcagataatggcgctgccgaggccgccgccgccgacgacgacgacgggaatggtgccgtccgatgattcctacgccatgatttccctctttccgggcgactgctacgtcacgcaccgcccgcttcccgccgcgcgcgaccccgtcggaggccagcgggagttctgcttcttcgacaagaagctgtcgccgagcgacgccgcggcgaacggcggcggcagcggcgccctcttcgtgatccccaagcccagcgccgccgagcacgtccttccgcggatcccggacctccgcgtgacgaacctgcaaggcggccgctgggagttcggccacacctggagcgacgccgacacggaccgccgctcctcctcccacacgctcgccgccggctggagcgcgttcgtcaaggccaagcgcctctgcgtcggggacaccgtgatcttcatgcgccgccgccccggcggcgagccgctcgtcggggtgcgccgcaagccgcacggcggcatgccggtcgggatccccgacaagcacgtggcggacgcctggctcgacgcgtcgtccgcccaaccgttcagggtgacctactgcccatggcagggcacggcggagttcgtggtgcgccgcgaggaggtggaaggctcgccgccgctcgctccggggacgagggtgcgcttactgatgaaccccgacgacgcgcgccgccgcagccagccaccggtgtacggcaccgtcagggacgtccattgccggagcgagtggcgcatgctcgaggttgactgggatcgtgactccccgctcgctcccacgatgaacagacgagttaattcttggcaagtccaacccgttcagctcgctcttccaccacagggttctgatgaggaggcggcagcagcaaccacatcgactgcgcacgccggagatgccaccacgtctgctccatcgttggcgctgcaacttcagacaatggcatcctcttcttcttcatccgcaccaattatcccgagtcgtggctccgcgtttcgcattgtaaatcctcgagatggatcacagggctaa

SEQ ID NO: 11282 - DNA, 3318 bp, Oryza sativa
  Clone ID: TFbOSC401793j.C1.o21.fg
atggcagccgctgcggcggcggcggtggtggggagcgggtgcgaaggggagaagacgaaggcgccggcgatcaactcggagctgtggcacgcctgcgcggggccgctggtgtcgctgccgccggcgggcagcctcgtcgtctacttcccccagggccacagcgagcaggcggacccagaaacagatgaagtgtatgcacaaatgactcttcagccagttacttcatatgggaaggaggccctgcagttatcagagcttgcactcaaacaagcgagaccacagacagaattcttttgcaagacactgactgcaagtgatacaagtactcatggaggcttctctgtgcctcgtcgagctgcagaaaagatatttcctccactggacttctcaatgcaaccacctgcacaagaactacaggccagggatttgcatgataatgtgtggacattccgtcacatatatcggggtcagccaaaaaggcatctgcttaccactggctggagtctatttgtaagcggcaagaggttatttgctggagattctgtcatttttgtcagggatgaaaagcagcaacttctattaggaatcaggcgtgctaaccgacagccaactaacatatcatcatctgtcctttcaagtgacagcatgcacatagggattcttgctgctgcagcccatgctgctgccaacaatagcccatttaccatcttttataaccctagggccagtcctactgaatttgttatcccatttgctaagtatcagaaggcagtctatggtaatcaaatatctttagggatgcgctttcgcatgatgtttgagactgaggaattaggaacacgaagatacatgggaacaataactggcataagtgatctagatccagtaagatggaaaaactcgcagtggcgcaacttacaggttggttgggatgaatccgcagccggtgaaaggcgaaatagggtttctatctgggagattgaaccggtcgctgctccatttttcatatgtcctccaccattttttggtgcgaagcggcccaggcaattagatgacgagtcctcggaaatggagaatctcttaaagagggctatgccttggcttggtgaggaaatatgcataaaggatcctcagactcagaacaccataatgcctgggctgagcttggttcagtggatgaacatgaacatgcaacagagctcctcatttgcgaatacagccatgcagtctgagtaccttcgatcattgagcaaccccaacatgcaaaatcttggtgccgccgatctctctaggcaattatgcctgcagaaccagcttcttcaacagaacaatatacagtttaatactcccaaactttctcagcaaatgcagccagtcaatgagttagcaaaggcaggcattccgttgaatcagcttggtgtgagcaccaaacctcaggaacagattcatgatgctagcaaccttcagaggcaacaaccttccatgaaccatatgcttcctttgagccaagctcaaaccaatcttggccaagctcaggtccttgtccaaaatcaaatgcaacagcaacatgcatcttcaactcaaggtcaacaaccagctaccagccagcccttgcttctgccccagcagcagcaacagcagcagcagcagcagcaacaacaacaacaacagcaacaacaacaaaaattgctacaacagcagcagcaacagcttttgctccagcaacagcagcaattgagtaagatgcctgcacagttgtcaagtctggcgaatcagcagtttcagctaactgatcaacagcttcagctgcaactgttacaaaaactacagcaacaacagcagtcattgctttcacaacctgcagtcacccttgcacaattacctctgatccaagaacagcagaagttacttctggatatgcaacagcagctgtcaaactcccaaacactttcccaacaacaaatgatgcctcaacaaagtaccaaggttccatcacagaacacaccattgccactgcctgtgcaacaagagccacaacagaagcttctacagaagcaagcgatgctagcagacacttcagaagctgccgttccgccgaccacatcagtcaatgtcatttcaacaactggaagccctttgatgacaactggtgctactcattctgtacttacagaagaaatcccttcttgttcaacatcaccatccacagctaatggcaatcaccttctacaaccaatacttggtaggaacaaacattgtagcatgatcaacacagaaaaggttcctcagtctgctgctcctatgtcagttccaagctcccttgaagctgtcacagcaaccccgagaatgatgaaggattcaccaaagttgaaccataatgttaaacaaagtgtagtggcttcaaaattagcaaatgctgggactggttctcaaaattatgtgaacaatccacctccaacggactatctggaaactgcttcttccgcaacttcagtgtggctttcccagaatgatggacttctacatcaaaatttccctatgtccaacttcaaccagccacagatgttcaaagatgctcctcctgatgctgaaattcatgctgctaatacaagtaacaatgcattgtttggaatcaatggtgatggtccgctgggcttccctataggactaggaacagatgatttcctgtcgaatggaattgatgctgccaagtacgagaaccatatctcaacagaaattgataatagctacagaattccgaaggatgcccagcaagaaatatcatcctcaatggtttcacagtcatttggtgcatcagatatggcatttaattcaattgattccacgatcaacgatggtggctttttgaaccggagttcttggcctcctgccgctcccttaaagaggatgaggacattcaccaaggtatataagcgaggagctgtaggccggtccattgacatgagtcagttctctggatatgatgaattaaagcatgctctggcacggatgttcagtatagaggggcaacttgaggaacggcagagaattggttggaagctcgtttacaaggatcatgaagatgacatcctacttcttggcgacgacccatgggaggaatttgtcggttgcgtgaaatgcattaggatcctttcacctcaagaagttcagcagatgagcttggagggttgtgatctcgggaacaacattcccccgaatcaggcctgcagcagctcagacggagggaatgcatggagggctcgctgcgatcagaactccggtaacccttccaatggttcatatgaacaattcgaatga

SEQ ID NO: 11283 - DNA, 1590 bp, Oryza sativa
  Clone ID: TFbOSC401200j.C1.o58.fg
atggcgcgcccgccagccgccaccgctccgcctcctcctccgccgccgccgccaccgccaccgccaccgatcgaccgcctcgtctggctcgcctgcgccgccccgctgtcccgcatccccgtcgtcggcacccaggtctcctacttcccagagggccacgccgagcagtgtcccgcccctctcccggatccgctcccctccgcccaccgattcttcctctgcaccatcaccgccgtcgacctctccgccgacaccaccaccggcgagccctacgccaccatctccctcctccctcttcgccacgacgcccccgcccccgcccccgcccccgcccccgccgccgccgaattagcagaagcagaatcacaggagttccgctactacgccaagcagctgacgcagagcgacgccaacaacggcggcggcttctccgtgccaaggttgtgcgccgatcacatcttcccggcgctcaacctggatgatgacccgcccgtccagagcctcaccatgggggacctgcagggcgactcgtgggaattccgccacatctaccgcggcacgccgcgccggcacctgctgacgaccgggtggagcaagttcgtgaacgccaagcagctggtggccggggacacggtggtgttcatgtggtgcggggccccggcccccgagaggaagctgttggtcggggtgcgacgcgcggccaggtactcgggcgagtcggcgtgcaacgcgcgggggcgggtgcagccccaggaggtgatggaggcggtccgactggcggcggagcaggcggcgttcagggtgacctactacccgcggcatggggcgggggagttcgtggtgccgcgggtggaggtggataagggattgactactccgtggaggtgcgggatgcaggtgcgcgcccaggtgatggaggccgaggacacccgccgcctcgcttggctcaatggcaccctcactaacctccgccaccaacaaatctggcgcactctcgaggttgaatgggatgcctccgccgcgtcatcttccatgaaaaacagatttgttaatccttggcaggtccagcctgttgatttccctcctcttcccatggggctaaagatttctaacaacaatattagtgcacctgtgtgcaatggggattcactgctggtgccaccgatactaatgcacccgcaacctcaacctcccgctgacattcagggagccaggcataacaatggccatgcctatgcagatataccctcttcatcaacaccatcaatggtgaggactcagcagctgttcccaagggatcttcagattttagttccccacaccgacattgtcactcctcaaaatggatcaccgcccgacaaccccgtaaacacgcctctttctgcatctgacggaatgaagaccatacagctgtttggcgtcacaataacatcacctgtgcaaggagacaccaatggcgctttcgcttcagcacaagtgaatcaggttccagagggtgtagatgatgaaactgctaccgaagaagcttctgacacaagcctacctgactctcttaccaatggccacaatcaagatggtgctaggctttga

SEQ ID NO: 11284 - DNA, 939 bp, Oryza sativa
  Clone ID: TFbOSC401166j.C1.o27.fg
atggagttcaccccaatttcgccgccgacgagggtcgccggcggtgaggaggattccgagaggggggcggcggcgtgggcggtggtggagaaggagcacatgtttgagaaggtcgtgacgccgagcgacgtggggaagctgaaccgattggtcatccccaagcagcacgccgagaggtacttcccgctcgacgccgcggcgggcgccggcggcggcggtggtggcggcggtggcggcggcggggggaaggggctggtgctgagcttcgaggacaggacggggaaggcgtggaggttccggtactcgtactggaacagcagccagagctacgtgatgaccaaagggtggagccgcttcgtcaaggagaagcgcctcggcgccggcgacaccgtgtcgttcggccgcggcctcggcgacgccgcccgcggccgcctcttcatcgacttccgccgccgccgccaggacgccggcagcttcatgttcccgccgacggcggcgccgccgtcgcactcgcaccaccatcatcagcgacaccacccgccgctcccgtccgtgcccctttgcccgtggcgagactacaccaccgcctatggcggcggctacggctacggctacggcggcggctccaccccggcgtccagccgccacgtgctgttcctccggccgcaggtgccggccgctgtggtgctcaagtcggtgccggtgcacgtcgcggccacctcggcggtgcaggaggcggcgacgacgacaaggccgaagcgtgtccggctgttcggggtgaacctcgactgcccggcggccatggacgacgacgacgacatcgccggagcggcgagccggacggcagcgtcgtctctcctgcagctcccctcgccgtcgtcctcgacgtcgtcgtcgacggcggggaagaagatgtgctccttggatcttgggttgtga

SEQ ID NO: 11285 - DNA, 1422 bp, Oryza sativa
  Clone ID: TFbOSC400445j.C1.o23.fg
atggcccagtttaggtctgcgcctgtggaaagcgaggcggagccaggcgccgatggccctgtggatgaagccaatgctgtggaagaggagaaatctggtaagggtgaggatggcattgaggaggctgccgataccgttgattccgtgaaggattcagcaaagcctgaaggcatggatgcaaaggaggaggcggtggagcaggagggtggggccgcagcggataaggcaaaggatattcctgtgactagtaacggtaagacggatgctggcggaaatgaggtggctgaaatgaaggttgaaaaattggagaatggtgatgggcatttgaaggcggacggcgatagcaatggtgataacaagggtgctgatggtgagaaacagcttatgttagcgtcagctggggaggacgtggaggacccggtgctgtccaagcttgcaagcaactccttcatgtttgattacagctgtggtggtgatgactcggggactgaggaggagcaggctgctttcatgaaggaacttgagcggttttacagggagaagcttatggaattcaagcccccgaagttctatggtgaagggttgaattgcctcaagttagtacaaggacctctttgtctgttgtggagacaagtgactgggttgggtggctatgatcagttgcatcaacaggtgacatcgtgcaaactgtggcggcaagtgggagagtctttcaaacctccgaagacatgcacaactgtttcatggaccttccgtaacttctatgagaaggcactccttgaatatgagaaacacaaaatcgaaacgggcgagtttcaagttgctgcatctaatttaacagagaggattacttctgaaagtcaggttggcatccatgcttctggttctggaagagctagaagagaatctgcaacccgagctatgcaaggctggcactctcagcgcttgcttggcaatggtgaaattgctgatccaataattaaagataaagggacggtgtctgtcttaaaaaaggataaaactcctaaaagcagcggttctgccaagaggaaaaggacaccgaccttggaagatgacaggattgtaccatataaacctgacaagctacaaaatgactcaatggttcttgaccttggccctccagctgattgggtaaagataaacgttcggagaaccaaagattgctatgaagtctatgcattggttcctggccttctgcgtgaggaggtacatgttcagtcagatcctgctggccgtttgatagttactggagagcctgagcaactagacaatccttggggtgttactccattcaagaaggttattagtttgccctcccgcattgatcctcatcaaacttcggcagttgtcactctccatggacagctatttgtccgtgcaccattcgagcagtcaaagtaa

SEQ ID NO: 11286 - DNA, 2298 bp, Oryza sativa
  Clone ID: TFbOSC900362j.C1.o9.fg
atgtcgcaaatccagagcttctcgcggcagaactgcgtgctcctcgcggtgctgtgtgggaagcacgctgagaagcgtgcccaggcgaggtcggggctggaggcgaagcggctgcggccgtcgtacccgttcccggagctcagctcgtcggggagattggaggtgcacacgctgttcaacccgacaccagagcagttcctcgaggcgcagcgcgtggttcagcccaacttcttgtacatccaggggcaacagcttgaggatgagaaggagattggctcgctcgtctggggggacaatgacgtatctgatccgcaggcgtttagttgtctcatcagcccgccatttccgaccatagtttatctggaggttccaattggtgaaaaacttgctcaagcagttcattcaaaggggattccatacgtaatatactggagaaattcattttcatcatatgcagcatcccattttcgccatgcattaatgtcagtggttcaaagttcggtgagccatacttgggatgcttttcagcttgctcatgcatcctttcgattatactgtgtaagaaacaaccatgtacaaagtgttaagcttgggcctcgtctactaggggatgctccaaagataaatataacccctcctgagaatgagatggttgaggaggaaggttcttcagatgtgtttccagctataaaaatttatgatgatgacatcaacatgaaatttcttctttgtggagttcctagcacaccggatccttgtttgttaggttcattagaagatggcctgaatgcacttctgaatattgaaattcgggggtgcaaacttcagaatcgaatcagtgcttctccaccaccacttcatgctgcatccttaccacgtggaatggttacaatgcgttgcgacatcactacgtgcagttcttctcatgtgtcacttcttgtttctggtagcgcacaaacttgttttgatgaccagcttttggaaagccacatcaaggatgagatcattgagaagagccaactagtccatgctctgccaaataatgatgataagttatcatcaagtgtgcctttcacttcaatgtccacagcttgtggggcttctacctttgaagtttggatgacccttcctaagtgggcagcacaggttctgaagcatttagcgccagacatctcatacaggagcttagtggcacttggaattggttgtataaatggcacgcctgttgcttcatttgataggcgagatgcagaccgccttcttttcttttgtacaaatcaacacaaagatttggctattgaaaatggcccatactttcatctgccaagatggtcagcatctcttaccaaggaaagagtgaaggtgggtctggaatcgaaaccaaatttgttaggtgcgaatggaattcctgaggacaagaaacgtctgatcgaagggccttcctcatcttccaaggcaaaattgaagcctgcaactatgaggcccattcctcactctagaaagcaacaaatgcatccttttatgggtttcctggaagctactgttcatgaaactagtcaggttaagccaaacttgccagctgctcccccagtgaagcataattcggtacctgctgctccagcaacacatagaaaatcaacttcagggccatctcatgctcagtcaatcattcaactgaacccactgcctctgaagaaacatggatgtgatcggttgcctattcagatgtgctctgaggaggacttcttgaaggatgtcatgcagtttttaattcagaggggtcataatcgactcgtacctcatggaggactagctgaatttcctgaggccgtccttaatgcgaagcgccttgacctatataacttgtacaaagaggtggtgtctaggggtggcttttatgtaggcaatggtataaactggaagggtcaagtcttctcgaagatgcgtaaccatactgtgacaaatagaatgaccggtgttggaaacacactgaaaagacattacgaaacatatttactggaatatgagctagctcatgatgatgtagacggggaatgctgtttgctttgccacagtagcgctcctggagattgggtgaactgtggtttgtgtggtgaatgggcacattttggttgtgacagacgacaaggcctaggcactttcaaggattatgcaaagacagatgggctggaatacatctgccctcactgtagtctagcaaactataagaagaaacctcctccccaaaaggtagctaatggctttgcgaatacagtgtctgtatcacgaaatgtttag

SEQ ID NO: 11287 - DNA, 1677 bp, Oryza sativa
  Clone ID: TFbOSC4861j.C1.o5.fg
atgagcgcggcggcggaggaggcggctgcggcggcggcggcggaggaggtggagggggtggaggcggggaagaagggcgtggcggatgcgaaggggaaggggaaggagaaggtggtggtggcggaggaggattctgcggtggcggcgggctccgggggaagcggaggcgggaggaggacgttggtggcgtacccggcgcgggttgcggggtacaaggacgtggtggcggacgcggcggtcttcaggagggcgctcgaggggttgcacgcccagatggggacaaagctcaaggtgccaattattggtggaaaagaccttgatcttcatcagctgtttaaggaggtcacttcacgaggtggcattgataagaaatactacatgtcactattataccattttgagaggctatacttgtttgaggcacaaggctggtatcaagaaactgcagattccagaagcatttcctgtatagaaatgaaagctgaaggtcaagcttcccggaaaaggaaaagaggaagcaattcttgttcttcagaccctccaattaacttagagtggaccctttgttcaacaccattgatgaaggtgccgaggtacaacatcttggcgccaaccatacacttcggttctgagaaaggccaagctggcatgaagtccacatggtccgcgcagaaggtgttggcgctaattggccaaaagctgaccattaaaataagagaaataaaagggaaaaactcacagcttgaacactcgaacccaggatgtcgaggaaatcatgaggccatcaaaccactagaccacttatcagcttgttacctattgtaccccacaagccttttaagcttcctatatggtcagcgccaagagttagttcctttgactttgtcagacctagctgcttctttggataatgatgtacaagtgataattgatggtaagtttgaacatggctacatagttaccgttatcatgggctcaaaatcaacgaaagcggtactctataattgcaccgaagaacctgcagtgccaactgcggtgcctcatgttgcaattgacagcgctgagggcatacgtcctcgccgccgccgccgtaggaagaagttaagtacaacagaccccaaccatcctaaaccaaacaggagcggctacaatttcttcttccaagatcagcacaggaagctcaagccagaatatcctggacaagacaggcttatcagcaagatgattggtgaacgatggaacaatttaggccctgaagataaagcagtatatcaagaaaaaggtgtagaggacaaggcaaggtaccagagacagttagctctttacagagaacagagaacaggccagccaatcagcaacgcggtgcctatccagcagagacttcctcagaaagaagtgacgattgatgaggtggactctaaagtcagtgaaggtgatatcctgctgtccaaccaaggatacagcagcagtaccagtagcagtgatgaaaccgctgattcgggagaaaaaaatgtggaagatgatgaagagtttaacacagagacatctcctgagccgagcatggaaacaacagattctcatggacagcctgatccttctgctgatggggagcgctttgaactgcgccgcagggagaaccctaagattgatgagaaacgtgacatgccacctaattaa

SEQ ID NO: 11288 - DNA, 3303 bp, Oryza sativa
  Clone ID: TFbOSC101541j.C1.o11.hg
atgaacggcgccacggccggctccggctccggctccgaccacgacgacgcgcgcgccgccgaggaggccagaggggaggaggcggcaggccgtgccgtggaggttgaggaggaggaggaggaggaggaggcggtgcccgtggcggaggagagggccgcgtggggcggcggcggcactcccccgacccccgagccgaagagcgacgcggacgcggagggcgcgggctcgctggatcgggtggagctcaatgcaggggcgggcggcggccgtgagcgcgaggacgacgagggggaggacgaggccgtgggggcgaggggggtggagatgaacggggaggacgccatgagccacgacggccacgacggcgatgaggatggcgatgacgaggaggacggcgacgacggcgaggaggaggaggaggaggatgatgatgaggaggatgacgatgacgactccacccccgatgcgtcgccgagggcggaggcgaaggcggagggcgagagctccaccgtgatggcgggctgcgccaaccagcccgctgagcccgaccccttcctcgacggtgacgactctggaacggaggaggagcaggcggcgttcatggtggagctggagcgcttccacagggagcacggcctcgagttcaagcctcccaagttctatggcaaaggtctcaactgcctcaagttatggaggcaggttgcccacctgggaggccatgagcaggtaacaatttgtaaactatggcgtcaagttggagagactttcaggccgccaaagacgtgcactactgtatcgtggtcgttccgaattttctatgagaaggcacttctcgagtatgaaaaatacaaagtccgaactggccagcttcaagtaccattgtctgctttaccacagcctggtggtactggccgtgaggaaaaagattcagtcccttcttcaagtcgtggtaagaacctaaaggatgactcaatggtcactgatgttggagaacctgccgagtgggtgaagattaatgtacgacagactaaagattgtttcgaaatctatgctctggttcctggacttctacgcgaagaggtgcatgttcagtcagatcctgctgggcgtctggttataactggggacccagagcagcctgataatccttgggggatcactccattcaagaagggcccatcaattagtagtgaaacaaatccggtggtgggcccgattcgcaattcgccaaacggcagggacccgacgcgaccgcatcggcatcgcggcagcggcagcgtgcggtgccgacttgtgggaggagccgcctcctccgcctccgactatataacaaaaatcctcccgcacccccggcacatcgtccccgctagtcgccgccagtcaccaagccccgagcccacccccccaagctaccagcacagaacgaatcggagcgccgcgccgcgccgcgctgcgtcaccggcgatggactccgactacggcgtgccgcgcgagctctcggaggtgcagaagaagcgcgcgctctaccagcccgagctgcccccctgcctccagatctgtgtgcttccggaccgcgcggcgccagatcccgcgccgctccggcgtccggatcagtccatctcaccggcgctggtcgtgtatactggcaccactgtgagagtggagtatggtgacgctgcaattgctgctgatcctgcaggcgctcatgtgatcagccacgcgttcccccacacatacgggcagcccctggcccattttctccggaagacggctaatgtccccgatgctactgtcatatcagagcatcctgttgtcagggttggtgttgttttctgcggaaggcagtccccgggaggccataatgtcatctggggactccatgaggcaattaaggctcacaacccaaacagcaaacttattggttttcttggtggaagtgatggtcttctcgcacagaaaactttggagatcaccgacgaagttctttcttcatataaaaaccaaggtggttatgatatgcttggccggacaaaggatcaaattagaacaacagagcaggtcaatggtgccatggctagttgtcaggctttgaagttggatgctttagtaatcattggaggtgttacatccaatacggatgctgctcaacttgctgagacttttgctgaggctaagtgtgcaacgaaggttgtaggtgttcctgtaactttgaatggggaccttaagaatcagtttgttgagacaaccgttggttttgataccatatgcaaggtgaactcacaacttataagcaatgtatgcaccgatgctctttcggctgagaagtattactactttattcgcatgatggggcggaaggcttctcatgtggcattggagtgtgctcttcaatcacatccgaatatggttatcctaggtgaggaggttgctgcatcaaaacttaccatctttgatatcacgaagcagatatgtgatgcagttcaggcaagggctgagaaggataagtatcacggagttgtacttattccggagggactcgtggagagtattcctgaattatatgctttgcttcaggaaattcatgggcttcacggcaaaggtgtttccatggagaatatctcctcacagctttcaccttgggcatctgcactatttgagtttttgcccccatttattaggaagcagctgcttctccatcctgaatctgatgactcagctcaactttctcagattgaaaccgaaaaacttttggcccaattagttgaggatgaaatgaacaggcgtatggttcttgggcacgtgtgctaccacatcttagctgctggtttgaatggttacatggctactgtgacaaatcttaagagtcctgcgaacaaatggcgatgtggtgcggctccgatttcgtctatgatgaccgtgaagagatggtcacgtggtcctgcggctactcaaatagggaaacctgctgtccatatggctactgtcgacttgaaaggcaaagcattcgagctattgaggaacaattctaccagcttcttaatcgacgacatctacagaaacccaggaccactccaattcgaaggagcaggtgctgattcaaagcctatttcactgtgcgtggaagatcaagactatatgggcaggatcaagaaactccaggaatacttggagaaggtgaaaagcatcgtgaagcctgggtgctcgcaggatgttctcaaggcagcgctgagcgctatgtcatctgtgaccgagacattggcgatcatgacatcgtcttccactggccagggaaccccactctga

SEQ ID NO: 11289 - DNA, 5196 bp, Oryza sativa
  Clone ID: TFbOSC402966j.C1.o6.fg
atggggatctccgccgcagccagaggcagcggcgttggatcttccgtccctgaggctccggtgttccgccccacggaggaggagttcggcgaccccctggcgtacgtggcccgtatccggcccctcgccgagccatacggcatctgccgcatcgtcccgccgccctcctggtctcctcccccggcactcgacgtctgcaccctctctttccccacaaagaggcagcccatccaccgcctcctcgcccgcctcgcccccgctgatcccgacaccttcctcctcgattaccgccgtttcctccaccgacaccgaggccgcaagaagccaaagccaaagttgcctgccctctccgacggacgcccgctcgacctctgccgccttttccacgctgtcaagcgcttcggcggctacgacggcgcctgcgcggggaagcgctgggccgacgtgctccgcctcgttgatgacaaggcgccgaggcatgccttctccgtctccgagcacgtcatcgcgcagctctattatgagcatctctatcaatatgagcacttcacaaacagattgccatcacaatcacatgatgatcaaccgccggtttctgcttcctctgctaatattagtattaggcgccagaagaaaaggcttaggaaaaccagcaacacaatgggacactgtggaggcagcactagtgccaaaactgcagcatctgctcccaagcagaaaaggagaaaggttgatgcaacggctactgtggtcaatgaggcaatggatcaggtctgtgagcagtgtaatagtggcttgcatggggaagtcatgctgctctgtgatcgctgtgataagggatggcatctatattgcttgtctccaccactcgagagtgtgcctccgggaaactggtattgctcagagtgcatgaactctgataggaattgttttggatttgtccacaggaggaagacttgccaagttgaaactttccggaaatttgaggagagggtgagaaaaaggtggtttggacacaagaatcccagtcgtgttcaggttgagaagcaattttgggagattgtagagggaaaggtaggagagcttgaggttatgtatgggagtgatttggacacttcaatttatggaagtgggtttcctcgcctttgtgatcccgtgccatcgtcggtggacccagttatgtggcacaagtattgctcgagcccatggaatctgaataatttcccaaacctaccaggctcagttcttcagacagtccgggataacattgctggtcatctgatgtctaatcatagagccgctgtgagtgctagtctttttcacctacacagttactccatgcacgtgggtgagccgaaatgttggtatggggtacctggagcagaagcaaatgcttttgagaaggcaacactgagacttgttatgttagaatacttaaccttttgtgatctgcaggttatgcgcaatgctttgcctgatctatttgatgcacagcctgacctgctttttcaccttgtcacgatgctgagtccatcgattttacaagcaaatggtgttcctgtttatagtgtgatacaggaacctggtttaaattgtgctgaggctgtaaattttgctcctgccgattggttacctcatggtggcattggtgctgaactatatcgcctgtaccgtaaagcacctgttttgtcacatgaggagcttttgtatgtggttgcaaagaacggcgtggacaatgaatcacttccctacttacaaggagaaatagagaggctatttgtgaaggagaaaaaatgtcgtgaggagctatggattactgggattgtcaaatccaatctgatgccaccgaagaataatccaaacttcattggaagtgaagaggtagacctactagtatatcgccatctcatgtcatgtgacattgacagtgcactcatcccattgatattagccaagtttattaagagcattttctctttttcccagcactggaagcacctttgtgaatgcagtccagagaaacatcgcttactttaccgccatacccttgcagagttgggtgatttagtttgtgaggtctcaaaggctaatctaccaagggagaatgttaagcagaactcccttttacatagtgatgtttttttgccaacgagaaaggacaaagatcagtatatgtcatatacacaacttgcagaagactggctttcaaaagctgaccatattctccatatgccatttttagatactgcatatgccactgccttagaagatgctgaacagtttctttggggtgatcataatatggattctgtgcggaatatgtcagcaaaattaatagaaggtaggaaatgggcttccagtgttagaaaatgcctctctcaaattgatggctttcttcattgtaaagagaattgttccgagaaagtaaattatgtggaaatcaaagaattagctgctgtaagatgcaaaccatgttatgaaccaagtcttgcacaattgcaggtatatgtggacaaaggagaaataatgattaatgagataaacaatgcattatcatctcgctcaaaggttgattacttggaaacactgtactctagggctttagagttcccggttgaactaacagaaacatcagcactgtcttgtgagatttcttccgcaaagtcctggttgaagaaagcatgtgattgccttgaacagaataaacggggcatcgtcgacatagatttcctaaatgaactgaaatctgaggagttggagagcttccttcttgtggtggatggtgccaacttcagtattccagagctgaacattctgatgcaacggtattcaggtgcttgctcatgggtcaatcatgctaataacatagtcggcaaacttcttgaaaggaatgattatgacaacattgttgaggagttgactggcattctgaaggatggagaatcactaggagtaaaaggcatgttgtttgaggaattttccgttgttgaggaagagctaaagaaatccttctgcaggaagcaagcatccgaggctcttgcaacacaaacatctatggaggtggtcaaagaagtgctgaaagaagcttccatattaaccattgaagaggagcaaccatttgttgatctgtcccataacctcaaagctgccatcacttgggaagagaaggctagctttattcttgagcactcagctgctctccctgagtttgaaaaccatattctgtgctcagagaacatacatgttatccttccatctgaactggatatgaaagcagaggttgctactgctaagttgtggatggacaaatgtcaggcctatctgaggcctagaagtgataaacctgcatctggaggttttcttaatgttgatgacctaaaggatttaatcggccagcctgcaagtatgaaagtcattcttgacacttctgcaattaattctgttctcaacaatgtcatagaatgggagcataattcactaagtctgatacacagttcaagatccttactggattcaaatgtaatcgactctactattgatccacttaaaagaaaactagaggagctgcaagataaaattaatgcagaaatagaaaaaggactatctctcggttttgaatttaaggttgttcatgagctgaaggattcttttttcacacttggatggatattgaatgcattgtctttctgcggtgtgactcctttgttgcaggatgctgaaaaattaattcaacaagctgtcaaccttcctgcctcattgtcggattgttccttagctgaactattggtgaggggatcatcttggctaagaaaagcacttatgtttcttcctggttcagaaatgtctgaaacatccagattgttaaatgttgaaaatattttagcggagtataaggcaagtatttcaaagttcaaactgatatatctcattttccatgcacttgttggtgatcaggaaattgctgttccttatcctatgatgattgccaaacttgaggatgctatcaacaagcacaattcatgggcagaacaatgcaatgccttcttcatgtttcctgatcatcaatcttgggatggactattaagcttgagagacagtggtcagtctgtggcattcgattgtactgagatggataaggtggttgctgagattaaaaagatcgaggagtggcttactcactgccactgtactctgtttcctgatggcaataacagtgattctttgctctccgcgcttctgaagattagaggatcaatggacaatgcttgtatgttatattccgactgtaaccagaaaggattatgtgccatctgctcttgtgatgtgggagatcatattacccctagatgtatgatatgtcaagcgaggtatcatagctcctgtgtcgaaccactgcctgcttctacacaagtgactcgtgaatggacctgtcctttttgctttcatttagaaagtggggacccattacagaatagactacaggagaagatatctaaagggaatcgtccagcacttcctgcattaatcgggctccgctcttttgccaagggtttctattcagggattgaggagttggatttattagaagaaattgctgagaaagctcataaatttaagtcctaccttatgcaaatattgcatgatgcagactcttaccatggagaagatcttagtgtcatgcacagatctcttttgattgctctaaaggcaacatcggctgctggcttatatgatcaccagatcagttgcagaattgagtcaatgttgagcagatattcctggaaaaaacgaatacatattctcttgtgtggtggaaaaaagataccgatccaacaagtactgatgcttgataatgagggttcaagtttagagatatgtggtgaagatttcttcaagttggagattaataaaataaaggaaactagtctgcagtggctggccaaagcagaaaagactacacttgattctggtaagctcgcccttgaccttgtgtatggacttattattgaaggcgaaagtcttactgtgcatgttgagaaggaactgaagttactacgagaccgcagtgttctatattgcatttgccatcaacgaccgaagcaggacctcacacccctccggcatcttgtgaagcagcaggaagagtgggagctatccagtgcaacagtagtagccaatgggagaaaacacatgtaa

SEQ ID NO: 11290 - DNA, 921 bp, Oryza sativa
  Clone ID: TFbOSC900124j.C1.o5.fg
atggctgagaagctgctgtacccaccaccgcttctctcccacgaggaggtcgccaacgacagagcggccttcatggacaccctcaggcgcttccattccctcatgggcaccaagttcatgatccctgtgattggaggcaaggagatggacttgcacgctctctatgtggaggtcaccagcagaggcggcctcgcgaaggtgatggaggagaggaaatggcgggaggtgatggcgcggttcagttttcccgcgacgacgacgagcgcgtcgtacgtgctgaggaggtactacctcagcttgctccaccactacgagcaggtctacttcttccgcgcccatggcgccctcctccgccctgctgcgtcggcgctgacgaagacgccgaggaggaagatgagaggaacctccgatcagtcgccggcggcggcggaggccgggaagagaatggcgctcccggagcggctaggcggagagccctgcagcttcagcgtgaccggctccatcgacggcaagttcgagcacggctacctcgtcaccgtcaagatcgccgccgagacgctgcgaggcgtgctctaccgcgtcgcaccaccaccaccaccaccagcagcaccaccaccaccgccaccgccggcgaggggccggcggcggcgagggcggcggcagcgcgacccggcgcagccgaggccgaacaggagcgcctacaacttcttcttcaaggagaagcacccggagctgaaggcgacccacccgcacagggagagggagtacagcaggatgatcggcgacgcctggaaccgcctcgccgccgacgacaagatggtttactacaggcacagtgcagaggacaaggagaggtacaagagggagatgcaggagtacaacgagaggctcaagcttgcgccgtcaacaatggctggatga

SEQ ID NO: 11291 - DNA, 352 bp, Oryza sativa
  Clone ID: TFbOSC401571j.C1.o5.gp
gggctccatgcaggttaaagctattggagatagagctgtagacaagtcttctgttagtttaatgccagacaaaccttttatttcaacaggttttttcctaggtcgccctctaccttttcttggagttgattccacaggattaacagttggcatgggacaagctattgcaacgtcacatgaaacaactgctgaactgacaagaggatcaataagagcaaactcttgacttgtgtcgttttgggatgaatcttccaatttggcaattggcagcggatattttcttggtctgccccttggtcttttgacacttggttccaagtgatcagaatttgtgatggtctttcttggtcta

SEQ ID NO: 11292 - DNA, 355 bp, Oryza sativa
  Clone ID: TFbOSC400259j.C1.o61.gp
gggctccatgcaggttaaagctattggagatagagctgtagacaagtcttctgttagtttaatgccagacaaaccttttatttcaacaggttttttcctaggtcgccctctaccttttcttggagttgattccacaggattaacagttggcatgggataagctattgcaatgtcacatgaaacaactgctggactgacaagaggataaataagagcaaactcttgacttctgtcgttttgggatgaatcttccactttggcaattggcagtggatattttcttggtctgccccttggtcttttgacacttggttccaagtgatcatcagaagttgtgatggtctttcttggtcta

SEQ ID NO: 11293 - DNA, 646 bp, Oryza sativa
  Clone ID: TFbOSC406953j.C1.o3.np
cctcgacttcccgcctccgccgccgccggtgaacgttccggcggcggctccggcgggggccgcgtcgccggagagcaagcagcaggcggcggcgggggccatcgtgccgctgcggcggccgagggggaggccgctggggtcgaagaacaagccgaagccgccggtgatcatcacgcgggacagccccgacgcgctccactcccacatcatcgaggtggcgccgggggccgacgtggcggcgtgcgtcgcggagtacgcgcggcggcgcgggcgcggggtgtgcctgatgggcgcgtcgggcgccgtcgcggacgtcgccgtgcgcggcgcggcggcgccgctcccgggaaggttcgagctcctctccgtaacgggcaccgtgctcccgccccccgcgccgcccggcgcgtccggcctctccgtgctgctctccgccggccagggccaggtcgtcggcggctgcgtcgtggggcccctcgtcgccgccggccccgtcaccctcttcgccgccaccttcgccaacgccgtctacgagcgcctcccgctccaggccgaggaggccggagagccgcacgcggaggcggagcagcaggcccagccggaagccgccgcggcatctagctagctcggagctggtttgtcaaca

SEQ ID NO: 11294 - DNA, 951 bp, Oryza sativa
  Clone ID: TFbOSC900202j.C1.o3.fg
atggatccggtcacggcatcaatacacggtcaccatcttcctccaccgttcaacacccgcgacttccatcaccatctccagcagcagcagcaccagctgcatctcaagaccgaggatgaccaaggcggcggcactccgggtgtcttcggcagccgcggcaccaagcgcgaccacgacgacgacgagaacagtggcaacggccatggaagcggtggtgacggcggtgacctcgcgctggtacccccctcgggtggcgggccggacggcgccgggagcgagagcgccacgcgccgcccgaggggacgcccggcggggtccaagaacaagccgaagccaccgatcatcatcaccagggacagcgccaacacgctccggacgcacgtcatggaggtggccggcggctgcgacatctccgagagcatcaccacgttcgcgcgacgccggcagcgcggggtttgcgtgctcagcggcgccggcaccgtcactaacgtcacgctgcggcagcccgcatcgcagggagcggtcgttgcgctccacggccggttcgagatactctccctctccggctccttcctcccgccgcccgccccgccggaggccacggggctcaccgtctacctggccggaggccagggccaggtcgtgggcggcagcgtcgtcggcgcgctgaccgcggctgggcctgtggtgataatggcggcgtcttttgcgaacgcggtgtacgagcggctgccgttggaggacgacgagctactggcggctcaagggcaagccgacagcgctgggttgctcgccgcggggcagcaagcggcgcagctcgccggcggggccgtcgatccaagcctcttccaaggactaccaccaaacctactcggaaacgtgcagctgccgccggaagccgcctacggatggaaccctggagccggcggtggccgcccggcgccgttctga

SEQ ID NO: 11295 - DNA, 777 bp, Oryza sativa
  Clone ID: TFbOSC24712j.C1.o1.fg
atggggagcatcgacggccactcgctgcagcagcatcaggggtactcccacggcggcggcgcgggagggagcaacgaggaggaggaggcgtcgccgccgcccggcggtggctcggctacggggtcggcgggccgccggccgagggggaggccgccgggctccaagaacaagccgaagccgcccgtcgtggtgacgcgggagagccccaacgcgatgcgttcccacgtgctggagatcgccagcggcgccgacatcgtcgaggccatcgcgggcttctcccgccgcaggcagcgcggcgtctccgtgctcagcgggagcggcgccgtcaccaacgtcacgctccggcagcccgcggggactggggccgccgccgtcgcgctgcgggggaggttcgagatattgtccatgtctggcgccttcctcccggcgccggcgccgccaggggccacggggctcgccgtgtacctcgccggcgggcaggggcaggtggtgggtgggagcgtcatgggggagctgatcgcgtcgggccccgtcatggtgatcgcggccacgttcggcaacgccacgtacgagaggctgccgctggaccaggaaggcgaggagggcgccgtgctgtccgggtcggagggcgccgccgcgcagatggagcagcagagcagcggaggcgccgtcgtgcccccgccgatgtacgccgccgtccagcagacgccgccgcacgacatgttcgggcagtgggggcatgcagcggtggctcggccgccgccgacatcgttctag

SEQ ID NO: 11296 - DNA, 1171 bp, Oryza sativa
  Clone ID: TFbOSC24712j.C1.o2.gp
tgaaggagcaagtgagcaaccactgccgatcttgatacgcacagtaattttacattcttcaaactctgaagaaaatggaacgataagatcacacgagtacttatgcattacatagcacattaattaacatggtaaatgattaattaacctactcaaacaactagggaaagaagtggaaggctaactagctaggtagagagacattgattaaccggtgccagtgctagaacgatgtcggcggcggccgagccaccgctgcatgcccccactgcccgaacatgtcgtgcggcggcgtctgctggacggcggcgtacatcggcgggggcacgacggcgcctccgctgctctgctgctccatctgcgcggcggcgccctccgacccggacagcacggcgccctcctcgccttcctggtccagcggcagcctctcgtacgtggcgttgccgaacgtggccgcgatcaccatgacggggcccgacgcgatcagctcccccatgacgctcccacccaccacctgcccctgcccgccggcgaggtacacggcgagccccgtggcccctggcggcgccggcgccgggaggaaggcgccagacatggacaatatctcgaacctcccccgcagcgcgacggcggcggccccagtccccgcgggctgccggagcgtgacgttggtgacggcgccgctcccgctgagcacggagacgccgcgctgcctgcggcgggagaagcccgcgatggcctcgacgatgtcggcgccgctggcgatctccagcacgtgggaacgcatcgcgttggggctctcccgcgtcaccacgacgggcggcttcggcttgttcttggagcccggcggcctccccctcggccggcggcccgccgaccccgtagccgagccaccgccgggcggcggcgacgcctcctcctcctcgttgctccctcccgcgccgccgccgtgggagtacccctgatgctgctgcagcgagtggccgtcgatgctccccatcccctcggccggatcgccggccggccaccggtttgccagccctactattttcgcggtcggaaagtcgcaccaacaatctagcttctccacgccaatcgctgaagccagcgtcgctcccgtctccaagcaaaagcaaagcaagcaagcgaacccacccacttaattagctgc

SEQ ID NO: 11297 - DNA, 3267 bp, Oryza sativa
  Clone ID: TFbOSC400259j.C1.o38.fg
atggcggcgccgccggaggcgacgggggcgccgccccagactgaaggagaggaggttaaggatggcgtcgaggtctgcgtatttgacgagtcaccggaggtcttctccagagcggtgcacgccatctcggagctcacaaccggggagcacgagccgaacttccctgacgccgaagtcgagcggctcgcctcctcaataactttcctcagagaatggaggcacttctcttatgagccaaaaaatgttagtttcacttgtgacgccagatcagctccatccagagttgacacacacaagataaacttaccacagttctcgtctgcatctgtcccccagatcacacacctagacaatgggaaggctaaaacagacagcttttgcagctcagatttcgttatatttgccggaggcaatgtttgggcgttggactggtgccctaggttgtgtgacaggcctcattctcccataaactgtgagtatcttgctgttgctgctcaccctcctggttcttcttaccataaaattggcatgccgttaatcgggagaggtataattcaagtttggtgtctcctagcaccatctgaagagggtcatcctcatcagtcattggttgcatgcaataaatataatccatccaatcaaccaaaacaaaggggtagaccaagaaagaccatcacaacttctgatgatcacttggaaccaagtgtcaaaagaccaaggggcagaccaagaaaatatccactgccaattgccaaagtggaagattcatcccaaaacgacagaagtcaagagtttgctcttatttatcctcttgtcagtccagcagttgtttcatgtgacattgcaatagcttatcccatgccaactgttaatcctgtggaatcaactccaagaaaaggtagagggcgacctaggaaaaaacctgttgaaataaaaggtttgtctggcattaaactaacagaagacttgtctacagctctatctccaatagctttaacctgcatggagcccaagaaaaaaagggggaggccccgaaagtatcctgctccaagcaacagcaagcatcttccaggcactgatactgaattaggaaatgattctgtctgtcagcctggttcaattgattttggtttgggtcccactgaaaatactgggtctggtgctaatataactcatgctgcagttgatgcagcctccccagttccattgtcaggtcagaggggtagagaacagccagaaaaggaagtaattcatattgagaattccatgcaatctggacagtctgacataggatccatgttgcctacgtatattttacctgaatcaggcaacaagagtaactcaactggtctgaggcggaggggacgacctaggaagaaaccatttccgagtacaaccagttgtgtatttgttcctggtactgagaccccaaagaaaggttctactctgaccaattcaaataatctcgtggtcttggccaagagtaattgtgacattttagcaaatgatattggtccatcaagctgtgctatagagaacagtgtccatttgagtgttggaacatctcatgctgcaacaccagcacagggcatatgtcttgcaaaatgcaaggaagaatcaagtgccaagaagggtagaggcagacctagaaagcagccaatttcaacggaatgcggttgttctaaagcatgcaggggtgaagaacaaaaaactcagacaattcccaagtcaagcgacaatgcgtccttggttgaaaattgcaagaaagaatcatgtcccggaaagggcagagtgcaagataaaaagaaatctgtttcaaatgaaagaagttcagtagtgcttagtgttgaagcacagaacatggacggatcttctgcatcaactgcatatacttcatgttgtactcctgcttgtaactttgaaaacgcagagacaaatcaggctgtatctgttccttccgaaaacagtgctcaggttattgatgaactaaaagatacagaagtggctcgattcaaagaatcaactaaagatgataatatgatttgttctgcagaaaagaccctttctcgtgtcccaaaagacatttctctaccaagggttgtcttatgtttagctcataatggaaaagttgcttgggacgtaaaatggaaacctccttcagcaaatcagtcagaacataaatcatgtttgggttttcttgcagtactcttggggaatggctcgcttgaagtcattcccttgacagttgattggtcaccctctcatgatatgatattggcgggatgtcacgatggaacggttgctttatggaagttctctgcaaacctgtcatttcaaggttcaaaaccttttatgtgtgtaactgctgaatctgctcccatcagaaccgtgtcgtgggcaccatctgtgagtaaggaaaacgtgaatacctttgtcactgctggagaggatggtctgaaattctgggatttaagagatccatatcgtcatctttgggagttaactactgctccaagggccgtaataagtcttcaatggttgaaggatgcaagaggtgttgtcatatcattggaagatggcacattaaagttcgttagcttgtcaagaatcgcaaatgatgttccttttactggaaggccatttgttggaacgaaaactcagggtgtttctacctatcaattgtctgaatatttgatctggagtgtccatgcctcagaaattacaggctatgcggcttattgtgtggctgatggaactgctgtttgctttgagcttactccgagattctgggaaaaggaacctgggaggaaccgtgtaccatattttctttgtggttcattatcagaggagggaacaaccattaaaattggtatcgcattaccaaactctcctttgtcaaatgttcctctggggaccaaacgggctactaaaacttgcaaagatgtagctcaattgcatgttatagaagaagggaaacttcttaccaactcagaatacaatggtgctataaatccgagcatcagagatggtcaacaagatgaacctgatgaaggacaagaaaccggtgccatagttttagctgctccttcaatgcaagagaattttgacacaagcaccagcaggggtagtgaatcccctgaaaattttgaggtctttcctcctaaagctgtagcattgcatcggttgagatggaacatgaataaaggtagcgagaaatggttgtgctatggaggtgctgcaggcattatccggtgtcagaggatctaa

SEQ ID NO: 11298 - DNA, 3534 bp, Oryza sativa
  Clone ID: TFbOSC400506j.C1.o9.fg
atggctgaccacgccgccgcctccgccgccgcggacgcggacccctcgctccgtcagggcggggacgctgctgatgctgatgaggaggaggaggaggaggaggcagcgccttcgtcggcggcgggggtgggggtgggggtgggggtggaggagaggtgcagggcgatgatggaggtggtgaagaaggacgcggtcggggggaagtggagggtgtcgaagctggtggtggagcacaaccacgaggtggaggtggcgccgtgcggggagggggagggggaggtggccgcggcggtgccggtgatggggatggagttcgaatccgtgcacgccgccaaggggttctactacggatacggcgagagggtggggttcaaggcgcgcacgggctccaatcgccgatcggttggtaatggcgtcatgatcatgcagaggttcctctgctccagaggaaattacgccaatcggaggaacaaggcaaatggtttggatgagttgaaagaggaggaggtgcaggatggtgctgcaggcaagaggaagaggggcgccaataataagaggaatcccaaccctgtgaaaaataactcagaggtgatcgaagtggagagctctgcggagaagggtgtcgggacagcagtcccaaataacgggcaagaggcgcgcaagatgaggggttctaagaggggtaggactaaaaaggatgttacagagaaggatgagaagcctgttgtcgaattggaggccgaaaaggaggacgaggtggtggcgcaagatggtgatgatgttgaggagcagaaaggggaaggggaggaggaaatggaagaggaggtacaagtggaagtgcaggaaaagagagggaggggaaggccgaggaaagcagatgccgagggcaatgccctgcaggcacgtgtgctgagggaactcggtttgagggcatcacagtacactaatgaggagaggaagaagatagttagtaagtacctctcaaagcgacagagcagacctgtttcggcaaggcctgccaagatcgcctcacatcaagctttggctgaaagacgaaaacgtggtgatggaggtagatttctgtcaagcgaaggactgacgcaaccttcggaaaggcgctctaaacgtcttgaaaagcaaaatctcaaaaaagaagataagggtgagagtaaagaagatgaaataattgaaggagaaccagatccagaaatggaagtagttgctggacctggaggagaaccaaaagttggaatggttttcctgaatgaagacaaggcctatgactgctatgtcacctatgctggaactgtggggttcagcgtccgaaaaggatggttggaaaaaacagcaacaaatactacaaaatctcgggcatatgtctgttctaaagagggattccgctctaaaagtgtcagtactgatcccaagaagccacggccagaaacaagaactggttgtctggcacacatgactattaaaatcactgtgagtggcaaatatgtagtgactgagtatgtggctgatcataatcatgatcttgaaactcctttggtggacatccaggttctgagatcacataagttattagcaaagttacagcagcctccagatccaccaagagttgttttgataccaaatgattataaaaattatgtaaggacaaggcacacaaaagatatgcaattaggtgatacccaggcaatttatgaatatttgcagaggaagaaaggtgaacatccttctttcttttatgccatccaagtggatgaagatgaccagttgacaaatgtattctgggcagatgttaagtcgattctggattaccactactttggtgatgtactgtgtgttgacacaagatatagcacaagtgatcatagtaggcctctattgttgtttattggtgttaaccatcataagcagccagtcatatttggtgcagcattggtttatgatgaatcagttgaatccttcaaatggttgtttgaaactttcaaatctgcaatgagtggcaagcaaccaaaaacagttatgatcgatcaatctacagcaatcagtgaagcagttgcttctgtttggccaaggaccacccagcgcttttcactgattcatttatataaaaatgccactaagatattaagggatgccttccaagcctcggaaacttttgcagacgattttagcatgtggttgtatggctatgaggaggagggggatttcttgtcaagctgggaaatcctctcagataagtacaatctaaaggacaatgagtggctaggtaaattgtatgcagatagagaaagatgggctttaccttatggacgtgattcattctgtgcagatattgcagccgcactccgaagtgataataacactgatgctatactggcagatcttctaaagaaagaaacggatttcccatccttctttaacaattatgacaaacttttggagaacaaacgcctagctgaacaacaagctgactaccttggggttcaaatggcacagagagtagcacctctgcggatgctttggcaagctgctaatgcatatactcctacactttttgagatgttcaggttggaatttgaactgaccttgacttgcatggcttattgctgtggtgagattggaccaatatctgagtatgaggtaactgtcaaaaacaggccccgtgaccattttgttagatttgactcatcagaatgtatggttgtttgtagctgtaagaaatttgaattcacaggtattccatgttgccatgtactgaaagttcttgaggtaagaaatattaaagaacttccaccacactacattttgaaaagatggagaaaggatgctcagagtgaatctccgagggagaactatggttttgaagctgtagatgaagatcccaggttcttgttgtctaaacgatacagcatgttgtatcgaacgttctacaaaattgcagcaaaagctgccgaaaatattgaagcttatacatacatggagagccaatgtgatcagtttatagagcaagttgaacttctattgcaagcaaagttacatgataaatcttcattgagcactatactgaaagttcaacagccaaatttgtttccgaatgaagccagcaacagtgaaactcgcagacagcaaagtcctcttcaatcaaataagaagaaaaagggtagacaaggtctaccggagcctgaggaggctgaagttccgcttagggttgatcctcctacaatatcaaatgacattccaaatcatctgagaactccaaccagtcaatttcttgcaacaagccatataatgcaggcaccgtatattgcacagcaattcggacttagctctcttcagggatttcctggcatatcaccatttgggcagttgcaggaaccagcacctgctcctctccagcaacctcatctacagcaaccaccctttcatagcggtccacaaatcccccaggtgattgttataacttacacccatgttcccttcccaagggatttcactttcacagattccattagcaattactag

SEQ ID NO: 11299 - DNA, 801 bp, Oryza sativa
  Clone ID: TFbOSC101556j.C1.o2.fg
atgggcttgccggagcagccgtccggctcgtcgggccccaaggcggagctcccggtggccaaggagccggaggcgagcccgacggggggcgcggcggcggaccacgccgacgagaacaacgaatccggcggcggcgagccgcgggagggcgccgtggtggcggcgcccaaccggcgcccccgcggccgcccgccgggctccaagaacaagccgaagccgcccatcttcgtgacgcgcgacagccccaacgcgctgcgcagccacgtcatggaggtggccggcggcgccgacgtcgccgacgccatcgcgcagttctcgcgccgccgccagcgcggcgtctgcgtgctcagcggcgccgggacggtcgccaacgtcgcgctgcgccagccgtcggcgcccggcgccgtcgtcgccctgcacggccgcttcgagatcctctccctcaccggcaccttcctccccggcccggcgcctccgggctccacggggctcaccgtctacctcgccggcggccagggccaggttgtcggcggcagcgtcgtggggtcgctcatcgccgcgggcccggtcatggtgatcgcgtccacgttcgccaacgccacctacgagcgcctgccattggaggaagaagaggagggctcaggcccgcccatgcccggcggcgccgagcccctcatggccggcggccacggcatcgccgacccttcggcgctgccaatgttcaacctgccgccgagcaacgggctcggcggcggcggcgacggtttcccatgggcggcgcacccccgcccaccgtactga

SEQ ID NO: 11300 - DNA, 4137 bp, Oryza sativa
  Clone ID: TFbOSC401571j.C1.o5.fg
atggcggcgctgccggaggcgacgggggcgctgccccagactgaaggagaggaggttaaggatggcgtcgaggtctgcgtatttgacgagtcaccggaggtcttctccagagcggtgcacgccatctcggagctcacagccggggagcccgagccgaacttccctgacgccgaagtagagcggctcgcctcttcaataactttcctcagagaatggaggcacctctcttatgagccaaaaaatgttagtttcacttgtgacgccagatcagctccatccagagttgacacacacaagataaacttaccacagttctcgtctgcatctgttccccagtatcttgctgttgctgctcaccctcctggttcttcttaccataaaattggcatgccattaatcgggagaggtataattcaagtttggtgtctcctagcaccatctgaagagggtcatcctcatcagtcattggttgcatgcaataaatataatccatccaatcaaccaaaacgaaggggtagaccaagaaagaccatcacaaattctgatcacttggaaccaagtgtcaaaagaccaaggggcagaccaagaaaatatccgctgccaattgccaaattggaagattcatcccaaaacgacacaagtcaagagtttgctcttattgatcctcttgtcagttcagcagttgtttcatgtgacgttgcaatagcttgtcccatgccaactgttaatcctgtggaatcaactccaagaaaaggtagagggcgacctaggaaaaaacctgttgaaataaaaggtttgtctggcattaaactaacagaagacttgtctacagctctatctccaatagctttaacctgcatggagcccaagaaaaaaagggggaggccccgaaagtatcctgctccaagcaacagcaagcatcttccaggcactgatactgaattaggaaatgattctgtctgtctgttgcctggttcaattgattgtggtttgggtcccactgaaaatactgggtctggtgctaatataactcatgctgcagttgatgcagcctccccagttccattgtcaggtcagaggggtagagaacagccagaaaaggaagtaattcatattgataattccatgcaatctggacagtctgacgtaggatccatgttgcctacgtatattttacctgaatcaagcaacaagagtaactcaactggtccgaggcggaggggacgacctaggaagaaaccatttccgagtacaaccagttgtgtatttgctcctggtactgagaccccaaagaaaggttctactttgaccaattcaaataatctcatggtcttggccaagagtaattgtgacattttagcaaatgacattggtcgatcaagctgtgctatagagaacagtgtccatttgagtgttggaacatctcgtgttgcaacaccagcacagggcatatgtcttgcaaaatgcaaggaagaatcaagtgccaagaagggtagaggcagacctagaaagcagccaatttcaacggaacgcggttgttctaaagcatgcaggggtgaagaacaaaaaacacagacaattcccaagtcaagcgacaatgcggccttagttgaaaattgcaagaaagaatcatgtcccggaaagggcagtgttcaagataaaaagaaatctgtttcaaatgaaagaagttcagtagtgcttagtgttgaagtacagaacatggacggatcttctgcatcaactgcatatacttcatgttgtactcctgcttgtaactttgaaaacgcagagagaaatcaggctgtatctgttccttctgaaaacagtgctcaggttattgatgaactaaaagatacagaagtggctcgatttaaagaatcaactaaagattatcatatgatttgttctgcagaaaagaccctttctcgtgtcccaaaagacatttctctaccaagggttgtcttatgtttagctcataatggaaaagttgcttgggacataaaatggaaacctccttcagcaaatcagtcagaacataaatcatgtttgggttttcttgcagtactcttggggaatggctcgcttgaagtatgggaagttccatcaccaagcatgattcagaaaatatattcctcttcttcaaaggagggtactgaccctcgatttttaaagctgaagcctgtgtttagctctgccaaagttgctttatggaagttctcagcaaacttgtcatttcaaggttcaaaaccttttatgtgtgtaactgctgaatctgctcccatcagaaccgtgtcgtggacaccatctgtgagtaaggaaaacatgaatgcctttgtcactgctggagagaatggtctgaaattctgggatttaagagatccatatcgccatctttgggagttaactactgctcgaagggccgtaataagtcttcaatggttgaaggatgcaagaggtattgtcatatcattggaagatggcacgttaaagttcgttagcttgtcgagaatcgcaaatgatgttcctgttactggaaggccatttgttggaatgaaaactcagggtgtttctacctatcaattgtctgaatatttgatctggagtgtccatgcctcagaaattgcaggctatgcggcttattgtgtggctgatggaactgctgtttgctttgagcttactccgagattctgggaaaaggaacctgggaggaaccgtgtaccatattttctttgtggttcattatcagaggagggaacaaccattaaaattggtattgcattaccaaactctcctttgtcaaatgttcctctggggaccaaacgggctactaaaacttgcaaagatgtagctcaattgcatgttatagaagaaggggaacttcttgccaactcagaatacaattgtgctataaatccgagcatcagagatggtcaacaagatgaacctgatgaaggacaagaaactggtgccatagttttagctgctccttcaatgcaagagaattttggcacaagcaccagcaggggtagcgaatcccctgaaaattttgaggtctttcctcctaaagctgtagcattgcatcggttgagatggaacatgaataaagggtgtacccacatactgccctcgtctggtatcggttggttctcgagtgtaggctgcgtgttcacggtggtatcatttgcaggggtcccttggttctttgagttcatccggtctggaaatgtaacaagatcagtctcaaaacctcatgggcggaacttgtttctgcaaagcttagttgaagaagggcagaatccaagcactagcaatggtgccagcaactcccagaaaagtgttgaagataaggacctgatcgactgtctagagaatggcgtcaacttttggacggattattcaaaagttcagtatcatcctcagagtttatatgagttacatgggtcatggacagactttgacaagtttgataactatggcagcgcacaagaggttgtttcagactggtcgcaaatagaggaaatgaatgagaggctaaggttctttgttgaagaatgcgaccatattcagatagagatgctattggggaacatagagatgaagctgcactctttgacccctgaaatcagcgacgaggacgaagatccttattcagttgaatcgctggtggttcatggagctcttgatagaggtgggcaaaggacttccatatcacaagtgaaagactcggtatgttcagtctacgaagccagagagacaaagccaaaattttcccatctctcagcatctctttgccccctccctgtcccccttccgttcccgtcaatcttcagaggcaacattggccggcacggggagatccttagcgaccatgcagaagaatcccagccaaagggctcactcgatattgaatcgataccgatggcggcacgattacgatcaagcagcactgtcctgcctttcatagagaggcgatcggggagcctccagaagcacggtgtcgcaagaggtgccatcgggtctttggtcctccgtgactggggcttcgggagggaggaggtggatgacatgggggagcacctagcaaagttactccgcccgtttcaccctgaaatggatcttacttcggattctgactag

SEQ ID NO: 11301 - DNA, 4137 bp, Oryza sativa
  Clone ID: TFbOSC900057j.C1.o13.fg
atggcggcgctgccggaggcgacgggggcgctgccccagactgaaggagaggaggttaaggatggcgtcgaggtctgcgtatttgacgagtcaccggaggtcttctccagagcggtgcacgccatctcggagctcacagccggggagcccgagccgaacttccctgacgccgaagtagagcggctcgcctcttcaataactttcctcagagaatggaggcacctctcttatgagccaaaaaatgttagtttcacttgtgacgccagatcagctccatccagagttgacacacacaagataaacttaccacagttctcgtctgcatctgttccccagtatcttgctgttgctgctcaccctcctggttcttcttaccataaaattggcatgccattaatcgggagaggtataattcaagtttggtgtctcctagcaccatctgaagagggtcatcctcatcagtcattggttgcatgcaataaatataatccatccaatcaaccaaaacgaaggggtagaccaagaaagaccatcacaaattctgatcacttggaaccaagtgtcaaaagaccaaggggcagaccaagaaaatatccgctgccaattgccaaattggaagattcatcccaaaacgacacaagtcaagagtttgctcttattgatcctcttgtcagttcagcagttgtttcatgtgacgttgcaatagcttgtcccatgccaactgttaatcctgtggaatcaactccaagaaaaggtagagggcgacctaggaaaaaacctgttgaaataaaaggtttgtctggcattaaactaacagaagacttgtctacagctctatctccaatagctttaacctgcatggagcccaagaaaaaaagggggaggccccgaaagtatcctgctccaagcaacagcaagcatcttccaggcactgatactgaattaggaaatgattctgtctgtctgttgcctggttcaattgattgtggtttgggtcccactgaaaatactgggtctggtgctaatataactcatgctgcagttgatgcagcctccccagttccattgtcaggtcagaggggtagagaacagccagaaaaggaagtaattcatattgataattccatgcaatctggacagtctgacgtaggatccatgttgcctacgtatattttacctgaatcaagcaacaagagtaactcaactggtccgaggcggaggggacgacctaggaagaaaccatttccgagtacaaccagttgtgtatttgctcctggtactgagaccccaaagaaaggttctactttgaccaattcaaataatctcatggtcttggccaagagtaattgtgacattttagcaaatgacattggtcgatcaagctgtgctatagagaacagtgtccatttgagtgttggaacatctcgtgttgcaacaccagcacagggcatatgtcttgcaaaatgcaaggaagaatcaagtgccaagaagggtagaggcagacctagaaagcagccaatttcaacggaacgcggttgttctaaagcatgcaggggtgaagaacaaaaaacacagacaattcccaagtcaagcgacaatgcggccttagttgaaaattgcaagaaagaatcatgtcccggaaagggcagtgttcaagataaaaagaaatctgtttcaaatgaaagaagttcagtagtgcttagtgttgaagtacagaacatggacggatcttctgcatcaactgcatatacttcatgttgtactcctgcttgtaactttgaaaacgcagagagaaatcaggctgtatctgttccttctgaaaacagtgctcaggttattgatgaactaaaagatacagaagtggctcgatttaaagaatcaactaaagattatcatatgatttgttctgcagaaaagaccctttctcgtgtcccaaaagacatttctctaccaagggttgtcttatgtttagctcataatggaaaagttgcttgggacataaaatggaaacctccttcagcaaatcagtcagaacataaatcatgtttgggttttcttgcagtactcttggggaatggctcgcttgaagtatgggaagttccatcaccaagcatgattcagaaaatatattcctcttcttcaaaggagggtactgaccctcgatttttaaagctgaagcctgtgtttagctctgccaaagttgctttatggaagttctcagcaaacttgtcatttcaaggttcaaaaccttttatgtgtgtaactgctgaatctgctcccatcagaaccgtgtcgtggacaccatctgtgagtaaggaaaacatgaatgcctttgtcactgctggagaggatggtctgaaattctgggatttaagagatccatatcgccatctttgggagttaactactgctcgaagggccgtaataagtcttcaatggttgaaggatgcaagaggtattgtcatatcattggaagatggcacgttaaagttcgttagcttgtcgagaatcgcaaatgatgttcctgttactggaaggccatttgttggaatgaaaactcagggtgtttctacctatcaattgtctgaatatttgatctggagtgtccatgcctcagaaattgcaggctatgcggcttattgtgtggctgatggaactgctgtttgctttgagcttactccgagattctgggaaaaggaacctgggaggaaccgtgtaccatattttctttgtggttcattatcagaggagggaacaaccattaaaattggtattgcattaccaaactctcctttgtcaaatgttcctctggggaccaaacgggctactaaaacttgcaaagatgtagctcaattgcatgttatagaagaaggggaacttcttgccaactcagaatacaattgtgctataaatccgagcatcagagatggtcaacaagatgaacctgatgaaggacaagaaactggtgccatagttttagctgctccttcaatgcaagagaattttggcacaagcaccagcaggggtagcgaatcccctgaaaattttgaggtctttcctcctaaagctgtagcattgcatcggttgagatggaacatgaataaagggtgtacccacatactgccctcgtctggtatcggttggttctcgagtgtaggctgcgtgttcacggtggtatcatttgcaggggtcccttggttctttgagttcatccggtctggaaatgtaacaagatcagtctcaaaacctcatgggcggaacttgtttctgcaaagcttagttgaagaagggcagaatccaagcactagcaatggtgccagcaactcccagaaaagtgttgaagataaggacctgatcgactgtctagagaatggcgtcaacttttggacggattattcaaaagttcagtatcatcctcagagtttatatgagttacatgggtcatggacagactttgacaagtttgataactatggcagcgcacaagaggttgtttcagactggtcgcaaatagaggaaatgaatgagaggctaaggttctttgttgaagaatgcgaccatattcagatagagatgctattggggaacatagagatgaagctgcactctttgacccctgaaatcagcgacgaggacgaagatccttattcagttgaatcgctggtggttcatggagctcttgatagaggtgggcaaaggacttccatatcacaagtgaaagactcggtatgttcagtctacgaagccagagagacaaagccaaaattttcccatctctcagcatctctttgccccctccctgtcccccttccgttcccgtcaatcttcagaggcaacattggccggcacggggagatccttagcgaccatgcagaagaatcccagccaaagggctcactcgatattgaatcgataccgatggcggcacgattacgatcaagcagcactgtcctgcctttcatagagaggcgatcggggagcctccagaagcacggtgtcgcaagaggtgccatcgggtctttggtcctccgtgactggggcttcgggagggaggaggtggatgacatgggggagcacctagcaaagttactccgcccgtttcaccctgaaatggatcttacttcggattctgactag

SEQ ID NO: 11302 - DNA, 1560 bp, Oryza sativa
  Clone ID: TFbOSC409220j.C1.o4.fg
atggctggacaaggttcccaaaagaagaaatcttgtgattggtccaaaagatatgtggaccatttgaatggaaagatgaagtgcttccacctgcaaatgagtgctaattttgggcatagcatgaccataccaaacaagttcttggaccattttggtgggacgttgtcaagaaccattgaactagtatcccccaagggtattgtgtatattgtcaaagtcaccgagcacatgaataagacaatcctacagtgcggatgggaggcatttgtagatgcccatcacatagaagagaatgactccttattgttccgtcacattgagaattcccgctttgaggttctgatccttgattctgatggttgtgagaaagtctttacctgtgctggcataaaaaagacttctagtgttcaagaaagaaatgcagctccagttgatatttcaaggagcactcatgatgaaaccacacaatcatcagggagtaaaaaatttgttagatgccaaagggctagtgacagtcagcgtggaaaaactgcaaaattggcagaaacatcttcgtctggggaatcaggagaggagggcactgacagcagtacttctgaagatgagtcatcctatgagctagatgatcctcagatgcctccaggacgtaattatgtcttatcgcgttggactagtctatctgaagcacaggaagaaaaagtagatatgcttgtccaggacattcaacctgaaattcctgtatttgtggctatcatgaagcatagcaatgttaactcacgtcgtgcttgtcttgtaattcctaagcgctatgcatctgcacacttcccacttgaaagtcaaaccatcacacttcagcggcaaggcaagaacaagaagtggtatcccatgttttacattaggaaagatggatctggatacatgctttatgggtgttggaaaaactttgttcgtgacaaccatgtgaaggagggagacatgtgcatctttcacctaacaaagtttactgggggggaattcggagcaacagtccatctactccgtgaaacaaaatctggttccttaggttcattccatactagtcataaaaggtttgacttaagggatggcagaacgtggccgaaagtgactggtgttagaagagtaagttctaggccttacctgacagcagacagagtttctctgactgaagaacaggtcaggaaagtggaagaagttgttcactccattcaatctgaaggtcccatgtatgtgtcaataatgaacaagagcaatgttggtaccgatgggctctacatcattatctttggcaggcaattcgcgacaaggtacctcccggaaggggagcaaactttgacgcttctgatgacggggaagagcaatgcatggcaggtcaagatgcgccctcggagcggcgatgcgcagatgatcaccacaggctggcgccattttgtccatgacaaccatctgcaaattgaagacatctgcctcttccagctgatgaatgatgagagtaagcttaccatgacagtccatatcattcgtcgcaacgagaagagctag

SEQ ID NO: 11303 - DNA, 1617 bp, Oryza sativa
  Clone ID: TFbOSC409221j.C1.o1.fg
atgaagaaatactgtgattgctgcaaaagatatgtggaccattccaatggaaagatgaaatgcttccacaggcaaatgagtgctaattttgagcatagcatgatcataccaaacaagttcttggaccaattcggagggaaaatatcaagaacagttgaactagaatcccccaagggcaacgtgtatgtcgtcaaagttagcaagcacatgaataagacagtcctccagtgtggatgggaggcatttgtagatgcccatcagatagaagagaatgactccttattgttccgtcacatcaagaattcccgaagggcctctggtgttcaagaaagaaatgcagatcctatcgatgtttcaagcagcacccatgatgataccgtgcaatcatccgggggtgaaagatttgctagaagtgaaagtggtagtgacagtcagcatagtaaaaccgcgaaattggcagcgacatgttcatctgggggatcagaatgcacaggagaggaggccaaggagagcagcagttctgaacatgagtcatcctatgatctagttgatcctcagatagctccaatgcctggttatgtcttgtcgcgcgggactaatctatctcaagcacatgaggagaaactagatatgcttgtccaggaaattcgacctgaaattcctctatatgtgactaccatgaagcatagcaatgttaactcacaccatgcttcccttgtaattgctaagcattatgcatgtgcgtactttccgcatacgagtcaaaccatcacacttaagtggcatggcaagaacaggaagtggcatcccaaattttacattaggaaagatcaagttgggtacatccttcatgggcgttggatagactttgttcgtcacaaccatgtgaaagagggagatatctgcatctttcacctaaaaaattttaatgggagaaaattcagggcaacagtgcatctactccgtgaaacaattcctcactcctttggtgcactccatattcctaaaaggtttgaatcaaggaatggcagaatgaggctgaaaatgactgatgatagaagagtaagctcaactgaatgtaggagagggacaatggaaccttctacaaccaatgtcaagaaggaagcggacaatgaacaatgcaacaatggtcaaggaaagcgtcaggaacctctcaattttgatgtttctgtggggagttctaagccttacttgacagcagacagagtttctctgactgaagaacagttcatgaaagtggaagagaatgttcactccattcaatctgaaggtcccatttatgtgtcgataatgaacaagagcaatgttggtaccgatgggctctacatcattacccttggcaggcagtttgctataagatacctcccggaaggggagcaaaccttgacgctcctgacgacggggacgggcaaggcatggcaggtcaagatgcgccctcggagcggcgacgcacggatgttcaccctcggctggcgcgatttcgtccgcgacaaccgtctgcaaactgaggacatctgcctcttccagctgacgaagaacagtgagagggggcttgccatgaaagtccacatcattcgtcacaacgagaggagctag

SEQ ID NO: 11304 - DNA, 2214 bp, Oryza sativa
  Clone ID: TFbOSC409221j.C1.o7.fg
atggccccattcctggcttcccccatacgccttcacccctgtcctctcctcttctcccaccctcacctcttcggatccgactactttgcctttagcgtaaaaggcagaggtgcacatttagaaagtatgcgtgtggaaaataagagagggaatagaagttggggaacagatgctaaaagaacacaccctaactcaatatttaaccagttagtgcgatatggttacatcggaaccggattccctgacatgaactgctccttgacgtggtcactgataggtgggccctcaacactgtctcttccttccttctttccctctgctcatctactgctctcacttgctctcttcttcttcttgtgcattcagagtaaccacaggatgagcaagtctggttgtgagagatgcagaggacggggtttttgggatacggatgatcaggacacgtatttcttcaaggttatgattggtggtttccgacgtcaaatgaccataccatacaagtttgcagaaaatttcagagatcagatccaaggaacaatcaaactgaaggcacgtaatggtaacacttgcagtgtccttgttgacaaatgttcaaataagttagtccttacaaaagggtgggctgaatttgccaactctcatgacattaagatgggtgacttcctggtattcagatacactggcaattctcagtttgaagttaaaatctttgatccaagtggttgtgtgaaagcagcatcacacaatgctgtgaacattggccagcatgcccaaaacatgcaaggagaccctattgaaattttaagctgctctgatgaacatctgcgagcgcaatcgctaacaaccgaaaggcaaaatcaacctgaaaaggatgtcattgacaattgtaacaagaagatgaagacagagcatgcttcttcttcagaagatgatcaggaaacacctactgctgaggtgcacaggatgaaagtagaagagatggtccgagctattcattccaaccacccagtttttgtggctgtcatgaaaaaaagcaacgtcactcgacaaccttgctatgtggcaatctccaggaaatatgccaatgaatattttccaggaggggaccaaatgctaacgcttcaacgacatggcaagaggtggcaagtgaagttttgtatcagcaaacgcaaattgagaatgctttcaaaggggtggagaaaattcacaagagacaacgagctgcagcactgggctcctctggctctgttcatcactctgtttttttcccctcattttcgaaagatgaaaaagtgtggtcagaagatgaggaagctgaacacaagatccacggctagggatgatcaagaaaagtatttcttcaaggtcatgattggtgacttccataagagaatgaccatacctgataaatttgcacgccacttcaaaggggtgatatcaaaaactattaagctagagcctcgcagcggttacactttcgatgttcaagttacaaagaagttgaatatattagttttgggatctggatgggagtcatttgttaatgctcatgacttaaacatgggtgacttcctggtgttcaaatacaatggggactttctgttgcaagtgttaatctttgatcctagcggttgcgagaaatcgacttcatgttctatggaaaatgctattgatcatgttggacaagggtggaaagaacacaatgatatctcaacaagttatcatgatcaaccaaaaggaaataaacattggatgcaaaaggatagctcatctaaagggaataagattggcaataccaggtcatcaaacaccccatctaagttttcaggttgcattctccctcgtggaacctgtcttcctgtggttcaggagaagaagatgaaagaaaagatccaagctatacattccaaaaccccaatgtatgggaatgtcatgacaaaatgcaatgtttctggaagcccttgtgttcttgaaataactcaactatatgatgatgcgtatcttccattcaataatggccaagagctgatgcttcgacaccgagacaagagttggaaagtgcggttttacagattcaagaacaaatctagaaagctcactcaaggttggaaaagatttgtgcacgacaactacctgcggatgggagatctatgtctctttgagatattaaagaataaatacacaatgaatgtccatataattcgcaaatgctaa

SEQ ID NO: 11305 - DNA, 921 bp, Oryza sativa
  Clone ID: TFbOSC409222j.C1.o4.fg
atggtgaaaatcttaaaaacaacattaagggcaacaacaatgcttaaggtcttggtgaaaataaggttgagcctatttttaacatttagtgtcttatgtctaatgcctataatgtatatggctagtcataagacaataccgaatgaatttctacataatttcgggggcaaaataccaaaatctattaagctggaaacacgcagcggcctcacttttgatgttcaggttaccaagaattctggcagagtagtccttcaatcaggttgggcatcatatgtcagtgcccatgatctgaaaattggggacttcttggtattcaagtacagtggtgactctcaactgaagactctaatctttgattcgagtggttgcgagaaagtatgtgaaaaacctgttgacatgtcaggcagatcttacgatattgccatgagaaactcacaagatgaaaagaagaaacggaagcaaagggatatctcaaggcaggggacagtgaagccatcagaagaaggtctgaaagcggaacttgtaccgggttgcatcctcccatcccggaccgatcttactcgtttgcagaagaatatactgatagagaaggtgaaagctattaattctgaaaccccaatctatgggtatgtcatgaacaatagcagtattcatgggattccttgtaccgtggaaatttctaagaaatatgccgatgtatatctcccatttgaggatggaacagtcgtgcttcaacatcatggcaagagttggaatgtgcggtgttgtcttactaagcaaaactcgaaaaggtttttgaaagggtggagacagtttgcaggtgacaacaagctgcacctgggagatatctgcctcttcgacctactgaaagacaagaagaaatatgtgatggatgtccatatcattcgcagaaaatga

SEQ ID NO: 11306 - DNA, 986 bp, Oryza sativa
  Clone ID: TFbOSC409222j.C1.o1.fg
caagttcactttataagatgagaaggcctggtgcgagatgcagggaaggacatgcacatttcaacgggaaccacatagatgggcaatataagaatttcttcaaggttatgattggtcgctttcgtgagagaatgatcataccaaacgaatttcttcaatatttcaggggtaaaataccaagaactataaagctgcaattacgcgatggttgcacttatgatgttcaagtcactaagaatttgggcaaaatatcccttcaatcaggatggaaggcatttgtgactgctcatgacttgcaaatgggagattttctagtattcagttatgatgggatctccaaattgaaggttctgatctttggtccaagtggctgtgagaaagtgcattcacgctctacattaaaaaatgctacacattgtggtgagaagtgggaagaacccctgcacatttcaagcaattcgcatgatcttcctgtgaaatcaccacaaaatgtaagcaaatctgagaaacaatgggatagctcagaacaagaaaacgacaccgcgaatatcgaagaagttgcattgcaaggagatgatctccaagggcatccggttctgaattgcatcctcccaaagcacacccgccttacagatatgcagaagcagcagctggaaagcaaagttggagctattcattctgaaatccccatctatgggtgcatccttaggaagagtcgcgtccacggaaaatctcaaaccgtagacatatgtcgagaatatgcagatgtatatcttccattcaaggagttaaacatgacgcttcaacgtcatggcaaaaattgggaggtgctatgtcgcactaaggatacaagaaccaaaaggctctcgacagggtggagtcggtttgcacaggaaaacaatttgcaggtgggagatatctgcctctttgagctactgaagaagaaggaatactcgatgaatgttcatatcattcccaaaaaatga

SEQ ID NO: 11307 - DNA, 619 bp, Oryza sativa
  Clone ID: TFbOSC8898j.C1.o1.gm
atggccatgcaccctctcgcccaggggcacccccaggcgtggccatggggtgtagccatgtacaccaacctgcactaccaccaccactacgagagggagcacctgttcgagaagccgctgacgccgagcgacgtcggcaagctcaacaggctggtgatccccaagcagcacgccgagaggtacttcccgctcggcggcggcgactccggtgagaagggcctcctcctctccttcgaggacgagtccggcaagccatggcggttccgctactcctactggaccagcagccagagctacgtgctcaccaagggctggagccgctacgtcaaggagaagcgcctcgacgccggcgacgtcgtccacttcgagcgcgtccgcggcctcggcgccgccgaccgcctcttcatcggctgcaggcgccgcggcgagagcgcgcccgcgccgccgcccgccgttcgcgtcacgccgcagccgcctgccctcaacggcggcgagcagcagccgtggagcccaatgtgttacagcacgtcgggctcgtcctacgaccctaccagccctgccaattcatatgcctaccatcgctccgtagaccaagatcacagcgacatactacacgcag

SEQ ID NO: 11308 - DNA, 918 bp, Oryza sativa
  Clone ID: TFbOSC900066j.C1.o8.gm
atggccatgcaccctctcgcccaggggcacccccaggcgtggccatggggtgtagccatgtacaccaacctgcactaccaccaccactacgagagggagcacctgttcgagaagccgctgacgccgagcgacgtcggcaagctcaacaggctggtgatccccaagcagcacgccgagaggtacttcccgctcggcggcggcgactccggtgagaagggcctcctcctctccttcgaggacgagtccggcaagccatggcggttccgctactcctactggaccagcagccagagctacgtgctcaccaagggctggagccgctacgtcaaggagaagcgcctcgacgccggcgacgtcgtccacttcgagcgcgtccgcggcctcggcgccgccgaccgcctcttcatcggctgcaggcgccgcggcgagagcgcgcccgcgccgccgcccgccgttcgcgtcacgccgcagccgcctgccctcaacggcggcgagcagcagccgtggagcccaatgtgttacagcacgtcgggctcgtcctacgaccctaccagccctgccaattcatatgcctaccatcgctccgtagaccaagatcacagcgacatactacacgcaggagagtcgcagagagaagcagacgccaagagcagcagcgcggcgtcggcgccgccgccgtcgaggcggctcaggctgttcggcgttaacctcgactgcggcccggagccggaggcggatcaggcgacggcaatgtacggctacatgcaccaccagagcccctacgccgcagtgtctacagtgccaaattactgtgacccacacacccttggctactgggactaccagaacctgacccacaaaactggatgcagccatgcaggggcccaactcaaaaaccggacctacaagacgctatga

SEQ ID NO: 11309 - DNA, 600 bp, Oryza sativa
  Clone ID: TFbOSC401196j.C1.o40.fg
atggccaccattgttgcatgggagagtagaaacctgcagctgcaaggaggaggaggtggccatggcggtggcggcggcggtggcggcggcgagcggcgggagtacatgttcgagaaggtggtgacgccgagcgacgtggggaagctgaacaggctggtggtgccgaagcactacgccgagaagtacttcccgctggggccggcggcgaggaccagcccggcgggcaccgtgctgtgcttcgaggacgcgcggggcggcgacagcacgtggcgcttccgctactcctactggagcagcagccagagctacgtcatcaccaagggatggagccgctacgtccgcgacaagcgcctcgccgccggcgacaccgtctccttctgccgcgccggtgcccgcctcttcatcgactgccggaagcgcgccgcctccgtgtcgtcctcgtcgctggtgccaccggccttgatcaaggtgcagctgccgccgtcgcggcctgtcgtcgacgaggaggaggctgcgtgtggccggcggtgcctccggctgttcggcgtggacctccagctccgcgccgatgcctcgccggcgctggatttgcagctttga

SEQ ID NO: 11310 - DNA, 124 bp, Oryza sativa
  Clone ID: TFbOSC32158j.C1.o1.hg
atgttaagtgctagtgatgctggacggattggtcgtttggtgttgccaaagaaatgtgctgaggcgtacttccctgccatctctcaggcagaagggcttcccttaaaagttcaggatgctactg

SEQ ID NO: 11311 - DNA, 1657 bp, Oryza sativa
  Clone ID: TFbOSC401603j.C1.o6.np
tattgtgtctgctctcagcataagcatgcattgcatggtttcgaggcccatgtcgtcgccggcgcagccgcccccgacgcggccgccggtggccgccccgcaagcgcaattgcgcaatggaaggcctagaatggatgcaaaggcgagatctcagttgcttccacgctattggcctagaataacagatcaagagctacagcacctatctggagactcaaattctgttattacccctttgtttgagaaaatgttaagtgctagtgatgctggacggattggtcgtttggtgttgccaaagaaatgtgctgaggcgtacttccctgccatctctcaggcagaagggcttcccttaaaagttcaggatgctactggtaaggaatgggtgttccagttccgcttttggcccaataataacagcaggatgtatgtattggagggtgtcacaccttgcattcaatcgatgcagttacaagcaggcgatacagtaacctttagccgaatagatccagaagggaagctggtcatgggatttcgaaaggcaacaaatctttctgcagaacagcctccagaagcaaataataaagttgttgtcccagattctagtcctaatgctgctgtacctcgaccaattaaagtcaacacagagagcaaaagttccagccctgtggaacaagccactgcctgtaaaattgacaaaggtgcattaccacaaaaggaagggccaggaacttcaagttcctccccactacctgtcaagagaaaggcaacttctgttggtccgaagatcaaacggttccacatggacagtgaggaatccatggaattgaagataacatgggaggaagctcaagaattacttcgtcctcctcctaaggccccttcaattgttgttgttgatggccatgagtttgaggaatatgaggagccaccaatacttgggaggaggacatattttgtgacagaccaatcaggtgagaatcatcaatgggctcaatgtgaggattgctctaagtggcgtaaactgccggtggacgcccttttgccctctaagtggacctgctctgacaataaatgggattctgaaaggtgacctgctattttagaaccattcagccttttgtatgctgtatttatgattagctacaatagaaaaagtgctgcaaaaaagaccaaagggaaggtagatactgacaatattgatgtttcagatgggctggacacactcgcaaatcttgcaattcttggtgaaggtgaatctctcccttcccagccaaccacaaggcatccccgccatcgccctggctgctcatgcatagtctgcatacaaccacccagcggaaagggaccaaagcacaaacagacgtgcacttgcaacgtctgtatgacagtgcgacgccgtttcaggacgcttatgatgcggcgcgagaagcgccagcagtcagagaaggactctggggtgcctcgcaaaagagagccaggtcaatccagcgagccagttccacaaacaacaagaggacctcctctcctgtcaagaaccagattgacctgaacagtcagcctgagcgggaagacgacctcgagatcgtgaagttctcctccgcttcctccgcctccggcgccgtcttcaccacctccggcaccgtcacctccacgggaa

SEQ ID NO: 11312 - DNA, 819 bp, Oryza sativa
  Clone ID: TFbOSC4900j.C1.o12.fg
atggcggcttctccgccactgcctacttccatcgatggtggtcaagtgctagatgacatggaggtcgtggagatgaagtacctgtttggcaaggtcctgatgccaagcgacgtgtcctgggacaccgaacagctcgtgatcccggacgagcacgtcgggaaactactggacatggtggtgatgaaccggccggaagggggcttcttcgtcgtcgtcgtcgaggatggcgaggtgactgggaagctgtggcttttcaggtactggaaacgcgacgacgtccactgcctcaccaagggctggggttgctacgccagggagaagggcctcagagccggagacaccgtctccttcttccacagcaccgcgtgcggtcgcttcttcatctgctgcaggtgcacctgcatgagtttcttgtcactacccacaacatcgcatcgcattcacggctcgtctgtactgccgcaaccgcgggctgcccaggaggcgcaccatccattctcaggacacgccacattgtgtctcggcaacaaagctagtgatcacagcgcgccggcaaggcatgccactgcctccttagggtgtgcggcggcgcagcctccgcaggtgccgccgacgccgacgccgcgtcgtcgacggcgcagtatgatggttcacccagaaccaccggagcacacaacggacggcatgcctgtgattctcgagtcgatggcactcgtatccaccccgcccgtggcgaaacgcgtgcgcctttttggagtctacatcgacgttcctccactgcgcccaggcggcgaggcaacacaagatttcaacccatga

SEQ ID NO: 11313 - DNA, 1593 bp, Oryza sativa
  Clone ID: TFbOSC100940j.C1.o8.fg
atggctgatgctaggggctcctcttcttcttccggcgatggcggtggcggcgagggcaagggcggagcaggccatggtgactttgtggggggcggccagcacaactggtaccatgggatccttggggccgtgccgccgcccaacgttgggcgacaaaacatcgtgcaccatcagtaccctgctgctagcttgatccagcagcaccaccagtcgccaacaatgccgctaccgatggcgcagctcccctacgtgccccaatacaccgtgctgcctacgcccgccgtgctcccgtcgcaccaccaccaccacggccagtcgcagatatctcaagaaaacttccaagactgggttccctccaacaatgttgcagctccgcatgttcccagcgcttttcaggattggaggcaaatgtgcaatgggtcggcattcatgccttttggccaaactgctgccaatagcaatgttttttaccagaatctgaccttcaattcatggactagcaataacatgccgaggaaccctgtctacactagtttccaccctgctgcaattgaggatcaccatgctcctctattccatagcaacaatcatgacatagacccagagtttttgggaaaccgacacttgcatggagttgacatcgccggagctccacccgcaaaagccacctcacctgccaccgccggaggtctgctcacgaacacagcccctgccaccgtgtcacagatccatgcgagatgccgccgtcgccaaatctaccgctgctgtggccttcttccgcgagcacctccaccatcagatccgtgtgcgttcgcgagggccaccatcaccgctgccagatccgcccgcggcctcctctctcatttgtacggtggcttggtgttttggcttgttgggaaaaggaagctgggggagaaacgagagaggaagagaaaagtggtggctgggatggatccaccaattgtcttcagaaggagcgatatggagagcgaaaaaaacgatgataatccagatcaaactccggttagtgagcctccaagcatgaatcagaacggtgaaaatcttattattagattcaactgtagagaataccgtgttatcttgcgcaaggagttaacaaacagtgatgttggtaatattggaagaatcgtgatgccaaagagggatgcagaggctcatcttccagcattgcatcaaagggaaggtgtgacgctgaaaatggatgacttcaagtttgaaactacatggaattttaagtataggttctggcccaacaacaagagcagaatgtatgtcttggaaagcaccggtggttttgtgaagcatcacggtctccagacaggcgacatattcatcatttacaaaagctcggagtctgggaaatttgtgagctccgtgccatttacttccacaacgtacggagaatccgacggtgaggactacaacggtgatagaagcggccccggtgccggagaggtggccgacgaagatttcagaaagcctgagtttggttggtattgttgcgcgaagataaacaggaaagaaagtgagatcagggaacaagtgtctaaggagaaagtgaactccaactga

SEQ ID NO: 11314 - DNA, 2187 bp, Oryza sativa
  Clone ID: TFbOSC400964j.C1.o49.fg
atggacgcctccgccggctcgtcggcgccgcactcgcacgggaacccggggaagcagggtggcggcggcggcggcggcggcggacgggggaaggccccggcggcggagatcaggggtgaggcggcgagggatgacgtctttttcgctgacgataccttcccgttgctcccggacttcccgtgcctttcttccccgtcaagctcaaccttctcgtcgtcgtcgtcgtcgaactcgtccagcgctttcaccaccgcggcgggagggggttgcggcggtgagccgtccgagccggcctcggcggcggacgggtttggtgagctcgccgacatagaccagctcctcgacctcgcgtcgctgtccgtcccgtgggaggccgagcagccgctgttcccggacgacgttggcatgatgatagaggacgccatgtccgggcaaccgcatcaggcggacgactgtaccggcgacggcgatacgaaggcggtgatggaggcggccgggggaggagacgacgccggcgacgcatgcatggaggggagtgatgcgcccgacgatctgccggcgttcttcatggagtggctcacgagcaaccgtgagtacatctccgccgacgacctccgcagcatccgcctccgccgatccaccatcgaggcggcggccgcgcggctcggcggcgggcgccagggcaccatgcagctgctcaagctcatcctcacctgggtgcagaaccaccacctccagaagaagcgcccccgcacggcgattgacgacggcgccgcgtcgtcggaccctcagctccccagccccggcgcaaaccccggctacgagttcccctccggtggccaggagatgggctccgccgccgccacatcctggatgccctaccaggccttcacgccgccagccgcgtacggcggcgacgccatgtacccaggcgccgccggcccgttccctttccagcagagctgcagcaagagcagcgtggtcgtgagcagccagccgttctccccgccgaccgcggcggcggcgggcgacatgcatgcgtcgggcggagggaacatggcctggccgcagcaattcgcgccgttccccgtctcctccacgagctcctacaccatgccgtcggtcgtgccaccgccgttcaccgccggattccccgggcagtactccggcggccacgccatgtgctctccacgcctcgccggagtcgagccgtcctcgacaaaggaggcccggaagaagcggatggcgaggcagcgccgcctctcctgcctgcagcagcaacgtagccagcagctcaacctgagccagatccacatctccggccatccacaggagccctcccctcgcgccgcgcactcggcgccggtcaccccgtcgtcggccggctgccggagctggggcatctggccgccggcggcccagatcatccagaatcccctatcaaacaagcccaatcctcctcccgccacgtcgaagcagccgaaaccctcgccggagaaaccgaagccgaagccgcaggcggcggcgacggccggagcggagagccttcagcgctcgacggcttcagagaagcggcaggcgaagacggacaagaacctgcggttcctgctgcagaaggtgctgaagcagagcgacgtcgggagcctcggccgcatcgtgctccccaaaaaggaagcagaggttcacctgccggagctgaagacgagggatggtgtctccatccccatggaagacatcgggacgtctcaggtgtggaacatgcggtaccggttttggcccaacaacaaaagcaggatgtatcttctcgaaaacacaggtgattttgttcgttcaaacgagctgcaggagggtgatttcattgtgatctactccgatatcaagtcaggcaaatatctgatacgtggtgtgaaggtgaggcgcgcggcgcaggagcaaggcaactcgtcgggggcggtaggtaagcataagcatggctcgccggagaaacccggcgtctcgtccaatacaaaggccgccggcgccgaggacggcaccggcggcgatgacagtgccgaagccgcagcggcggcggcggcaggcaaggctgacggcggcggctgcaagggcaagtccccgcacggcgtgcggcgttctcgccaggaggccgccgccgccgcctccatgagccagatggcggttagcatctga

SEQ ID NO: 11315 - DNA, 804 bp, Oryza sativa
  Clone ID: TFbOSC4900j.C1.o11.fg
atggcagcctctctgccactgtcagctgccatcgttggagccgaagagtcggttgacaaggaggtcttggagatggagtacctctttgagaagtttttgatgccaagtgacttgtgcagcaatactgaatggcttgggatcccagaagaacatgttaggaaatttggcatgatgttggaggacagggacggttactccgtcattttctttcaggacggtgtggtgcctgggaagttgtggtgctttaggtactggaaaagcaatggagtccatggcttgaccaagggctggaggtgctttgttagggagaagggcctcaaagccggagacaccatctccttcttccgaggatctgcatgtggccgtctcttcatctgctgcaggttaggcacccatgcaacctttgcgtcatcctccaccttgcatcatggcttttctatgcccccaccacctgcccgcccgctggtgggtcttcaatctggcatgttggcaagagatgtcccatcattaggacaagctaggttgcatgatggaaatcaagatggaggcggtgcaccatcaagacatgttccatcctcaggacgacgtgtggaggcacagctatcacgtgtgtcgtcgcgccgtcaacgccgtactatgaagcactcgataccagagcccacgatagagacgccaccaattcttgagtcgatgttcctcatagccgcaccaccggcagtgaagtgcttacggctttttggcgtcaacatctatgtgttgcctgtgtcctctagtggccagccaaaacaagaatccagcccataa

SEQ ID NO: 11316 - DNA, 267 bp, Oryza sativa
  Clone ID: TFbOSC404812j.C1.o6.hg
atgcagagattggtgggggggcggctgacctgggggcgcgttggagcgtttccttggcgcgatcacgccggccctctcggcgagcgcggccgcagcgacaaaccctccaactgccgccaccgctgctgccccgaccccgccgggagtttctccacctgtgactcgtccaggaacagcagccagagctacgtgctgaccaagggatggagccgattcgtgagggagaagggcctctgcgccgacgagctgctcttcatcgactgctag

SEQ ID NO: 11317 - DNA, 807 bp, Oryza sativa
  Clone ID: TFbOSC400044j.C1.o70.fg
atggccggggtcaccagcaagcgccgatcctcctccgcctccacctcctcctcctccggcgacggcgccgccgtctccgaccggccgcggggggtgacccggaagcgcaggtccggcggccgttgcccccgccccgccgcctccctgaggccggccgcgccccgaccctcctctagcgatgcacgtgcaagaactaggcacaaatcggggatatgtgttcttagtggagtaatttctattactaatggtgggtataactggtgtaggaaggtaaacatgttggatttgaatagagctatccttgattcagatcaccacactgctggattgagagtaattctgcaaaaggaactacggtacagcgacgtaagccagctagggagaattgttctcccgaaggtattggcccaacaacaagagcaggatgtcatcggagcaaagaaggcaggtgatcaacaagctgccactgtgccacaagttgacgagcatatctctaccctcttccccatttttccaattgcacaagtcgatgactatctctctcccatggcaccacaagttgatatctctgccttcgtgccacatgctgatgagaaccatgagatatttgacgggatactgaattctctgccagagataccagtagccaatgtgaggtattctgacttcttcgacccattcgatgatggtatggacatggcaaacactctgaacgccaacgccaaccagtctgctagtctgcatgtcactgatgataagtctgggcattccttgattcccaacccaaagtctgggcctcacatgtga

SEQ ID NO: 11318 - DNA, 3645 bp, Oryza sativa
  Clone ID: TFbOSC900160j.C1.o1.gm
atggcggatgagggggagagagtctgtataattgttgatgaaatggagagggaagattcggataatgaggaagcggacgacgacgcatcatccgatgaggaaggtgatgtaatggccactaattgggcaaatgaggacttctctggacttgttatatcagagggtgatcatgtaccctgggagtataaggagaacgaggtaattgagggtgcaaggtatgctcataaggatgagatgaaggaggcgaacggttgggatgagaagggacttccagctaagtggcctgatattcggagtcggtggtgcatgcgtcacatgggtgcaaatttctacaagcaattcaagaacaagcatcttatggagctctttaagaggctctgtgcacagaaccaagagaagaaatttaatgagttgtgggacaagttggatgagttgacaacgaagcaaacagatgagcaatctcgcagaccacaagttgaaggtgacgagcctcccatacctcttggtgcattacatgatgacccaccaacaatgagaagtaggtcagggtcgtccatcagaaatttcactcagtggattgagaatgagcctaaggagaagtggtctctattgttcgacaccgatggatctcgcaagtgtgatctgcgcggccatacttacaagaaatgcccgaagaatgcagaagttccaagcggcgcagatgctagtccatctagacaggcaagtgatggtatggcgtacgacacaccggcgctgttgaaccgtgggattgacaggaaccaccgctcgttcccgtcagcagtcgagggtgcacagctcggcaccttccgtccacgcacgtcgcgtgagtggttgcgtgtcgacccccgtcacgttccttggtacgcgcttgttgaggcggcggcggacgaccgtgacccagcgaagcggtgggatgcagaccggtcactccttgccgctctggtagaccgctggagacctgagacgcacacgttccaccttccctgtggggagatggctccgacactgcaggacgtgtcgtacctgctcgggctaccgctggcgggagcaccagttggtcccgtggacggtgttgttgggtggaaggaggatatcactgcgcgcttcgagcagacggaccttctgcaccctgacgctgatgattactcggtccgacgctcccttgaggcgtacctgttgtggttgttcgggtgggtgatgttcactagcacccacgggcacgctgtggacttccggctggtccactacccacggtccatcgcggatgctcagccacaggacgtgccgcagtggagctggggttctgccatgctagcagccacgtaccgtgccctctgtgaggcgtgcacgaagactgacgcgggagcgatcatcgctggctgccctatgttgcttcagctttgggcagccgagaggtttgccataggtcgaccagtggtggacagcgcaccctacggggttggtcgcagcacgcagtggccagaggacggtcccacgatggggacttactggtgtcgacgtgggcgtcgttacgctcacgtccaggtgagacgaggttacccggacttcgtgttcgagtttgaccgtctccagccgagcgacgtcatctgggagccgtacacagaagaggccgtcgctgcgagagcaccgctaggactttcgtccttgtgcacacgcgatcaggcttactggctcaccatcctgccgatggtgttcgacattttcgttgagcctcactgcccgcagcgtgtgatgagacagttcggacttaggcaggtgtttccgggtaacgtgcagccgaccgtcctccctgccgaccactcgttgactcgacggggacagctagcaggcgcactttgggctccacgtgtacagcagtacgttgacgactgggtgttagctacagaggaggtgatcaacgagctcttcccacacacggaggagaactaccgtgactaccttcgctggtaccttcctcgcactcgtgcgcgtgtgaccttcactccagacgccccagagccgcacgttgccgctgtcacggacgcgtatcccacgcaccgtgaccgagactacttcgtgggggctgatgccgcacgggatatcagtgccgatatcaccgcagtccaagtgaggttgaacagagcgccgtggacgtcgtacctccagctggtccggtacaaccacggcctcgcgcgcctaccgtcggagcaggacctcgacctacggcacctgtttcgcacggacctcgtttgccttcgagcgcccctagcttcggagcagtgcgacctacagcaccggacctcgtctgccttcgagcgcgttcgcaggcacgaccggcgcttccgcgagctccgcaggggcgttcgccacctcttcgggcgcgttcgccagctcttcctctcacggagcgtcgatccctcgcccacacgccgggatcttcggtactggggcctcttcgtctcacgccgcttggaggagctccagaggcgcacactcaggagcagccagaggtcacacctgtataggcaggacgggttgcccgtgccgtacccccggaccgactcacgtactcccaggggcacattagggcacagggaactctcggatggtgaggaagtgtctgatggtgagtatcaggccggcgacgatttctctggctacgcggtccggggccgggggttcgtcgagaaggagcacatattcgacaaggtggtgacgcccagcgacgtcgggaatctgggccggctggtgatcccgtggcagcacgcggagtgctacttcccgcgggacgtacccgcgaacgagagggagggcgtcgtcctcagattcgaggacgatgccggcaattcatggcgtttcctctaccgcggcagcagcttgacgttgggatggagccacttcttcaggaagaaccgcctcgacgccggggacatggtctccttctaccgtggcgccagcgaggccacccgtgaccgcctcttcatccactcgaagcgccggatgcacattctccctactctaggctactcagaccctcaggttcatatcaatcgcctctttcagctgctggttcgggtaagaaccatggtttcatccttcggtaaatctgggtcgccgtcgccgcccaattctccgcttcctacagttcaaaatttcacctacaaagcgctaaaagattgcctccaagatctgcactactacagcctcctgtccatgatggggagaaaccacaaaagtcagtcaacatccgcaaagatccgtgatactattcctacgcttgatgctttgatacaattacgaagcctgtcagatccagtttttcgtattcccgccgcagcgacgtcgcattgcatcctcttatgccgtggtgttttggggatcatgggcttcctatgctctgatgagaatatgaaggaggatcaccggatgcttcaggttcctgcttttgatgatctgaactactctgcccaagacaagattaccaggatgaaagaacagacaatgccatcatccctggctgaccccatttatctgttgcccacagcaatcaggaacctgctgtatttggacctctcaaattgcagtgacattgctgttggatttgtcgggctgtcgcagtcttag

SEQ ID NO: 11319 - DNA, 966 bp, Oryza sativa
  Clone ID: TFbOSC400021j.C1.o6.fg
atggggcaaatggacggcggcgacggcggcggcggcggccacccctaccactaccaggctctcctggccgccgtccaccagcagaccgtcccctttcccaatcccttccccgccccctcctccggagccgagcccccccacccgcacaaccacaaccacaaccacaatcacaaccacaatattcacaattctcacaatcacaaccacaatcacaatgctgctcctcacccttgtcacactcccactcccactcccactcccagaggtttcgccgactggagcgcctccaccagcgccttcacctcccttgccgcgcactcttctactgcccccagcaatgccgttcactacagcttctccccctgctatgccttctggacacattacatgctcaacaagaacgcctaccccacctccttccctgcgccacacgacgaccacctgcgccttgccaacaacaatcatcctagagacgcaccaggtcctgcatccagctacggggtcgagtcttttacttcaccgtccatggcaccgaatatttgcacccacatgcctcccatagaaggacccatatctgccaaggaagataagaaaccagagattttgcctagagtggttaagagcagtgatgaattggaaaccagaaacagcaatgttgaatttcactctgagacagttggtactctccctgagtcgaagcaaggccatgacagtcgtgctactaaactactcaactcgggagaataccaagtcattctgcgcaaggagctgacaaagagtgatgttggaaatgttggaagaattgtgctacccaagaaggatgcagaggctagtcttccacctttgttgcaaagggatcctttgatactgcacatggacgacatggtgctcccagtgacatggaagtttaagtacaggtactggccaaataacaaaagcagaatgtacatcggatttcgcaggtga

SEQ ID NO: 11320 - DNA, 1302 bp, Oryza sativa
  Clone ID: TFbOSC900266j.C1.o5.fg
atggctgacacgagaggctccacttcctctggcggtggcgatgacaggggcagagaaggccacgatgacttcacagggggcggccaatacaacaggtaccataggatccttgaggccgtgccgtcaccccttgttaggagtgagaatgttgtgcatcatcagtaccccactggcctaatccaccacccgtcgtcgacaatgccggtggcgccatgctcctacgtgccccggtacaccatggtgccaacatccgccatgctcccgctgcagcaccaccaccgccaattgcagatatctcaagaaaacttccaagaccgagttccctccaataatgttgcagctccgcatcttcctagcaattttcaggatttgaggccaatgtgcaatgggccgccattcatgtcttatggccagactgcttccaatagaaatgttctttatcagaatctgacgccatactccttcaatgcatgggctagcaataacatgccgaggaaccctgtctacactagttaccaccctactgcaattgaggatccccatgctactccattccacatcaacaatcatgacacagaccaaggtttcttcaccgtttctactagcttcagggtggatcaatcatttgtacatgctccttcaccctttccaccagtgtcttcatcatcccgcagtttctcttcagctcaaatttcaaatggaccgacagacgctaagaaagccaagaaatcagatataaaagatcaaccaattgttttaagaagaagtgatacagagagtgaaaaaaatgatgaactaaatcaaactccggctagtgagccttcaagcatgagtcataacagtgcaaattcgactattagattcaactgtagagaataccgtgttatcttgcgcaaggagttgacaaatagtgatgttggtaatattggaagaattgtgatgccaaagagggatgcagaggctcatcttccagcattgcatcaaagggaaggtgtgatgctgaaaatggatgacttcaagcttgaaactacttggaattttaagtacaggttctggcccaacaacaagagcagaatgtatgtcttggaaagcacgggtggctttgtgaagcagcatggtctccagacaggggacatattcatcatctacaaaagctcggagtctgagaaattagttgttcgtggggagaaggccattaagccgaatgtcatcatgcctattgtggactgcagctgcaaaaatgatctcaacaacagcgaagaatgcgggttcgctatcagcctgctgactaagaaaacctga

SEQ ID NO: 11321 - DNA, 864 bp, Oryza sativa
  Clone ID: TFbOSC401138j.C1.o1.fg
atgtacatggacttaaccctaggaggagcactgctgcaggtagaagaagccactgaggaagaagaagaagaagaagaggaggagcaagctctaggtcaagaacctgcaccggctgcggcggcggcggcgctggtgctaggtcgtcgccacggcgtcgtcgtcggcggcggcggtggtggagtggtggtggcggcggagcgggagcacatgttcgacaaggtggtgacgccgagcgacgtgggcaagctgaaccggctggtggtgccgaagcagcacgcggagaggttcttcccggcggcggccgccggcacgcagctgtgcttcgaggaccgcgccgggacgccatggcggttccgctactcctactgggggagcagccagagctacgtgatgaccaaggggtggagccgcttcgtccgcgccgcccgcctctccgccggcgacaccgtctccttatcccgcgccgccgacggccgctacttcatcgactaccgccactgccaccgccacggcggccgcgacatcagcttcgcctccgccgccaccgccatgccggcggcggcgtggccgctcttcggccgggtgcaaacggcggcgccggtcagctacggcggcggccatgggagtgcggccgcagcaacgatgttcttggacacggtggcgcccgtcgccgccgccggcggccaccgcggcgaggtggggccctccggacagaggagcttcaggctcttcggcgtcaatgtcgagtgcggcggcgacgtcgacgcggcggcggaagaggaggatgccgacgacgacgtcgacgacggtgatcatcgccgaggtgaagaaatggagcttgtgatgtggacgaaccataggtag

SEQ ID NO: 11322 - DNA, 942 bp, Oryza sativa
  Clone ID: TFbOSC900015j.C1.o21.fg
atggccatgaaccaccctctcttctcccaggagcaaccccagtcctggccatggggtgtggccatgtacgccaacttccactaccaccaccactacgagaaggagcacatgtttgagaagcccctgacgcccagtgacgtggggaagctgaaccggctggtgatccccaagcagcacgccgagaggtacttccccctcggcgccggcgacgccgccgacaagggcctgatcctgtcgttcgaggacgaggccggcgcgccgtggcggttcaggtactcctactggacgagcagccagagctacgtgctcaccaagggctggagccgctacgtcaaggagaagcgcctcgacgccggcgacgtcgtgcacttcgagagggtgcgcggctccttcggcgtcggcgaccgtctcttcatcggctgcaggcgccgcggcgacgccgccgccgcgcaaacacccgcaccgccgcccgccgtgcgcgtcgccccggctgcacagaacgccggcgagcagcagccgtggagcccaatgtgttacagcacgtcgggcggcggctcataccctaccagcccagccaactcctacgcctaccgccgcgcagcagatcatgatcacggggacatgcaccatgcagacgagtctccgcgcgacacggacagcccaagcttcagtgcaggctcggcgccatcgaggcggctcaggctgttcggcgtcaacctcgactgcgggccagagccggaggcagacaccacggcagcggcaacaatgtacggctacatgcaccagcagagctcctatgctgccatgtctgcagtacccagttactgcagacatggatggggaggtttcaggaaacatcaagttgaaaaggagaggggaattgaagagacaggcagagagctatgcaattatgcaatgcttccatttgttgcaatccaatag

SEQ ID NO: 11323 - DNA, 1593 bp, Oryza sativa
  Clone ID: TFbOSC900266j.C1.o4.fg
atggctgatgctaggggctcctcttcttcttccggcgatggcggtggcggcgagggcaacggcggagcaggccatggtgactttgtggggggcggccagcacaactggtaccatgggatccttggggccgtgccgccgcccaacgttgggcgacaaaacatcgtgcaccatcagtaccctgctgctagcttgatccagcagcaccaccagtcgccaacaatgccgctaccgatggcgcagctcccctacgtgccccaatacaccgtgctgcctacgcccgccgtgctcccgtcgcaccatcaccaccacggccagtcgcagatatctcaagaaaacttccaagactgggttccctccaacaatgttgcagctccgcatgttcccagcgcttttcaggattggaggcaaatgtgcaatgggtcggcattcatgccttttggccaaactgctgccaatagcaatgttttttaccagaatctgaccttcaattcatggactagcaataacatgccgaggaaccctgtctacactagtttccaccctgctgcaattgaggatcaccatgctcctctattccatagcaacaatcatgacatagacccagagtttttgggaaaccgacacttgcatggagttgacatcgccggagctccacccgcaaaagccacctcacctgccaccgctggaggtctgctcacaaacacagcccctgccaccgtgtcacagatccatgcgagatgccgccgtcgccaaatctaccgctgctgtggccttcttccgcgagcacctccaccatcagatccgtgcgcgttcgcgagggccgccatcaccgctgccagatccgcccgcggcctcctctctcatttgtacggtggcttagtgttttggcttgttgggaaaaggaagctgggggagaaacgagagaggaagagaaaagtggtggctgagatggatccaccaattgtcttcagaaggagcgatatggagagcgaaaaaaacgatgataatccagatcaaactccggttagtgagcctccaagcatgaatcagaacggtgaaaatcttattattagattcaactgtagagaataccgtgttatcttgcgcaaggagttaacaaacagtgatgttggtaatattggaagaatcgtgatgccaaagagggatgcagaggctcatcttccagcattgcatcaaagggaaggtgtgacgctgaaaatggatgacttcaagtttgaaactacatggaattttaagtataggttctggcccaacaacaagagcagaatgtatgtcttggaaagcaccggtggttttgtgaagcatcacggtctccagacaggcgacatattcatcatttacaaaagctcggagtctgagaaatttgtgagctccgtgccatttacttccacaacgtacggagaatccgacggtgaggactacaacggtgatagaagcggccccggtgccggagaggtggccgacgaagatttcagaaagcctgagtttggttggtattgttgcgcgaagataaacaggaaagaaagtgagatcagggaacaagtgtctaaggagaaagtgaactccaactga

SEQ ID NO: 11324 - DNA, 1911 bp, Oryza sativa
  Clone ID: TFbOSC401605j.C1.o26.fg
atggcgaaggaggaggacggcggcggcggcccggagttcgtgaggtggagggaggacttcgtgtcgcaggagaggggcagccgcgtcgtgcattactacctcgaggacgccgcgggcgcgtcgcacctcgccgtcgtcggcacggagcggagcctgcgccacatgctctatgtggtctcggaggatttccgggaggcgcagggtgccgatggcggcgggccgggggtgtttgcgcgcaagtggcggtcacgccgtgaggtggtggattggctcgcctccttccttccggcgaagtccctcgcctcgaaactttcaaaatttggatcacatatgggtaatgacattggattggatggatacagtgaacctgatagctttatgggtcacaatctggggaaagcctgtagctcggacattatgtggtctggttcgtcctggacttgtggcaagcagctttaccactataaagctttttgtcgtaatggtaccacaatatctacccactcttttgtgcttgtcatgtctgaggaggaaagtcgctatcttgcatacttggaagatatgtacgaagataagaaggggcagaagaaggttaaagtgcgatggtttcatcaaaaccaggaatttgcttgcgctatacctcctccccctcctcatccttgcgaagttttcatcactccttattctcaagtaatcagtgtggagtgtgtcgatgatattgcaactgtgttaactcctgagcactatgaaaaatgcgtcaatacattgccaaattcttctatggtgggaatccgtttctgctttcgccaatacagtaaaaataagtttaaacgttttgacctgagatcattgcgtggatattttagtcaagctgttgttttgtccttaaaacttcccccagagcaagaaaaggatgatggttctgatatcataaaaacttttgagcaatggacacctgggaagacaaagtttcctaagcagtttgagaggctttactcaaaatgtttgggaactaaaatctgccgaggcccacaagaagactccatagcatcttatcagaaaccaagcagtaagcaatctcccagaaaacatctctcagtcaagttcatagggccccagaatcagcgtatgccaacctacaatgttggtgacagaatagaggtcttgtctcaggacagtgggattgtaggctgctggttcaggtgtacagttctcaagtcatgtactaatcataacaaattgaaggttcagtatgatgatctccagaatgctgatgatagtgggagattggaggagtgggtacctgtatcaacattggctcgtcctgataaactgggattgagatgcccagagcgacgcagagttaggccacgccctcaacaaaatagtttggctgacggaactaatcttttacctggagctgctgttgatgtatggcaatttagtggctggtgggaaggagttctagtcagtgcagacaacatttcagctgatagcctacaaatatattttccaggcgagaacttctttagtgtatgccagctaaagaatttaagaatttcgaaagattgggtcaagagccactgggttgatatagaaatgaaaccagatgtgttatcgaaaataccttcggttggtgttcaaacaaggcaacctgataatctgacatctgttgagaggccggactccagaaattctgcaatgtctgaccaagagcttgcagccatacaaacaaactctagtgaagataaacaaacaggagctgatcagccagcagaagttagtttgactgatatggcctctgcttttgcagaggaccagaaacaaacagttctaggaaagcgacctagggatgatgatgctgaacaacattgcaatggggaagtaggcatagatgttggcaaattgtga

SEQ ID NO: 11325 - DNA, 2136 bp, Oryza sativa
  Clone ID: TFbOSC2508j.C1.o1.fg
atggaggtcgaggcgggaggtcgtggactggctgtcctccctcgtttccggattatggagaatacatgtgtgacccagtggaagccgctgcaggtttccctttttgggtcgattgtgttcaatgaaaatccatatgatgacattgagttcactgatgttgctgcttcaaaggatgtttcacatacatcatcagtaaggaataactcaaaagagttcacatggttaggtcctgcatggctttgcgaaaagcgatggaagcactacagatctttctgccgtaaggggattactatttcggtgcataattttgtctacatcctgagtgaggaaaagaagaggctcatcgcccaagtggaggatctgtatgaagatactaattcaaccaacgttgtcatggtacgatggttcgacaaagttgatgaggttggtgtcgaattgccacctgatgttggtgacagagagattttcttttcccctggtctgcaagatctcagtgttgaatgcattgatggattggctgcagtcctgagtgctcaacacttcgagaagttccagagtagtccaaaacatagctattggcagccttatatttgtcgccgacagattgatgaagatggcgtcaaaccttttgatgtaacccaattgcaaggttattggagtcaagaagtgcttaggacaatgttcaatgcagcttcttctcttaaggtacgtttcaaggtcactaaaggtgcttctagttcagatggggcacaaaagaggaagcgtgatgcattcagtgaaaccgatccacagcagtgtgttccttccgctgcattcggttctgatagtctcaagaatgatttggaacataaaactcaaaagcagctatatcctggtagccgtgctgaagtcctatcacaggacagcggtataaggggctgctggtttagatgctttgtattaaagaggcgcggagacaaaatcaaggtgcgatatgaagatcttcaggatgctgatgagacaggaaatctggaggagtgggttttgctaacaaggattgctaaacctgatcagttgggtatacgcatccctgaaagaccaatggtgcggccatatcatgtacatagcaaggatccatgctctttcgatgctggttccattgttgatgcatggtggaatagtgggtggtgggaggggattgtattgcagcagggaaatgacagacgccttcaagtttattttcctggagaaaagcagattgctgatttttgtgaagatgatttgaggcattcacgtgagtgggctggtggcaaatggaattccttgggggaaagaaaagatatcacacacctgttgccccccacttcagttcatgaagagggaggtttgcttagcaaacctgtttcacaagaaggcaatccctcttcaaaattagaatctgacaagaggtgtgatgacaaatcattgggcaccaagatttcacatgatcagaagcatcagaagcgtgttctggctgatctcacaaatgctctgaaattcgataacctgaaatggaggccaagaaagcggagcagaagatctggttccaaaaggcagtcagacactagcagtggcagtggcagcagcagccagggcgacatggaggagtccagcccctgcggaagttttgcagtgcttaattcagcgcccgatgaagaagtatgcaagagcagtggagaacctcttttcatgagggtttccaacctgacaactttgctctatggttttgccagattcttctaccgttctctcttctccggcgagccggaagccgacgaccggtcgtcgcgcgccgccgccaagtggacagacggtgttcatgagtggcaaggtgattatggtgaattggaagtgcagagggggaatggtgtgttctactgcatgaccgtcaggatgagcatcgactgcaatgggtgctaccagaggatcaggagggcactcctccagatgcaagaagatctggatagccacctgatcgaccggaagcagcagcgggtgagcgtctgcggcgccttcgtgccgcaggacgtcgccatcaagctccgcaagaagaccaaccgccgcgtcgagatactggagatcaaggagatcgacgccggcgacggccaccggctgtga

SEQ ID NO: 11326 - DNA, 2451 bp, Oryza sativa
  Clone ID: TFbOSC400493j.C1.o35.fg
atggacgagctcgcggcggcgtcggcggcggcgaggaggaggtgggtgcagtgggaggaggtcgtggtgtcgaacgaccgggggaggcgcctcgtgcactactacctccggggagcggccgcgggcggcggaggagggggagaggtgagggagcttgcggtggtggggcgggagcggagcccgcggcacatgtcgtacgtggtgcaggggcggttcctgcggtcgctggcggcggcgggggtgggggtgggggtgggggtgggggcggcggtgggggcggtggtggcagtgccgtcgccgtcacggtcgccgctgccggcttccgcggagggcggggcgccgaggaaatggaggtcgaggcgggaggtcgtggactggctgtcctccctcgtttccggatgtaattacggatcttcttcaatgtctaataggttcaatgaaaatccatatgatgacattgagttcactgatgttgctgcttcaaaggatgtttcacatacatcatcagtaaggaataactcaaaagagttcacatggttaggtcctgcatggctttgcgaaaagcgatggaagcactacagatctttctgccgtaaggggattactatttcggtgcataattttgtctacatcctgagtgaggaaaagaagaggctcatcgcccaagtggaggatctgtatgaagatactaattcaaccaacgttgtcatggtacgatggttcgacaaagttgatgaggttggtgtcgaattgccacctgatgttggtgacagagagattttcttttcccctggtctgcaagatctcagtgttgaatgcattgatggattggctgcagtcctgagtgctcaacacttcgagaagttccagagtagtccaaaacatagctattggcagccttatatttgtcgccgacagattgatgaagatggcgtcaaaccttttgatgtaacccaattgcaaggttattggagtcaagaagtgcttaggacaatgttcaatgcagcttcttctcttaaggtacgtttcaaggtcactaaaggtgcttctagttcagatggggcacaaaagaggaagcgtgatgcattcagtgaaaccgatccacagcagtgtgttccttccgctgcattcggttctgatagtctcaagaatgatttggaacataaaactcaaaagcagctatatcctggtagccgtgctgaagtcctatcacaggacagcggtataaggggctgctggtttagatgctttgtattaaagaggcgcggagacaaaatcaaggtgcgatatgaagatcttcaggatgctgatgagacaggaaatctggaggagtgggttttgctaacaaggattgctaaacctgatcagttgggtatacgcatccctgaaagaccaatggtgcggccatatcatgtacatagcaaggatccatgctctttcgatgctggttccattgttgatgcatggtggaatagtgggtggtgggaggggattgtattgcagcagggaaatgacagacgccttcaagtttattttcctggagaaaagcagattgctgatttttgtgaagatgatttgaggcattcacgtgagtgggctggtggcaaatggaattccttgggggaaagaaaagatatcacacacctgttgccccccacttcagttcatgaagagggaggtttgcttagcaaacctgtttcacaagaaggcaatccctcttcaaaattagaatctgacaagaggtgtgatgacaaatcattgggcaccaagatttcacatgatcagaagcatcagaagcgtgttctggctgatctcacaaatgctctgaaattcgataacctgaaatggaggccaagaaagcggagcagaagatctggttccaaaaggcagtcagacactagcagtggcagtggcagcagcagccagggcgacatggaggagtccagcccctgcggaagttttgcagtgcttaattcagcgcccgatgaagaagtatgcaagagcagtggagaacctcttttcatgagggtttccaacctgacaactttgctctatggttttgccagattcttctaccgttctctcttctccggcgagccggaagccgacgaccggtcgtcgcgcgccgccgccaagtggacagacggtgttcatgagtggcaaggtgattatggtgaattggaagtgcagagggggaatggtgtgttctactgcatgaccgtcaggatgagcatcgactgcaatgggtgctaccagaggatcaggagggcactcctccagatgcaagaagatctggatagccacctgatcgaccggaagcagcagcgggtgagcgtctgcggcgccttcgtgccgcaggacgtcgccatcaagctccgcaagaagaccaaccgccgcgtcgagatactggagatcaaggagatcgacgccggcgacggccaccggctgtga

SEQ ID NO: 11327 - DNA, 968 bp, Oryza sativa
  Clone ID: TFbOSC10018j.C1.o1.fg
atgttgcatctgatgaagttgcaatttgtaacaatgatggcaaagatgctaaacttgctaatatctccacaacaaagggctcttcatcatcaactgctggaaatgattcaggggatttcaaatggttaggtcctgaatcgcattctaaaaaagggaagagctacaaatccttctggcgaaggggatttacattcatggttcacgattttgtttacatcttggtccaacatggcaacaaacttgttgcttatgtggaagaactctatgaggataaccatgcaaacaagatggttcagatacgacggttccgcacactcaactccaccggtattcaactttctccaggtgttaatgatagagagatcctccactccgacaatttgcaagacatcggagttgaatgcatagatggattggcttcagtcctgaacgaagaacactttgagatgtttcaggcaattgccaacaacaccaacaggcaaccctacctatgcatccggcatatcgacaataacagcaatgtcaagacctttgacattgcacaactgcaagggtattcagaacaggagatatttagaatagtctcaggcacacctcccgtgaccgtgcatcccgacgcatctgaaggcagcaagaacacaccaagatcatcagccagaggtcatcatcatcatcggaccatggagaaccccactgctagtgatgagaccaatgttcaggccacaacaatcaatgtccttgcacgcaatgctgcaccaacagagtctgcttctgctctgataaactctgccctggagaagtatcttgagcagtacttctctcatggttgccttgtggaatgcctaagccaggacagtggcattaggggctgttggttcatcggttcagtgattaggaggtgcggagatcgcatcaaggtgaggtaccaacacctccaagatcccgaaacgccaagagcaaacctagag

SEQ ID NO: 11328 - DNA, 2193 bp, Oryza sativa
  Clone ID: TFbOSC900127j.C1.o10.fg
atgggaaacgatggagaaaaggcatcaaaactatgcaaggaggcaggagggcctagcctagattcaaatcttgctccaaccatcgtgctagcgctcaccaccgtccccatggggtgggataaccgtaggaggaaacaagcgagtacgataatgaatgcacgtggccgaggggctaggaatggaaacgggcccaaccgggggcgtgggggtggaagggctcattcagatgtggtggttggagcaaacaccaccgtactagcaacaaggaggtgggttgggttggagatagattccgtgccaggtaatgaggggcaacgtgacattgtgaactactacctccgttgcgccactggcgttggtaatggggagagggagctggcggtggtaggaacacaccatagcaataggagggtgacttatgtggtgcatgagccattcctacagtccctcaaggagctgcaggtggctgcggttgttggagttgaacgactcatgtggaagtcgaggaaggatgtggtgcactggctcaacatgctcatctcagatgttgcatctgatgaagttgcaatttgtaacaatgatggcaaagatgctaaacttgctaatatctccacaacaaagggctcttcatcatcaactgctggaaatgattcaggggatttcaaatggttaggtcctgaatcgcattctaaaaaagggaagagctacaaatccttctggcgaaggggatttacattcatggttcacgattttgtttacatcttggtccaacatggcaacaaacttgttgcttatgtggaagaactctatgaggataaccatgcaaacaagatggttcagatacgacggttccgcacactcaactccaccggtattcaactttctccaggtgttaatgatagagagatcctccactccgacaatttgcaagacatcggagttgaatgcatagatggattggcttcagtcctgaacgaagaacactttgagatgtttcaggcaattgccaacaacaccaacaggcaaccctacctatgcatccggcatatcgacaataacagcaatgtcaagacctttgacattgcacaactgcaagggtattcagaacaggagatatttagaatagtctcaggcacacctcccgtgaccgtgcatcccgacgcatctgaaggcagcaagaacacaccaagatcatcagccagaggtcatcatcatcatcggaccatggagaaccccactgctagtgatgagaccaatgttcaggccacaacaatcaatgtccttgcacgcaatgctgcaccaacagagtctgcttctgctctgataaactctgccctggagaagtatcttgagcagtacttctctcatggttgccttgtggaatgcctaagccaggacagtggcattaggggctgttggttcatcggttcagtgattaggaggtgcggagatcgcatcaaggtgaggtaccaacacctccaagatcccgaaacgccaagagcaaacctagaggaatggttgcttgtgacaagaaccgctaatcctgacacgctacgcatacgcctctctggaagaacaagaattcgtccccacaatatgtcggagagggagaacccctctacgatcagtgttggcaccgtcattgacggatggttgtatgatggttggtgggagggaattgtgctgaaggtgaacgatgcaaggaggctgctagcttacttaccaggggagaagaagatggtgctattccgcaaggatcaactgaggcattcactcgagtggattgataacgagtggaagaattttgctcaccgggaagatatcgcacgtcgaatccctagtgcggaagatcttagaataagagtcattactgcacgagaagttcttacaagagaagaagtaatgaagcaattggaaggcctgaaaacaaacaaaggtggttcaaactctgcaaaaccagctgcagagaagggaagtagcagctctgctactaagaaaaccacacctgatctcattaggcatgcaacaaatgatctaggatctttaaacttcaagcatgtcggtgttcctgcctctgaagaaattagaactgataacaagggatcgcaagttaatcttgaaaatgtcctaaagtcggacagtctaaaatggaccgagcgtaaggctagaggatcttttggtccaagaatgtag

SEQ ID NO: 11329 - DNA, 1674 bp, Oryza sativa
  Clone ID: TFbOSC3380j.C1.o2.fg
atgaaggatggccgggatgaggaagttgccactgatgcggttggtgctggtggagttgatgtgggcggtgagacatcaaaattgattgatcaagactgcatggcaatactcgacgtgctggcgaggaggcttatgagtggtgagtctgaaccttacattggaaagataataaagatatggcagcaaaatcaggctaagaaagtaaagattctttggttttttctcccggatgagattcgaaaacatttaagtggccctgtaatggaaaaggagatatttcttgcttgtggtgaaggcgttggccttgctgatatcaacccactggaagctattggtgggaaatgcactgtgctttgcatttcaaaggatgagaggaatcgtcaaccttcccccagggaactagcaatggctgattatatcttctacaggttttttgatgttaacagttgcacactttctgaacaattacctgagaaaattgcaggggtggaaggaatctttttgcttattccaaaagttgagcaagtgacatcctgttcagaccaggaagtgcatggtgttgatcagaagatgcttaatgtcccagttccccttccccagtcaacggttatggaggatgaaagtccagttgctgcagtttcccttcccccgtcagtattcaaggaggaaaatgtggcttcagccattccctttccccagccagtggtcaaggaggaaagtgcggctgctgccattccccctccccatgtagcactgaaaaaggagagtgtgtccaaatctacagagaacattaccaaacctgcacagaaagttctccctggggagaggccaccaaagagggtcaaattttctgaaaatgttacagtgcaaaatgtgccattagatgttcctgaaagaccaagtcgcactggacctttggaactagcaggtagacaagctgacagaagcaaatggttcaagattccatgggataccagactacgaaatgctgatgagcaagggacacttgtgtacattcaaaatcttgacatacagtttgcagctgctgacatagaggagcttatacgtgatgctttacaactaaattgtatcgctaagcctattaaccacccaacttatgatgatccaaacaatggaaaagcatatgctatattcaaaacaaaaagtgccgcagactctgctatttcaaaaattaattcaggcttggtggtcggtggaagacccctttattgcagcaaaggattgcttaaggttccaaaaccttcagaaactcttctcgggcacttaacaatcaacaatattagaatgggtataagacaacgagaagaacaggtgctgatgttgtcctatgaagtttgctctatttcttttctctgtcttaatatttttgcacaaccattattctttctccagaagaaggcagtttcaacctcgcattgttctcaacccaatacaatggagtatgatttggccttggattggatgcttgtccgagcaaagcaagaaacgaaatttaggacacttcacaagctcctgaatgcagccaccggcctcggtaggttaaaaattgacaccgcaaattctggtgatcgcctggtaggtattgttggtatagctaaagatgatcatgtcttcgttttggatgctcttggtgaaccatatgctggttcttga

SEQ ID NO: 11330 - DNA, 1674 bp, Oryza sativa
  Clone ID: TFbOSC4791j.C1.o11.fg
atgaaggatggccgggatgaggaagttgccactgatgcggttggtgctggtggagttgatgtgggcggtgagacatcaaaattgattgatcaagactgcatggcaatactcgacgtgctggcgaggaggcttatgagtggtgagtctgaaccttacattggaaagataataaagatatggcagcaaaatcaggctaagaaagtaaagattctttggttttttctcccggatgagattcgaaaacatttaagtggccctgtaatggaaaaggagatatttcttgcttgtggtgaaggcgttggccttgctgatatcaacccactggaagctattggtgggaaatgcactgtgctttgcatttcaaaggatgagaggaatcgtcaaccttcccccagggaactagcaatggctgattatatcttctacaggttttttgatgttaacagttgcacactttctgaacaattacctgagaaaattgcaggggtggaaggaaatcttttgcttaattcaaaagttgagcaagtgacatcctgttcagaccaggaagtgcatggtgttgatcagaagatgcttaatgtcccagttccccttccccagtcaacggttatggaggatgaaagtccagttgctgcagtttcccttcccccgtcagtattcaaggaggaaaatgtggcttcagccattccctttccccagccagtggtcaaggaggaaagtgcggctgctgccattccccctccccatgtagcactgaaagaggagagtgtgtccaaatctacagagaacattaccaaacctgcacagaaagttctccctggggagaggccaccaaagagggtcaaattttctgaaaatgttacagtgcaaaatgtgccattagatgttcctgaaagaccaagtcgcactggacctttggaactagcaggtagacaagctgacagaagcaaatggttcaagattccatgggataccagactacgaaatgctgatgagcaggggacacttgtgtacattcaaaatcttgacatacagtttgcagctgctgacatagaggagcttatacgtgatgctttacaactaaattgtatcgctaagcctattaaccacccaacttatgatgatccaaacaatggaaaagcatatgctatattcaaaacaaaaagtgccgcagactctgctatttcaaaaattaattcaggcttggtggtcggtggaagacccctttattgcagcaaaggattgcttaaggttccaaaaccttcagaaactcttctcgggcacttaacaatcaacaatattagaatgggtataagacaacgagaagaacaggtgctgatgttgtcctatgaagtttgctctatttcttttctctgtcttaatatttttgcacaaccattattctttctccagaagaaggcagtttcaacctcgcattgttctcaacccaatacaatggagtatgatttggccttggattggatgcttgtccgagcaaagcaagaaacgaaatttaggacacttcacaagctcctgaatgcagccaccggcctcggtaggttaaaaattgacaccgcaaattctggtgatcgcctggtaggtattgttggtatagctaaagatgatcatgtcttcgttttggatgctcttggtgaaccatatgctggttcttga

SEQ ID NO: 11331 - DNA, 2160 bp, Oryza sativa
  Clone ID: TFbOSC26838j.C1.o4.fg
atggcgcccagctccccgtcctccgccgccgcgcccacgcgtaccttcacgcgtaagcgcgccgcctccgccttcgccttcgccaaggccaccgacgagccctccaccaagcgcacccgcaggcccaaggcggagaccaagcccaggaagaagaaggacgaggtaaaggaggaggagaagccgcccatggaggacgacgcctgcggggaggagccggatgcggaggagatggccttgggggaggaagccgaggccgaagaggcggaggcggagcaaaagcagctggacgcccccgcccccggtgtggcgaggaagcgggtggcgcagcccagcagggtccgacacggcagcgacggcgaccacgacccggagttcgtcggcgaccccttccccgccaaggaggcgcgcgacaagtggccgcagcgctaccagcgcaacgccgccaccaggaggcccgatgaggaggaggacatcaaggcgcgctgccactacagctccgccaaggtcgatggcacgctctactgcctccacgacgacgtctatgtcaaggctgaggaagataaggccgactacatcggtagaattactgagttctttgaggggactgaccactgccactattttacctgccgttggttctttcgggcggaggatacggtcatctcatccataatgatggagaatgctgatgatgaaaagcatgatctcaagcgtgtttttctttctgaagaaaagaatgacaatgtgcttgattgcatcatttcaaaggttaaaatcgtgtatattgatccaaatatggaatcagaagccaaagctcgacggttggctgattgtgatctgtactatgacatgtcgtacaccgttgcttattcaacatttgctaatatcccacttggcaaagttgtctctgattcagaggcatcttcagtgggaaaggctacactccttgatctgtactctggttgtggcggtatgtctactgggctctgtttgggtgcggcacttgctggactcaatcttgaaacgcgatgggctgttgatttcaatagttttgcgtgcgagagtctcaagtataatcatccaagaactgaggtccggaatgaaaaggcggatgagtttcttgctcttcttaagggatggcatagcctttgtgatgaatatgtcaagaaagatattgatttcagttcagctggtgcctcagagaacgaagaggatgatgatgagcctcttgaaaaggatgagtttgttgtggagaaactagctggaatctgctacggtggcagtggtagagaagatggcctctatttcaaggtacaatggaaaggctatggccgtgaagaggacacttgggagcctattgagaacctcagggattgcccattgaaaattaaagaatttgtgcaagaaggatacaggagaaaaatcttgcctcttccgggtgatgttgatgtcatttgtggtgggccaccatgccaaggaataagtggtttcaatcggttcagaaaccgcaaagagccactaaaagacgagaaaaacaaacagatggtgacattcatggatattgtggcatacctgaagcctaagtatgtcctgatggaaaatgttgtagacatactgaagtttgcagatggttaccttggacgttatgccttgagccgtctggtggctatgaagtaccaagcacgacttggaatgatggttgcaggttgttatggcttgccacaatttaggatgcgtgtgttcctctggggagctcttcctaccatggtgctgccaaagtatccgcttcccactcataatgttgttgtccgtggtggtgccccaaatgctttttctgtaaacaaccatcagcctaatgaagtgatggaatatggttcttcccccaaaacagaattccagcgctatatccggcttagccgtaaagaaatgctggatagttcttttgaagggaaggatggtccagatctaggcaagcttttggatcaccagcccttaaagctaaataaggatgaccatgagcgtgtgcagcaaattccagtaaagaagggagccaacttccgggacctgaagggtgtcagggttggggcaaacaacatcgtggagtgggatccagacgttccccgtgtatatttatcttctggcaagcctttggcaccttga

SEQ ID NO: 11332 - DNA, 2529 bp, Oryza sativa
  Clone ID: TFbOSC400269j.C1.o65.gm
atggcgcccagctccccgtcctccgccgccgcgcccacgcgtacctccacgcgtaagcgcgccgcctccgcctccgcctccgccaaggccaccgacgagccctccaccaagcgcacccgcaggcccaaggcggagaccaagcccaggaagaagaaggacgaggtaaaggaggaggagaagccgcccatggaggacgacgcctgcggggaggagccggatgcggaggagatggccttgggggaggaagccgaggccgaggaggcggaggcggagcagaagcagctggacgcccccgcccccggtgtggcgaggaagcgggtggcgcagcccagcagggtccgacacggcagcgacggcgaccacgacccggagttcgtcggcgaccccttccccgccaaggaggcgcgcgacaagtggccgcagcgctaccagcgcaacgccgccaccaggaggcccgatgaggaggaggacatcaaggcgcgctgccactacagctccgccaaggtcgatggcacgctctactgcctccacgacgacgtctatgtcaaggctgaggaagataaggccgactacatcggtagaattactgagttctttgaggggactgaccactgccactattttacctgccgttggttctttcgggcggaggatacggtcatctcatccataatgatggagaatgctgatgatgaaaagcatgatctcaagcgtgtttttctttctgaagaaaagaatgacaatgtgcttgattgcatcatttcaaaggttaaaatcgtgtatattgatccaaatatggaatcagaagccaaagctcgacggttggctgattgtgatctgtactatgacatgtcgtacaccgttgcttattcaacatttgctaatatcccacttgaggcatcttcagtgggaaaggctacactccttgatctgtactctggttgtggcggtatgtctactgggctctgtttgggtgcggcacttgctggactcaatcttgaaacgcgatgggctgttgatttcaatagttttgcgtgcgagagtctcaagtataatcatccaagaactgaggtccggaatgaaaaggcggatgagtttcttgctcttcttaagggatggcatagcctttgtgatgaatatgtcaagaaagatattgatttcagttcagctggtgcctcagagaacgaagaggatgatgatgagcctcttgaaaaggatgagtttgttgtggagaaactagctggaatctgctacggtggcagtggtagagaagatggcctctatttcaaggtacaatggaaaggctatggccgtgaagaggacacttgggagcctattgagaacctcagggattgcccattgaaaattaaagaatttgtgcaagaaggatacaggagaaaaatcttgcctcttccgggtgatgttgatgtcatttgtggtgggccaccatgccaaggaataagtggtttcaatcggttcagaaaccgcaaagagccactaaaagacgagaaaaacaaacagatggtgacattcatggatattgtggcatacctgaagcctaagtatgtcctgatggaaaatgttgtagacatactgaagtttgcagatggttaccttggacgttatgccttgagccgtctggtggctatgaagtaccaagcacgacttggaatgatggttgcaggttgttatggcttgccacaatttaggatgcgtgtgttcctctggggagctcttcctaccatggtgctgccaaagtatccgcttcccactcataatgttgttgtccgtggtggtgccccaaatgctttttctgtaaacaaccatcagcctaatgaagtgatggaatatggttcttcccccaaaacagaattccagcgctatatccggcttagccgtaaagaaatgctggatagttcttttgaagggaaggatggtccagatctaggcaagcttttggatcaccagcccttaaagctaaataaggatgaccatgagcgtgtgcagcaaattccagtaaagaagggagccaacttccgggacctgaagggtgtcagggttggggcaaacaacatcgtggagtgggatccagacgttccccgtgtatatttatcttctggcaagcctttggttcctgactacgcgatgtctttcatcaaagggagatcactgaagccatttgggcgcttgtggtgggatgagacggttcctacagttgtgacccgagcagagccacacaaccaggcgagagttctgaccgtaagggagaatgcaaggttgcaggggttcccagactactacaagatgtttggccctatcaaagagaagtatatacaagttggcaatgcagttgctgtacctgttgctcgtgcattgggttactcccttgggcttgcataccagcgtgagtcggaggggagcagccctctgttcgtcctgccagacagcttcacggaagtcgggcgacaggcggcgccggcaagagcatcctctgttggtatccctgttggcgaggttgttgagcaatag

SEQ ID NO: 11333 - DNA, 684 bp, Oryza sativa
  Clone ID: TFbOSC402051j.C1.o12.fg
atggccaagaccaagcagggcaagcgggacgtcgactcctacaccatctccggcaccaacaaggtcgtacgagtgggggactgcgtgctgatgcggccggtggactcggacaaccagccgtacgtggcgcgggtggagaagatggagctggacgggcgcgggagcgtgcgggtgcgggtgcggtggtactaccggcccgaggagtccaagggcgggaggaggcagttccatggcgccaaggagctcttcctctccgaccacttcgacatgcagagcgccaacaccatcgagggcaagtgcgtcgtccactccttcaagaactacaccaagctcgacaacgtcggccccgaggacttcttctgccgcttcgagtacaaggccgccaccggcgccttcacccccgaccgcgtcgccgtatactgcaagtgtgagatgccatacaacccggatgatctcatggtgcagtgcgatgactgcaaggactggtttcatccttcatgcatgagcatgacgattgagcaggccaaaaaactagatcactttgtgtgctcagattgtgtcaaggaaaacggtgcaaagagaccttcacatgcatatgcaggttcaacaaagtatgagcctaagtggattcaaggttttagcttgtcaactggtatcagcctactattatttccttttctttga

SEQ ID NO: 11334 - DNA, 1878 bp, Oryza sativa
  Clone ID: TFbOSC400543j.C1.o17.fg
atggggcggcggcggcgattcgcgcagctcgccaccaccagcgacgacgacgacgacgacgcccccgccgccgacgcgccgcccaaggcgaagcccccgccgccgccctcctcctcctcaggccccaagaagccgaagcagcgccgcctttcctccgcggcggccgacgacgacgacgacgtcgaggaggacgacctggagctcgaggaggaggaggaggacgagaaggatctggaggagatgcggaggaacgaggaggaggagcggcgggaggagacgcagacccgccgccgccgccgccgccggggccgcaagcccaagcgccccgccgaggagagcgaggaggacgaggaggaggaggaggaggaggccaaggcggaggaggcccgcgaggaggagaacaccgaggcggtccccatcggggagcccgtcaagatcaccggcagggggaagaagcagcgcaagcattacacctccttcgagtacgagggcaacaccttcgagctcgaggacccggtgctgctcacgcctgaggatagcaaggagaaaccttatgtcgccatcctcaaggatataacagaaactgagggaagcttatcagtaactggtcagtggttttatagaccagaagaggctgacaaaaagggtgggggaagctggaaagcaagtgacacgagggagttattttatagtttccatattgatgatgtgccagcagagtcagttatgcacaagtgtgtagtccatttcattcctcaacataagaaaattcccagccggaaggaacaccctggattcattgtccaaaaggtctatgacacagttgcgaagaaactttggaacctaacagacaaagattatgaggataacaagcaacatgagattgatcttctcgttaagaaaacaatagaccgtattggacagctttctgatattgaacctgcagatgctcctggtgacaacaatgatcagctctcaaacaagcgaggactgcggaagagacctgtgcttcctatagatgtttcaagagatgatgctttagcaggcaaatcagagcaatttggaaaagcagagacacctggaagtgataagctaaagaattatgccacccttgtcaagtataaagctgttactggtgatcaatatcgtgataggtggcttgataaattagtggatactattccactaacatcaaaggaaagtgctggggcttctcatgctgatcctggtggtgctaccaaaagttcaactaatggttcatctgcaaaggaagacaatgaaaaatcttattcacctgatgtgattgtttcaataatggcctccttagaaagatctacttatgaagctcttggttctgacttccagaagtataaccagaaattgagacagttactgttcaacatcaagaatagccctgtactacggaaccggctgatgaacaaggagcttgatcctccagtcctgttaacaatgtctcctgacgaactaaaggttggcttgacagcagcagagagaacatctgaacctgaagaatcaaggaagttgcagatgactgatgcacgatgtgtaagatgtgcagaaaaggaagtaggtgtatctgatattattcatgctggtcatggagatcgctatcagaaggtggtggcatctagaagagagaacgaggtcgttaacgtaggtggcgataggaccttgaggctagcgaggctagtggccagcggcaagatcttaagggtgtgtgacgtgctgaaggaaagttttcaacggtggagatggcctaggatgtcattgatagatcttgtaggacaacacaggatggagtgggaggtcgttgctagtggcttagatgtccgagtggagcttgtgagggcatggtag

SEQ ID NO: 11335 - DNA, 177 bp, Oryza sativa
  Clone ID: TFbOSC27144j.C1.o1.fg
atggccaagaccaagcagggcaagaaggacgtcgaatcctacaccatcaagggcaccaccaagatcgtccgagtgggggattgcgtgctgatgcgggcgtcggacacggagaaggcgccgtacgtggggagggtggagaggctggagacggacgggagggggagcgtgcgggtgcgg

SEQ ID NO: 11336 - DNA, 2535 bp, Oryza sativa
  Clone ID: TFbOSC400897j.C1.o16.fg
atggatctctccgccaccccgtccagatccaaatccggcctcagatcctccccgaggaagcccgtcgccgcccccgccgtggcccagatggacctctccaccccgtccaagccgacccccaggcggaagcccaaggcgccgccggtggcggctccgatgtcccccgtgaccccgtcctccgtccgccgctcctcccgcctcctcgagacgccgaccaaggtaacttccgagacccccgtgaagcccaccccaaccccgaagcggaagcgcgccgcgccgtcgccgtcgccgaagacgccgacccagtccgagcccaagcggcagcggcagaggcagaggcagaggcagcagccgaagaagccgaagaagagggcgtactaccggaaggtggtgtacgacggcggggagttcgccgccggggacgacgtgtacgtgaagcggcgggatggcgcggagtccgacgcggaggacccggaggcggaggagtgccgcgtgtgcttccgcgccggcgccgcggtgatggtggagtgcgacgtgtgcctcggcgggttccacctgcggtgcgtgcgcccgccgctgcggcgcgtgccggagggggactgggcgtgcccctactgcgaggccgagcgcgcggggaaggccatcgagaggcccaagccgccggaggggaagcgcatcgtgaggaccgccaaagagaagcttctctccagtgatttgtgggctgcacgaatcgagagtttatggagggagccagatggaatattctgggcaaaggtaagatggtatattatccctgaagagactgcagcaggaaggcagccacataatttgcgtagggagctgtaccgcaccaatgatcttgcagacattgagatggaaacaattcttagacattgttatgtcatgagccccaaagaatttaaggatgctagtgatcaaggagatgacgtattctactgtgaatatgaatatgacatacactggcataattttaagcgtctggcagacatcgatgatgaacctgagacaaaggaagatcctggcgacgagccatacaatgctggtaatgattatgtcagtgactcggatgaagattctgaatatgatgaggaggaagaacctactaaatgtagttctgctagaacacatcaatcacatgcgttggctgcgaatctgcggaaagggaggacatatggcctacaaaaaattgggatccgtaaaattcctgaacatgtccggtgtcatcaaaagaccaatctggagaaggcaaaagcaaccctgttattggcaactcttcctaagtcgttaccttgtagggataaagaaatggaggagatatctgcatttgtgaaggatgcaatttgcaatgatcaatgtctaggacgctgcctttatattcatggtgtaccaggcactggcaagactatgagtgtacttgcagttatgaggaggctaagatccgagcttgattctgggaatctgaggccttattctttcatagagattaatggtcttaaattagcttctccagagaatatctacaaggttatatatgaacagttgagtgggcatagggtagggtggaaaaaagcccttcattatttaaccgagcacttttcaggtggcactaaaattggcaaacaagcaaaccagccaattattttgctcatcgatgagcttgatcttcttttgacgagaaatcagtcggtgctgtataacattcttgactggcccaccaggccaaattcaaacctagttgtcataggtatagcgaacacaatggatcttcctgaaaagttattgcctcgtatttcaagtcggatgggtatccaacgactgtgttttggcccatataattatcggcaactgcaggagatcattacaagccgtctaaagggcattgatgcctttgaagaccaagctattgaatttgcttctagaaaggtagctgctatgtctggtgatgcaaggcgagccttagaaatatgtagacgtgcagcagagtttgcagattaccgcgttaaacaatctgggcacacttctgtgaatagaggaaaaaatgttgtttgcatgggtgacatagaagctgctattcaggaagtctttcaggcaccacatattcaagtaatgaagaactgcccaaaatttggaaagattatattggtcgctatggttcatgaattatacagaagtgggctaggtgaagtgatgttcgataagctggcagcaactgtcctctcttggtgccatgtcaacagagaattattgcctggctatgatactcttctgaaaatctgttgcaagcttggtgaaggtaagataattctctgcgaggaaggcactaagcacaagttgcagaagcttcagcttaactatccaaggaatccccagatattccatggttgtccaagtacctgtgaagtttacacttgcagcggttgtactttcccagcatttcattcatctactcctggagttggagagcaacgatcgcaactacttgcccttgatcagcaaagtttgaaggccatctag

SEQ ID NO: 11337 - DNA, 711 bp, Oryza sativa
  Clone ID: TFbOSC101747j.C1.o25.fg
atggcgaagtcgcggccgcccaagcggatcctcgagtcctacaccatcaagggctccgacaaagtcatcaagcgtgaggctccccctcccacctccccaaccgattatgggagttcagtctctggggactgtgtgctaatgagggcatctgatacatcaaagccaccctatgtggcaagagttgaggctattgaggctgcagggtcacgaggcacaaatgtgagagtacgggtgcggtggtactatcggccagaggagtccatgggtggaaggcgtccatttcatggtgccaaagaggtgttcctctcggatcactatgacgtacagagtgctgacaccatagagggaaagtgcaacgttcacagcttccgtagctacacaaagcttgattctgtcaatgctgaggacttcttctgtcgctttgagtacaaatcagccacaggaagcttcgtgcccgaccgcattgctgtgttctgcaagtgtgagatgccatacaatcctgatgaccttatgatccaatgtgaggaatgctctgattggtttcacccttcttgcattggaatgactattaaagatgcaaaaaaactagagcattttttctgccagagctgtactgcggaaaatggaaagatggctgagaattctcatgaagctacagcgcaatccgaagaaaaggtaagttttgatgtgatggaaaagttgaaagtttaa

SEQ ID NO: 11338 - DNA, 747 bp, Oryza sativa
  unsure (1)..(747): unsure at all n locations
  Clone ID: TFbOSC16028j.C1.o4.fg
atggcgaagtcgcggccgcccaagcggatcctcgagtcctacaccatcaagggctccgacaaagtcatcaagcattatgggagttcagtctctggggactgtgtgctaatgagggcatctgatacatcaaagccaccctatgtggcaagagttgaggctattgaggctgcagggtcacgaggcacaaatgtgagagtacgggtgcggtggtactatcggccagaggagtccatgggtggaaggcgtccatttcatggtgccaaagaggtgttcctctcggatcactatgacgtacagagtgctgacaccatagagggaaagtgcaacgttcacagcttccgtagctacacaaagcttgattctgtcaatgctgaggacttcttctgtcgctttgagtacaaatcagccacaggaagcttcgtgcccgaccgcattgctgtgttctgcaagtgtgagatgccatacaatcctgatgaccttatgatccaatgtgaggaatgctctgattggtttcacccttcttgcattggaatgactattaaagatgcaaaaaaactagagcattttttctgccagagctgtactgcggaaaatggaaagatggctgagaattctcatgaagctacagcgcaatccgaagaaaagttgacaaatttccaatacttaatgacacaaagcaccagttgggaaacagtaccaatttattcatatggcagtanaaagtctggtgtgattttacaactataa

SEQ ID NO: 11339 - DNA, 681 bp, Oryza sativa
  Clone ID: TFbOSC423524j.C1.o14.fg
atggcgaagtcgcggccgcccaagcggatcctcgagtcctacaccatcaagggctccgacaaagtcatcaagcattatgggagttcagtctctggggactgtgtgctaatgagggcatctgatacatcaaagccaccctatgtggcaagagttgaggctattgaggctgcagggtcacgaggcacaaatgtgagagtacgggtgcggtggtactatcggccagaggagtccatgggtggaaggcgtccatttcatggtgccaaagaggtgttcctctcggatcactatgacgtacagagtgctgacaccatagagggaaagtgcaacgttcacagcttccgtagctacacaaagcttgattctgtcaatgctgaggacttcttctgtcgctttgagtacaaatcagccacaggaagcttcgtgcccgaccgcattgctgtgttctgcaagtgtgagatgccatacaatcctgatgaccttatgatccaatgtgaggaatgctctgattggtttcacccttcttgcattggaatgactattaaagatgcaaaaaaactagagcattttttctgccagagctgtactgcggaaaatggaaagatggctgagaattctcatgaagctacagcgcaatccgaagaaaaggtaagttttgatgtgatggaaaagttgaaagtttaa

SEQ ID NO: 11340 - DNA, 4224 bp, Oryza sativa
  Clone ID: TFbOSC101037j.C1.o10.fg
atggaagcttcagtttctcaaatccgccgctctcctcctcgaatcgaaaaaagaaaaaagaaaaaccacaattctctttcgggcaaagcccccccgactcgtggcaactgcgactccctccctcccgtgtggaacgcgaagtcagcaagtgaatgccactggacacgccgattgacttccaactacctttcgctggtggtggtggtggttggggaggaattgcccccgtgctttgctcctcctcccatggagaccccgccccccgaccccgtctcgcctccgccgcccgccgccgacgagggctcgccgggaggcgacgacggggcggaggacgcgggggggttcagcgccgggctggattcgctgtggacggccctgttcggctccccggaggagctggagcccatgtggtccccgccgagggggttcggcgtgggggccgagttcgccgcggcggaggtggagcccgagatcatggacgtcgcggggggcccatgggacggcgcgccctggaggtcctccggggtcgtcgccggcgagggcgcggccaccgcgctcgttccccccacggccgccgcggggttcgcggagttcgagcccgcggcgccgatcgattcgtatccggcgggggcggcggcggcttcgttgggcgacgttcctgaggtgagtgcgctcgattccggcgttgattgttcgcctgacccgccgccatcgtcgtctcctccggtggattttgatgcgcgggggtttgaccccgtcgccgactccgccccggcgatggagtctccactaccgccgtctgtcgcttcctcggaagccaatttagacgggagaatgctcgattgtacgctcaactccgtgccatcgccacctcttgcttccccatatgaggtcggtttgggggctgaggatcctatcaaggattcttccccttcggttgcttggggaacaaccatggatgcgaaggatcccgaggtggatgctacttgtgcaaatggtacagctctgcggagatcacggaggatcatgaaaatcaagtcagcggcgagctccatgcctttgaatcagaatggagactcatctagagcttccaagcgacgagttgcggattcaaggaagagtagaagcagtgaagggagcaaactccctgcgttcacagggccaatttcagtaaacacagttgatttgattaacggggtgaaggttcaaggattgcaagaaattgttgccgtggaaaacgtaagttcctcttacgacaataatcagaaagcaggtggtctctacaatcaggttgtggtggctttaccagcagcgagtaatagtttgttgaaagacaaaggagcttctgttcttcctcgaaggaagactaggttagcctcaaaggtattggtgaattcagacagggtgtcagctatatcaccagtggtaaatggtggacctcctgtgcagaaatcagatgtttgtatacctactaaaaagcataagcttgctgttgaagagtgcttgacaagtctggatggagtggatggtggtggtattgtgttgtgcaactcaaagttgaaaagtgcaaaatcacgagtggtcagcaagacgcctcaagggagaggaagaagatcccctcaacctccaaagacacagagggccaggacgttgtcggttaaatacttggaaaaattaaagagggcagaaaacaataataataatggctcaatgtccaaatcaccaagagttccaatgataccagaaaataatggctcaatgtccaaatcaccaagagttccaataataccagaactgagcactaagcacgaacttgttttggacaagcacatggttgattcagtgatgttggaaacggacgatggttcctgtttctttgtgggggatgcagttcctgatgatgaggctaggaagcagtggcctcaccgttacgaaataaatgatcaaatcatgaaaaaggataagaggaccagcagccaaacatttgccaaactagttaccgtatctttttgtgtagtctttatgtatgtttatctacagatgcttgatttcaggggtccagagggaaaaccaaattatattggcaggttgctagagttcttcgaaacaaaaactggtgaatgttacttcagagtgcaatggtttttcacagctgaagacacggtcataggagagcaagcacaatcacatgacccgaggaggctcttttactcagacctgacagatgacaatttactggactgcattgtctcgaaagtgacaatcgtgcaagttcctcctagtgtagatggaaaatcaaagtcagttccttcgtccgactattactatgacatgaaatactctatcgactatagtacattctctaccatagaaatggaagacacagatgatttaatgcagtcatgttacactagtagaatcaatgacaaaatgaagaagatagatgtcaataagaagcacaagtctcctgtgctagagaagatggagctctctttgctagacctgtattgtggttgtggaggaatgtcaactggactatgccttggtgctcgtggtggtggtgtgaatctttcagcgagatgggccattgatgatgatgaaattgcatgtgaaagcttcaggaacaatcatccagaaacacgggttcggaatgaaaccacggatgatttccttgaactgttaaaagaatgggagaaattatgcaaaacatatgtgaaacatagtaggactaaggcatgtgttgacagtacaacagaatccaataatgaaactccagattgttctaccgtcccacctgaggagtttgaagtatggaagctagttgacatttgctttggtgatccaaataaagtcagcaaacacggcttgtattttaaggtccgttggaagggttatggccctcatcatgacacatgggagccagttgaaggattaaggaactgcaaagaggcaattagggattttgttattgaaggccacaggcaaagaatactaccacgccctcgaagaaacatagctgtgttcttgcttcgaccatcgaagttccctctgggtgatgtggacgttgtatgtgggggtccaccatgccaaggaattagtggctacaaccgcaatagagaattcgaggcaccatttaaatgtgagaaaaacaagcagatcatagtttttatggatgttgtgcaatttttgaagcccaaatatgtgtacatggaaaacgtccttgatatattgaaatttgctgatgcaacacttgcaagatatgctttaagtcggctagttgcaatgcattatcaagcaaggctagggatcatggctgctggatgttatggccttccacaatttcggatgcgtgtatttttattaggctgtcattctaaggagaaattacccccttttccactgcctacgcatgaggcgattgtgaagaatggctgcccgttggcttttgagcgtaatttggttggttggcccaatgacacaccaatgcaactagcaagaccaattgtccttgaagacattctttctgatctcccagaagtggcaaatggggaaagccgtgatgaaatgctgtatgtaaagggtcctcaaactgaattccaaagatacattcggtcatttaatgttgaagtgcatggtcccagagctcatgttacaaaagattccaaatcctcaaaattgtatgatcatcgaccattggtactggataatgataactaccaaaggatattgcaaattcccaagagaaagggagctaattttagagacctttcaggagtcatagttggtcctgacaatgtggctagattagatccaacgaaagaaagagtacttttgccatctggtcgtcctctggtgcttgattgcatactagcttatgagaatggtaaatctttaagaccttttggtcgagtatggtgggatgaggtagtgggaaccgtgctgacagttccaaatgcccgtatgcaggccttgatacatcctgcacaagacagactgcttactattcgtgaaagtgctcggttgcaaggctttcctgacaattacaggtttcgtggaacagtcaaagacaggtatcgccagattggaaatgcggtggccgtacctgttggacgagcacttggatacgccctggcgatggcctacctgaagaagtctggagacgatccccttatgttgctgccgcccaactttgcattctcccatgacttaagagggtttgcctag

SEQ ID NO: 11341 - DNA, 783 bp, Oryza sativa
  Clone ID: TFbOSC419703j.C1.o6.fg
atggccaagacgcggcagccgcagaagcgggtgctggagtcgttcaccatcaaggggcccgacggggtcatcaagcgtgaggacccctttcttgatccttttatctatttatctaggtttttgttgttttgggggaaattttggatcgtagaatcaagatactacctaagatttcgtagcatcgtggaaatgaatactggggatactgtgctaatgatggcacctgactcatcaaagaaaccatatgtggcaagggttgaggaaattgaggcaacaggacctcaagcctctcaagtgaagatcaaggtgcggtggtactaccgcccagaagagtccattggtggccggcggccattccatggttcgaaggaagtatttctttctgaccactatgattcgcagagtgctgacaccatagagggcaagtgttatgtccacacctttcgagattacaccaagcttcgatctgtcagcgctgaggacttcttttgccgctttgagtacaaatctgccacaggcagctttgtgcctgaccgtatagctgtgttttgcaaatgtgagatgccatacaatcctgataaccttatgatccaatgtgaggattgctctgactggtttcatccttcctgtgttgaaataaccatcaaagaagcgaagaaactagagcatttttactgtaaaagctgtattgctgaaaatggaaaggatctacaaaagtccaatggtgctactgtgcaatctgaagaaaagggttttcgtttttacccctacttttttaaatga

SEQ ID NO: 11342 - DNA, 4635 bp, Oryza sativa
  Clone ID: TFbOSC101706j.C1.o3.fg
atgacaggaaagaaaaggtgcagagcaaagccacaaaagaaggacgaagatacaactgataaaggcaaactggatgagggacctctggatgctacaaaagagatgaatggagttggaaagggtgatagtcgtgctgcctgcaagaggccaaggagagcagcagcgtgctctgatttcaaagagaaatctgtacgcttatctgataaatcctctgtggtcgcgaccaatggaaataagatggaagaggaggaaatggatgccgtaaagctgacaaaattaggaccagaagttcagcgaccttgtcggaaattgattgatttcatcttgcatgatgctgatgggaaactacagccctttgaaatgtcagaaattgatgattttttcatcacagctcttatcatgcccatggatgatgatttggaaaaagatcgtcaaaaaggagtgcgctgtgaaggatttgggcgaattgaggactgggcaatatctggttatgatgaaggtactgcagtagtctgggtctcaacagaagttgctgactacgaatgtgtgaagccagcaggcaattacaaatcttactatgaccacttctatgagaaggcacaggtctgtgttgaagtttacagaaaacttgcaagatcagttggtgggaatcctaatctaggtctggaagaattgcttgctagtgttgttcgctctattaatgctatcaaaggttatagtggtacactgagcaaagactttgtgatctccaatggtgagtttgtatacaaccagcttattggattggatgagacagcaaacactgatgatgagaagtttgcgacactaccagttcttcttgctctaagagatgggtgcaaatctagagtggaagtaagcaagctgcagcctaacatttcaaatggaagcctgaagattaatgatgcagagtgtaaagaggtatctgaagatgatgatgagaagttagcaagattgttgcaacaagaagaggaatggaagatgatgaaacagagaggtaaacgtggaacaacttcccagaaaaatgtctacatcaaaattagtgaagctgagattgccaatgactatcctctgcctgcatactataaaccctctagtcaagaaatggatgagtacatatttgacagtgaagatagcttctattctgatgtgccagtaaggatcctcaacaactgggctttatacaatgcagactccaggcttattcctttggaactaatccccatgaaagcaggcgctgaaaatgatatagttgtctttggatctggttttatgagagaggatgatggaagttgctgttctactgctgaatctgcaaaattgtcttcatcaagtagttctaaccaccaggatgcaggcgtttcaatttatctgagccctatcaaggagtgggttatagaatttggtggatcaatgatttgcataaccattcgaactgatgtggcctggtataagctacggcaacctacaaagcaatatgctccttggtgtgagcctgtcttgaaaacagccaggctctctgttagcatcataactctactaaaagagcaaagtcgtgcttcaaagctttcctttgctgatgtcatcaagaaagtggctgaatttgataaagggagtcctgcatttgtatcatctaatgttgcactggtcgagagatatattgtggtccatggacagattattcttcagcagttctcagattttccagatgagactatccggcggagtgcatttgctactggtcttttgatgaagatggagcaaagaaggcatacaaagttggtcatgaagaaaaaggttcaagtgatgagaggagagaatctgaacccaagtgcaactatggggccagcatcaagaagaaaagtgatgcgtgcaacaacaaccaggttgattaacaggatatggagtgattactatacacaccatttccctgaagattccaaggatgcagatgtgaatgaagctaaagaaattgatgatgaactggaagaaaatgaagatgaggatgctgaagaggaagcacagattgaggaggaaaatgtctcaaaaactccaccatcaacacggtctcgaaagttggtatcacaaacatgcaaagaaattagatgggaaggtgaagccattggtaaaacaccttctggagaagctctatacaaatgtgcttatgttcgagagctcagaataaatttgggacggacagttgcactagaagatgattcaggagaactggtcatgtgctttgttgagtacatgtttcagaaacttaatggagcaaaaatggttcatggaaggctacttcagaaaggttcagagactgttcttggcaatgctgcaaatgaaagggatcttttcttaaccaatgaatgtttagaatttgagttagaagatatcaaagaattgatgtctgtcaatctccaatcattgccctggggtcacaagtatagaaaagagaatgctgaagctgacaggattgagcgtgccaaagctgaagataggaagaagaaaggtttgccaatggaatatttatgcaaaagcttgtactggcctgagaagggtgcatttttctcccttcctcatgataagctgggccttggtaatggtttctgtagctcttgtcagcagaaagagccagattgtgatgaattgcaaatactatccaagaacagcttcatttacagaaacattacctacaatgtcaatgactatttgtatattagacctgactttttctctcaagaggaggatcgtgcaaccttcaagggagggcgaaatgtgggtctaaagccctatgtagtttgccatctattggatgtccatgaacctgctggatccagaaaaattcatccagcatcaacaaaaatcagtgttagaagattttacagaccagatgacatttcatcagccaaagcttatgtttctgacattagagagatatttctccttacattggctttgatactttttctggatcaggtatactatagtgaaaatatagttaaagtgcctgtggatatgatagagggaaaatgtgaggtcaaaaagaagatcgacatctcaaactcagatgttccagtgatggttgaacatgaatttttctgtgaacatttctatgatcctgccactggagcattaaagcagttgcctccaaatgttaagctcatgtctgtgcaacaaaaggcaactggcgctttgaaaaagaacaaaggaaagcagatctgtgaaagtgatcaggtggattcagataaatgtacaaaggtgtccaaagagaaccgtcttgcaactcttgacatttttgctggctgtggaggtttatcagaaggactgcagcaagctggtgtatcgtttacaaagtgggcgattgaatatgaggaaccagctggtgaagcatttaccaaaaatcatccagaagctgcggtgtttgtggataactgcaatgtgattttgaaggcaattatggacaaatgtggagatgctgatgattgcatttcaacttctgaggctgctgaacaagcagctaaattttctcaggacaatattatgaaccttcctgtccctggtgaagtagaattcataaatggtggtcctccatgtcagggcttttctgggatgaacagatttaaccaaagcccatggagtaaagttcaatgtgagatgattttagcattcctgtcttttgctgaatatttccgccccagattctttcttttagaaaatgttaggaactttgtttcattcaacaaaggacagacatttcgactgacagttgcatcccttctggagatgggataccaggtccggtttggaattttagaggcagggacttttggtgttgctcagtccaggaaaagagcattcatttgggctgctgcacctggagagactctgcctgattggccagaaccaatgcatgtgtttgctagccctgagctgaaaataaatttgcctgatggtaaatactatgcagctgcaaaaagcactgctggtggtgctcctttccgtgcaataacagttagagatacaataggcgatttaccaaaggtggagaatggcgccagtaaactcctacttgagtacggtggcgaacccatctcctggttccagaagaagattagagggaacacgatcgcgctgaatgatcacatatctaaggagatgaatgaactgaacctcatcagatgccaacgcattccaaagcggcctggttgtgattggcatgacctaccagatgagaagcggaatgttaaccattatgagcgtgtgcaggtgaaactatcatctggccaactggtggacctgatcccttggtgcctgcctaacacagctaaaaggcacaaccagtggaaagggctttatggtaggctggattgggagggcaatttccctacttctgtgacagacccccagccaatgggcaaggttggcatgtgcttccaccctgaccaggataggatcatcacagtccgtgaatgtgcgcgatctcagggctttcctgacaactaccagttcgcgggcaacatccagagcaagcacaggcagattggcaatgcggtgcctccacctcttgccttcgccctcgggaggaaactgaaggaagctgttgatgcaaagcgtcagtag

SEQ ID NO: 11343 - DNA, 5586 bp, Oryza sativa
  Clone ID: TFbOSC419704j.C1.o1.fg
atggtgaggcgggcgagcgtggcggcgtgcctgacctgcccgctctgcggccgcctcctccgcgacgccaccaccatctccgagtgcctccacacctcttatggtattttcaattgtgttttgttcagagttgatcacagtatgcaattcgtaaggtcaaggatatttcctttcaaacgaaggaaggttgagaacccagaaatcatttgtccagttgcgtcacctgtcaagaggaaagaaagatcactatcttcacttacaatccctgctcctcaggtgtctatacagaaatgtttgacaaagaggagaacgaaagcttcgtgcttacgcaactttcctttgcattctacctcgaggggcagtaaagatacatcaaagaaacttgggggttggagaccattgggttgtcaacttaagcttggcaaagacaaaaaatctctcaaatcaagtgtaaaagatacaaacagaaccaaaagtaagtctggtgatacagatgatggtgctcctgctagtaaagcaaaggctagagaaccctttacaagatatgggcgtgcagctaagaggactggaagaaagaaattgctcatgttgaagaacaaaaagaaaaggttcaaggcaaagcagcccagtaaaaagaggagattccgagcactatggttttatctacttgctgcttttgaccagagaggagtaccaactttaccacaactaccagcaaagtatttgaggatcaaggatgttgatttgcctgcttctattatacagaagtaccttgcacagaaacttaacctctcaagtgaaactgaggtagaagtgttgtgtggtggcaaagtagtgaaccaagggatgacactgcatgatctagcagattgctggcttgagaaaggaccaaagagccgaatgcgctcatcgttttgtctctgccttggttgcttgtgggggttcgtcgctgatcgtggtgtcgtggggagagctgatcgcggtcgcgtgatgcggggagctatggcgaaaagtccacgttctgttgttaccacaggaacaaaaaggcgtagagcaaaggttcataaagaagatgagcctgttgagaatgaaaacttggagagtgaatttgatgtttccaagaaagagagcaatggtgccactgaacctggtaatgagcctgttgccagcaagagaccgaagagagcagctgcctgttctaacttcaaagagaagtcattggacttatcagaaaaagattcaattatcacaatcaaggaaagtcgggttgaagagaaggaaatagaggctgttaatttgacaaggacgggacctgaagatggtcaaccttgcagaaaaatcatcgatttcatcttacatgatggagatggtaatctgcaaccctttgaaatgtctgaagttgatgacattttcataacagctcttatcatgcccttggatgatgatctggaaaaggataggggaaagggaatatgttgttcggggtttggacgaattgaaaactgggcgatttctggctatgatgaaggtgctgcagtaatttgggtctcaacagaaacatcagattacaaatgtgtgaagccagcaagcagttacagatcttattttgaacactttagtgagaaggcacgtgtctgtgttgaagtctataagaagttagctagatcagttggtggaaatcctcaggtggacttagaagaattaattgctggtgttgtccgttccattaattcaaacagaagcttcaacggaacagtaaccaaagactttgtgatctcctctggtgagttcatatataaacagcttattggattagaccatacagctggcaatgatgatgagatgttggccacactgccagttcttgttgcactgaaagatgaatgtaaatcaagagcaggattcacacatttgccagctatgccctcgaatggaactctgaggattaaggatgggcaagacaagggactgactgaggatgaggatgcaaaattagcaagactgttgcaggaagaggaagaatggaaaatgatgaagcagagaggcaagcgtggaacttcacagaaaaatatctacatcaagatttgtgaaactgaaattgccaacgactacccacttccagcctactataaaccatataaccaagaaatggatgagtacatatttgatagtgatattggtatgtattctgatgatgtacctgtaagaatccttgacaactgggctctatacaattcagattccagactcatttctttggagctcatccctatgaaagctggtgcagaaaatgatattgtggtatttggatctggttttatgagagaggatgatggtagttgctgttcaacagctgagctagcacagttacattcttcctcaagtaaatctggccgggaagatccaggagttccaatttatttgagcccaattaaagagtgggttgtagaatttggtggttcaatgatctgcataaccattcgaactgacgttgcttggtacaaattacgccagccaacaaagcaatatgctccatggtgtgagcctgtgctgaaaacagcaaggctagctgttagtatcatcacccttttaaaagagcaaagtcgcgcttcaaagctttcttttgctgaagttatcaagaaagtagcagaatttgacagtagacaccctgcatttatatcatcgaaagcaccaaccgttgaaagatatgtcgtggtgcatggacagataatacttcagcagtttgcagactttccagatgaatctgtcaaacggtgtgccttcatcacaggtcttctagcaaagatggaggaaagtaggcacacaaagttggccatcaagaaaaaatctcaacagatgagaggggagaatctgaacccaagcgcaaaaatgggtccaatactgagaaagaagcttatgcgtgctacaactacaatgttgatcagcaagatatggggtgaatactatgccacttatttccctggggatacaaaggaagaagatcagaatgaaccaaaggaaattgatgatgatcaagaagaaaatgaagacaatgatgctgaagaggaggtaaatgttcaagatgagaaggccacaaggactccaccatcaacacggtctagaaagtcgtcagcagatactcgcaaggaaatcaaatgggaaggtcaaacagctggaaaaacagtgtctggagaagttctgtacaaatgtgttattgttcaagacctcagtatttctgttggtgcgacagtcacaacagaggatgattcaggagaaaccatcatgtgttttgttgagtatatgtatgagaaacttgatggtaaaaatatgattcatgggataattctgcaagaaggttcacagactgttcttggcaatgctgcaaatgatagagaggttttcttgactaatgactgtttagaatttgaagcaagtgacatcaaagagttggtgactgttaatatccaatcactgccttggggccacaagtacagaaaagagaattctgaagctaagagaattgaaaaggccaaggcagaggagaggaaaaggaagggcctgccagtggaatatatttgcaaaagcttatactggcctgagaaaggtggattcttctcccttccgtatgataaaattggaaatggcacaggcatctgtagctcctgtgagagaaaaccagttggcaatgaattcaagttactttctgagagcagctttgtctttgagaatattacgtataacatccatgactttctgtatatcaggcctgaatttttctcccaaggggagggccatgagacctacaaggctggaaggaatgtgggtctaaaaccttatgcagtctgccatctgctgagtgttcatggtcctgctggatcaaggaaagctaatccagaatcgacaaaagtgaaagtaagaaggttttaccgacctgatgacatttcatcaacaaaagcctactcatcagacatccgagaggtgtactacagtgaagatataataagtgtacctgtggtgatgatagagggaaaatgtgaggttcgactgaaggatgaccttccaaattcagatcttccagcggtggttgaacatgtcttttgttgtgaatatttatatgatcctgctaatggagctctcaaacagctaccgcccaatgttagacttgtgacactgacaaggaaggtacctgcttcaaaaaagaacaaaggaaagcaaatttgtgacattgagctaggtggttcagacaaaccaaaggatgggcaatcagagaactgtcttgcaacacttgacatttttgctggttgtggaggtttatctgaaggattgcagcgatcaggattgtcacttactaaatgggctattgaatatgaagaacctgctggggatgcatttggtgaaaaccatccagaagctgcagtatttgtcgaaaactgcaatgtgattctgaaggcaattatggacaagtgtggtgattctgatgattgcatctccacttctgaggctgctgaacgagcagctaaactttctgaggacaagattaagaatctgcccgtgcctggcgaagtagaattcataaatggtggccctccgtgtcagggtttttctgggatgaacagattcaatcaaagtccctggagcaaagtccagtgcgagatgatcttagcattcctgtcatttgcggagtatttccgtcctagattctttctcttagaaaatgttaggaactttgtctcgttcaacaaaggacagaccttcagattgacactggcatcactcctggagatgggataccaggtccgatttggaattttagaggcaggggcttatggtgttgcgcagtccaggaaaagggcattcatttgggccgctgcacctggagagactcttccagagtggcctgaaccaatgcacgtctttgctagccctgagctgaaaataactctacctgatggcaagttctacgccgctgtcaagagcaccgctgcaggagcccctttccgctcaattacagttcgagatacaattggggatctaccagctgtggaaaatggcgccggcaaaccaacaattcagtacggaagcggtcctgtgtcttggttccagaagaagattagaagcgacatggcttcactgaatgaccacatatctaaagagatgaatgagctgaacctcataagatgcaagcacattccaaagcgcccaggttgcgactggcatgacctgccagatgaaaaggtgaagctgtccacagggcagatggtggacttgatcccttggtgcttgcccaacacagccaaaaggcacaatcagtggaaaggactgtacggtaggttggactgggagggcaatttccccacttctgtaacggatcctcagccaatggggaaggtcggcatgtgcttccatcctgagcaggacaggatcattactgtccgtgaatgtgctcgatcccagggcttccccgatagctaccgtttcgctggcaacatccagaacaagcacaggcagatcgggaatgccgtgccaccgccccttgcctatgccctcgggaggaagctcaagcaagccatcgacgccaagcgttga

SEQ ID NO: 11344 - DNA, 4845 bp, Oryza sativa
  Clone ID: TFbOSC400546j.C1.o3.fg
atggtgcggcgcggcgccgggggacggcgaggagggatcggcggcggggatgatgcaaggctatgcatgggtggcgcgaaggcggcggacgggcgtgaattccgtgttggcgactgcgctctttttcaggctgttgaagttccccctttcattgggttgatacgttggattgagaaaaaggaggaaggctttcccaagttacgtgtaagttggctgtatagaccagctgacatcaagcttaacaagggaacacagctgtgcgccgcaccaaacgagatcttctattctttccaccaggacgagacatccgctgtctcactgctgcatccttgcaaagttgcttttttgcgtaaaggcgttgagcttccagctggaatttcttcatttgtgtgtcggcgcgtgtatgatattgacaacaagtgtttatggtggcttaccgaccaggattatataaatgagcggcaggaagaagtaaatcggcttctacacagaacaaagctagaaatgcatgcagcagttcagtcaggtgggcgctcaccaaagcggctcaatggaccgtcgtctgcccagcaaaagtctggttctgatggtgcccaaaactgcggtctttccaaagggaagaagagggacaggggtgagcaaggaactgatccagctaagcgagaccgtgagcgtcccctaaaggctgaggatggcgaatcaggcaactttaaggtggagaatctaaagtctgaaattacaaagataacagaaaaaggtggacttccacatgctgaagctgtagagaagctggtacatctcatgcaacttgatcgaactgagcgaaagatagatttgcctggccgggtaattctagctgatattattgcagctacagaaagtcctgactgccttggtaggtttgtgcaactgcgaggccttcctgtgtttgatgattggcttcaagaagctcataaagggaagtctggtgaagctggtagtcctaaagaaactgataagcctatggaagatcttgtcctggccctgcttcgtgcactggcgaaattgcctattaatcttactgctttacaaagttgcagtattgggaagtctgttaatcatctgcgaagccataaaaatccggagatacagaagaaggcaaagtgtcttgtcgaaaattggaagaagcgcgttgatgctgaaatgaagtcaaatgatgtgaaaccagtggtatcaggtcaggctgtatcctggccaggcaaacctgggtttccagaaatttctagtgctggaaacagacgaagtggctcaagtgagtctagtctgaaaagcccagtgtctcagctttcttcatcgaaggccttgacttctaaacctgtagccgccgatgctgctgcgaaatcgagtccagtgatatctggttcttcaaaattgcaacatatgcaaccaggaaatgctgtaaccaacttgaaggagcaaccctccaaatcaactggtggcacttgtggctctgagctgcctgcagtgaaagaggagaaaagcagcagttcaagccagtctctgaacaacagccagtcatgttctagtgaacatgcaaaaacaatcggttcttcgaaggaggatgcccgaagctcaactgcagcttctggtgttgcctataaaacttccggtagttcttctcgtgtgcatcgaagaacaaacaatgggcttcttggttcagggatccagaaagaagctgccgtggcaagatcgtcttcacttgatcactcttcagtgcaggaaaaagtgtcacaatctggcacagcatgtgagaaaggagctgacatacaatcagatcagggtaacagccatagattgattgtccggttcccaaatcctggtcgaagccctgctaggagcgcaagtggcggttcttttgaggacccatcatttactgggagtagagcttcatctcctgtggcagacaaacatgaacaaagtgaccgtagagtgaaaatgaagactgaaaattccaatcctcatttaggcaatgatacaaatgctgagtcttggcacagcaatgatgttaaaggagcttcagtttctgaggaaggcgataaatcacctcgtgctatgttgactgatgacagcaagacaactgaaggagctggcagagatgtacctgtttcacgagttgcttgttcatcatatgcaaatgaaaagggaatctgttcaagtgagactgggctgactaaattgttcaaccctatgaatgctttgattgaaatcaagtactctgaagctagtcattccttgcaagctggggatgatacagcaatgaatcttcttgccagtgtcgctggagaaatatctaaatctgagttgatttcctcatctccttcgcctagaaattcatcagcaaatgaacagggctgtgaaggagacaacattgggaagctaaaagtggaatgtgatgtgagcttgccacagcatgcagggccatcaaatgaagttgagaaagtcatctctgagaagagtgaaaaaagtggtgtaggtttggttggaaaggagctgcaccgggaggatgttaatatgctgtctgtaaacaacttgttgtcacagggtgacaagggcacaacatctgctggatcgtcccctctaccagaaatagattctaaagcgaagactgaaaatcgtgaagtagaggacaccgataaatgttcacatccaccttcacgtggtgatgatggtgtaaagtcaaatgccaaacaacctattggtttcaagattgatacaaactcaaatataaaatcatctactacgagtgaatataggtctgcatttactgttcgaggtaaagttgaagatggttgtacaaccagttctgatgtgggctccacattaggtgatcaatgtaagctggctgtttcaaatagaaaaatgctccctgccgaggaaccattatgtggtggtgacaaacaagctcatggtttgttaaagccaacagatcaaaagcatcttctgggtctaccatattattcagaacacattgataaatctggtgacagtactgcaaataaattgaaattgaagccttcattttcatcatcgactgtggaggtgaataaggctgatggtttgctggttggtagtaacacggtgctgaaagaggatgaaaagaaggaacatccagctgatgttacaaaacttgctgtagcaactggagtcaaacatggtccagaaaatgggattagttctaaagaatcaaaagacaattccagtgaatcaagcagtcacacaagacctggaggcactgtctcacaggaaactgaacatagtgcacaacgcagctcaaagaaatctagcgatgatgcaggtgggaaagacgaccttgtctcatctgatgatggttcttcattctctgccaagaccaggtcaaatgccactgccaagcttgactttgatttgaatgaaggaatacctggagacgaggggcatctgtctgagccagctacctctcctgctgtgtgttcttcagcgattcatttacctcgtccttctccgtttgtatcacctatttcaagtgggctgcctgctccaatagctgctccagctaaaggcccctttgttcctcctgagaacctaataaggttgaagtctgagactggctggaaaggttcagcagccacaagcgcatttcgcccagcggagccaaggaaaatttttgagatgactctcagtgcatctggcattctggtttctgatgctgcagggaaaaaccgcccagcacttgacattgacttaaatgttgcagatgagcaatttcttgaggaagacgtctctcagagttctgttcagacaactggttctgaatctggcaacactagaagaagcaatggtcctgtacgtagtgttggctttgagcttgacttgaatagggccgatgaagttgcagagaatgggcaaattgtgtctaacactaaccacagggttgaagtcccattattatcaagaccattacctggagttttctctagttccgatgcaaatagctcaagggattttgatcttaataatggaccaactcttgatgaagctggtacggaacatgcaccaaggagtctgtcatctaaaaataccagtagcataccattcctacctcaagtcgctagcatgagaatgaacagtgctgaaatgagtaacatatcaccatggtttgcttctgccaatgcttgtgctcctgtagctataaagtcgtttttaccttctagaggagaacagcctcacccagtcgagacagcagctggaagtggaacccagaggatcatcacatcgatggcagatggtgtccaacatggaagtgatcccagccggactccagttatttcaacttcaccgactatgatgtttcaccctcctgcttatcagtatgcaggattcccttttactcctagtgtccaccttcaagcaccggggttttcaattgggtctacatcatatgcgaattctgcacctggaggaattccttatttccctacaattgctccgacgcttgttggcccagcaggtgcattacctgctcagcatactcgacaatatgcaataaacctccctgaaggaagcagcactgttggacatgacaataatcggaaatggggaagacagggtcttgatcttaattctggccctggaagtgtggatgtagaagtgaaggacgatagagtaactttaccagttagacaaaattttattgcgccaccacatgcctttgtggacgagcatacgagaatgtatcaaatgcctccaggtgttggaataaagaggaaggaaccagagggcagttgggatgccgaacgatcttcatacaaacaattgtcatggcaatga

SEQ ID NO: 11345 - DNA, 636 bp, Oryza sativa
  Clone ID: TFbOSC900107j.C1.o10.fg
atggccaagaccaagcagggcaagaaggacgtcgaatcctacaccatcaagggcaccaccaagatcgtccgagtgggggattgcgtgctgatgcgggcgtcggacacggagaaggcgccgtacgtggggagggtggagaggctggagacggacgggagggggagcgtgcgggtgcgggtgcggtggtactaccggccggaggagtccaagggcgggaggaggcagttccatggcgccaaggagctgttcctctccgaccacttcgacacccagagcgcccacaccatcgagggcaagtgcgtcgtccactccttcaagaactacaccaagctcgacaacgtcggccccgaggacttcttctgccgcttcgagtacaaggccgccaccggcgccttcacccccgaccgcgtcgccgtgtactgcaagtgcgagatgccgtataacccggatgatctaatggtgcagtgcgagggatgcaaggactggttccatccatcttgtatgggaatgaccattgagcaggccaaaaaattagatcatttcctgtgcgcagattgtgtcaaagaaaatggcacgaagagaccttcaaattcatatccagcatcatcaaattctgattctaaggtcattatttga

SEQ ID NO: 11346 - DNA, 5286 bp, Oryza sativa
  Clone ID: TFbOSC401817j.C1.o11.fg
atggaggccgaggcggaggcggtggccgacctcgacgagatcgaccgcgagatgtcgcgcgccgagtcgcgcaagcgccagcgcaggacggcgaaggagaagcctggtgcccgtaagggagcgaccgaatggaagccggaggacgtggagaaggcggcggcggcggagggggtggccgagctcgacgagatcgaccgcgagatgccgcgccccgagttgcgcaagcgccagcgcaggacggcgaaggagaagcctagtgcccatgagggagcgaccgaatggaagccggaggacgtggagaaggcggcggcgcaggagcccgaggggaccgagctcgacagtgggttgtcgcccgcagagtcacgcggcaagcggcagcgcggggtggagaaggtcaagcgtcgtacccgtaagaagacggccaaggagaagacgaaggagacgaccgagaagtcggcggctcaggcgcccgagaagatgaaggtgaacgatgcgggtggcgcgctggccgaagacgtgtgcgcggatgagccggacgccgaacagatggccatggaggaggaggaggaggcagccgacgtgctggaagcagaggagaggatgggtaagtgtgtcggagaaggatcagccgagaaggctgcgacgaggaagagggtggcgcggccaagcactgcgagaagggtggaggactcagatgaccactttgtgggcgatccagtaccggatgatgaagcgcgacaacgatggcccgtgaggtacagtagaaaggggtctgattcgcttcttaagcaggagcctgacgaagatgaagaaatgaaggctcgatgtcactacctggctgctaatgtggatgatgaaatctatcatcttgatgatgatgtctatgtcaaggctggtcctgatgaggaaaattacattggacggattactgaattttttgaaggagtcgaccgtggatcatatttctcttgtcagtggtttttccgtacagcagatacggtcatctcatcaaagttgttaaaggtgcatgatcatagacataaccataagcgtgtttttctttcaaaggagaagaatgacaacttgattgagtgcatagtctcaaaagtaaagattgcccatgttgatccaaatatgacgcctcaagcaagagctcatgctatatctgattgtgacctgtactatgacatgtcttactctgttgcatattccacgtttgcaaatcttccagcagataatgatggtgcattggggagtgaggcaacatcaaatatttcctgcgatgatgctgacaattcttctaagggaaaattgtcggctgatattgtggcaccatatagtgaacaaacagagacagcttctctgcttgatctttactcaggatgtggcgctatgtcaactgggctttgtttgggttttgcattttctggcataaatttagagactaggtgggctgttgacataaacaaatatgcttgtgcttgtctcaaacataatcacccatactcgcaggtgcggaacgagaaaactgaggattttcttgcccttattcagcagtgggatgcactttgtagaaaatatgttgtccacaaaaacgatacactagaacctagtatagatatgcccttaaatgatgctgacgatgtaaatgagcctcttccagaagatatattcgatgtagaggagctccttgagatatgctatggtgatccaagtaacacaggaaaaaatggcttgtggtttaaggtgcggtggaaagggtatgatccaagttatgatacatgggagccaattgatgggctcagtgattgccctgagcgtattaaagaatttgtagagaaaggacacaaggaaaatattttgcccttgcccggtgctgtggatgtcatatgtggtgggcctccatgtcaaggcatcagtgggttcaaccgattcagaaagcataatgatccacttgaggatgaaaagaacaaacagttggttgtttttatggatatagtgaagtatctgaggcccaaatatgtcctcatggaaaatgttgtggacatattgaaatttgcagatggattccttggacgctatgcaatgagttgccttgtggctatgaattatcaagctaggcttgggatgatggcggcaggatattatgggctaccgcagttcagaatgcgggcatttctctggggagcccttccatcaatggtattaccaaaattcccacttcctacccatgatgctgttgtgcgtggaatagtaccaactacattttcgcaaagtgttgttgcatacaatgaggtagacacccgttgcctacgaaaggctcttctccttgcagatgccatatctgatttacccaaggttggaaatgatcaacctaaagatgtaatagagtatagtgttgcccccaaaactgaatttcaacggtatatccggaacaaccgtaaagacattcaggattactcttttcgtggagatgatccttctgaagaaggtaaattgtttgatcatcaacctctaaagctaaacaaagatgattatgagcgtgtgcagcggatacctgtaaaaaagggagcgaactttcgtgatctaaagggcgtcatagttggcccagataatactgtgcggctggatccaaacatttcccgtgaacgactgtcatctgggaagcctttggtgcctgactatgccatatctttcgtcaaggggaagtcaactaaaccgtttggacgcctgtggtgggatgaaactgttcccactgtagttaccagagctgagcctcacaaccagattattttgcatcctagccaagaccgagttctgactattcgcgagaatgcaaggttgcaaggttttcctgactattacagattgatcggcccactaaaggagaaatatatccaggttggcaatgcggttgcaattccagttgctcgagctttggggtatgctcttgggctggcctaccggggtgaatctgatggagatcgagcagtactcaaattgccagagagttttatttatgctgatcaagagacggttgttaaatcttcggcaggaactcctggaagtgaaatagctgattcggaacagttgtttgaatatttcataaaccccaatttcttttgcatgatgtttgcttttcttaaagtgaatgtggttattcccttgatcctagattctaagatgggtttatcgcgacgaggagccgaggagggggaggcgcgccgcgccgttccattccagaacatcctctcgtgggaggggtggaatcgtcttgatcatcgccggggcgagatccgtctcgacgtccggcgggaaatggacgattccccgctagataatctgtttgatggaaatggattggattcatcggcaggcgcggacagctctagctccacgggatcaccgccgagctccacgtcgtcgtcccctccgtcgtcgcagtcacctcctccggggtcatcgccgcctcctgccagcccgccaccgtccacaccgtcggccccaccgaccaattcctcgggctcagcaccgtcgccaccttccccgtcgcagtcggcgccaccggcgaataccggcggcggcgggtccccaccaccatcgcatggctcgccgccagcgccaaaggccgtccagtctcaacccgctccgaagcgtagcggcgacggtggctcctcctcggacagtgggagctccaaggagggaggcagctcgagtgaccgtggcaagagcgaaagcaacggcaacaggccggggccagaggctgccatcatcgccggcatggtcatcgggttcttcaccttcgccctgctgctggccatcgtcgcctgcgtgtgctgctccaagaagaagaagagacctccccacatgcacatgccgtactacaccgacgagaacgggaaagtgtactacgcgaacagcatgcccaggtggcagaacagcgtggaccaaggcggcggctggcacgcgcagtactcgccaggccaggcgccgccgagcagcgagatgagcgggtcgcacggggcggggccgctgccgccgccgtcaccgggcatggcgctggggttctcgaagagctccttctcgtacgacgagctggcgctggcgacgggcgggttctcgtcggcgaacctgctggggcagggcgggttcgggtacgtgtacaggggcgtcctcgcgggcagcggcaaggaggtggcggtgaagcagctcaaggccgggagcgggcagggcgagcgcgagttccaggccgaggtggagatcatcagccgtgtccaccaccgccacctcgtctccctcgtcggctactgcatcgccggctcatcccagcgcctcctcgtctacgagttcgtccccaacgacacccttgagcaccacctccacggtctccatatctttcctgctcttttcccagccatcgtaacgcgccattcggaagggcgtgccggtgatggcctggacgacgaggctcgccatcgcgctcggctcagccaagggcctcgcgtaccttcacgaagatttctgcagggacaaatcctgtctgtacgtccttctaacgatctgatttgttgcattgtggttgtcacgtacgaaggccatcctaggatcatccaccgtgacatcaaggcggccaacatcctcttggacgagaatttcgatgctaaggttgcggatttcgggcttgcaaagctaaccacggacaccaacacgcatgtctcaacgcgcgtcatggggactttcgggtatctggctcccgagtacgcgtcgagcggcaagctgacggacaaatcggacgtcttctccttcggcgtcatgctgctcgagctgatcaccggccggcgaccggtcgacccaacgaactacatggaggacagcttggttgactgggcgaggcccctcctggcgcgcgccttgtcggaggacggcagtttcgacgagctgatcgaccagcgcctggagaacaagttcgaccggctggagatggagcgcatggccgcatgcgctgccgccgccgtccgccactccgccaagcgccgcccaaagatgaagcagattgtccgtgcgctggagggcgacgcgtcgctggacgacctgaacgaaggggtgaagcccgggcagagcatgatgttcagcacggggtcggagtacgactccggcaactacgcttccgacatcaacaggttgaggaaggtggccttcgagagcagcatcgaggacagcagcgagtacgggacccactccagcgccgactcgggggagccaccccggcggcaacagcatcgctag

SEQ ID NO: 11347 - DNA, 4611 bp, Oryza sativa
  Clone ID: TFbOSC400546j.C1.o2.fg
atggacggacgtgagttcagagtgggtgattgcgctctttttcgggctgtcgatgtaccccctttcattggattgatacgctggattgagaaacaggaagaaggttatcccaagttgcgtgtaagttggctttacagacctgccgacattaagctcaacaagggcttacaactcgacgctgctccaaacgagatcttctattcttttcaccaggacgagacatcggctgtctcacttctccatccttgtaaagttgcctttttgcgaaaaggtgcagagctgccagctggaacttcttcattcgtatgttggcgcgtttatgatattgacaacaagtgtttatggtggcttactgatcgtgattatataaatgaacgacaggaagaggtaaatcggctactgcacagaacaaggcaagaaatgcatactgccgtgcagcaaggtgggcgctcaccgaagcggctaactggcccatcagcttcccagcaattaaaggctggttcagatggggcccaaaattgcggttcatctaaaggaaagaagagggaaagaggtgaacaaggaattgatcaaattaagagagaccgtgatcgcacccttaagactgatgacactgagcctggaaacctgaaaggagacaatatgaagtctgaaattgcaaagattacagaaaaaggtggacttcctcatgctgaagctgtggagaagctagttcatctcatgcaacttgatcgaactgaacggaagttagattttgctggtcgagtaatgcttgcagatgttataacagctacagaaaaccctgattgccttggcagatttgtgcaactaaggggccttcctgtatttgatgattggcttcaagaggctcacaaagggaagtctggtgaaggtggtagtcctaaagaaactgataagcctatggaagaacttctcctagcgctgcttcgtgcattggcgaaattacctattaatcttaatgccttacaaagttgcagtatagggaaatctgttaaccatctgcgaagccataaaaatccagagatacagaagaaggcaaagtgtcttgttgaaaattggaagaagcgtgttgatgctgaaatgaagtcaaatgatgcgaaaccagttgtatctggccaagctgtatcctggccagggaaacctgggtttgcagaaatttctagtgctggaaacagacgaagtggctcaagtgagcctaatctgaaaagcccagtgtctcagctttcttcatcgaaggccttgaccgtcaaacctggagcgtctgatactactgtgaagtcgagtcccttgatatctggttcttcaaaactacagcatattcaaccaggaaatgctgtaaccaacttgaaggagcaaccctgcaaatcatctggtgggacttgtagccctgagttgcatacggtgaaagaggagaaaagctgtagttcaagtcagtctctgaacaacagccagtcatgctctagtgaacatgcgaaaacaattggttcttcaaaggaggatgcccgtagttcaactgcagcttctggcattgctggtagaacatctggtagttcctcacgtgtccatcgaagaacaaacaatgggattcttagttcaggaggccaaaaggaagctactgtggcaaggtctacctcacttgaccgctctctgttaccggaaaaagcatcacaatctgtcacagcatgcgagaaaggaactgacacaccatcagatcagggtaatgggcatagattaattgtccggtttccaaatcctgtccgtagccctgctagaagtgcaagtgggggttcttttgaggatccatcatttactgggagtagagcttcgtctcctgtgcttgcagataagcatgaacagagtgatcgcagagtaaaaatgaaaactgagaattcaaatcctcatttaggcaatgatacaaatgctgaatcttggcatagcaatgatgttaaaggagcttcagtttctgaggaaggtgataaatcaccttatgctatgctgaccgatgatcgcagtaggacaactgaagaagctggcaaagatgcatgtgcttcccgagttgtttgctcagatgctaatgaaaaggcggcttgctcaagtgaaaatggggggagaaattcgttcaaccctatgaatgctttgattgaaatcaagtactctgaagctagtcattccttgcaagctggagatgatacagcaatgaatcttcttgccagtgttgctggagaaatatctaaatctgagttgatttcttcatctgcttcacctagaaattcaccaggaaatgaagagggctgtgaaggagataacattgggaagctaaaagtacaaagtgatatgggcttgtcacggcatgcagggccaacaaatgatgctgagaaaatcatctctgataagggtgagaaaattggtgcaggtttggtcgcaaaggaggaacaacacctaggggatgcaaaggacaataaggtcacatcttctgggctaccctctccacctggaatagatgttaaggctgttgaatctcctgctaagactgaaaatcatgaagtgaggactacagataaaggtggtgatggtgacaagtcggtcacaaaacagccagttgatatcaagattgacgcaaaattgaatatatatccatctactacaagtgaattacgtggtggagataaacaatctcatggtttgttaaagtcaacagatcagaagaatcgccagtgtctaccagataattcagaagccattgaccgatctggtgacagtgctgctgttaaattggatgtggagccttcattttcatcttcgaccgtggaggtgaataaggctgatggtttgctggttggtaacgcagtgctgagagaggatgaaaagaaggaacaaccttcttccacttcagctgatgctacaaaactagctgtaccagcaggtgtaccatttggtccagaaaatgggattagttctaaagaattaaaagacaattccagtgaatcaagtagtcatgcaagacctggaactactgtctcacaggatactgaacgtagtgcaaggcgcagctcaaagaagtcgagtgatgatgcaagtgggaacgaggaccttgtctcatcagatgatggttcttcttttgctgccaagatcaggccaagtgctacagccaagcttgattttgacttgaatgaaggaatacctggagacgacgtgcatcagtctgaggcagaaacctctcctgctgtgtgttcttctgcaattaatttaccttgtctttctccatttatatcacctatgtcaagtgggctacctgctccgataaaagtagctgctacagctaaaggtccctttgttcctcctgagaacctactaagatttcagcctgagactggctggaaaggttcagcagccacaagtgcatttcgtcctgcagaaccaaggaaaatttttgagatgactctcagcgcacctggcattccagtttctgatgctgcagataaacaccgcccagcacttgacattgacttaaatgtagcagatgagcaatttcttgaggaagatatctctcagagttctgttcagacaactggttcggaatctggcaacactagaagaagcaatggtcctgtacgaagtgttggtattgaacttgatttgaacagagctgatgaagttgcagagaaccattttgtgtcgaacactccccacagggtcgaagtcccattgttatcgtcaagaccgttacctgcaattttctctagtgctgatacaaatggctcaagggattttgatctcaataatggaccaactctagatgaaactggcacggaacatgcagcaaggagtctatcatctaaaaataccagcagtataccattcatacctcaagttgctggcggtagaatgaacagtgccgagatgagtaatatctctccatggtttgcttctgcacacccttatgctcctgtagctgcacagccatttttaccatctagaggagaacagcctcacccagttgagacagctgctggaagtggaacccagaggatcattacatccttggcagatggtgtccagcgtggaagtgatccctgccgtgctccagttatttctacttcaccaaccatggtttttcatcctcctgcgtatcaatatgcaggattcccttttactcctggtgtgcaccttcaagcaccggggttttcaattggctcgacatcttatgccaattcagcacctgcaggagttccatattttcctagcattgctccaacactgttagggccagcaggtgcattacctgctcaacatactaggcaatatgcaataaaccttcctgaaggaagcagcactgttggacacgacagtaatcggaaatggggaaggcagggccttgatcttaattctggccctggaagtgtagatgcagaaataaaggacgaacgagtatctttaccagttagacaaaatttaatcacgccaccacatgcctttggggaagagcatacaagaatgtaccaaatgccaagtgttggaataaagaggaaggaaccagaaggcagttgggatgcagaacgttcttcatacaagcaattatcatggcaatga

SEQ ID NO: 11348 - DNA, 2163 bp, Oryza sativa
  Clone ID: TFbOSC420016j.C1.o9.fg
atggagtcgggaggcggaagccacgtcgcggagatgccgcgcgtccccaagtccgcgaggggcaagagatcaattcggaagaaggagagccagggtcaggtgatgtgcgcgttcgacctgctcgcgactgtggccggaaagctgcttgatgagggggagggttctctggggaacgcgagctcaggcaccccggccgtggacgcgtcgcccaaggatgtccgcgtgaagcaggagcagtgcgatgaggaggcgaagcatttcaagaatgaggtgatggatcaggatagctgcaatgagagtgcattggtctcccacattgcgtttcagcggccggtgaatcaccatgggcggaagggggaagatccggaggggagtcatgctgtgattgaggaccccaaggccaagtccgaggcactggacaaggaatcctcaatgataagctgcaccaaggctgaattgggttgtaattttgcagcgatcgctgataggtggtcgcctgaatccgtggagtcaggggccttcactggggatgcagctgcaattgcgatgccggctaccacatcaggcttccacaagaatgctccagatatgtataatctgctcgatccaatggatgtggatgtaaagccgcctcctttggtcagctctgacagcaccggcgaaatgccgttgtatggcaataaaattcgccgatcgacctctttcccgagggtccccaagggaggggcggggtttactgtagatagagatgaagatgatgatgataaatcttccgggtgcactcatccgagcaccgctactaacaggggtttcaggcccaattgtacagctggtcatagtagggtaaagaagttgctcgcctgtaagcacaggaaagttgctccagccaggatgcacaaaggagatctttcctatagtggtgagcattgtgagatcccattcaccttttccttttttgaggagcactgcattgatggcactcatattcaaacctgcttactctattcttacttgagttcgttgatcctgctagatgttgaccggaagccttctttccgcaacaagaaaatgtattatacacgacaaaggacacaaaggagcacattcaagcggaggaagatgtttgatcgtcattcagcccaagtttctgaagaatatgcaaaggcaaacacaaagtttgctgcaagagactcgcacgcggtttctttggaagcaaacaaggggaccaattcaacagcattccagaaatcacaagagtcaagtgactgccacgtaaaacttaggatcaagtctttcaaggtgcctgaacttctaattgagatcccagaaactgcgactgttggttcactgaagaaaactgttctggaggcagtaaatgccatacttggaggtggtctgcgtgtcggtgtgctccatcatgggaagaaagtcagagatgataataaaaccttaatgcaggctgggatttctcatgatgaggtactggacaacctgggtttttctcttgaacccaattgtgcaccgcatccgtcacaactctcacctcccgaagataatgaattcatggaaactgttgatactactgaacccctagctaggattgcacctgctgactcatcttccaagcatggtgaagttgatgcttcacaggagcttgcattggcacccttatcagcaaactaccaagggagtgatcatgactttgtgcactctcctgggggcatgtcttcacctgataaggcatccacaaactcgcgagctattgttccagttactcctgcagattccaatgctggggctatagttccagcaaacaaagcaaagaggtcacctgaacaagggcaacgccgaatcaggcgtccgttctctgttgccgaagtggaagcccttgtgcttgcagttgaaaagcttggaaccggaagatggcgagatgtcaaacttcgggcctttgataatgcaaagcaccggacttacgttgatcttaaggacaaatggaagacgctcgtgcacacggcgagcatctcgccccagcagcggcgtggcgagccggtgccacaggagctgctcgacagggtcctggcggctcaggcctattggtctcagcagcaagccaagctccagcctaagacgcccccgctggctgaggctctcctgctcacctaa

SEQ ID NO: 11349 - DNA, 1976 bp, Oryza sativa
  Clone ID: TFbOSC400887j.C1.o25.fg
atggtgttgcagaagaggttggactatggatcccatggccatcgtgctcccattaagccacgtgtcgcaacattggcgccggttaaacgctccacaagaataaggaaaaagcagatgtatgcacttgatttgcttgcgacagctgcagaaaaattgttggctgatcaagacaatttatctagtggacctaacataaatgaaacaccagaaggttatgttacaagcatgaaaccagttaaagcagaacagtttgatgaagcgtttccgttgagaagcgtggctgtgaaaaaagatgactgcaaaggttgtacagtaggctgtgcaggcatctgtggctttctcagacaagctaatatgtgcttggctgaaaactcgtcgactcaaaatctagctgattcagtactagagtcactaacagcaaagcctgatgtgttggctaaggactcatttgttagcagtaaaaaatcatgtcgattgggttttggtcttggcacaattccggagtatggatctgttggagtatgccaaccttggtccacaagatcagcagaggttaaacaagtgcatcgggcgagaccaacagcaatcagaagtcaagaagatagtgatgctgcagctctatgtgctttggtcgagaccatggatttggacaccaaacctcttgctgaggctagctctggtagtaactcaggagtgcacatctgcggccctgacagggggcataactcccatccctcgtgtttggctaaagtgcagcatgctgcagacagagatgatgacgaaaattcttctgggtgtgtacatccaagcacctcaggaaataaccgtggttatattccacattatataggtgaccgcaggataaggagattgtttgcctccaggttaaggaaggcagctcgcaacaggatatgtggagagatgtcttgtaaaggtaacaagctgagtttgtgtgaaaagaagatgcccactacgcgccgaagagtgcaacaaacaactttgaagaggaaaagacttgctcaactttactccgaaaaatcatctgatgaagtcaagttaaccatcaaatctttcaacatccctgaactactaattgagatccctgaaaatgcaacagttggttcattgaagaaaactgtgtcagatgctgttactactataattgaacgcggtctccgtgtcggtatacttcttcaaggaaaaaatattcaaaatgacaacaagacgcttcgtcaggctgggatttgccgtggtaaaaaactaaatgacataggctttactctggaatgtgaagctgggcaagattctcaccctggtgtaatagtgccagaagaaatggattttgttggtgcatctgttgtggacaagtctgctacaagtttcggaaactacacgaccatagatttttgctgtatgtggtcatctaagggttttaatattccatttccagggtgaaatgcgaagaacctgctgagaaccagcagcttatgcaagattttccaggctgcagcttgagtgatcctggttctgttgattatcccgtggaatggagcacacaagaaacatcagcaagctcccaagccatcgtcccttttgcagatccaaactcactggcgctggccaatgtgccgctttctaggtcaaagcgaccagattttgggcaaagacggataaggaggcctttcactgttgctgaagtggagttgctggtggaagccgtcgagcaccttggaacaggaaggtggagggacgtcaaattccgcgcatttgaaaatgttcatcataggacctatgttgatctgaaggacaagtggaagaccctggtgcacacggcgagcatagcgccgcagcaaagaaggggagctccagttccacaggaactcctggaccgtgtgctcgccgcacaggcctactggtcggagcagcaggcaaagctccatggcgatccccctgttcctgaaatctgccctacctga

SEQ ID NO: 11350 - DNA, 94 bp, Oryza sativa
  Clone ID: TFbOSC24168j.C1.o1.gm
aatatgaatgagcatcctgatgcttggccattcaaagagccagtggattcacgtgatgttcctgactattatgacattatcaaagatcctattg

SEQ ID NO: 11351 - DNA, 1677 bp, Oryza sativa
  Clone ID: TFbOSC19148j.C1.o1.fg
atgtctggaaaagggaagaggcgaagtgctagattactgaagcttgaagagcagaagaacgatgacactactgccactggttgtctcctagatccttggcagataatccgaaacagcattgctggtgttcgagggaagagaaaaaggaatgaagaaatccagcatttgcagggagaagcttcttctagccaagcactgtgtgcaacaaccgatatcaataatttgtcaagcaaaagttcagcagtacaaatcattgagtacattcttgatacactagagatgagagacactcatgagttatttgcaatgcctgatgacatccaagtaactgattatgcagaacgggtgaacaggcccggtgactttgcaacattaaggcagaagaacaaggatggcatgtacaacacactggagcaattcgagaatgatgtttacatggtgttccagaaagcaatgtccataaacagcgaggacactataccttacagagaggcaatgtcactgctacatcaagccaagcaggtattcctgtccctgaagagcaaccagatgtactcggagtcagagctcgcagcgtggcgccagaaaaatctggtgagccagtcgccggccaagctaaacgggaaattcgatggcagcaaagtaggctccggctccggcgccggcggcgccgctccgaccacaccacagcggccgagcgcgccggcgaggaagaagatcgccgccaaaaccggcgctgtcgccgccgccacctcggttaagagcacaacgaggcagcgggcagcgagggagagcaacggtgcgccgggaagaagagcaagaaaagctgcatcggtgacgccggggacggcggagcacggtggcgccggcgccagcgccaccgtggagcagagacggttagcctacgccgacgaggctgatcacggcggctggcggccagtgcccgtcgtctccactggccagcacgccactctcgtttaccggccgcagacggcggcgcacacgtaccaggatagcctccggcgattcgtccggcacgccgggcttaaggcgcgcgtcgccgccgagttcaggaacctcgagtgcgacgtacgggccaggcaggcccgcccggcgccgggctactgccgaactgtggtttcgcttccagctccggcgccggcacggccagcaggtcgttcctcccgcaacggccgctgcccgccgccgtctcctccgagcgcggcgttcggaggcggcggcgctgccgctgcatcatctgccgacgctgccggcaacaaggcgccaccgcggtgcaggctgaagacggacgaggtgctcaagctcctcgtgctgatcggcaggccggcgttcatggagagagccaggagagtgctcggccatgagcgccaggagagcagctcaaagcagggacacgatcagaaaccagctgtgaccagagccggtgacgacgacggcggcgcgaaggccggcgtaacggcggccaagccagggaagaagaagggcagtgccagcaagccagccgccgtcgagttcgggccattcgcgccgcccaagctggtcatccccggccggcagctgggcttcagccagttcgccggctcgtcctcccaaccgttcaaagtgacgcctaccactccaaatgttcctgacaagaagaagaagaaacgaggttga

SEQ ID NO: 11352 - DNA, 6702 bp, Oryza sativa
  Clone ID: TFbOSC401731j.C1.o13.fg
atgcagcccggcgaggcacccccctcctccgggggctcgccggcgacgtcgccgcggccgccgccggcggtggcgcaggggcagcagcagctagggtttaggaatcaggcaatgatgcatcaccatgatcagcagcagcagcagcagcaagggtacccatcgggcgcgccgcatggtatgatgggaggtggtggcagcagtagtttccctccgtcctcaggcccaatgcccccgttccagggccagaggaacatgccgctacccggtggaccgcagggtctggctggaggccagcagcataacccgacggcgatgcagcaagcatacctgcagtacatgatgcagcagcagcagcagaaggcccatgggatgctcctccagcagcaacagcaggccaagatgaatatggcagggccatctacaagggaccaggatgtggctgccaacactgcaaaaatgcaggagcttatgtcccttcaggctcaggcccaggcccagatgttcaagagacaacaatctgagcatcttcaacaggcagagaagcaggcggagcaagggcagccgagcaatagcgagcaaaggagtggtgatatgaggccaccttcgatgccaccacaaggggtccctgggcagcagttgtcatcggcgggtatggtgaggccgatgcagccaatgcaagggcaagctggcatgagcaatgctggagctaacccgatggcaatggcccaacttcaagctatccaggcctgggccaaagagcacaatgttgacctgtccaatcctgcaaatgtgactctcatttctcaaatcctaccaatgttgcagtcaaacagaatggctgccatgcagaagcagaatgaggtaggcatggcgtcacagcagcagtctgtaccctcacagatgaacaatgatgcaccaggacatagtaattttcctagtcagggtgccccatcgaagccccgacagcctcttccaccaagcacctctgtttctggtggggcagagcctaagatgatgaatatgagcaacatgcagatgcaacaacagttagcagctcataacagagatagctcgaatgacagggctgcgaggccagccatgtcaatgggcaatggtggacaaatgatgcatatgccccaaagttctggacatgcaaacaagattcctgagcagcccaatccaaaaaatgcaaattccgaagcaatgcagatgcaatatgcaagacagttgcagcaggctaaccgagctactgccccttcagcaaattctggtgaaacaggaggatcacaggccccaaatcaagctgcccgaccacctatgggtttcaccaaacatcagcttcatgtacttaaagctcagatattagcttttcggcgtctgaagcgtggtgataagaagctaccaccagaagttcttgatttaatcatgtctggaccaccacctgattcacaagcgcagcaggtttctggacctccagtaacaaaccgtgaaagatctgctacaagcagcgctgatgaacatggaagacctgtggagagtggtggtatagctcctgaaagatcttccctgttgaaggcgccctgtttaccaaaggtggaggtttctgctccagaagacaaaactattcctgctagtggtcccatgcaagtgatgaaagcttcacccaaggaacctcttagaattggaccagtttcaatgcctgaacaaaccaacaccaccctgattaaatctgagcaggatccagaaaggggtatccagagaacacctgggagaagtgattacaatggtgaaagggggaaatctttgccagcagaaagtggttcagcagacgctgagcaggcaaaaagagctgcctcatcaagtagcgtgcctactcccaacagagatgtttcaagaaaataccatgggccactatttgactttccatcctttaccaggaaacatgattccatggtgtctgcaaattacaacagtaatctagcactcggttatgacgtgaaggatttgttagctcaggaaggcatgatagttcttggcaagaaacgggaggataatttaaaaaagatcagtggcttgcttgcaattaatctagagaggaaaaggatccaaccagatcttgttttaaggctgcagattgaagaaaagaagctgaaactccttgaatttcaggctcgtatgagggatgaagttgaacaggagcaacaagaaataatggcaatgcctgatagggtgtacagaaagtttgtcagacaatgtgaacgccagcgtgttgagcttacaaggcaagttcagcagatgcagaaagcctcaagagaaaagcagctcaaatccattttccagtggcgcaagaagcttttggaggcacactgggccattcgtgatgcacggattactcgtaaccgaggggtagccaagtaccatgaaaggatgctgagggaattctcaaagaaaaaggatgatgatcgaaacaaaagaatggaggcactgaaaaacaatgacgtggaaagatatcgtcaaatattattggaacaacaaaccagtgttcctggcgatgcagctcaaagatacaatgttctatcttctttcttgacccagactgaggagtatctctataaacttggagggaaaataactgctgccaagaatcatcagcaagttgaagaggcggcaaatgctgctgctgctgctgcccgagcacagggtctttctgaagaagaagtgaaggctgctgcacaatgtgctggtcaggaggttatgataaggaacacattctctgaaatgaatgcgcccagggaaaacacatctgttaataagtactacacattggctcatgctgtgaatgagagagttacaaggcagccctcactgctgcgagcaggaacgttaagggactaccagctggtgggccttcaatggatgctttccttgtacaataataagttgaatggtattttggctgatgagatgggtcttggcaagaccgtacaggttatgtctctgattgcatacttgatggaatttaaagggaattatggaccacatctcataattgtaccgaatgctgtcttggtcaactggaaggaggttctggctgtgaaattcaatgttcttgtaacaacatatgaatttgttatgtatgaccgttccaagctttcaagaattgattggaagtacattattattgatgaggcccaacggatgaaggacagagagtcagtcttggcgcgagatcttgatcgttatcgttgccaacggcgtttgcttctcactggcactcctctacagaatgatcttaaggagctttggtccctcctaaatttgttgctaccagaagtatttgacaaccgtaaggcatttcaagattggttctcaaaaccttttcagagagatgttcctacacatagtgaagaagaagatgattggctggaaactgagaaaaaagtaattattattcataggctgcatcaaattttggaaccttttatgctacgaaggcgtgttgaagatgttgaaggctcacttccaagaaaggtcgattgttctgcccttgtcacactcagtgatgctatttgtcactcagctctttttgtttgctacattgttaactcgtcatgtcatttgcaggagtcaattgttttgaggtgcagaatgtctggtattcaaggtgctatatatgattggataaaatccactggcaccatcagggttgatcctgaagatgagaaagcacgtattcagaggaatgcaatgtaccaggctaagacatataagaatctcaataacaaatgcatggagctgaggaaagtttgcaaccatccattgctgtcatatccttttatgaattactatggaaaagattttataatcagatcttgtgggaagttgtggaatcttgataggattttaattaagcttcataggtcaggtcaccgtgtactccttttcagcactatgacaaaacttcttgacatcctggaagaatatttgcaatggaggcaacttgtttacagaagaattgatggaacaactagcttggaagatcgtgaatcagcaattgttgacttcaacaggcctaattctgattgttttatattcttgcttagtattcgggctgctggcaggggtctgaatcttcagagtgcagacactgttgtaatttatgaccctgatccgaatccacaaaatgaagagcaagcagttgctagggcccatcgtatagggcagactagggatgtaaaagttatttacatggaggctgttgttgataacatctcaagttatcagaaagaggatgagttgaggaatgggggaagtggagatctggaggatgatcttgcgggaaaggacaggtacatgggttcaatagaaagtctcatccgcaataatatccaacagtacaaaattgacatggcagatgaagtcattaatgctggtcgatttgatcaaagaacaacccatgaggaaaggcggatgactttggaaacactcctgcatgatgaagagagatatcaagaaactgttcatgacgttccttcactacagcaagttaaccgcatgattgctcggactgaagaagaagttgagctatttgatcagatggatgaagaatttgattggacaggagatatgatgaaacacaatcaagctcccaagtggctccgtgttagctccacggagcttgatgctgttgttgcgagtttatccaaaaagcccttgagaaatatggcggctgggggaatttctcttgacactaatgaaaaacttgagaaacgaagggggcgacctaaggggtctgggaagtactccatctacagggagattgatgatgacgattttgaggaatctgatgatgattctgaagagaggaatacctcatctctgcctgaagaaggggaaataggagaatttgaagatgaagaggacaatgatgattcagtgcctgataataaggatcaatcagaggaagaagagcctatcaatgatgaagggtatgatttttcacatgggatgggacgcagaaaagcccatagatctgaagaagctggttcaacaggatcttcatctggtggccgtagattgccaccacctgcaccttcctcctcttcaaaaaaattgcggtctttgtctgcattagattcccgcccgggtgctttgtcaaagagaactgcagatgacctagaggaaggagaaattgcattatcaggggattcacatctggatctccagcagtcaggcagctggaatcatgaacgagatgatggtgaggatgaacaggtagtacagccaaaaataaagcgcaagcggagtatccgtattcgtccaagacctaatgcagaaaaactggatgatagatccggtgatgggaccgtccctcaacgtggtgttcatcttgcatttcaaggagatggtgattatgattcacaatttaagtctgagcaagcctttgctgatcctgcttccaggcagcaagacacagttcatcggacagtaaaacaaaagcgtaacatgccatctagaaaggctccccctgccactaaggctgggaaaatgactcagctgtctggatctggtgagggatctgctgaacattctaaggaaaattggagtaacaaggtgatagaatctgctggtccaaattcaagtggaacaaagatgtctgacagtatgcaaagaaaggtaaatctcgactgctatctgcttgcattagcaaaagagccaagtatgacgccgcttatttcatgtggtgttttcacattgttctacaatcataacaactgcaagaacgtgataaacaagctttggaggaggattgacaaagagggtcatcaaatcataccaaatatatcttcttggtggcgtaggaacgagaattcctcattcaaaggtttggctagcagcacccttgatctacagaaaattgaacaacgagttgatggatttgagtatggcggtgtgaatgaattcatagctgacatgcagcagatgctgaaaagtgtggttcaacatttcagctataggcatgaggtccgagtagaagctgagaccctccacaacttatttttcaatataatgaagattgcctttccggactcagacttcagagaagctaagggtgctatgtcattttcgaatcctggaggaggtgcaagtggctctgctgcgcaatcaacaaagcaatctgcttcaggccagaaacgtcgttcaagcaccagtgaagcggagcagcatggttcaagcactagcagacacaatcagcatgcaccagttggtgaggtttcaggccgggcccacacttcaaaatctgagaaggactcccggcattctggaccaggtagcagggaacagttcacggatagcgcagggctgttcaggcaccctacagatatgttcatagttaagaagaagagagatcgaaggccgagcctggggtctccatccagttcaggccgaactggaccgctctccccgaccaacgccgggcggatgggaccggcgccatcacctagaggtgccaggacgcccttccaaagagatccacacccttctcagcagtctatgcattcagctggatggggtgctcattctgtgcagcaatctgatcgtggggggagttcatcacccggcattggagacatccagtgggctaaacctaccaagagatcgaggactgatagtggcaaaagacggccaagccatatgtga

SEQ ID NO: 11353 - DNA, 6633 bp, Oryza sativa
  Clone ID: TFbOSC411283j.C1.o10.fg
atggcgttgggattcgaattttttttgtgtggtttgggggcaatgatgcatcaccatgatcagcagcagcagcagcagcaagggtacccatcgggcgcgccgcatggtatgatgggaggtggtggcagcagtagtttccctccgtcctcaggcccaatgcccccgttccagggccagaggaacatgccgctacccggtggaccgcagggtctggctggaggccagcagcataacccgacggcgatgcagcaagcatacctgcagtacatgatgcagcagcagcagcagaaggcccatgggatgctcctccagcagcaacagcaggccaagatgaatatggcagggccatctacaagggaccaggatgtggctgccaacactgcaaaaatgcaggagcttatgtcccttcaggctcaggcccaggcccagatgttcaagagacaacaatctgagcatcttcaacaggcagagaagcaggcggagcaagggcagccgagcaatagcgagcaaaggagtggtgatatgaggccaccttcgatgccaccacaaggggtccctgggcagcagttgtcatcggcgggtatggtgaggccgatgcagccaatgcaagggcaagctggcatgagcaatgctggagctaacccgatggcaatggcccaacttcaagctatccaggcctgggccaaagagcacaatgttgacctgtccaatcctgcaaatgtgactctcatttctcaaatcctaccaatgttgcagtcaaacagaatggctgccatgcagaagcagaatgaggtaggcatggcgtcacagcagcagtctgtaccctcacagatgaacaatgatgcaccaggacatagtaattttcctagtcagggtgccccatcgaagccccgacagcctcttccaccaagcacctctgtttctggtggggcagagcctaagatgatgaatatgagcaacatgcagatgcaacaacagttagcagctcataacagagatagctcgaatgacagggctgcgaggccagccatgtcaatgggcaatggtggacaaatgatgcatatgccccaaagttctggacatgcaaacaagattcctgagcagcccaatccaaaaaatgcaaattccgaagcaatgcagatgcaatatgcaagacagttgcagcaggctaaccgagctactgccccttcagcaaattctggtgaaacaggaggatcacaggccccaaatcaagctgcccgaccacctatgggtttcaccaaacatcagcttcatgtacttaaagctcagatattagcttttcggcgtctgaagcgtggtgataagaagctaccaccagaagttcttgatttaatcatgtctggaccaccacctgattcacaagcgcagcaggtttctggacctccagtaacaaaccgtgaaagatctgctacaagcagcgctgatgaacatggaagacctgtggagagtggtggtatagctcctgaaagatcttccctgttgaaggcgccctgtttaccaaaggtggaggtttctgctccagaagacaaaactattcctgctagtggtcccatgcaagtgatgaaagcttcacccaaggaacctcttagaattggaccagtttcaatgcctgaacaaaccaacaccaccctgattaaatctgagcaggatccagaaaggggtatccagagaacacctgggagaagtgattacaatggtgaaagggggaaatctttgccagcagaaagtggttcagcagacgctgagcaggcaaaaagagctgcctcatcaagtagcgtgcctactcccaacagagatgtttcaagaaaataccatgggccactatttgactttccatcctttaccaggaaacatgattccatggtgtctgcaaattacaacagtaatctagcactcggttatgacgtgaaggatttgttagctcaggaaggcatgatagttcttggcaagaaacgggaggataatttaaaaaagatcagtggcttgcttgcaattaatctagagaggaaaaggatccaaccagatcttgttttaaggctgcagattgaagaaaagaagctgaaactccttgaatttcaggctcgtatgagggatgaagttgaacaggagcaacaagaaataatggcaatgcctgatagggtgtacagaaagtttgtcagacaatgtgaacgccagcgtgttgagcttacaaggcaagttcagcagatgcagaaagcctcaagagaaaagcagctcaaatccattttccagtggcgcaagaagcttttggaggcacactgggccattcgtgatgcacggattactcgtaaccgaggggtagccaagtaccatgaaaggatgctgagggaattctcaaagaaaaaggatgatgatcgaaacaaaagaatggaggcactgaaaaacaatgacgtggaaagatatcgtcaaatattattggaacaacaaaccagtgttcctggcgatgcagctcaaagatacaatgttctatcttctttcttgacccagactgaggagtatctctataaacttggagggaaaataactgctgccaagaatcatcagcaagttgaagaggcggcaaatgctgctgctgctgctgcccgagcacagggtctttctgaagaagaagtgaaggctgctgcacaatgtgctggtcaggaggttatgataaggaacacattctctgaaatgaatgcgcccagggaaaacacatctgttaataagtactacacattggctcatgctgtgaatgagagagttacaaggcagccctcactgctgcgagcaggaacgttaagggactaccagctggtgggccttcaatggatgctttccttgtacaataataagttgaatggtattttggctgatgagatgggtcttggcaagaccgtacaggttatgtctctgattgcatacttgatggaatttaaagggaattatggaccacatctcataattgtaccgaatgctgtcttggtcaactggaaggaggttctggctgtgaaattcaatgttcttgtaacaacatatgaatttgttatgtatgaccgttccaagctttcaagaattgattggaagtacattattattgatgaggcccaacggatgaaggacagagagtcagtcttggcgcgagatcttgatcgttatcgttgccaacggcgtttgcttctcactggcactcctctacagaatgatcttaaggagctttggtccctcctaaatttgttgctaccagaagtatttgacaaccgtaaggcatttcaagattggttctcaaaaccttttcagagagatgttcctacacatagtgaagaagaagatgattggctggaaactgagaaaaaagtaattattattcataggctgcatcaaattttggaaccttttatgctacgaaggcgtgttgaagatgttgaaggctcacttccaagaaaggtcgattgttctgcccttgtcacactcagtgatgctatttgtcactcagctctttttgtttgctacattgttaactcgtcatgtcatttgcaggagtcaattgttttgaggtgcagaatgtctggtattcaaggtgctatatatgattggataaaatccactggcaccatcagggttgatcctgaagatgagaaagcacgtattcagaggaatgcaatgtaccaggctaagacatataagaatctcaataacaaatgcatggagctgaggaaagtttgcaaccatccattgctgtcatatccttttatgaattactatggaaaagattttataatcagatcttgtgggaagttgtggaatcttgataggattttaattaagcttcataggtcaggtcaccgtgtactccttttcagcactatgacaaaacttcttgacatcctggaagaatatttgcaatggaggcaacttgtttacagaagaattgatggaacaactagcttggaagatcgtgaatcagcaattgttgacttcaacaggcctaattctgattgttttatattcttgcttagtattcgggctgctggcaggggtctgaatcttcagagtgcagacactgttgtaatttatgaccctgatccgaatccacaaaatgaagagcaagcagttgctagggcccatcgtatagggcagactagggatgtaaaagttatttacatggaggctgttgttgataacatctcaagttatcagaaagaggatgagttgaggaatgggggaagtggagatctggaggatgatcttgcgggaaaggacaggtacatgggttcaatagaaagtctcatccgcaataatatccaacagtacaaaattgacatggcagatgaagtcattaatgctggtcgatttgatcaaagaacaacccatgaggaaaggcggatgactttggaaacactcctgcatgatgaagagagatatcaagaaactgttcatgacgttccttcactacagcaagttaaccgcatgattgctcggactgaagaagaagttgagctatttgatcagatggatgaagaatttgattggacaggagatatgatgaaacacaatcaagctcccaagtggctccgtgttagctccacggagcttgatgctgttgttgcgagtttatccaaaaagcccttgagaaatatggcggctgggggaatttctcttgacactaatgaaaaacttgagaaacgaagggggcgacctaaggggtctgggaagtactccatctacagggagattgatgatgacgattttgaggaatctgatgatgattctgaagagaggaatacctcatctctgcctgaagaaggggaaataggagaatttgaagatgaagaggacaatgatgattcagtgcctgataataaggatcaatcagaggaagaagagcctatcaatgatgaagggtatgatttttcacatgggatgggacgcagaaaagcccatagatctgaagaagctggttcaacaggatcttcatctggtggccgtagattgccaccacctgcaccttcctcctcttcaaaaaaattgcggtctttgtctgcattagattcccgcccgggtgctttgtcaaagagaactgcagatgacctagaggaaggagaaattgcattatcaggggattcacatctggatctccagcagtcaggcagctggaatcatgaacgagatgatggtgaggatgaacaggtagtacagccaaaaataaagcgcaagcggagtatccgtattcgtccaagacctaatgcagaaaaactggatgatagatccggtgatgggaccgtccctcaacgtggtgttcatcttgcatttcaaggagatggtgattatgattcacaatttaagtctgagcaagcctttgctgatcctgcttccaggcagcaagacacagttcatcggacagtaaaacaaaagcgtaacatgccatctagaaaggctccccctgccactaaggctgggaaaatgactcagctgtctggatctggtgagggatctgctgaacattctaaggaaaattggagtaacaaggtgatagaatctgctggtccaaattcaagtggaacaaagatgtctgacagtatgcaaagaaaggtaaatctcgactgctatctgcttgcattagcaaaagagccaagtatgacgccgcttatttcatgtggtgttttcacattgttctacaatcataacaactgcaagaacgtgataaacaagctttggaggaggattgacaaagagggtcatcaaatcataccaaatatatcttcttggtggcgtaggaacgagaattcctcattcaaaggtttggctagcagcacccttgatctacagaaaattgaacaacgagttgatggatttgagtatggcggtgtgaatgaattcatagctgacatgcagcagatgctgaaaagtgtggttcaacatttcagctataggcatgaggtccgagtagaagctgagaccctccacaacttatttttcaatataatgaagattgcctttccggactcagacttcagagaagctaagggtgctatgtcattttcgaatcctggaggaggtgcaagtggctctgctgcgcaatcaacaaagcaatctgcttcaggccagaaacgtcgttcaagcaccagtgaagcggagcagcatggttcaagcactagcagacacaatcagcatgcaccagttggtgaggtttcaggccgggcccacacttcaaaatctgagaaggactcccggcattctggaccaggtagcagggaacagttcacggatagcgcagggctgttcaggcaccctacagatatgttcatagttaagaagaagagagatcgaaggccgagcctggggtctccatccagttcaggccgaactggaccgctctccccgaccaacgccgggcggatgggaccggcgccatcacctagaggtgccaggacgcccttccaaagagatccacacccttctcagcagtctatgcattcagctggatggggtgctcattctgtgcagcaatctgatcgtggggggagttcatcacccggcattggagacatccagtgggctaaacctaccaagagatcgaggactgatagtggcaaaagacggccaagccatatgtga

SEQ ID NO: 11354 - DNA, 1312 bp, Oryza sativa
  Clone ID: TFbOSC11640j.C1.o1.fg
cggcggcagcttgcgtcggagctcgaccaggtgcgtgggctttccaagcggctgaaggcggccgctgaggccatcgcggctgagtctgcagcggcccttgctttgcctgtggtggtgccgccgcctcagcttcctgttgggtatgcgcactcgcagttcgcactcgctgatcctgtgacgcccatacctggtcaagttgctggtgctattgttccggtccgctcagtgatgcagcgcgggccactaaccgtgtcagtgactcacacagagtccttcgagaaggagaagcggacaccaaaggcgaatcagttgtatcaaaattcagagttcttgcttgccaaggataagtttccgccttcagattcacatggtcgtaagaaacccaagcaccacaagaagaagcatcgttccttagcatctcatggtgctggttatgatgctgagcagaggctatactctcatgcttttaagaaatctatgtcgctgctttctaggctaatgaagcacaaatttggttgggtgtttaacaagcctgtagatgctgttgcgcttggtttgcatgattattttgctattatcaagcacccaatggatcttggcacgataaagacccgactcacgcatggccagtacaggaacccgagggagtttgctgatgatgtacggctgacgttccataatgccatgacctataatcccaaggggcaggatgtgcatttcatggctgagcagttgttgggaatctttgaggcgcagtggcccgaaattgaggctgaggttcagtaccttgcctcatgtccgccattgccaaataagtttccacctccaccaattgacgtgcgcttccttgatcggtcagattctgtaaaacaccatatggtgttggactccaagtcaaggccattaagtcatactcccacttatagtgccaggactccatcgatgaagaaaccaaaggccaaggatccggataagagagatatgacaatagatgagaagcggaagcttagtaacaaccttcagaatttgccaccggagaagcttgatgttgttgtgcagatcattaagaacaagaatctgtctgttagacagcatgatgatgagattgaggttgaaatagatagcatggatactgagacactttgggaacttgatagatttgtggccaactacaagaagaacctgagcaagcaaaagaggaaggctgagcgagccatgcttgcaaggcaggatgcagagttgcatgcacaacatgttgccccacaacaaccaagtcaagagcctaatattggtgtaaaatctccaaagcaaa

SEQ ID NO: 11355 - DNA, 1971 bp, Oryza sativa
  Clone ID: TFbOSC401036j.C1.o32.fg
atggcctcgtcccctcctggcgccggcgccggcggggaggagcggcccgcggcgagccccgcggccccggccgtggcggaggcggtggaggaggggccggtgacgtcgcggtgggcgccggagatcagggtgtaccggcgcaagtacccacgcaaaaaccctaaaccccctccgaaccctagccctagctccagccccctcgcgcaaaccctagcctcgattcggaggtcgattcgccgccccgaggatgggcctgcggcgcctcggcctgatccgcccgccgcgcccgcttcctccccccatccccctccgccgagcgccccggttgcccccgcgcagcagggggagcccgccgcgcccgcttccgacgacgtctccgcggggcctaatcgggacggcggggccgttcccaacggccatggagacgtccgggcggccgccgaggagaaggcgcggaagcggagggcgcggagcgagctgcggcggcagcttgcgtcggagctcgaccaggtgcgtgggctttccaagcggctgaaggcggccgctgaggccatcgcggctgagtctgcagcggcccttgctttgcctgtggtggtgccgccgcctcagcttcctgttgggtatgcgcactcgcagttcgcactcgctgatcctgtgacgcccatacctggtcaagttgctggtgctattgttccggtccgctcagtgatgcagcgcgggccactaaccgtgtcagtgactcacacagagtccttcgagaaggagaagcggacaccaaaggcgaatcagttgtatcaaaattcagagttcttgcttgccaaggataagtttccgccttcagattcacatggtcgtaagaaacccaagcaccacaagaagaagcatcgttccttagcatctcatggtgctggttatgatgctgagcagaggctatactctcatgcttttaagaaatctatgtcgctgctttctaggctaatgaagcacaaatttggttgggtgtttaacaagcctgtagatgctgttgcgcttggtttgcatgattattttgctattatcaagcacccaatggatcttggcacgataaagacccgactcacgcatggccagtacaggaacccgagggagtttgctgatgatgtacggctgacgttccataatgccatgacctataatcccaaggggcaggatgtgcatttcatggctgagcagttgttgggaatctttgaggcgcagtggcccgaaattgaggctgaggttcagtaccttgcctcatgtccgccattgccaaataagtttccacctccaccaattgacgtgcgcttccttgatcggtcagattctgtaaaacaccatatggtgttggactccaagtcaaggccattaagtcatactcccacttatagtgccaggactccatcgatgaagaaaccaaaggccaaggatccggataagagagatatgacaatagatgagaagcggaagcttagtaacaaccttcagaatttgccaccggagaagcttgatgttgttgtgcagatcattaagaacaagaatctgtctgttagacagcatgatgatgagattgaggttgaaatagatagcatggatactgagacactttgggaacttgatagatttgtggccaactacaagaagaacctgagcaagcaaaagaggaaggctgagcgagccatgcttgcaaggcaggatgcagagttgcatgcacaacatgttgccccacaacaaccaagtcaagagcctaatattggtgtaaaatctccaaagcaaaatttgattgtggatgagaaattagctacttctgtgccagaacaagctgataataatggacaaaatgcaagtagatcgagcagctctagcagctccagcagtgatacaggatcctcttctagtgactcagacagtgatagctcctcttcagatggatcagatgccgccaattcatcttga

SEQ ID NO: 11356 - DNA, 1371 bp, Oryza sativa
  Clone ID: TFbOSC400239j.C1.o45.fg
atggcctccgccctgctcgccggccggggcggggttaaccaccaccaccaccaccaccagtggggggagacccgtgccccgctcgcgcccgtggcccccaattccgatcccaaccaccctctccagcagcgcgccaacggctcggccacgaggccgccgccgtcaagctacgtggcgctgcggccgggggcaatggctcaccgcgaggcccgcgcgctgcgggaccgcctcgccggcgagcttggccaggtccgcgccctcatcgcccggatcgacacgtggcagcagggtcaggtgaagcgccatggctcgcctcgccgggacctccccacgccgccggcgaagctcagggcggcgatgcggaagcgttgcgagcagatcctggcgaagctgcggaaggacaagcggagcatctggttcaacgcccccgtcgaggtcgaccgcctcgggctccacgactaccacgcagtcatcaagtgccccatggatctcggcacggtgagggcgaacctcgccgccggaaggtacccctcacacgacgacttcgccgccgacgtccggctcacgttcagcaacgcgctgagatacaaccctgcggggcacgaggtccacaccttcgccggcgacctcctggcgtcctttgagaagatgtacaaggcatctatgtcttggttcgagcaggaactcaagctccttgagccgccgatgccagtgccgccaccggaattgccaccggcgacagctccggtgcaggtgaaaccaagggcagcgaatgtgaaaatgcggaagccgaaggcaagggagccgaacaagagggatatgacgctggaggagaagaacttgttgagggttgggttggagagcttgccagaggagaagatgcataatgtgctgcagattgtgcggaagaggaatggcaatcctgagctggttgggggtgagatcgagctggatattgatgagatggatgtcgagacacagtgggagcttgatcgattcgtcaacaacttcaagaaggcgctcaacaagagtcgacgggctgccattgttaatggtgaaaatgccgatgtcattgatgcttccgtggctaatgatagtgatatgctggtgaatggcagtaccgctacgatggtggacaacggtgatgtgacaatggcaatagagagcaaggatcctgacaagatcactacacaggccgagcagttggatgagtatgtagatatcggggatgaaatgccaacagcaacttaccaatcagtggagattgagaaggatactgaggccgcgagcagtgggtcctcatcatccagtgattcagggagctcaaaggacagtgtctcagaatctggcaatgcccattctctggtgtaa

SEQ ID NO: 11357 - DNA, 3720 bp, Oryza sativa
  Clone ID: TFbOSC400938j.C1.o9.fg
atgccgcggtcgccgtcgccgccgcctgacaggcaccaccaccaccaccacccggcgcgccggagggggcccgccggggcggcggcgccgccgccgcggtcgctgcggccgaggagggcggcggcgccgtcgtcgaggccgctggtggacgacttcttcccgttcccttcctcgccgtcgtcgtcgccgtcgaggccgccgccgccgcagcagcagcagcagcggaggccgtcgccggagccgtcgagctccgactcggacggccatggcggcggcggcgggggtgggggtgggggctcctcggcctctgaccgacggcggcggaagctcaagctcgtcgtgaagctctcacagctcgcccccgaccagaaccaccaccggcggggcccgcctcccccctcgtactcggactcctccggcggcgagcaggagcaggaggaggaggaggaggccggcggcaacggcggcgacgacgtcagcggcggcgaggagcgggtcaagccgcccaagaagcgccggatcgagccgcgcggcgacagatctcgccatcgggaggtgcggggagagaccgccaaccccaagctggttggtgggaggagcgacgccgccagcgcgccgaggacgaagcgcctcccggtgccagggatggcgaggacgacgccgctgcctgaccggaaggcgctggacatgattctcgacaagctgcagaagaaggatacttacggagtgttcgcggagcccgtcgatccggaggagttgcctgactaccatgatgtgattgagcacccaatggactttggcaccgtcaggaggaagcttgccaggaatgcatatcgctcgttcgagcaatttgagttacagcccaacagatgcaatggcatagcattatatcaaattaatcacaggtttacaattacatctgtagatttcgtctttctactggatgatgtattcttaatttgcagtaatgcgatgcagtacaatgcacctgatacaatctacttcagacaggcccattccatacatgaattggcaagaaaaaagtttcaggaactgagagatgaaggcattcccactgaaaacctaataaagagtgaacagaaaattagaccacaccctagcaatagagaaccaattaagaagcctgttttgaggtattcagatgatgatctaggcttcatgtcccacaaagagcaagttagtagaccaaattccaaagacttagaggatgatcgaaagttcaaagatcaagttaagaagacaatttcaaggaattctgaggatgtcttaagttcctctttccagaaagaacgagttaagaaatccagtgtcaggaattcagacgatgatttaagttcctccttccaaaaagaacaagttaagaggcccatttccagaaactcaggggatgatataagctcttcattccacaaggagcaaggaaggaaagtcatctccagaaattcagaaaatgatagagttgcatctttccacaaacagcatgacaagagacccacttcccggagttcaaaagatgaattgccatcgcagaaaaaacacataagaaagcctgtttgcacgaatggtgaagaaccagatttctcatcacaccgagattcagtagagaatccagtttgcacaaatggagaacatgtaggcgtcttgtccccgaaaaggctagttgagaagcccatttgccgaaatagagatgacctaggtcactcccacaaaaaagggttgaataataagtctatttgtggagatggacaggatgatatgggttactcctgcaatggagagactgttaagaagccagtgcgtatgaatagccaagatgctttgggttcagatgtttctgctgcaaccattgcttctgcaggagatgattctaatggtttaagcatgtcgcaggcaaatgctgttgagccccaagattgtattgcagccaacgggtttatggacaaagatatcagttccccacttgatgaaataagatctgagaagccagatgatatttcagctagggaaagttcagtgaagccaagctacaagtcaattgtagtagatgagacacgacgcaaaacatatgatacatatgaagaacagccttcatcggaatctgacacaattttcgacgtattctgtgaggagccaaaagagcttgttaatgttggacctcattctgagcactcatatgcaagaagtcttgctcgttttgctggctcacttggtactcaaggctggagacttgcttctgaacgcattcaacgggtattacccactgatgtaaagtttggacgtggttgggttggagaatacgagccaccattaccacctattctgtttgtgcaaaaccaaccgagaagtctggttagctcagaggctaatgtacaaaggagtgcttcaatgactaggaataatgaaaggatcagaccaacagaaagtgtcaatccaaaggatatgagtttgagtctacttaatcgaataaccactggtaataatgtggttggagttcctggccctcttgaaagtccagaaattaagccaagattattcggtgttacagctgagccccagcagaggagcactgaagcaccatctctgcatgaaaatcatcgggcgcctggaagtgttgcaaagaccaaaagggcacccagtgaacaaacaaggaaagggagctcgtcctccagttctcgccctcttcaaaagcaaccacagaggcctgaaatttcaaaaggagcttccaatgtgcttgatatgccttctttgaacaaaatgactggccagcccagacccttcttccaaccagcagaagcagctataactcagcaaatgagaaaaagcgagacacctaaaagttctcatccacttgaaatggcacaccagaggcttgagtgtgcaaaaggtgcttctggtgttcatgatatgccttccttaaacaatacaagtgggcagcctaaacccttcttccagtcgcaagaagcagctgttccacaacccagaaatgaaaatacatgggtataccatggacgacctggtgatgggaagtatgggacaaccgacaaaagcagaccaatgagcagcatgggttttatcactaaaaatcaacaagtaaatgcggccagctttgcaatgaatttgaacgggcaaaagaatgtcaatgacaatgtaaaatcagtgggatcaactgtaatgcctgtgcaggtaaatacaacaaacagagggcctgattcttcccggaatattttctcagcatttccaccagctgtcagggagaatcagagcattccatctgctccagtggctcaatcttggatctcatttggtgcttcgtcagagagcaaaccaaccattgtcagtccaactttccatgatagtaattctggctggaagatgccatttgcaaatgcccgtcctgatgaagcaaagatgactgctgttccacagttctttaggcaacccgttcagatggttagagaaagtccagggcaaaacaagggtttggtaatattcccccagttggtccagacagacttctcaagatcacagggccaaccacaatggcaaggcctggttcccccgatgcaacagaaaccaaacaaggatatgcttcgcccagacttgaacatcgggttcccttctcctggttcaccaccagctcgacagtcttcgggcatcaatttggaagcacaacagccagaccttgctttgcagttgtaa

SEQ ID NO: 11358 - DNA, 2254 bp, Oryza sativa
  Clone ID: TFbOSC24127j.C1.o1.fg
atggggaagacgcagaagttctccaaggggcacccgctcggcttcgtgccggattaccggcacggcgtggagacggtgggggagtcgaagggctgtatcgggagcccggagcggatcgtatcggggagctcgtgtgctgtgccgaagaggaaatgcggaatcctgaagacagaggatggaggggagcttccggggttcaatgtgccgcgggacgtcttcatgctgccgaggatgtcgccttcggataaaaaggacctcgagatgaggctccgcaaggagcttgagcaggttaaggccctacagagtaggctgtttttgaggccggctgcggtgagcatgaatggcggggcggcgtcagcttctggagacgtagttgcaaagagaaacgatgcgaagcttaaacggagcaattcagtgcagtctggcagaggagtgccaccatcagcagccacacctgtggtcaggtctgcaaactacgcagaagcttttaaacaatgtggcaaccttctgaagaacctcttcaagcatcagtgggctggtccgttccttgcgccggttgatgttgtacagttgaacattcctgattattttgacataatcaagaagccaatggatttgggtaccatcgagaaaaagttgaatgcaggcatgtactctacaccttgggattttgctgcagatgtgaggcttacttttgacaatgccgtgacttataacccagtcggtaatgacgtgaatttaatgggcaaagctttgacatgtatttttgaaactagatggaagtttatcgaaaagaagcttccttcactagatgatagattctctgtgagaagagagccatctcaaaagggtgcagttaagaaagataccattgagaaagattacccttctgagaaaaagcactcgacaaaaggtgtacacaagaaagatatgtttaaaaaagaggatgcttcaactaagccagctttgcaaccaaagaagagaaaagcttctcccttggttcagggttctcttgaaatacctgtagtagaagctgataaggtcattgatgatgctcaagtggtacagccttctaaggtgattgatgatgcccaagtggtgcaggcttttaaggtgattgatgatgctcaagtggtacaggcttctaaggagattatgacggacagacaaaagtatgagctaagcgtaagacttcaatcatatggtgggttgattccaaatcatgtagttgatttcataaggagccaccttcctgatgataatgagggtgatgaagatgagttagagcttgacatgaatgtcctaagtgatagtacattgtttgaacttcagaagcttcttgatgactatgatagggtaaatcagtcaggaaaccctacaaaagatgagcatcgtgaggttgagtttgaaagtgaatatgggcttagcaactcatcgatgcatcatgaagaaggtaatgagctcgttgaagaagatgttgatattggtgggaatgatcttccacctttgacgtatcctcctgcagtatttgaaagtgaaactgcagaaagaagcagcaagcatagcacttctagcagttctagtagtgattcagaatcatcctccagtgattcagattcaagtagctcttctggaagcgatctggatgtcaatgttcctccatcaacaagtggggccaaggacaacacgcaatctgcggttaggttggatcaggaaaacgatccactgagctcgaccaatctaccacaacaaagtagtgatcctgtacctatttctgccgaagatgagggggagaatgtgtctgagaaacaggtcccccctgcaaagcaataccgagctgctgttttgttaaaccgctttgctgatacaatttttaaggctcgtgagaaaactcttgatcagagagctcggatacaagctgaggcaaaagcagctgaagatgctcgcaagagagctgaggcagcagcagctgctgaggctgctgcagaagctaaacgccaaagagaacgtgagagggaagcggctcgtaaagccttgcaacagatggagaaaactgtagacatcaatgaagggaacctctttttgaaagatcttgaaatgcttggaactgttacatcaggtgaacagtttcccagctcggttggtgagacgagtccaactcatacgcctgaaggccttggatttcagctaggtagcaaccctttagaacagcttggtttgtatatgaaaaatgatgatgaagaggatgaggaag

SEQ ID NO: 11359 - DNA, 502 bp, Oryza sativa
  Clone ID: TFbOSC12766j.C1.o1.fg
gtaactgattatgcagaacgggtgaacaggcccggtgactttgcaacattaaggcagaagaacaaggatggcatgtacaacacactggagcaattcgagaatgatgtttacatggtgttccagaaagcaatgtccataaacagcgaggacactataccttacagagaggcaatgtcactgctacatcaagccaagcaggtattcctgtccctgaagagcaaccagatgtactcggagtcagagctcgcagcgtggcgccagaaaaatctggtgagccagtcgccggccaagctaaacgggaaattcgatggcagcaaagtaggctccggctccggcgccggcggcgccgctccgaccacaccacagcggccgagcgcgccggcgaggaagaagatcgccgccaaaaccggcgctgtcgccgccgccacctcggttaagagcacaacgaggcagcgggcagcgagggagagcaacggtgcgccgggaagaagagcaagaaaag

SEQ ID NO: 11360 - DNA, 1518 bp, Oryza sativa
  Clone ID: TFbOSC400795j.C1.o14.gm
atgggtgccgcgagcgagcgaaagtgcacggcgtgcggcggcaccggtggcgacgaagtgcagatcgacatcgatcggcgaagaacgtctcactggtgctcctcctggagtacatcatccgcccgcccgccccgaccccgttcctcgtcctcgcccgcgccgacgggctcgacgacaccaccggcgcccccggcgttccgcctcgagatgggcgtggtcggcctcgccgagaactaccacgcgtgcgtcggagggggcggctccgtgcttgaggtgtcgtaccacggcatggccgtcgccatgggccgcgtgccgcggttctgcgtccacgggaagcgggcgggcggcgagcgggccgacggcgtggccagcgcggaggcgacgtcggtgcgcgaggagctgcgcggcctgatccggagcgagcggcagatcgtgggggcggccgagttcagcgtggaaggggagatcaagggcttcggctatctccgctgcaaggcgctctgtgttgttggtcgccgtggcctcggccggcgcgagcggcaagtcggcgcggttcgagctgctccggccgacctgacgcgcatgcaccgggagcggatggcattcatctcgtcgcgcgggaggcgccgcgtggcggagaccgcgtccgccttcgtgatgctgctctcctccggcgtgtacaccgggacgggccagtcgcatcccgccacctccagccctactatgcctcgcccaaagcgccgccggtcgcccttgccgccgccggcgccgcctggcttccccacggagcggaaacaccatctgccggagctgcagcctccagcggtggccgcggcgtctcctggcgtcgctggagttcccgccgatcttggcgacgcgctcctgcgctgcggcaagctcctggacaagctcctggagcacgaggacgggtgggtcttcgccgagccggtggacgcgcgcgccctccgcctcgtcgactactacctgcgcatctccgaccccatggacctcggcaccgtccgccgccgcctcgagcgccgccgctacgcggacccgtgggcgttcgccgccgacgtccggctcaccttcaacaacgccatgtcctacaacagcgcgggcgaccccgtgtacgagagcgccgccgagctctccgaaatcttcgaggccgggtggccctccgttctcgcggcgccaccgcgcccgcccgacgccgagcgcaagcggaggctcagtggtttgctcccgcggctgccggtgggtgcacaggtgacggtggccgagatcatgaagaagcgggacgggtgcctgcgggaggtgaacgggatgatggaggtggacctggacagggcggactccgcgacgctggacgagctcgaccggatggtcgcggagcacggggccgccctcgccggcgtggttaaggtgaagcagggtgcgttggtgatcactgatcaggagcacaatgcaaatttcagtggatggactatcagtctattcacagttgggctcctaggatga

SEQ ID NO: 11361 - DNA, 1026 bp, Oryza sativa
  Clone ID: TFbOSC400239j.C1.o49.fg
atgcggaagcggtgcgaccagatcctggcgaagctgcggaaggacaagcggagcatctggttcaacgcccccgtggaggtcgaccgcctcggactccaagactaccacgccgtcatcaagtgccccatggatctcggcacggtgagggcgaacctcgccgccggaaggtacccctcgcacgacgacttcgccgccgacatccggctcacgttcagcaacgcgctgcggtacaaccctgctggacacgaggtccacaccttcgccggcgacctcctcgcgtcctttgagaagatgtacaaagcgtcggtgtcttgtgccgccccggaattgccaccggcgaaagctccggcgcaggtgaaaccaagggcagggaatgtgaaaatgcggaaaacgaaggcaagggagccgaacaagagggagatgaccctggaggagaagaacttgttgagggttgggttggagagcttgccagaggagaagatgcataatgtgttgcagattgtgcggaagaggaatggcaatcctgagctggttgggggtgagatcgagctggatattgatgagatggatgtcgagacacagtgggagcttgatcgattcgtcaacaaattcaagaaggcgctcaacaagagtcgacgggctgccattgttaatggtgaaaatgccgatgtcattgatgcttccgtggctaatgatagtgatatgctggtgaatggcagtaccgctacgatggtggacaacggtgatgtgacgatggcaatagagagcaaggatcctgacaagatcactacacaggccgagcagttggatgagtatgtagatgcagtggcggacccagaatttttgtcctggccctgggtccgcccctgtgtagatgtcggggatgaaatgccaacagcaacttaccaatcagtggagattgagaaggatactgaggccgcgagcagtgggtcctcatcatccagtgattcagggagctcaaaggacagtgtctcagaatctggcaatgcccattctctggtgtaa

SEQ ID NO: 11362 - DNA, 1077 bp, Oryza sativa
  Clone ID: TFbOSC404150j.C1.o1.fg
atgcggaagcggtgcacgcagatcctgacgcggctgcggaagcagaagatcagcgtgtggttcaactcgccggtggacgtcgagcggctgaagctgcacgactaccacgccatcatcaggaaccccatggatctcggcaccgtcaaggagaacctcgccttcgggaggtacccctcgcatgaggcattcgccaccgatgtccgcctcaccttcagcaacgcgctgcggtacaatccggccgaccaccatgtccaccgctacgccagtaacctcctcgccaccttcgaggggttgtacaaggaggccttgtcctggttcgagcaggagtgccagcgtctcgagccgccaatgccgctcgctttgccgccgccgccgcagcccccggtgcctatgccgatgcaggcgccgccaaggattgggggtggggggaggaggccgaagcccaaggcgagggagcccaacaagagggagatgagcgacgaggaaaagcacaagttgagggtggagatcgggaatttgcccgaggagaaaatggggaatgtgctacagattgtgcagaagaggaataccgatccggcgctaatgggagaggtcgttgagcttgatttcgacgaaatggatgtcgagacgctgtgggagctcgatcgatttgtggtcaattgcaagaaggcgctcagcaagagccggaggactgtcgcgatgaacggtgatgctgttgatgcgactgctattgttccaactgaggacgataccgtgcaggagaatgacacgccggagaagagggtttcagaggttgatatggttgatgagtatgttgatattggcgatgagatgccgacggcaaattaccagtcggtggagattgagagggatgcccaggtgactgaggtccattttggcaacgtatttttagtagcgtggtataggaaattggatgggttcttgttcaagttgttggtaatccattcaaattgctatgggacatacaccttttgggttgaaggtgttttcccctatgctgactccattgtcattgcaaccaaaccaaacatccttatattctgtcttgactcttga

SEQ ID NO: 11363 - DNA, 1851 bp, Oryza sativa
  Clone ID: TFbOSC900093j.C1.o5.fg
atgtcggcgccaccgcggaagcggaagaagaaggggcggccctccctcctcgacctccagaagcggaccctccgcctcgagaagctgcaggagccgccgccgccgccaccgcccccgcagccgcggcggtccacgcggaggaaccccgccggcgtcgactccggcgacgaggggacggcacccggcggccgccgcgagaagaagctccgcctcgtcatgggcctccccgacggatcggccaagggagaaaagacgaggaaagcgacggatgggagtgaagagccgtcagattccgggcccacgacacctttgccggacaaaaagttgttagtcttcgtccttgataggctgcagaagaaggacacatatggtgtattctctgaccctgttgaccccgaagagctgcctgattaccatgatattatcaagcatccaatggatttttcaacaattcggaagaagctcaataaaggggcttatggcaacttggagcaatttgaggtcagtgtcagagcgtatggtgatttttgttggcctttcctgtgctgtttcgattttccttcgttaacagtcagtacatattcaagtcacactcaaaagaaatcacaagtacttaatatgaaaatgctgctaagtgctaacacatcaactgttataaagtgtgttgagcctcaggatgatgtattcttgttaacctcaaatgcgatgtgctacaattcaccagatacaatatactatcgacaggcacgggcgatccaagagcttgccaagaaggactttgagaaccttaggcaggatagtgatgcaagtgagccagaaccagaaccggaaattaaaccagatcctgaaccaaagccacaaccacggaggggcaggcctccaaataagaacactatcaaacagaaagttgggaagccaccggtagaacgcgctactgcagacttttctggagcaacactcgctagtgttggaaataatggacatcgtacgcagccaccatttgatctgcaacggcaagtaatgaatggatcctttatcgcagatgtactgagagcttcttttgccagtcgaaataatggatacaattggtctaacgagcgcaaattggaaagaattgaagattactcagggtctatcggtaaatggtcagcaaaaagtgggagaaaaccaattctgacagaagaaagtagccgaagcacttattgtcagcctcaaccttcgagttcaatatatgagctgccggttggggttcagttgcagcagtcctatccccgcagcttggcacgttttgctgcgcagctaggtcctgtcgcttgggagattgcgtccaaacgaattgaacgtgcccttcccccaggaacaaagtttggccgtgggtgggtaggagacggtgaagcaccgaacgcaactcagccaccagtgcttactacatcttcaacagccttgatacacccaagtagtacagaaacatcaagtgaacagccaactcataacggtacggccagcacaagccattcagcaggacctcagccatcttccgcaccatatgcctcttctacaatcacaactcatagggtcaattgtcagtcattaccaagccagcaacacggatcagtgccacaggtttcagcagaaagaggtgaacatggtgctgaggtgaagggcaaccataataatcttcatgaacggccagccattcagcacactgttaatggcttcagtgctgtttcagagaagggtattttttacccggtctctatatccaaccggatatatacggccattgaaataggaaacttagccccacaaacaacccaatctgaaattcgctccatagaagatttgaactaa

SEQ ID NO: 11364 - DNA, 1851 bp, Oryza sativa
  Clone ID: TFbOSC900155j.C1.o11.fg
atgtcggcgccacccgcgaaaacggaaaaaaaggggcggccctccttcctgacctccaaaagcggacccttcggctcgaaaagctgcaggagccgccgccgccggccacggcccccgcagccggggcggtccacgcggaggaaccccgccggcgtcgactccggcgacgaggggacggcacccggcggccgccgcgagaagaagctccgcctcgtcatgggcctccccgacggatcggccaagggagaaaagacgaggaaagcgacggatgggagtgaagagccgtcagattccgggcccacgacacctttgccggacaaaaagttgttagtcttcgtccttgataggctgcagaagaaggacacatatggtgtattctctgaccctgttgaccccgaagagctgcctgattaccatgatattatcaagcatccaatggatttttcaacaattcggaagaagctcaataaaggggcttatggcaacttggagcaatttgaggtcagtgtcagagcgtatggtgatttttgttggcctttcctgtgctgtttcgattttccttcgttaacagtcagtacatattcaagtcacactcaaaagaaatcacaagtacttaatatgaaaatgctgctaagtgctaacacatcaactgttataaagtgtgttgagcctcaggatgatgtattcttgttaacctcaaatgcgatgtgctacaattcaccagatacaatatactatcgacaggcacgggcgatccaagagcttgccaagaaggactttgagaaccttaggcaggatagtgatgcaagtgagccagaaccagaaccggaaattaaaccagatcctgaaccaaagccacaaccacggaggggcaggcctccaaataagaacactatcaaacagaaagttgggaagccaccggtagaacgcgctactgcagacttttctggagcaacactcgctagtgttggaaataatggacatcgtacgcagccaccatttgatctgcaacggcaagtaatgaatggatcctttatcgcagatgtactgagagcttcttttgccagtcgaaataatggatacaattggtctaacgagcgcaaattggaaagaattgaagattactcagggtctatcggtaaatggtcagcaaaaagtgggagaaaaccaattctgacagaagaaagtagccgaagcacttattgtcagcctcaaccttcgagttcaatatatgagctgccggttggggttcagttgcagcagtcctatccccgcagcttggcacgttttgctgcgcagctaggtcctgtcgcttgggagattgcgtccaaacgaattgaacgtgcccttcccccaggaacaaagtttggccgtgggtgggtaggagacggtgaagcaccgaacgcaactcagccaccagtgcttactacatcttcaacagccttgatacacccaagtagtacagaaacatcaagtgaacagccaactcataacggtacggccagcacaagccattcagcaggacctcagccatcttccgcaccatatgcctcttctacaatcacaactcatagggtcaattgtcagtcattaccaagccagcaacacggatcagtgccacaggtttcagcagaaagaggtgaacatggtgctgaggtgaagggcaaccataataatcttcatgaacggccagccattcagcacactgttaatggcttcagtgctgtttcagagaagggtattttttacccggtctctatatccaaccggatatatacggccattgaaataggaaacttagccccacaaacaacccaatctgaaattcgctccatagaagatttgaactaa

SEQ ID NO: 11365 - DNA, 1692 bp, Oryza sativa
  Clone ID: TFbOSC401369j.C1.o14.fg
atggcctcagggccgccgtcgtcgccctccagcaaggcgttctcccgcaaatcccacgcccacgcctccggccccaactcctccaaggcggcggcggcgggcggtggcggcgggggtgtcgcggcggccttcgatgctcacaacgggacgcacgtccgcaccgtcaccttctcgctgtcgtcctcgccggccgcccgcagggagctccgccgccggctcaccgccgagctcgcgcaggtgcgcgccacttgcaagcgcctcagctccctcccggcccccgcgccttcctccgcgctctccgccaccgacccttccaccccgctgcccccgcacccgccggtctccaagcacaagtcgaagaaggggaacccctcctccaacccgggcctctccgcggaggcgcggcggaagctctacgcgcccgtgttcaagagctgcggcgcgctgctcgctaggctgatgaagcacaagcacagctgggtgttcaacacgcccgtcgacgccagcgcgcttggcctccacgactaccacaccatcatcaccaagcccatggacctcggcactgtcaaatcgcggctggccgctgggcactacaagtcgccgcgggagttcgccggtgacgtgcgccttacctttcagaatgccatgaggtacaaccccaaagggcaggatgtgcacttcatggcggagcagctgttgaacatgtttgaggagaagtggccagaaattgaggccgaggtagcacagctgtcaccacagccgccaacgccatcatcggctgcacccaggaagccgaaggagatagataattctaaggtgttagagaggtcggactcaacagtacatgctgcggggatggaggccactccaaagcagaacactggtcggcccccagttttaaagaagcccaaggcaagggagcctaataagagggagatgaccttctgggagaagcagcggcttagtaataatctccaggagttgccaccagagaaacttgacaatgttgtgcagattataaagaagagaaacttgtcactcagccagcatgatgatgagattgaggttgatatagatagctttgatgttgagacattatgggagctcgataggtttgttacaaactacaaaaaaagtataagcaagaacaagcggaaggctgagaatcccgtggcagggcaggatgagatgaatcatgatatagagctagagaagacagagcatgcaaggttggatgaagtagagcaggatcagatgcctccagtacaagagacgttacataatcctgagccagaatcaattgatatcgaaccacctaaagaaaacacagcagatgataatgagaggtatgtaggctcatcatcacctgttcatttggaagatcagaagggggagaatgcgggtagatcaagtagttctggaagttctagtagcgattcaggctcttcgtctagtggtaaatgctctcatcctttgcagaaatttatattagcagcatttctgtttgcaattaactctataaaggatattttcatatacatctgcataacatatgaaatttaccgtgagaagcatatgcagatacagacacagatagttcatcagcagatggctctgatgctgcacagtcacccagaacgtaacatctataggccaggggatggctttggtacggtttatttggttttttaa

SEQ ID NO: 11366 - DNA, 1579 bp, Oryza sativa
  Clone ID: TFbOSC3556j.C1.o1.fg
gtcgttgcaatcaaaagtgaaacggctcaaggaggagagggaaaagagcatctccggcgagacgaagccgccgccggcggcggcggcggtgaaggaggaggaggaggatgtacggaagggatcaccggaggaggccggcgccgtggaggacagggtctccggccacgaatccggccggtcatgcaaggagtcgaactcgtcagatctgaagcggccggagaacgaccccgcggtcgccgacgacgacgaccgggaggcggaggaggaggaggaggcggcggcggcgcccgcggccggcgacatcgccgtgaaggaggaggcgtcgggcgagtcggtggctgggtcgaaggaggcggacgtcgagaaggagagcagcgacgtgcagagctccgccagcccgtcccgccgccggcgacggaagggcggaggcggcggcgaagaggcggaggcggcgtcgccgtcggtgtccgtgcccctccccgccgccgaggccgagccgctcgtcgccttcctcgagtcggtccggaccagcaaggccggcgccgtgttcgagcggcggctcgatagccaggatggggagaggtacagtggcacgatcaggcgccatgtggacctggagacggtcaggtcgaggctggtgggtgcaacggcggcggcggcggcggcggcgtgctacgcgtcggcgtccgagttctaccgcgacatgatgctgctctgcgccaacgcgctcgtcttcttcccgcgcggctcgccggagcacgccgccgcgctccagctgcgcgcgctcgtctccaagcaggtctccaaggaccggcagcctcacgccggggcgaaggcccccgcggcggcggcggaggaggaggagaagaagaagccggccaaggccgacgccgacatcgctgggccgctgctcgagaaggcgccgatcatcgtctgccggaagcggagctccatcgcgaaggccgcggcggcggctgccaagggggagaaggcggagaaggcagagacggacaagaaggagaaggacggcagcgaggagaagaagaaggctgcggcggcagcgacgacggcgacggcggcggccactgccaaggacaagaaggctcggggcatgaggacgaacaagagccggggacccgcgaggaatcagaagacggcgaagctctcggagaccggcgaggggaccaagaagtccgacaagaagggcggcggcggaggcggcagctcttcggcaggggcggcggcgggcgaggttgccaagaagcgaaacgccgtggatttcctgaaccggatgaaccagaacggctcgccgtcgacggagagggtgtcgttgctggagacgctgaagctctccgcggcggcgacggaacagcaagagacagtcgtagtcgtcgtcatccgggaagggcgacggccggaaggaggccggcggctcaggctccaagaagggcgccgcgcctcgacgccaccagggaggaggatcggtcggccaccgaagcgggcggccgcgccgcagacgccgccccgttccaagagggccaaggacgacaagccgaccaggaagcgcgggaagaagtga

SEQ ID NO: 11367 - DNA, 1815 bp, Oryza sativa
  Clone ID: TFbOSC407198j.C1.o1.fg
atgcagtcgaggtgcccttccgccgccgtgttcacccccaccacctgccgcctccggttccgcgtcctccaccgccggttctccggcggcgtcaccgccgagaacgaggacgccgacggcggcgaggaggaggaagaggccgacgccgccgccgtcgccggctgggtggaggaactccgcgagctgcgcgtcgccgagctccgccgcgaggtcgagaaatacgatctctcgatcgggtcgttgcaatcaaaagtgaaacggctcaaggaggagagggaaaagagcatctccggcgagacgaaaccgccgccggcggcggcggcggtgaaggaggaggaggaggatgtacggaagggatcaccggaggaggccggcgccgtggaggacagggtctccggccacgaatccggccggtcatgcaaggagtcgaactcgtcagatctgaagcggccggagaacgaccccgcggtcgccgacgacgacgaccgggaggcggaggaggaggaggaggcggcggcggcgcccgcggccggcgacatcgccgtgaaggaggaggcgtcgggcgagtcggtggctgggtcgaaggaggcggacgtcgagaaggagagcagcgacgtgcagagctccgccagcccgtcccgccgccggcgacggaagggcggaggcggcggcgaagaggcggaggcggcgtcgccgtcggtgtccgtgcccctccccgccgccgaggccgagccgctcgtcgccttcctcgagtcggtccggaccagcaaggccggcgccgtgttcgagcggcggctcgatagccaggatggggagaggtacagtggcacgatcaggcgccatgtggacctggagacggtcaggtcgaggctggtgggtgcaacggcggcggcggcggcggcggcgtgctacgcgtcggcgtccgagttctaccgcgacatgatgctgctctgcgccaacgcgctcgtcttcttcccgcgcggctcgccggagcacgccgccgcgctccagctgcgcgcgctcgtctccaagcaggtctccaaggaccggcagcctcacgccggggcgaaggcccccgcggcggcggcggaggaggaggagaagaagaagccggccaaggccgacgccgacatcgctgggccgctgctcgagaaggcgccgatcatcgtctgccggaagcggagctccatcgcgaaggccgcggcggcggctgccaagggggagaaggcggagaaggcagagacggacaagaaggagaaggacggcagcgaggagaagaagaaggctgcggcggcagcgacgacggcgacggcggcggccactgccaaggacaagaaggctcggggcatgaggacgaacaagagccggggacccgcgaggaatcagaagacggcgaagctctcggagaccggcgaggggaccaagaagtccgacaagaagggcggcggcggaggcggcagctcttcggcaggggcggcggcgggcggggttgccaagaagcgaaacgccgtggatttcctgaaccggatgaaccagaacggctcgccgtcgacggagagggtgtcgttgctggagacgctgaagctctccgcggcggcgacggagcagcagaagaagtcgtcgtcgtcgtcatccgggaagggcgacggccggaaggaggccggcggctcaggctccaagaagggcgccgccgcctcgacgccaccagggaggaggatcggtcggccaccgaagcgggcggccgcgccgccgacgccgccgccgtccaagagggccaaggacgacaagccgaccaggaagcgcgggaagaagtga

SEQ ID NO: 11368 - DNA, 2205 bp, Oryza sativa
  Clone ID: TFbOSC402265j.C1.o12.fg
atggagtttgggcagcagaggcagattaagcggggctacgatgaaatggcgttccggggcatggcgtcagcggcgccacggggttacgcggagaccgttggcgagtcggagggcgcggcaggcagccccgttcgtgttgactccgaggactcttcggcccccaagcgcaagtgcatcagcctaaacagcgacggcttcgatgtcaagcgggagattttcgtcccagccaagatgtcctcctccgagaggaggcatctccggaagaggttccgcacagagcttgattcggtccggaatctcctcaagaagccggagtttgctgtccctgtccctgtcaatagagctcccgcgctctcgtcctcggctgcccctcgaggtaagaagggacagcgtggtaaccatgtggtccgtggtgccaaggggcgtttcttgcctacaaagccccgacctgaggcttccacggtgttgactgaggatgcgatttttaagcaatgcgatgctattctgaaaaagctgatgactcagaaatgtagtaacatattcgactccccggttgatgctgttaagctgaatattccagattattttcaaatcatcaagaaaccgatggatcttggaactatcaggaataagcttgactctggttcctacacgagtccatctgaatttgcagccgatgtacggctgaccttttcaaatgcgatgacttacaatcctcgtgggcatgtagtgcatgattatgccattcaactaaacaagatgtttgaatcaagatggaggacaattgaaaagaagctggcttccattgccacagaggcgcacgtcgaggttgacagggctgactcaaagaggaggaagactccccctgtggactgcagtgaggtgtcaacagagtgtgtgaggccaacagagtctgttagaccaacagagtctgtaaagccaaaaatgacattcgaggagaaagaatcatttgggaactgtttggcatctttgtctgaggatccggaggtaccttcacacatcattgatttgttgcagcaatgcattgacaacaacacagatcagcttggtgatggagagatagagattgatatccatgctgtcagtgatgacctactattcgagttgaagaaacatgttgacaagtatttgcaagagagagagcagagccagcaggcaaaatctgagccttctgagaatgaggctgctaatgtatctggccttagccactcctctacaaatccctgcaaaggtggtgatccagttgaggaggatgtagatatttgcgggaatgcatcccctatattgatagaaaaagatgcacacaacaatcctaacaagtgtggtagcccaagtagttccagcagtgactctggatcttcttccagcgattctgagtcgggcagtgacagtgaaagcgaacaagaaaaaggtggtagcccaggaaagccgaagggaagtaagagatctgaacaactggtggagcaagaaaagagtgatgttataagtccagtcgatgccatccgtcctgctgatgatgtggagctccgtgagcaggataacgagtcaaagcctgccccagagggggagaattcaaaacccgacaggcaagtctccccagacaagctcttaagagcagccctccttaggagtcgttatgctgatgtgattgttaaggcacaggggattctcagccagggtggagacaaacaggaggagctggaaaagctccagaaggaagagaaagcaaggctgttggctgaaggaaatgcagctatggaagctcgaagagctgaagctgaagctgaagccaagcgtaaacgggaccttgagagggagaaagctcgccaggccctgcaggaggctagtgaaaaaaactgcatttactggtgtcgagctttctttttcccgctaaaatttgagtggtttaacttaatgcagatggagagaacggtggaaatcaatgacaacctccatctaaaggatttggaaatgcttggaacggcaaccacagaacatattgtgagttctgttgatgagactagtcctgagcattcccaggatggcatgcccagttttcttcctggatcaggcaatccattggaacagctgggactcttcatgaaagcagatgaggaggaagaggaagaagatcctagcagtgtccccagcactaaagatgcagaggaaggagagatcaactag

SEQ ID NO: 11369 - DNA, 5475 bp, Oryza sativa
  Clone ID: TFbOSC22451j.C1.o20.fg
atgggcgacggcgagcgccgcgaggacgagaacccgaccaccagtgccgcagatgacgatgatgatgaggattatgatgaacctggtggagggaatcacttcttgggcttcatgttcggcaatgttgatgattctggtgacttggatgctgactatctcgacgaggatgcaaaggagcacctttttgcactggcggacaagcttggcccatctttgaaagacattgatctgatcaagccttctgcagcaccaactgatccttctgagcaagactatgatgcaaaagcagaagatgctgttgattatgaagatattgatgaagaatatgatggacctgaagttgaagcagctacagaggaggaccatttgctatccaaaaaagattacttctcttcaaatgcagtttatgcttcggtcaatagtaaagtttcagtgtttgatgaggagaactacgatgaggatgaagaaccaccaaatgataatgatttgcctagtgataatattgtgcaaaactgcacttcagcttcagctgagcaactggatatggcaccgtcaaatgacaaccttgctgttgaaaagatgtctagttcgttatcagaaccagaagaaagttttgaaagtgaagcttttcagaaagaaatggttgctgaagagcaacttgagtctaaaactgcaacttccctcccagttttatgcatagaggatgggagtgttatattgaagttctctgaaatttttggagcccaggagcctgtaagaaaagccaaaatggaccgccataagcgcccagtgaataaagagctccagattacaaatttcacagatattgttgaagaagacgaggaggtatttctacgcagcactattcaaaatttgtcagctttgaagcatatcaagacgaacgataattttgttgagagtgacagtgatgagtcaacttcagatgttgccttaagactgaaagactcgtgcctttccgaacaaccgatgaaagataaagatattcctactgctgtacaatctccagttttccctgatttttatccactcgagcatgaaaattgggaaaatgatattgtttggggcaattcaccaacaaccgcaattcagccttgcttaacaagctgtgcaatatccaaagaaagcttggatgaccacaatgaagaccaggccgagggttatgtctctgggtgttgggatgtacagaataaatttcatagttcttcagtaatggcagatccttttgggcatacagaaatacctgattcaactagttaccgttcccctgagaacagctattctccattaagaaaggagactgctcaggagaataacagcttagatgaaccaaataacataactcaaccggttaaaatcgacaccacacggcatttaaacaagctctctttactgaacaaggagttgttagaaggatcttggttggataacatagtttgggatcccagtgaggatgtaccaaagcccaagctaatctttgaccttaaagatgatcacatgctttttgaaatattagatgaaaagaatggggatcacctccgctctcatgctcgtgccatgattgttactcggccaatgaaaacttcagcagtggaaaatgttgaccataacaatcaagcaattgcattgagtgggagattcaacatttccaacgacaaattttattctaacaggaaaatgtcgcagcaagctagatctcatgctaaaaagcgtgctacaatgggcttaaagttggtacattctgttcctgctcagaagctccagaccatgaagccaaagttgagcatcaaagaaatcgcaaacttccatagaccaaaagctaagtggtatccacatgaaaataaacttactgctagatttcaaggagatgagtgcagtcatgggccaatgactgctattgtgatgactttgggaggaaaaggagtcaaatttctggtcaatgcagaggaaactccactttctgtaaaatcaaaagcttccaaaaagcttgaatttaaaccttctgagaagatcaaattgttctgttctggaaaagagcttcaggatgacatctccttggctatgcaaaatgtgcgaccaaactctattctgcatgttgttcgcactgaaatacatttatggccaaaagcacagagattgcctggtgagaataagcctctacgtcctcctggtgcattcaggaaaaaatctgacttgtctgttaaggatggacatgtatttttgatggaatactgtgaggagaggcctttgcttcttgcaaatgcaggaatggctgcacgactgtgcacgtattaccagaagacttcaccttctgaccaaacagctacatccctgcgaagcaacagtgatggactgggtacaatgcttgctattgatcccgctgacaaatctccttttctggggaacattcgttctggctcccaccaatcatgtcttgagacaaatatgtacagagcacctgtatttcctcataaggttgcgacgacagattatcttttagttcgttcacccaaagggatgctttctcttcgtcgcattgacaagttgtatgctgttggccaacaggtgaaaaagtcagtctcctggatttatcacagattgactagaagggcaactaatttcaaaattttattctcctggcaggaacctcatatggaagtattttcacctgggacaaaaaatatgcagaattatattctgaatcggattcttgtgtatgtatatcgtgagttccgtgctagggagaagcctggtattattcctcagattcgagctgatgaattacctattcagcctcctataacagaggctattaaaggaccaaagggacatttgttctatattcagagacctgattttcggattccatcggaggaagaactgagaagattattgacacctgaaaatgtctgctgttatgagagtatgcaagctggccagtatcgtctcaagcacttaggaattgagaagcttactcagcctgtgggacttgcatctgccatgaatcagcttcctgatgaagctattgagcttgctgctgcagctcatattgagagggaattgcaaatcactagctggaatcttaccagcaattttgttgcttgtacaaaccaggacaaggaaaatatagagagattagaaattactggtgttggtgatccatctggccgtgggctaggatttagctatgtacgagtaactccaaaagcacctgtatccaattcaacacataagaagaagtcagctgctgcaaaaggcaccactgtgactggaacagatgctgatctccgcaggttgagcatggatgcagctcgagagttgctactcaaatttggcgttccagaagagcaaattgacaagttaacaaggtggcatcggatcgcgatggtgaggaagctttcaagtgaacaagctgcatcgggtgttacaatggatgaaattccagttagtaagtttgcacggggacaaaggatgtcttttctgcagcttcagcagcaaactaaagagaaatgtcaggaaatttgggacagacaaattcagtcactttcagctatggacggcaatgaaaatggcagtgacacagaagctaacagtgatcttgactcatttgctggggatcttgaaaatttgctagacgcagaagaatttgatgatgaagatgttggtaatacagacataagaagcgataaaatggatggaatgagagggcttaaaatgagaaggtgtcatactcaatcccaaattaatgaggaaattcaagatgatgtagcagaggctgctctagtagaaaaactgcttgaagagagtgatagtgatatgaagaggaagaagcagcctgtggaaactacaaattatagcactcctatgtataatcagggcaataaaatgaagcagggtaaggctggccaaatgattaaatcgtctgtatatgccggtgcattaaccccaaaagagagcataccaagagaagccaaggaggttgaaaattttgctgaaggaagtttaccctcaaaactaagaacaaagacaggatttgatgcaaatgatgatattattctagtaaaaaggaaaaatatcccaggaaaggatgggttcaaggaaaagagacagggtgcaaggggagacactcttgtatgtggagcttgtggtcagctcgggcacatgcggaccaacaaactgtgccccaagtacggggaggaccctgaaacatccgaaatggatgtcaattccatcaggtctcatcctcctgatattgtgagtaatgctcaaataaaaacatcaaacaagaggttggtagcaaaagtttcgtctgaagcttttgaaactgaaggacctgaaagtattgaaaaggctaaacctgtccctgtaaaattcaaatgtggagcacctgagaagtcattggataggaacatgtcaatctcagcttctttggtttctgataaacgtatgatggatgctacagattcgaaatcaactggaaaggttaataagattaaaatatctaacaagataaaatatgatgattatcctcctgatactcctaagccatctgttgtaataaggcctcctgctgaagtggagaaggatctacctcgtaagaaaattattatcaagcagcccaaggtgcttggagatcagcaaagacctactgaacttaggagtggtcaggagcccagaaagacaaggaaaattgttgaattgtcaagctttgagaagagagacagagaggatgataatggtttttctggacaacctattcagatcaattcctcacatgatagggggtggggtctggtgggaaaaagaagcaaaggaataatggaaagtagtgaatcctggagagcttttgaggagcaacgagagagacaagaacagagactaattgaagctaggatatatgatgcaaggagagaggatgagctccagaaggcaaagaagaaaaacaagaaaaagaaaaaacatgaatttcgagatgatgacctacttgatcctaggccatacaaaaatgacagaagggtacctgaaagaggtcgagcggcaaagagacgtaccccagctgatatgacagaatacacaccaccagctaagcggcacagaggaggagaggttgagctctccaacatattggaaaaaatagttgaccacttgcggacaatgagctgttcattccttttccgtaaaccggtgacgaagaaagaggctcctgattactttgacataattgagcgtccaatggatcttggtactataagggacaaggtgcgaaagatggagtataaaaatagggaggattttaggcatgatgtggctcagatagcactgaatgcacatacatacaatcttaaccgccatccccacatccctccgcttgctgatgagctcttggagttgtgtgattatcttcttgaggaaagcgcggatgtgctagatgatgcggaatacgcgatcgaggactag

SEQ ID NO: 11370 - DNA, 846 bp, Oryza sativa
  Clone ID: TFbOSC400632j.C1.o1.fg
atgcgtaaggagaaaataccgcatcaggcgccattcgccattcaggctgcgcaactgttgggaagggcgatcggtgcgggcctcttcgctattacgccagctggcgaaagggggatgtgctgcaaggcgattaagttgggtaacgccaggatcaattcctcacatgatagggggtggggtctggtgggaaaaagaagcaaaggaataatggaaagtagtgaatcctggagagcttttgaggagcaacgagagagacaagaacagagactaattgaagctaggatatatgatgcaaggagagaggatgagctccagaaggcaaagaagaaaaacaagaaaaagaaaaaacatgaatttcgagatgatgacctacttgatcctaggccatacaaaaatgacagaagggtacctgaaagaggtcgagcggcaaagagacgtaccccagctgatatgacagaatacacaccaccagctaagcggcacagaggaggagaggttgagctctccaacatattggaaaaaatagttgaccacttgcggacaatgagctgttcattccttttccgtaaaccggtgacgaagaaagaggctcctgattactttgacataattgagcgtccaatggatcttggtactataagggacaaggtgcgaaagatggagtataaaaatagggaggattttaggcatgatgtggctcagatagcactgaatgcacatacatacaatcttaaccgccatccccacatccctccgcttgctgatgagctcttggagttgtgtgattatcttcttgaggaaagcgcggatgtgctagatgatgcggaatacgcgatcgaggactag

SEQ ID NO: 11371 - DNA, 2169 bp, Oryza sativa
  Clone ID: TFbOSC417054j.C1.o1.fg
atggcgaagacccggaaggccgcggccgctccgccacctccgcccccgcccccacccgcggagaccccagcgaggaggaaggggaagaagaaggggcggccgtccctcctcgacctgcagcggcgcagcctccgcctccaggcccaaaaccctagcccggccccgtccccctcgcggcgggacgccaatccgtccgacgaggacgacgacggggtcgggagtggggggcgccgacggcagaagcggctcaagagcgtcctctccagcagcggcggcggcgaggtcgggcgcgctccccccctcttacctgtcgcgccaatttttcgaaatttgcccgaggtttttgggggcctccccgaggagaggagaggggggtttttgccgtgggacacgcggcgatgcggttgccgtagtggttggatctgcgattttggaatttttttgaggggggtgggtttcgtggatgatgaggcgcccgcggccgccgtggtggtgaaggtggaggtggaggagaagaagaagaaggtctcgtcgaaagcgaccgggaaaggggacgctgcgtcggatggcgggcccactacggggactcccctcccggacaaaaagttgcttctcttcatcctcgacaggctccagaagaaggacacctatggagttttctcggagcccgtcgaccatgaggagcttccagattaccatgagattatcgagcatcctatggacttctcgacgatccgcgagaagctgttgaatgactcgtataccaccctagagcagtttgagaatgatgtgtttctacttacatcaaatgccatgtcctacaattcagacgacacagtctactatcggcaggcacgatctattgaagctctggccaaaaaggatttcgagaacctgaggcaagctagtgagcctgaagaagaacaacaacccaagactgtacccagaagaggcagaccaccaaaatatgcaaagaaaattgagaagactgaaaatgatgtttcaccagatttatccaatgcaaaaacaaaatctgcagaccatgctgaaacaattagaaaaaggttgactggggacagaactcgaaatgcaaatatcacaacaagagactcaccctttcttcaacataatacacctggttcttttgctggtaaaagaacagatagatttggtgattattcagggccttcgaagtacggaaagaagaccaccccgactatttcagatgatgagcgtcgtagtacatacgatcagcaatacttccatagtagtcctctgttttctgcccttggtggtgagaggaaagtacttgtgccggtgggacttcaacagcaacatgcatatgctaggagcttggcgcggtttgctgcaaaatttggtcccgtaggctgggacatagcagcaaagagaatcagacgactactgccttctggaacaaattttggcccaggatgggttgtggatggtgagccacctgagaactctcagtggcctcgagttcccatgctctctgatccatccatccagtctactggtgttccagctagcaacgtaatatccaagaatgatgaatccaatcagaagtctggactgacttcgaacgaggattctggtgaagagcatctagctagaaccgagccagtggcttctacatctgcatgcgttaacacaaactctgtatctgccaccaagctagctaccaagtgtgaaaacggggctaatgtgtcatgtgatggtgtgggtagtactggacagacacctcccttgcagcagcacagccatagtcgagagatccactcaaatatgaatggcttcactgccttgccaaacacaattagtcaatacgcagggcaaggattcttgggacagatgcagttgacacatgctcaagttcttgggatgttttccggagtcaatggcagaacaaatggctttatccatgggcacccactggtggctaatagcattaaagcaccacaaaatggggatgttggaaaggtagccactaatccatcaccagatgcaggtcatgattcagaagctgcattatcacaaaccatgactagttctgctccaagtttaagtgctggtgttcaaccatcaggttccatgccaagcgaaaagttagcaaatccaaaaaagcacccggacttggcattgcagctctga

SEQ ID NO: 11372 - DNA, 1752 bp, Oryza sativa
  Clone ID: TFbOSC410643j.C1.o12.fg
atggacgggctcgcggcgccctcgccgtcccactccggcgcgacgtccggcggcggcgcctcccaccgcaagcggaagctcccgccgtcgtccctctccgacgccaccgccgacgaggacgacgacaccaccgcgccgtcgtcgccgtccacctccccgtcgtcgccctcacgcccgtcctccccgtcctcctcccactccgacgatgacgacgacgactccctccacaccttcaccgccgcccgcctcgacggcgcgcccccgtcctcatccggccgcccgccgaagcccgagtcctcgaccgtgtctgccgccgccgcggccgcggctgcagcggccgctcccaagcccgattccgcttccgctgccgccggcgacggcaaggaggacccgaaggggttgttcactgacaacattcagaccagtggcgcgtatagcgctcgagaggagggcctcaagcgtgaggaagaagcagggaggctgaaatttctatgctattctaatgatggagttgatgaacatatgatttggttggtaggcttgaagaatatctttgctcggcagcttcctaacatgcccaaagagtacattgtccgtcttgttatggatagaactcacaaatcaatgatggttatcaggaataatattgttgtaggaggcattacttaccggccttatacaagccagaagtttggagaaatagcattttgtgcaattacagctgatgagcaagttaaaggctatgggacacggttaatgaatcacctgaagcaacatgcccgagatgctgatgggctcactcatttcttaacttatgcagataacaatgccgttggctattttgtaaagcagggtttcacaaaggagatcacattggacaaagaaagatggcaagggtacattaaagactatgatggaggaatattgatggagtgcagaattgatcaaaagttgccatatgttgatctggcaacgatgattaggcgtcaaagacaggcaattgatgagaaaatcagagagctttcaaactgccatattgtttattctggaattgacttccaaaagaaagaagctggtattccaagaagaacgatgaaaccagaagacatccaaggcttgagggaagctgggtggacgccagatcagtgggggcattccaaatcaagatcagccttttctcctgattacagtacttacaggcaacaacttactaatctaatgcgttcattgttgaaggcaagtcttttatcttcgcaaatctttttatatgacatgcaaccatttggtttgacctcactggataaacctgtactttgcttgctcccttttgaattttttgcaccctttctgtttcaagcatattttctaaagccagaccagctggatggtctgttcaatggttcaatgattgaaatggccacattttataagtttaatattcaaatatttctgaatatgaatgagcatcctgatgcttggccattcaaagagccagtggattcacgtgatgttcctgactattatgacattatcaaagatcctattgatttgaagacaatgtcaaaaagagttgagtctgagcagtattatgtgacgctagagatgtttgtagctgacatgaagagaatgttcagcaatgcaaaaacttataactctcccgatacaatctattacaagtgtgcctcacggctcgagagcttcttctcaaacaaagtagcatctcagcttgcccaagcctcaacgaagaactga

SEQ ID NO: 11373 - DNA, 540 bp, Oryza sativa
  Clone ID: TFbOSC34007j.C1.o1.np
caatgccagtagtcgatctagctaacatataagccacctcattagcacttgtactaccatttacttgaactaaagaaaccgttccccgccaaaaaaaaaaaaaccgcaaataaaacagaaacatggcagtggtggccggaaggctggtcgcaaggatagcagcctttccaaagggatgcctgatcttatgcgccagtttggcacgattgtgcgccagatcacatctcatgaatgggccgagccatttctcaagccggttgatgtggtaggccttcagcttgatgactattacaagattatcaccaaacctatggatttttcgaccatacaaaagaaaatggaagggaaagatgacaacaagtataacaatgtccgagaaatatattcggatgttagattaatttttgccaatgcaatgaagtacaatgatgaacgacatgatgttcatataatggcgaaatcattgcttgagaaatttgaagagaaatggctccagcttcttcctaaagttgaaaatgaggtgaatgaatgtttgtaagc

SEQ ID NO: 11374 - DNA, 1485 bp, Oryza sativa
  Clone ID: TFbOSC12509j.C1.o3.fg
atggtggtggtggtggtgggaggcggaggaggaggaggaggaggaggaggggtgaagaaggaggagggggaggaggaggcgaggggaagaggaggaggaggcggcgtggtgggagggtgggggacgtgggaggagctggtgctgggcagcgccgtcatccgccatgggggcgttgcgtggggcgccgtcgccgccgaggtccggtcccgctcgccgtgcgccttctcgcctgaggaatgtgaagctaaattttcagagatacaagcacgctactctgcatgcgatgcttggtttgaggagctccgtaagcggagagttgctgaattaagaaatgatctgaagaagtctgaaaattttattggatccctgcagtccatgatcaaaagcctcagcaatagcaagcatgatgatggcaactctgaatgtcacactagtcatactgagtcatgttcaaataatgaaaatacagctgataacaattcatcaagcaaagcattgtccaaagatagatcatctgctgctagttttacagaggaagcaagcaacagtcagaaatctgaaaaggtgcaacactgcgatactgattcaattcaagtgaacaatacttcagcagaggctttggtaaaaccccttgttgaaaaaaaggtttgtgctgaagatggtttgctttggggctctagaaagaaaagggccgtgagggataggaggacttttctgatggctgataatagttgcagagctggcgagaatacatctacatcacacatacagacagatggttcctctgaaggctatgcaaagaagggcttgaaaactccaaatctagaatctggtgtgtctgtcgttgagaaagcaaaaccaaacttggcagagattttgaaaactatatctactcaaagtgactgttatatgttgcaacgccgacttgatgtccagcggaagcggactagatacaagaagatgattcgccggcatatagacttccgtatccttcattcaaagatcaagagtggcgcaacatcttctaccaaggagcttctaagagacattctactgtttgtgaataatgtccttgccttctatccaaaggctacgttagagcacatggctgcaattgaacttcgaaatattgcattcagaacagtgcaagagagcgcaagcatgccctctaagagttgtggagtaacaggagcagcaactgcccctttagtgaagaagaacacccgacccgtgcagcctggaagtcatgggcctcatgatgcaaagagaagcaaagtttctttaaaggggactggaagtactgtcaagcagggtgaggccaagggatcgcgtggtggttcatcagtgacagctaatgtaaaaactatgcagagaaatccaccggccaagaagagaggcgttgggcggcctccaaagaatgggcagaagcgtgctgctgcacagcaagatagccctaacaaaggcaggaagaggacccgacgctga
